United States Patent Application Publication US 2024/0093182 A1 - sequence listing, part 10

SEQ ID NO: 20350 - DNA, 855 bp, Artificial sequence
  DNA replication origin
gggacagcaaccccgctccccgccagccgcccaccacagcgttcatgatacagcttcggagtgtgtgtcggggcctatctgggaagccagggcaaaggcggtggcagctggcagcacccacacccacagctggggcactgctcacatgagcccccatcagcaggccccttggttgtgccacacgcaggggtcctgccccagggagggggcagtccagggaggggctcgagggtgtggcacaggccagctgtcactcctccctggagaggcagctggggacgcagctgggaggggagccaggagcagagacagcccggggccagcaggtgggtgacaggtggggcagcgggaggggcatgcgccgtccgcctggggctcgggcgtagagacgggaacctgccccccaacgcctggtgctggcccagcctcccccccggggcctctagcaccttcccggttgtggctgcaccctgctgggcatggcaggggagggtgggggtcaacccctttccttgtagtcccacgccagtgggcaagggagacgccgcagtgagcaggaccctagcctctctgcctggggaggccgagtgatgagccgcccggagcaggaggaggccttgaacttgggtctgaaagatgagcagggatttgctggactgggtgcaggcaagagctaatgcaggaaggcagagagcaggattgctcagagggagtggctctgtgcagctggagccggatgggtgaccctcactcaggaggaagcactgggaccctctctgcacgcgctgggtcccccgcctcctgttaggatccccacacccaggtccttctgggcctctgctgcacagatcaggt

SEQ ID NO: 20351 - DNA, 965 bp, Artificial sequence
  DNA replication origin
acacacactccgaagctgtatcatgaacgctgtggtgggcggctggcggggagcggggttgctgtcccactaccctctggaagcctcagccacggagggcccctgtgggcaccttttcccggcacacggtgctgtgtctctccactcttgggctctgcagtgacttgaggggtcaagtctaggaccccaggggaggctgggctcatgaggggaccagagacctcagtgctgtgcagggagccccgaaccaccctggtggaaggcccagcccagctccccaggcctcctgccagctccctgtggtgtccaagggacctgtggtcaggcctggaggagaagctccccctcccctcgacatcctccccgcagcccttgctcttcaccagagcctcctcactccccaggaccccagagaggacggaccctctccagccgccctctgggctcaggacagccgggtggggcagccacaggagctgcctgcagggggcagagtcgggacggggaccgagccggacacccattctgcaagtgtctgcagggggaggacggaggtgggtagctgggagtgctgggccgaggatgggcattgtcaggccctcagcggggactgggaggtagaagtgggggtgggggtttgtggaggaaggagaagaagggccagcgtcccgagtcggggggtgcttggcagtggatgaggccggcaggaacagacctgagcttggggagctccactccgaacgaggcatccgtcagagttctgtgcatactggtgtccctggctgggggccaggccccgaagtggagcctgggactgtgagggtgcgggggtgtgctggggtgggaggtggatggagcccccccaccgcctggccccttgggctgaaccttgggcttcggagccagaacagacacaggaaatcgcctaattgcatttgtgcaggaacaccaaatccctcgcagct

SEQ ID NO: 20352 - DNA, 1087 bp, Artificial sequence
  DNA replication origin
cctttcccaggccagaggcccccaccccaccccaggagagctgcccccctttcagttcccagaacggagcccagctgtggaatagtgagggggtgaggtcatggggagggggcccgcatgactcatatcctggggtaggggaaagggaggagacgtagaaggggcccagaggcctccacgtcctcaggctgctgggtcagaggccaggggctggccgggcttctccccagcactgggttttaggggagacaccaggagatgcttactctgcatcccctactctgtcccccaggcccctagccagggagagctcagtcggagtgatcctccaggggcccagctctgcagggacgatgttcccagagtacacacctgggcctcgtgccagggccggcaccgccgttgtcggggcaatggcaaggcaaacagtcaacgtttgcctcactaaagtgaggctgcggcaccctgaagggatccctggagggggacgtggtccccttgttcccaagcctgtctgcacacgcacgtggatgtcaaaggttcccgtgtgtgagcacgtgcatacttgtatgtgcatggggtgcgggcatgtatgcctgtgtggctggagcgtgggctcgtggagaacgtgtgtgagttgggtgtgcacctgcgtgtgccccaggcctagggagtcctgcgcccggccgcactccatgtgttgggcatgagctgtgagcagagtgagggcctttgtggggctgttggggcccggactgcttgcccataggggtggacctgaggaaacgtgtgcacacgagcttctggggtctctgcgccaatgtgtacttccaagccccgcctcccctatggcttggtggagggggtctgtggagctggagtgagggccctggacccatcggaagcccaggtccaaggaggagcatgggctccctctcatgccccaggcccagggacacacaccccagctaagcccttgctcacatggaggggctgggacatgggaacacggggagcaatatggccaggcttcccctccatggaacccctccacctcctcaacactctgccccagcctgcgccgccc

SEQ ID NO: 20353 - DNA, 1205 bp, Artificial sequence
  DNA replication origin
agcagagtgagggcctttgtggggctgttggggcccggactgcttgcccataggggtggacctgaggaaacgtgtgcacacgagcttctggggtctctgcgccaatgtgtacttccaagccccgcctcccctatggcttggtggagggggtctgtggagctggagtgagggccctggacccatcggaagcccaggtccaaggaggagcatgggctccctctcatgccccaggcccagggacacacaccccagctaagcccttgctcacatggaggggctgggacatgggaacacggggagcaatatggccaggcttcccctccatggaacccctccacctcctcaacactctgccccagcctgcgccgccctctgtgtggaggggctggggcgtgagtgagcacgagggcccctgcgccccaggctctgcctcctcaggtggaacaaggcccagcagcccccagccatgcggaggccggcagaagcgggaagctgggcctcatctgcccggatgatgggagccaggtgtggggaattaagtggcttcctcgggggccgggagttgaaggcacttctgaggagcaggacaggcaggcggattcgggggcgcggggggcggggtgcacaggcggctgggtttgcgtggctggagtcccctgtggcttcggtggggggagtgggccttgaactcgggcctgtggaagggcctggcttttgtctgagaggcttaggggagacctaggagagattagatcacgcgctggcagggctgtctggccaggggactggggcccagtggggatcaggctgcagggtcaggcagcggccactggccgggaagaactgagaccccagtggggagaccccagccctgctccctgttctggcctgggctccctccctgggtctgggataataagccctgtaggagtgtagagaccctggaccccctctcaggctctaggagggcgatgggaggcagggccatgacagctgaggctgcggtgtctgcaggacctggaccatctgagagctgctgggccggggctctgatgcccaggtccaggccagcctgtgcctacctctgtccctgaggggggcgcgtgggaccccaagaagccatggtttcaggctctgagggcagaagcactcccttacctcagtttccccatttttgaaatggctcaatcggctgggtgcggtgg

SEQ ID NO: 20354 - DNA, 2252 bp, Artificial sequence
  DNA replication origin
ccttgcaggacggagtcttggccgcagactgagcctgtacctcacccgtctcccaccgactcttggtactggccacagccatgctgggcagctctatggaggcctggcgggctagcttgggggtccggccagcggtctgcagaggaggaaaagcatcaggattaccttagtggacagccaccgtggtcacatcagagggtcacactgggcaaccgtctgctttgtgtttgtgttttccctgggagcgctttcccaatgcagccccagagtggggatcactggaaagatgagccttcctccattcgatgcagttgtgagacacctccctgtcctgaagagcatcagggagatgatggcgcacaggacagatgtgggtctgcctccatgctcctcatggggtagggctgggggaccatgggatggatggagggacattgaatggatagagggacaatggttaaatttcagagtattggttggatggaggagcattgattagatggaggagtattggttgtatagaaaggtgttgatagatgaaggaatattgattggatggaggagtactgattatatgagggagtgtttgttagatggaggggcattgattgaatggagtagtattggttggatagagccgtattggttcaatgaaggggcattgattgcatgcaacgacgttgattggataaaggagtattggttggatggaggggcactggtaggatggaaaggtattgactggatggaggagcagtgaatgaatgaaggagtattgattggatggggaagtattggttggatggaggaatattgataggatacaggagcattgataggacggaggagtactggttggatggagaggcattaattggatggaggaatattggttggatagaaggatgttggttggatagaggaacattgattgcatggaggagtactggttggatggaggagtattggttggttgaagggggattaattgaaatcagaagtattgcttgactagaagggcgctgattgggtgaaggagtaaagtatggatggaggggcattaattgcatagaagagcactgattggatggaggaatactggtaagatagaggagtgcttgttggataagtgagtactgggtggatggaggggcactgggtggatggaggggcactgatttagtagagtgttggttggatggaaggatactggttagatggagatgtcctgattagataaagaagtattggttgaatagaagggcattgattggaagcagaggcattgattgggtgaaactattttggttggatggagggaaattgatgggatagaaggccattgattgggtgcaaggcattattggatggaggggcattgactggatgaagttgttttggttggctggaggggaattgattgaatggaggagcactgaatgaataggggtattgattggatgaaggtgtattggttggattgaagggagttggtggatgaaggactattggttggatgcagggacattgactggatggaagagtattggatgattggatggagaggtaccgattgaatggaggggctggcatgtgggactggcattggttacatggtgagccattcattggatagatgagtattggttggatggagggtattggtcagatggagaagcattgatggatggaggagaattgattggatgggagggacattgattggatggagggacattggatgcagaggcactgattggatggagtagtattggatggagggatgaatcttgattggatggaggggcactgattggattaaggagtactggttggataaagggggattgattgactggaggaatattggctggatagaggagcattgataggatgaaagagcattgattgggtggtggagtactgttccgaggggggcattgattgaatggaggaacactgaataattggaggagtattggttgcaggagtattggttgtataaaggaacattaattggatgcagaagcattgataggatgggagattattggttggatggagtagcattgattgaaagggggggcattgattacatggagtgacattgattagatggaggggcattgattgggtagaggggcactgactggatggagaagcattggttggatagggtgttggttgaataaggcggcactgattggatggaagggcgttggttggatgaaggaatggtgccaggatgcagg

SEQ ID NO: 20355 - DNA, 1201 bp, Artificial sequence
  DNA replication origin
ctccgccactgacatgcggtacagcacggcatcccacatcctggaggtccgggaggcgggggcccggggtgcggtgagggcgggcacctcctgctctgtgggggcaggcacctcctgctctgtgggggtgggcacctctggctccaggctctgccgcggctctgggcacggaggctctggggcctcctccagcagctgcttcttgagccacgtccagccactgagccggggcttgggtgcaactttggggacagggcatgggtgagggcctgatggtggggtaggggatgaggcccaggcagggctggacactcgctcggcctcagcggcggggccagccatcgggggctcctccaggtgctctctgccagggcccatggggaccaggctgtgcggtgaggactccagcgagcggcaggtcggggctatgggcaccacaaccctggcactagcctctctgggcactgaggcctggaagccgggtggcggccgtggtacagggggctcctcaggcaagggactggcagcctggactgtggtgggcagtgggcggatgtgagccactgggaccaggggctgggccctggggggacttggggtggcatctccatcctggctgttggatcccacttctggggctgtcctgggaggctcaggggtcccattgtgtggggatggtgccagctggatgtgcacctgggtgacgtgggtgcccccacccccagagacagggacgaagccactggggggccgggtaggttctggggccgaggctacaacctggggccccatggccctgaattgagcagctagaatcctgcgctgggtgaggccgatggagaacgtggacttctgcaggggtgatgccacgtggtggatgatgggggtgtgcggggagcggggtagggcagccaccatgcggggagcctcggcggggcgtggggcttcaggaaggcgtggggcttcggcggggtgcgggccctcagcagcgtgcggggctgtgacctcctggtcatggctggcctcactcacgggggacagggaggtgcggaaggccctgggtggagcgaggtgtgtgcctcccatcatcttcttccgggctgccttcctcaggagcttctgcaaacgcaagttgtccttccctggcttgggcagcaggggcggtgggggtccaggggttccctggaggcttgggccgcac

SEQ ID NO: 20356 - DNA, 1900 bp, Artificial sequence
  DNA replication origin
tccatccatcaatccatccatccacccacccacccacttactcattcactcatccacatatccctctatccattcatccatcccctattcatccactcacccatccctccactcgctcatccagccattcatccactcacccacctacccatccattcacccacctatctgtccactcatccatccattcatctgatcatctatccattcgtccacccacctacccatccatccatccacccacttgcccacccagccattcatccactcgcccacctacccatccattcacccacctatccatccactcatccatccattaatctattcatctatccattcgtccacccacctacccatccatccatccacccacccatccacccatttgtctgttttccaaaccttcactgagcacctcctgtgtggtgttgggggaggccccgaggtggatcttgccctcagtgggtgcgaagtcaaggcacagaagtttatattgggctagtcctggttggggtagggatatcacagacattctggaaaaggaagcccggaccccacccattgtgtgtgctctgacttaggccaccagagagcttatgtcctggcgtcttatactgcaaaggccatgagacaggtcagactgcctgaacccagaggccacagcatgctgtgcagtgtgggaatgggctggccactggcccaacatttccatcctggccagccctgcccccttagtgagtacaagacagccagcacatgagaatacacagggagctttattatacaaaatggcggggtggggggcggcaagcagcgggggacgcagcatcaagcatcctgcatggccgttatcagcccttgacctgcagtttctccttggatctgggggggtgacccaccctctctgcacaggctgtgcctcaacctcctaacttcctagaaggcacttggcctctccaggggtaagtccctttggccaatgatcaggagtttctttcctcccccaagtaacaagaagcggagctgggtggggagggcgggggcggtggtcagagagtggaagggcagagaggctaaagggtccaggagcaaaaggaggtggcagcggatggcatcaaagaggcgagggtaggtcatgctggcaacaggaagcaacttcttagccagggccggggggcgggtgtctggctggaatctcccctgggtacatggagggtgccagccggctggacctgcagacccaggaagctggaacataggcatggggtgcagggggcattaggctagggtccagggaggggccacagacctgcctcctgcaagcccacagagcctgctccccgagcctctctctgctggcctccctgccctgcccacacccccactccaccacaggagaagacgtcctgcctcagaggcctgcttcccagtgcgagcacttgtgccctgggtcaggacctctggctggagacctgactcctggtggagggaaggcggcctgcctgccaagcagcctgcccaccctgggagctagaactggggttctcgtggttcctgcagtcccgtcatccagaggaggccggtagctgagagcagtcctaagcaggctccttccgcccccacccctccagcagctctgttcttgccttggcagagccagcccccaccagcggcagcccccaggactccctccttccccaaaccagagagcctctggctcggacagatgccatttgtcaatgtccttgcaaacacgtggtgcccagaaaccagggtgggcggcttggccgggccaccccagacaggaggtctgcgggaatatcccatttagcatagctcagcgaaaactgctcccaccttccggccaatctacctctgatgatgcagcctcggcttt

SEQ ID NO: 20357 - DNA, 1935 bp, Artificial sequence
  DNA replication origin
aaggagaaactgcaggtcaagggctgataacggccatgcaggatgcttgatgctgcgtcccccgctgcttgccgccccccaccccgccattttgtataataaagctccctgtgtattctcatgtgctggctgtcttgtactcactaagggggcagggctggccaggatggaaatgttgggccagtggccagcccattcccacactgcacagcatgctgtggcctctgggttcaggcagtctgacctgtctcatggcctttgcagtataagacgccaggacataagctctctggtggcctaagtcagagcacacacaatgggtggggtccgggcttccttttccagaatgtctgtgatatccctaccccaaccaggactagcccaatataaacttctgtgccttgacttcgcacccactgagggcaagatccacctcggggcctcccccaacaccacacaggaggtgctcagtgaaggtttggaaaacagacaaatgggtggatgggtgggtggatggatggatgggtaggtgggtggacgaatggatagatgaatagattaatggatggatgagtggatggataggtgggtgaatggatgggtaggtgggcgagtggatgaatggctgggtgggcaagtgggtggatggatggatgggtaggtgggtggacgaatggatagatgatcagatgaatggatggatgagtggacagataggtgggtgaatggatgggtaggtgggtgagtggatgaatggctggatgagcgagtggagggatgggtgagtggatgaataggggatggatgaatggatagagggatatgtggatgagtgaatgagtaagtgggtgggtgggtggatggatggattgatggatggatgagtggacggataagcaggtgaatggatgggtaggtgggtgagtggatgaatggttgggtgggtgagtggagggatgggtgagtggatgaataggggatggatgaatggatagacggacatatggatgagtgaatgagtaagtgggtgggtgggtggatggatggattgatagatggatggatgagtggacggataagcaggtgaatggatgggtaggtgggtgagtggatgaatggttgggtgggtgagtggagggatgggtgagtggatgaataggggatggatgaatggatagagggatgtatggatgagtgaatgggtaagcaggtgggtggatggatggactaatggatggatgagtgggtgaataggtgggtgaatggatgggtgggtgggaggatggctggctggctggctggctggctggatggatggatggatgggttagtgaatggataggtggatggatgaaaggagggatgcatgagtggataggtagatgagtggatggatggatgaagggatggctggatgaatggacagagggagagaggggggatggagggagggatgagtgagtgaatgggtaggtgggtgggtggatggatggatggaaggagcgataaatgaagggatgggtaggtggttggatggatggatagatagataatggagggattgatgaatgaagggatggatgcatggatgggtagatggatggatggatgaagggatggatgagagtggatggacaggtggatggatggataggtggatggatgaatggagggatggatgtgtggatgggtagatgaaaggatggatgaaaggacggatagatagataggtgagtgagtgaatggataggtggatggatgaatggagagatggatgagtggatgggtagatgggtgggtggatggatgggtgaagggatagatgaatggatggacagagagcgggaaggatggatggaggaagggatgaatgagtggatgggtaggtgggtgggtggatggctggagtgtgggagtgtgtgtgtgtgtgtgtgt

SEQ ID NO: 20358 - DNA, 1023 bp, Artificial sequence
  DNA replication origin
ttctctgtgtgtgtgttgtgggataggacatctgagatgatgtttctgtatgtgtgtgtctgtgtgttgtggggtcacacacgtgggatgatgtttctgtgtgtgtgtgtctgtgtgtgtatgttgtgcggtcacgcacctgggatgatgtttctgcgtgtgtgtgtatgtgttgtggggtcacacacctcagatgatgtttctttgtgtgtgttgtggggtcacacacctgggatgtttctgtgtgtgtgtgtgttgtggggggtgatgtttctgtgtgtgcatgtgttgggggggatattatttgtatgtgtgtgtgtgcggggtgatgtttctgtgtgtgtgtgttgtggggggtgatgttatgtgtgtgtgttttgggggggtgatgtttctgtgtgtgtgtgtgttgtggggaggtgtgtgtgttggggtgatgagtggatgtgtggatggatggatggagggagggatggatggatgaagggagggtggatgaagggagggagggagggatggatggatgcatgaatgggtagatggatagatgaagagatggatggatggatggatagacaggtagatggatgggtagatagatggataggtgggtggatgaatggatggatagactaatgatggatggatggatggatggcgggagggatagatgaaatggagggatgagtggatgggtaggtgattgtatgggtggttgaaaggatggacagacggagggatggatgatggaagagaaggagggaggaaggaaggaaaggaagtggtgaaggtgagagtgaatgcatgggaatgaatagatgggtggatgaatggacaactgtgtgaaatagcagacagcctggggacaccctccctcctgtccctcctctcccaggtcttgcactgggccctgacactcagccctgcagccttcagcgtctgggaagtcccttcgaggagcagcaccccagactctgatgttctggacttcactttgccattcccttgggtcctcacagccac

SEQ ID NO: 20359 - DNA, 890 bp, Artificial sequence
  DNA replication origin
aggtgacacaagtgagaacggggacagaacccacagggcctgcgggaagccccggctctgagtgcacccggaaacaaggctggcactgaggggtcttcagagacatgtcgcacgaagacccttccgtggcctcccggcctgccacgtggctgccccaagagaaaagatggctccccagtgccatatttccctcgcagaaatgagtctttccaccttttcggcagaaaaataaatgttttgctcacgttgttagggtagccaagtgttttcaaaatattttcaaaacatagcactcaggactcctcacaggacagccctgcctgctaaggttgcgtgaacgcgctccccagttgagtgggtgccagggattccagggcagcgccgtcggcctgagaaccgccaccccacacggttcccaggtgcgcccacacccgcccacgcctgcccgggcacgatggagacgcccacagaccacacctggccagcacagggagggggctccaggctccacccagggttacagcacagggttggggggtggcatggagggatggagacacagagagacagagatggagatggaggtggagaaatggggacagagaggccaagaaagacagagactgagagagagaggcagggagagacagagaccaagaggctgaaagatacagagacagagagaagctgagagatacacaggcacacagagagacaaagttgccaagagagacacggaaaggaactggagagagatggagagactctgagatgccgggagggtagagatagagagagaggcagagagacagcagcactgggcacgcagggcactcggtgttttgaggccttcatgaccagccccagtgaactccacacaccatggcaca

SEQ ID NO: 20360 - DNA, 1084 bp, Artificial sequence
  DNA replication origin
gtacagtgcaggcttcctctgtgtctcccaggcagagaggattgattccatagcctggggacaatgaggcccttcctgggctgccaacaggaaggtgggaggtgggggtggccagccttgaggccgaggcagagcaggccttgggaggacggtgctggggtccactgggaccctctggatccaccagggtggggtgggaagagcgcaggagaggcctccaccctgccccagttagcaagccagaagcgggaaggtagggaggggtgaggtggaagggagggtggaggggcaagtggagtgaagcagaaaagcaggctgaggcccaaggtggggacgctggggacccggaacagccaggggccatgcgtgcaaaggcccagtcaggtcccagcatcccacccattgcctgggcctgagccagacacacccggagtgaggaggccccctgggtgggcctgccctccctggtagtggggccggctgtactgggtggaggtcagagagctgcacattcaagtcaggggccccagctggggagtgcttctcagctccccccgttcatgggccgtggggctgaggggctcctccctgccgggcctgagctcttgcgtgactcgagcctcggagaggcccctggacaagaagggacatgctgggagggggatgggactccagccatgcagggaggtgtccaggagatagcctgtggggatgacagggttgctgggccgctctggaaccagcactgaggccagcggacagacggacagcagggcagggtggggcaggagcagaggaggcagggccgcaggacagcttttgccgcttggctgtgtgctcgctccccgaaattgctcagcctcccacccgacctcgccctcctccctggccggccttcccacccggaggggctcctcagccacgcactgcgtccagcaaaaccactaagtcagggaggccagggcgggcagcccattcatcgtcctcaccgcgctgttccttccgggcccttggctggaacgctcaggatgccccaccgctcactcccggtgcacatgtgccccaaggcatccggaacgggtga

SEQ ID NO: 20361 - DNA, 1388 bp, Artificial sequence
  DNA replication origin
gagactgggcggcctgcggccctgggttccccttcactgaaggccaccgtccttttcagctgggagtacccccaacccccagaaacaagagggtcctgtttctgctctaggcctgcaaaagcccctggcagggttggaggggaagagctcagggcctggggccaggaggaagggtgaggaagaggtagggaagaaataggagcgagacaggccgcgtccttgaaggctgggaagggaggagacggagcaaagaggacaggggctcgggaagaagattgggaggaaaggggcttgggagaaaggggaggggggcgtgcccggcccgggctctggcactgctggctggtcccgcttactccccctccgctgtgtggcagaaacttggagcggtggcacccgcgaggccctggcagctcgaccccagcggcaccgtgcggagcagcaaggcctggccctccgaggcccccgtgccaggggaagagaaagaggacagagggaggaggaggcagggcagcgagagaccccagcctgtcctctttccctcgcgtcggctagagccagggtcctgcacctccggcggcagggacgggcccttaccttccgcgtcctcctctgcggtgtcttccaggtggcaaaaggcacaagcacacatgcaagagaaaagccagtgcggctgcgggggagcagtgggcaaggggcctgtggcgggcaaggggcccacccctctcactcggacactctcttctccagggtgtgcctgcggggccctacaagtgccccaagctggggccggtgaatcaatgcctggggagggggtggaaggggctgggtgcccagtggagctcctgcctggaagacctagtggagaataggagggacacggggacctcgcggggcaaggtggggggctaagggcactgggtctcatctgtccccccggtctgtcctcttgggtctggcagggccaaccttggcatctgagaccctctccaccaagagggcgttgcagccggggtgggtgcagcccctttgcttcgtgcttcccggagcctgacccctgcctgtaaaggctgtgttactgggtggaacccagcagttcatggaatgactacagccctcaggcctcaggagcctctgccggcaacgtgatgtctaactccttgctggtctcagccccaggagcccccgcctgagtccggaatgtccaccacagcccccacccacaggccaggagcccaggcgcactcatccctgacctccctggggcttgccctctgactgccacatggctgctgtcctgagactgggcccctctgggacccccctgctacctctccctggccacctctggggtctgcctggcctgccctggccaccctaataagggg

SEQ ID NO: 20362 - DNA, 1714 bp, Artificial sequence
  DNA replication origin
cccgtgtccctcctattctccactaggtcttccaggcaggagctccactgggcacccagccccttccaccccctccccaggcattgattcaccggccccagcttggggcacttgtagggccccgcaggcacaccctggagaagagagtgtccgagtgagaggggtgggccccttgcccgccacaggccccttgcccactgctcccccgcagccgcactggcttttctcttgcatgtgtgcttgtgccttttgccacctggaagacaccgcagaggaggacgcggaaggtaagggcccgtccctgccgccggaggtgcaggaccctggctctagccgacgcgagggaaagaggacaggctggggtctctcgctgccctgcctcctcctccctctgtcctctttctcttcccctggcacgggggcctcggagggccaggccttgctgctccgcacggtgccgctggggtcgagctgccagggcctcgcgggtgccaccgctccaagtttctgccacacagcggagggggagtaagcgggaccagccagcagtgccagagcccgggccgggcacgcccccctcccctttctcccaagcccctttcctcccaatcttcttcccgagcccctgtcctctttgctccgtctcctcccttcccagccttcaaggacgcggcctgtctcgctcctatttcttccctacctcttcctcacccttcctcctggccccaggccctgagctcttcccctccaaccctgccaggggcttttgcaggcctagagcagaaacaggaccctcttgtttctgggggttgggggtactcccagctgaaaaggacggtggccttcagtgaaggggaacccagggccgcaggccgcccagtctcacccaggctgtctctctccctctccccacgctggtgtccctctccctacgctggtgctgtgtggaccagaggagaaaccgagacccaagtgagtgtggggtcctggcaggcccgctgctgagtgtgttctggggtgggggtggtcaagtgagtgtggggtcctggcaggcccagtgccgagtgtgttctggggtggcggtggccaagtgagtgtggggtcctggcaggcccagcgcctcgtgtgttccgtggtggaggcggaggagagggccagggccagatgcctggagcctgcattcggagggacgctcagagcgcagggtgggagggatgagggtcacctgggagatgggcttgggaggcccagcagggtgtgattttgcccagggtcatccagtgcagacaaggagggcttcctgtaggaggaggctgcagacgaggaaggagggaggagaggtgggtgggagagagttgaggaaggaaggcggggcagctggtgcagggagtctggccaccgcaacaccccacggccttcgggggaccacaccaagccccgccatacttctaggactcccagagtcctagattgaaaagcgacaggaaagtgagtccggaagtggagaaaggtgggggactcagcccagaaacccacttcagaatgacaccttgaccgtgtccagaagagctcactgtgcaggggcccctgctcccctttggggcagaattcagaggagcttgtcctcatcgcacctgcttgtgagcacttcgtgggttggtttttttaatgcagctcttctgacttttctgcttttgatcggtattcaccagcc

SEQ ID NO: 20363 - DNA, 1506 bp, Artificial sequence
  DNA replication origin
actcccttggccaccatgaaaatggcaagtggcaaggaatgttttgccttctccacattgccatggctgctatcctcataggggccgagggtggcctgattcctgagccacacagcagggatggtgcccagccataaggtcctcagcatccttaggatggactggccctgacttggctctgtcatcatcctcagagatgccctgcatgggcctggcagagagaagactgcagagtgagagaaattgttggatacataggtaggcatgtgaacagatgagctgatggatgggtggatgagtgagagaggatggagacagatgactgggtggatagatggatgattggagaaatggatggatggatgaatggatggataggtagatgggtggaggaatgattatgtggattaatggtagaggatgcgtggatggtgggtgagtgggtgggtgggtggatgggaggatgaatgggtgaatgggtgggtgggtgggagggtggatgagtggatggttatgtgagtgagtggatgatagatggatcgatggatggatgagtagatgaatgagtggtatgaatggatggatggatgggtggatgggtgggtgagcgagtaggtgagtggagagatgagtgagtggataggtaggtgagtgtatgaatgggtggttgggtgggtggatggatggatgaatgggtgagtggatacgtggctggttggatggatggaagtaaggcaggatggatggatggatggatggatggatgggtaggtgggtggttgggtggatgaatggatggatagatggttgagtggatgggtgtgtgggtgggtgtatgaatggataggtgaatgggtaggagcttacgtgggtgggtggatggatggatagaaggatagatggaggagaagggaagagagatgcttattcttagaggggtttcctctggcccaggaataagctatggtagaattgcccagacccaggaggccccggctctggctacttgggaggaagtgaccttctgaggcctagagcccaaaagctggggtgtggggaaaccgtggacatgttaaccagagtcctgtaaacttacatcgaagtccactttctccccttctgggatcttaggagcagtgagtctgaagaggagacagagaggcccgtgagcagagacccggagacccaccccagagggtcagcctggcgctttccccgctggcccctgccaaccctggtgccctcctgctctggcccccagccaagcatgcccgcctagtgacacgtttgccccagctttattcttatgaggtttgtagcccaccatcctgagagtggcttgagcccctcaagaaggcttccgcttccagcgccaccgtctgccttttggcttctggccattgcaatgtcactgcaccccagctaccagggagggcacctctgtttcctcctcaaacagataaacaaatgcagccatgtcgggtgagaagcgatggccactgtggg

SEQ ID NO: 20364 - DNA, 708 bp, Artificial sequence
  DNA replication origin
tgtgtgtgtgtgtgtgtgtgtgtttgagacagtgtctcactctggttagtttctgcttgtgcgtgtgtgtttgagacagggtctcactctgtttcccaggctggagtgtgggagtgtgtgtgtgtgtgtgtgtgtgtgtgagacagggtctctggtttctgcttttgtgtgtgtgtgtttgagacagtgtctcactctggttagtttctgcatgtgtgtgtgtttgagacagggcctcactctgtttcccaggctggagtgtgggagtgtgtgtgtgtgtgagagagagacagggcctcactctgtttcccaggctggagtgtgggagtgtgtgtgtgtgtgtgtgtgtgtgtgtgtgtgtatgtgttgtggggtcacacacctcagatgatgtttctttgtgtgtgttgtggggtcacacacctgggatgtttctgtgtgtgtgtgtgttgtggggggtgatgtttctgtgtgtgcatgtgttgggggggatattatttgtatgtgtgtgtgtgcggggtgatgtttctgtgtgtgtgtgttgtggggggtgatgttatgtgtgtgtgtgttgcagggtctgcacatgtgtgtgatgctatctggaggttctgttttgtcctctgggtcctggccttgtccccaaccccatcgcagactgagggggccgtgctgctcccccccatcccccgctccttggcccccatc

SEQ ID NO: 20365 - DNA, 1460 bp, Artificial sequence
  DNA replication origin
ggtgtgagccaccgtgcctggccgaggctgcagttttcaatgaggtgggtgaatgaggcctccgtgggaagagggcatggcaagtgtgcggggtcagcacgtgcccaggccctgcggcccgggaagcccacatgctacaggggcacaagaaggcccacgtggaccctcagaggcccccgaccacgccatgtgagaggctgactacctctgccaccccctctttgtggcacccgagagcagggtgcctaggaggccaagaatggtggggggaactgggattaagatgggactcctagaatggaggcactgttgagccctgggccaccaggagcaggtgctgggaggggctctgctgctgcagcaaaggggccaggttggctgggaaggtgggagggagtgggggaggaaggtgggagggaggggggagggagagggaggggctgatggggagacaagaagtctctaatggcagctgattctgaagggcttcgtcagggcagcaccaacacacccccgcctgctgtcctggtcctgtccaaacgcagcctcccatgtgggtggggggccttctcttctggttgggagaaaagccaggtggccacgtgtgtggctggtgatcacaggctggcgctgcaaggagctttgaggctgcaaggagctcttgctgtgccactgcacttccacactccagcctgggaaacagagtgagaccgtctcaaaacacacacacacacacacacacacacacacacacacacacatacaaaagcagaaaccgaccaggacattgcttgcttgagactgggaaatccaggatgggatggggagccacacagggcacgagaaaaattttggggcaatgggtgtgtctatcacagctctggggagggccgcaggctgtttgggggggtggtgtcttctgggttctatcctggtgtaatgcacaatggctttgtggatgtgagcaagccacattcccagagccatggtcacccagccggtacacagggtctgaggatgctggacgcaggcaaggagggtttgtggtccacgctgtggcctgcaggatgggcaagggctggcaacaacccttctgagctgcctgtgcctctcctgtgagtcctgcctgctctgccccagggatcctggtgcctgggtctggcctcccctgggctgtctggttcctggacagtgagagccggtgatctgcagccagggcctggcacaagtaggtgctgggtaaaacaagggggttgccatttcttcctaatctttgaaaacctgcatttgaacatggtggctcactggtttgtgcttacagtgatttcgctacaagtgtttgcacctttttgtgtgtttattggcgggatgaatgaatgagtctatgaatgaatgagtgagtgtatgtgtgaacagcccctcccccaccctctgtatgaatgaatgaatgagtgtatgtg

SEQ ID NO: 20366 - DNA, 1277 bp, Artificial sequence
  DNA replication origin
cagcccggttggcagcccccacgctggccacaccagccacgctgtccatcctcggtgctcccaccacgcctcctccaagagggccactggcctcttcaggccttgccgtttgctcaccccctctccacccttctggccagccccctccagcctctggcaaggccctctctacagggacccccgtccaaggcccagtcctcactcctttccttgggtagtgctggccaggagggctgctgggacccttcgggagtagagggcagcagcctccctcccctgtccccaggcctctccctcctcccctggtttcctctgcctggtggctggattcaggccacttctccatctatctctttaactgcccgtgccccccacccccaagcctggcttgttcccgcacccaacagcaccctaagtgttcttcagagcaagaggcaggggtgtcatgcttcagagcaagaagcggggccatgggtcctggttgttgctgggggcagggggcccaggcctgcaggtgggaacagggctgcgggagggcactggggttgatggaaattcaggaggaggagagggcactgtgcccctccgagggcctgggccgggtagggctggagttcctcctgatgggtgggtttgagtggaaatgactccagggggtctatctagcatgaaggcattgaagcaggatggagtgagaagtgggccagagtgggcagggaaggtggtggcagccgtccccactgttgtccaggcctgcgtgaggtggagaagctccaggctgccagtggcagggtcccaggaggctggtgaccagacaggcctttgcccagcagcaggtgcccttggccaggcccaaggagcagaccgcaggacagggatggagctggagaaggggggtcctggggccgggggtcctcaggcttccttttatgttcatgcaatgctgcctctttcggcagccacattgtgcagtgtgcttagagatatgtggctgctggaagttgggttcagagttgtgggtggccgatgtggagaggagggtgattggaggccgagctgtgggtcacgggtgggtgctgctcagatcactggggctgctggagggcggcggttgagctaggagctgaggtccttcctcagggcgaggcaggggtggggtcacaatggagcagacccctcaccactccttccatccctgtttctctgatagtctgctaatgggatcctccggaaggcatgctaagtatggggggtctctgagatgcctggggagccag

SEQ ID NO: 20367 - DNA, 1742 bp, Artificial sequence
  DNA replication origin
gcgcgcgtggccgccatggcgcggaatgtggtgtgagtaggggtcgtcacccccccgtcgcggggcgccccttagtgtcacaagcagacggaccccacagggcgcgcggactccggggagcggggtgggcgtccctgggccgcctcctggcccgggcgaggcagggttctccgggaccccctgtcatgccttgagacacgcgaggcgggtggcggaggagccccccgccaggtttagggcaaccccagggggcgggcgtggccgggctggggacagagggtccgagccaaacccatggaggccacggtgcccccgcgtggggagtgggagggtggcccggggtcaggcccggggctggtcccgcagccagggccgagggagctgtttggagacgtttctgatcgtcacggggcgggggccacgtcggctgttgggtccaggcggggaggcccgggcggcccccaccgcagcgcgggcgcggcctgaggcagaggagctgggaatccagattgggtttgagtgggaaagggcagctgaccgcagccctcagggctttggggcaggcagggcgggaggcccggttctgctcagcccagaccccccacgcccactctgcatgttctctggattcccagggggccatcggggcgctgtcctgcaccacttcgccctccccaaattgaagcaggaagccctgcatatttcttggtgaacgaatgactcaggcgtaatcagtagatgtgggctcccgggtgggttttggagaacagtaatcagtgtttctggagagggacggtcaaggggccagggtgtggctttggaggcccctgcacatagctggggagagaggggagggtggcaggtgggacccccagtggaggaggcttccttcagcagacacctgggaccggtgctgcgcgtggccctgaccttggggaacacccagcaccaaggaagaaaaggtctgagtgaggccaacactgccctgagcctcacgtgaattccacgctggcccttcgcctgtccctggagaatgaggaggaagtgagggtcagaggacccgggtggggtgttcctgaagggccaagggtggtgggcccctggaaacggatcaggtgtggttgccttggaggcagcggggcccgctcgcccagcagtgcacacactcctgttgccagggagcctttgcagggagcgctgactggacttgctgtggactggatgcagctggggtgggggtgccgagagggtgggatcctgggtgagtcactcgtggggccgtggggaggcaggctggtggcagtgagccaggtttttgtgttttgaggaagaagttagtgcagagttctacttgagataggttaccgtggaggtgcttgtgaaatcccatgcggagtgcttggggtgctccctggggagagtgggactgagggaactgagggctggtgggcccacaagggttcgagaacaaaagagaggccttagagccctgtcctggggccctgggtgtcgacagtgcagattgttccagatctgcaggctccatgcacaggcagctggcgctccagcctggagaggctcggcctgtgggaacaaggacagtgaatcgtcctggcccaacccctgccagcctctcatctcaagcccacacatggcccttcagacccttagcaaagtgtgcccttcaggccccaagcctggagactcgaaaattaatggcctgggagctgttgaaccctctt

SEQ ID NO: 20368 - DNA, 1446 bp, Artificial sequence
  DNA replication origin
tctggccaacccgcctccccagcatggggccacgtctcaagtctgcccaccctcagttccccgtcaactcagagaccagaccccggccgcgcccactgcccagaccctgggaaagcggagccaggccacgtggcgctcagagctggggggtggctgctgcgtgtctggcacccagagacccaagagaagaaggaagcagagcttccggctctttctcctgcagcaagacttttatttaggtgtcgggactgctctgccacagctgcccacctggggcgcgtccctgctggccgccccgtcacggcccgaaccagctggggatgccgccccgccgcgggtcgctgctctgccacagctgcccacctggggcgcgtccctgctggccaccccgtcacagcccgaaccagctggggacgccgccccgccgcgggtcgctgctctgcctctgctgcctctcctcctcgagcatgctgtagaggtcgtcggcagcgctgccttcagggctctcgtctttctcgggaaacagatctgggaacgtgaaggtctgtccatgggcctaagggggagaacaaaggctccagccagagctgcaaagactcctcagcagaggggtctgtgggggagcctcatgctttctggcagcccctttctgccggcgccggattcaactgctcagaggtacctccctgggcctcctggggcagcgtccctgcctggaatgtaagcacccccacggccaccggcccccggctgtcacgctgcagcagaggccacagctccaggacagggccgctttccccaccattgtctctttagggcctggtgtctgcccccgccctgggtgcacccatttactagcacggggccacctggttggtggggggcagaaacaaggcatggaaaaacatgacacaaatcacgtctggtaccatgctgaacctgtccatccaaaatgcctcaggctctactcacattaaagctccccctcctcccagcccagagcctggcaattaaagtgaacatcacgtacgaagaaacatgcacgtgcggcagttgataaatcaggaccggctctgccaattaactggtcttacatcttctgctgagagttcagaatatgtccgtgtcagccaagccccagcccaggccacagcatgtggctcgggttcacgagaaggaggggatactgctccttggggacctaagcaaatacaagaagccatcttaacttgctaatgattactaagtgctccaaagctaagaggcagaaagagcagaccagaggagagggaagagaagagggaggaggagtgaggatggcacccgaatctggaaccctttagtgagtaaaatcagtcaggtacacttggctcttgcagaccctttgtgtgtaaataaatctggatgtgggcaggcagccaagtatgatctgaaacaggcccagat

SEQ ID NO: 20369 - DNA, 1305 bp, Artificial sequence
  DNA replication origin
tttgttctcccccttaggcccatggacagaccttcacgttcccagatctgtttcccgagaaagacgagagccctgaaggcagcgctgccgacgacctctacagcatgctcgaggaggagaggcagcagaggcagagcagcgacccgcggcggggcggcgtccccagctggttcgggctgtgacggggtggccagcagggacgcgccccaggtgggcagctgtggcagagcagcgacccgcggcggggcggcatccccagctggttcgggccgtgacggggcggccagcagggacgcgccccaggtgggcagctgtggcagagcagtcccgacacctaaataaaagtcttgctgcaggagaaagagccggaagctctgcttccttcttctcttgggtctctgggtgccagacacgcagcagccaccccccagctctgagcgccacgtggcctggctccgctttcccagggtctgggcagtgggcgcggccggggtctggtctctgagttgacggggaactgagggtgggcagacttgagacgtggccccatgctggggaggcgggttggccagagagggccacacacaggctcggagctgcatgccaggtggggaatgagacacgcaggtgaaaagacccagaagatagttctgagcgcccacattcagagcctgagcccagaggcgtcgggaggaatggaggggtcagcgtgagcacggggcggcgccgggtgagagaacggcctggcctggacagaagttctggggaggggctgccagggcagcagccctcagggggcctggtgagggaactccggcccgcctgtgggtttcggtttggcactgttggcagcaagaacccgagaagggccgggaagggatccgagggcagcagtgtctcaggagagccatggcggagaggtgccgtcgggcggagaggtgccgtcgggcacaggcccggggctgggcctaggggacagggaggacccagcctggaaaggtggttagggcagggggcaaggtgtggccagcaaccactgcaaaacagttctgtgggcttctcggccctgggggtggacaggtcgagagaggagagggtgggcttgagcatcctgttggaggtgcccagtggcctcgcagtgtctgggtggatgcctgggtctagacccttgttctgtcggcccagggcaggtcaggacgcacggcccctgctctgattcttgtctaaagggttctgcgtggaagcctgtggccctgccagaggctctgtgctgcctctcctagcctggcctggcctgtgggagca

SEQ ID NO: 20370 - DNA, 1049 bp, Artificial sequence
  DNA replication origin
tggggtcttgtgtgaatcacccacccccgccgaggactggcagccctgtttctcacgctggaccgccacacgcccgtccctatcccccattcttcaagaaatgcgcccagcctcaccccgtgctcatccccgcattttggtcttgcctccatctgggcaccccctgggactgggcccaggccacgcacttggcaggcccctgaggctattatctcccctaaggcccggccctcagccagccccttaccggggtcagtgggctgccatgcagaaggatgcccagtgacgactggggagtgagggagcccctggtgtgctgtggagatgggggtgcagtagctccccagcccctttctcctccctggcagggaggcctgtgggagacatgggggctgcgacgggacagcacaggccggggtgagacagggcgggaggaggatctggaggccggggcggctggagccggagtcagggctgcgtctgggggtggcggccgtgatggagtgtgcctggtgcgctggccgccagcagggctgctaacggcccctgtgtgcggggctggacgtgccgtggatgaaggatgggattcctcttcccctgccgtgagttagggtcctcagagctctaggccccatgaattatttctctaaggaaaacacagttgactccatttctccggctctacttcctgaccttccccatccctttaaatcaacactgaagggtgagcttgcccgggccttcaccccctagccgaacacttcccccgccacaccccctcctgcctgcactccgggctgggggaggggaggctgagccagctgccacgccatctcctcttgcaagaccctcggaaggctgcccaagcagaaggaaaagccaggaccctcactcagaccacaacaggcccacgctgcagatcagggttggtcccaaggccacgtgacacctgtgttcttctgagcattcgcatggggaggcttacacggcaaacccaacttcgtgcaagaaagccgcgccgtgggctttcccccagacgcccgagtgcg

SEQ ID NO: 20371 - DNA, 1405 bp, Artificial sequence
  DNA replication origin
tgggccctgctcccaccagggccctgcccccaccaggggctgtgcagggtctgggaagggcacagctgtttgcctccccacattccagacacagggtcaagcagtgtgggaggctgtttttctttacaaatgtcatctgaaaacaaacacttactggctctgcccggctgccccgaccccttggagagtgggggcagggaccaggcctggctacccccgtccaggtggctggggactcttccaggccagagtggcctttgaccctccttcgctgcccctgccacaccaaccaggccagtgtcttccctagccagaaggctctggccccaccccatttgccacctagaactggggaaggacgcacctggcccggccagcggcccatgaagccgtctttctcccacgggccgtccctggctcgaccctgtgcccagggcagggtcaggcccagtgggtctctctgtggagggaggggctgcctggggtatctgggggtggtgagggggtgtcccagccccagcccttccccaggcctcatgtgggcaccacccctcgtttacgggctctgggagcgggtggggcccctcctcctcctgagctgtaaggtttttcttccagtggggtttgcacaagggtccacgcccacagcctcagcccggaacctgaaggctctgaggcttcctagggggttctgcggccttgcactgtgggtcctcccagctcggcagccctctgctgaggcaatgtcctcttggagcaaaaaacagcctccgcaccattcctcccagggtgcatctgagcccaggccccaggacactatccccgggggtccaaggcgggtggggaccgccctcccgacgaagcttctttgcgccctgctcactctcctcagcccccaggtgcactgggggatcctgcaggaagcctgcgggcggggactggggggtgtgtttggggcagcggtgtctagaccctggcctgcctgagggccgggagcttggacttcaggcctcaggagtcaggagagggccaccacgctcccttcccctcgccacagtggtcccaggcgggagggagcggacacgggctttgcggcacaacctggtccttgttctctggctgggctagggtcacctggagctggtgcccgtgatatccgcctgacgcggaagtgggcaccgttttctggatgctcccttactttctcagcgctgtgtggagggggaatgccccgtgcttctcaccctgtcttcgcctgtccccaccccaagctccactgggcggggaggagaggggcacctccataggactcagctatccccccaactcccacaggaacctcaggcccagagtccccaggagggagcagccggcaacacggtttccgctgtggagacggggcgtc

SEQ ID NO: 20372 - DNA, 1453 bp, Artificial sequence
  DNA replication origin
ggtgtatgaatgacacgcttgctctggagtttccacctgggagctgtatggggacagggctgttcctcctcacacccgctggggaagggacacaggcctcttggtggcccccaccatctcccagcactgcccatggctgtgcccacgctggctgccccctgagagcaggacgtgtactcaggggcagcgcctacctctgggcagcccaggtttctctgctccctgcagcggaacgggcttcctagggcagttcctggggtggtgtccctagggcagcccctgagtgctggagggggtctgggccacaggccctgaaacagggaggtggtgggggcagcgttcagggggctgaacctcagggtgaggcgggcaggcggggagccacaggcccgggggccccgcagcaggtgctcagcctcggagcctcctgccgcaccccggggcgggggctgggagcccgcccgagcccctagctctgagcgacctgccaggttggaatgtgtgtttatctttggcccaacccgatttcctgctttttagaaaaggggcttagagagggttgttagacaggctccaggcaccccaacacccaaaggcactttgaaaacgcccctgcactgacttcagtgcggagaagcaaacgggctggaatttcactcccaaaccccaacatgggggtggcggggccggggtgagggttgtggctgcctgcaaaggtgccaggaaatctggggagggaggaacttccaccgttcagggagaccctgagggtgccctggcttctggccacgtcccagaccctgttaggcaccgaggtcttcacacccagaccctccacccacccaagtttctgcggcacgtttaggttgagtgaagaccaagtcatccagttagagaagaggacttgaggcgcgtgctgctgctgtggccacgctggaccctcggtgcacgcatctcctggcgagtcccctgtggctctgtgggccgtacacacccggggcacgcgacctcagctaccttgtcaccgaggacgtgcatccacagctgtgcgtctgtgcctgggagcggggtctccacttggtgggtctctgcatgctgaccagttaacccgcctttccgggctgtggagggcgtgggtcctgtccggcccggagatgctccgcggggtgtgtgtgtgatcgtggccctgtagcggggtggtgttccctggagggtggacccctgagcctggctgtgtgtggctgtgtctcagcatgaattccgtgacccaggagcacgttttcaggcagggattaggggcagctgggtgtgggaggcaggcacttggtataccaccgaatggagacagaaaatcccaactctacgaaggaagtgaagtcccttcaacagggacaaagcgatgttttgggtctgactacaatgcaccctgggaagtctcaaagaaaacagtcgg

SEQ ID NO: 20373 - DNA, 1222 bp, Artificial sequence
  DNA replication origin
cctccactgccatcactgcatgctgaccgcctgccctgcacccctgaggtccacacaccctgtgctcaccccacccctggtgtgtgctgcgctgcacccatcccagaatcccccaccctggaacccccatcccccttttcatgtactcctccccatgccccccagcccccctctgcccaaggctggcctcccccacatcatgcccacagcccggattccagagtcctcgagacaaattgctgtaacagtgtttattgatgatgagtccagggctcctgctgaagccctggtggggaggggcacagagcgagatggggcgtaatggaatgcttgaaggctgctccgtgatgtcggtcggagcttccagactaggcgagggcagggtgaggcctcgggcacacagccggcgcccagtcacccggcccagatggagggcggccgggccctgcacaggcacttgccaaggtggctcacactcacgcacactcgtactgagactcaaggccgtctccacaactccaaccagtgcaaatgacttagtgcaaattaaattcagaagggacgggggaaacagagtcgtggaggctttgaatctctcagaaaaaaggaaagacaggaaagctcagaaacaaagagacagaaggatgaaaaagaagaagagggaggtggtggggacggcgtcatcccgctggaggagctcagctctgggatgatgtggtggctggtggtcaaccgtccgccgcagggggtggccatgaagatggagtcgccggtgcggggtgggtgctgcgggcgctgctgttccgatggtgtctttgatgttgggctgatgaggtctggttcctctagcttcacctagagatagcgacacgtgggtgggatgggggcagggtgctcgggggcctggaggcttccggaaggagcgctggtgctcaccttccagagccgattcctgagtcaggtagtgcagtggttgtaaagtgcagcatattcatttccaagctagagggttttgtgtccggattcaaaggcccaggcttgagctgggtagcaccatttctgtggatggggaaggagtgaggtcccactcagctcctctcgcgtgccccccaccccaagtgtggcaggaagcccctcacctttcatgttgtgggttctgggagcccagagggcagccatagtgtgccgactccgtggaggaagtaaagaaacagacccgctt

SEQ ID NO: 20374 - DNA, 1371 bp, Artificial sequence
  DNA replication origin
cctcagcaccccacccctactctccaggaacgtgaggtctgagccgtgatggtggcaggaaggggccctctgtgccatccgagtccccagggacccgcagctggcccccagccatgtgcaaagtatgtgcagggcgctggcaggcagggagcagcaggcatggtgtcccctgaggggagacagtggtctgggagggagaagtcctggaccctgagggaggtgatggggcaatgctcagccctgtctccggatgccaaaggaggggtgcggggaggccgtctttggagaattccaggatgggtgctgggtgagagagacgtgtgctggaactgtccagggcggaggtgggccctgcgggggccctcgggagggccctgctctgattggccggcagggcaggggcgggaattctgggcggggccaccccagttagaaaaagcccgggctaggaccgaggagcagggtgagggagggggtgggatgggtggggggtaacgggggaaactggggaagtggggaaccgaggggcaaccaggggaagatggggtgctggaggagagcttgtgggagccaaggagcaccttggacatctggagtctggcaggagtgatgacgggtggaggggctagctcgaggcagggctggtggggcctgaggccagtgaggagtgtggagtaggcgcccaggcatcgtgcagacagggcgacatcagctggggacgatgggcctgagctagggctggaaagaagggggagccaggcattcatcccggtcacttttggttacaggacgtggcagctggttggacgaggggagctggtgggcagggtttgatcccagggcctgggcaacggaggtgtagctggcagcagcgggcaggtgaggaccccatctgccgggcaggtgagtcccttccctccccaggcctcgcttccccagccttctgaaagaaggaggtttaggggatcgagggctggcggggagaagcagacaccctcccagcagaggggcaggatgggggcaggagagttagcaaaggtgacatcttctcggggggagccgagactgcgcaaggctggggggttatgggcccgttccaggcagaaagagcaagagggcagggagggagcacaggggtggccagcgtagggtccagcacgtggggtggtaccccaggcctgggtcagacagggacatggcaggggacacaggacagaggggtccccagctgccacctcacccaccgcaattcatttagtagcaggcacaggggcagctccggcacggctttctcaggcctatgccggagcctcgagggctggagagcgggaagacaggcagtgctcggggagttgcagcaggacgtcacca

SEQ ID NO: 20375 - DNA, 974 bp, Artificial sequence
  DNA replication origin
aaggacagggatcacggtggggtttgcattcacacgccctctttgctccactgaacttccttggagcagacctcaggtgcagagctctggtggagctggcggggccacaggtggggctgggctccccatgagtctcctgggagggtgcgggactctgcccgcagcccgtcttgctgcagttaccattggctcctgcgtctggggcacccacgtcacacccttcatctgctcagtcagcccgaggcagctcccagcctcaggaaagcccagaagcaattggaagagtctgggggtgggaggcgcgaggacatcggacagacctggcgcggccgggcggtgcaggcctgcttcagccttctttggcctgggcttgaaggcaggcctgcgcctgaggggtctgcggtggtctggggtgctccgcggaggtctggggtggtctgcaatggcccgaggtggccagaggggtctggggtggtctgcagtggtgtggtgtggggtggggtggtctggggtggtctgcagtggtctggggtggcctgaggggtttggggtggtctggggtggtctgcagtggtctggggtcagctgggcctttgcctgctgtttggtgcccagtgcaggcccgcaggttaatggtcagtctggtcagcctgtgtcctaggggatggaggtgtcagatttggatgaagagctggggtaggggggctcagcactgccatggtggcggctctgagttgggggtgactggaatgggcctgggccacccccacgctggcagtgctccaactcagctctgagcccctctttccttcctgccgccacccccacacccggctctcatcacctcacacctgggctcttgcagcagcctggcctccccctgggctctgcactctgcacacagtaggcaccctctgcacacaccagacccttgacttgggagtgggcagggaggcccccaaacagcaccctca

SEQ ID NO: 20376 - DNA, 1139 bp, Artificial sequence
  DNA replication origin
ggattctgagggatggagtgtgcagaccgctttggtggggctgggggcatatcctggagcctccgcaggggtcccctgggtcccaccctgagcagctgggcgttggaagccgcctccccttcccagaagagcagctctctgtcggcatcctccctccccccgggctgagcggacaggctcccatggaacagcctctgagcggagagagctgtgtcctcagatctgccggggccagggctggggcagaggaaggggcgtgcagtgagcccagctgggacagcaaacaggcctctggggtctctcctttcccttgcctgcccactgcagggggctggccggggccagggccgggggagacttcctcgatttatctctgcagccagcggacagcctacagcctggaatctggggttaggctgaggtttgcgtgtcctgctgtgagcagcttgcagcaggacagaaggactgggcttgggggtggggggggcactgagggaatgcaggcgggatggggtggggggctgggacagagaggatgctgggatgcctctgagctggctggggaccctgttgctttgatggggcctgagtgtgtgtagaactctggtacaggccatggccatgttctctgaggagccaggggactgagggctgtaggaagtgtattggggggtgccaggcgatgtagacacagccccgcctgcggcagagggtgggagcgggtgccggagcctgtgcttcagctggaggaggaaggcacagacagaaagaagaggattcagcagggaagggcagggccgggtcctggaacaccaggccggagccagctggagggaggcaggagctggggggcttccagaggcttcaggcaggaaggaagggaggcctggggagccacaggctggcgaacagagacagcacagcttcaggactgccaccgaagcaaggccccagacacaggcgagggccccaccagtggccctgtagacagaggctcccggcctggttgcaaaagcaccacacggcttccctgtgttttcatgatacgactggcctctccccctacagctgccccaagatgagaggggcccttcatggctgcccatgcattgctgtcccatagaggaccctccgcagtc

SEQ ID NO: 20377 - DNA, 970 bp, Artificial sequence
  DNA replication origin
tggcgggagggggctggggtcgcttcccacctgcaccccccctaggagccccacctcagtggccaaatgggtgtcatgctgcccactgacctcacgggggcgcaggagacaacaaaatttcagccggttcaagggacggtccctttgtggctggatcctctgggctgagcggcttagtgggggctcagcgggggctccccagccgtctctcaaagacgagccaccctgcctgaccccactcacctcccaccctgaacaatgtcccctgaccttgcagcccctcttgcctctgtcctcctccctaggccgctctcccttctcctctccacttccccactccctctccttgggccaggcccaccccagacaggctggggactgaggctccctgggggcggtgggggcgggaggaaggggtctgcagctggggcggaggggccacaggtcccaggcagccgaggggagcgggcagctctgggaagggcctgggagccaggtgtggcccctgcccaggagcttgggagaggtggctgaggactccaaagctgggcggaggccctggataggagtgggctggggagaggagatgaagaactgaggcacagaggggccggagacaggcagagggcagcccaggggcttgggtgggggattccagggacattgaggaggtgggagggagagggagaggggaggagacccagcttcaggcaggagcagtgaggggtgtgctgggggtcccactgccagagccagactcccgagggtcagcaggggtgctcttcacaggggacccgggggagctatccaggagtagccagaaagatagactcagggacggctgtgggaggcgctctcccaggtctgaggctgacggtacaaggagaagagacataaccgtcccctccagtactggggagccatgggaggttgctgagcaaggacaagcctgccagaatctggatgggaa

SEQ ID NO: 20378 - DNA, 927 bp, Artificial sequence
  DNA replication origin
agaccacaaaccctaaaataccacgtcagatccgcatgtggaacaccctattgccaaatatctgcttggagctgtgtacatttttcctcgatcccacgactaaaaccaattgtaataaaacacgataaaattaattttgaaaatccaaatgcttgatctaaaaaaaaatgtggccccaggatgtgggcctttgagcagaaagcctggccgcgcaaggaggggctgtggaggtgagggcagggctggtgggctagggctgagcggtttctggagtcccaggaggcctcaggagatgtggggagctgggcagtcggcccggagggcagggcagggaccacccagacatggaaggtgtggaggccagctctgaaaatggggtgggacagaaagggaagaaaggggcatgagccagcagccgggcagtcagagccaggggcccagggagcagtgtggtttgggtaacgggtgtttgcctgcatcaggcactgccctgtctggggaaaaacagagccaagaaaggactcgtgggtttggccacctagaggccaccagaggccttgaagagagctgctttggggaggtgggacagtcccgtggatgtggttcagaggaggtaggagaggagcacagcccagagcagaagcgctcgtcttcggagccagcaggtggaattaatggccgcaaaggtgtctgatcctcatctctgaatgtgacctaatgaggaagaagggtctgtgcaggtgtgaggaggtgaacggctttgagatggcaatccggtcctggaccatctgaacaccataaacgccaacacaaggtggttataagagggaggcagctggagatttgatgacagaggggcggaggaggcagtgtgaagacagaggcagagatgagaggaacgggaccacatagcatggaaccgcggga

SEQ ID NO: 20379 - DNA, 949 bp, Artificial sequence
  DNA replication origin
ggatcttggccttctaaaatgtttactacatcaggaaacgaacgcactacgcgcgggctcagtgatgaagaataaacacacacactcactcaggacacattgagtgcaggcccagccccgggcttcccgctgcgggggaggctgggagggttcaggcatgccgcagccacagaccatgagcttgggggtcaggcgggcgggggccaagggcagggccacgtcccagccctccccacccaggtccgggcgcctgcccgcccgccctggctgctctgatctggctgtcacggttacacaaggccagcctccatttcttcattaatgcctcaccaaggggggccgctaacccgcagcctcaggaatgtgcctttacagagcagaggatgcagccgctgaagggccgggcaagctgcaccggccggggctggaggtcctggcctggactgctcccccggccctccccactctggcccgtgctggtccaggccagggcagaaggaggtcaacttgtgcaatgcctctctgggtgagctctgcaccgggagctggtgatggggacagaggaggccctggaagaggggacgtgagttgagagagcagcacaaacccaggacatgcctccagcatctctgcctcccttcgtccacagagactgctgcggggtcaggcagcacagcttcttgcctgagctctgtggcctcgggcaaggaaggtccaggagtcaggtgctggtctgcaacatgggatcatctcgctctccagaaaggctgccaggggatcttaggggaggccctcactctcgtctctcccctgtagtcctgacacctgccgacctcacacatgggccctctgggcgcctgccctcccccctcgtccttgcatgcatgctgttccagccttcggaaatgctgttccctggtgaccactcctactccagccccctgtgcca

SEQ ID NO: 20380 - DNA, 1134 bp, Artificial sequence
  DNA replication origin
cgggtgacgggtactgttgtcaggcaaggcgggggtgcggctcccgcttggcatcctccaccagggctgcagtgagaggcgtggccagcaggtgagcaggcagaggagtgtgtgggtgcacccagcccagcagcctggccacgagggccccctggcacccaggcgctgctcttcatcagagtctgccctgtgccagctggcagggccagcatagggatgtttcacttacgtacacttcacaagggaagcggcaggctgaggagctgtctgctgagggccaagacctggggacacgccacaagtggggacagcagttcctgaggatcccaatgagccctggtgggagggggccatggggagggtcccagggagcaggtgctgggcactgtagcgtgtctgggccagctttgaccctcaggagggtgggctggggtcagccaagccgcttcttagaacctggggatatcaaaaagagcagagctggcctgctgtgcccagcaccagccaggacaggagacagcaggggaggggcaccggcatatcacctactcagggctgcaggagctgggtgggggcaggcagcaggcaccaggaaagaagggggagtgataagggatgtgggctgagactggtgggagttctgggttcaggataagcttggccacagcctcgaggagagaggaggaagtccccaccccagctggacccgcatttctggccatgttcagacgccctgcggtccggtctccactccaggtgctctgtccgggcaggaggctgtgacgcaccctctttgtcaaggggcattcagggataaggctcctacctgcaaggagctcactctagaaggggagcgactctgaagcagacaggatggggccaaccgcgtggggtgaggaggaggcatcccaaccgggaggatggggaggtccctgcagggggtccgacccaatgtgaatgctcgtctgtcatgatggccgtggaggggcaggatccaggaggggtgctggtggcgccaaggggcatgaggactgggcaggacgctcctgagcttggtgctggacctggaagccttgctcccaggaggcctgatgcccctgcctcctgccccagtccttggcaagatgcccgtgg

SEQ ID NO: 20381 - DNA, 926 bp, Artificial sequence
  DNA replication origin
cctttggtctaggcttctctgtaaaatgggctgccaagatggttgtgcgggtcgatggagagaagtaatctgcctgtctttgaatcattgcctccaggtgaaggtctcccctctttctaactctaatctaaaaacccatgaggttgaaatcctcaagccccaagcgacacctgtgaaacggcccaagagaagcgtgccatgaggcagcaggaagggcattccaggaggagggaacagaggtgagagagacgccctgacatttggggacccagcagggagtttggcctggctgtcactggaatggcagcacaggtggctggagaggaaagaggggccaggctgaaggatcagatgcccctgggaacacacaggagctgtggggtgggccaggtggggttcctgagggaggggcacaggtgggccagctggccgagaagaagcttcctctgcagggtggcgagtagaaaggggagtgagccccacctgcatggctgccgaggggtccagtgagggaaggtggtgagtccagggacccagcttcaagtgccacacgggtcccgcttggccatgctggatgggaagggttctcctctggtacactgtgtctggaggccccgggtcttcctcccttggcctggcagggtggtccctcccgctgctcggctctgtactaggcttgatcccctgtcttgggtacagtcctgccccaacctccccaggcatccagtccctcctgtcctgccccatggagtctgcaaacccaatgcccttggcttctccctgcctccagcttccgtccttcagcccgtgccaggggcctgcccgggaggtctcttgtcaccagtccccagtgccagtctcccactcagcaactgtggggcacctggaaggacctgtgaaataaacccctgaaccctggcccaaag

SEQ ID NO: 20382 - DNA, 1335 bp, Artificial sequence
  DNA replication origin
ctcagcaaaggctctcactctgccctcagcacacaccagggtgcaaccaccctcactcctccaccagtccctcccagtcactcccttctgtgtgtatcccagcaggtgcctccacttctcctcttgcactctggtcactcagcagccacaggatcccttcactcctaagcagagacctccactagccccacttctctccaagaaaaagctgcatccccttcagggcttcctgatgccttcctgggcaagctccccttggtttctcaggtgtgtttctcaacaacccatgcttcctccctatccaccactcctcagagacgccacatcacctctctacaagccttgtacccgctgctcctgccatgagatgctctcccccagatgtccatgtgagtatgtggtgggggctagaaaggtatgtagatgggtaaatggttggctgggtagatggctggatgcgtgggtggatgcatggatccatggaaggaaggaaggaaggaaggaagagagggagggagggcaagaggaaagaaggaaggaaggaaggaaagaaggaaggaagagaagaagggagggagggaggatgaatgggtgcacagatgggtgcatggatgggtgcatggatgggtgcatggatgggtggatgaacagatggatggatgaacagatggatggatggataagtggatgcatggattcatggaagtaaggaaggaaggaaggaaggaaggaaggaaggaaaggaagatggatggatgcatggatgggtgcatggatggatggatggatgcatgcatggatggaaggaaggatggatgggtggatggatacatgaacaaatgagtgggtggatggatggatggatgaatgggtgggtggatgcatggatgggtggatgcatggatggatggaagatagatatatggataaataagtgggtgtatgaataggtgggtgaatggacggatgaatagatgcatagatgggtggatgcatggatggatggatggatagatagatagatacatgggtgaatgagtggatgtatgaatgagtgggtgaatggatggatgaatagatgcatagaggggtggatacatggatgggtggatagatagataaatacatggatgaatgagtgggtgtatgaatgggtggatgcatgcatggatggatggatagatggatggataaatggatacatgtaggagtgagtgaatagatgcttggatggatggatggaagaaaggatggatggatagatgaatacatggataatgactgggtgtataaatggatgggtggatggtgggtggatgaatgaatggatagatg

SEQ ID NO: 20383 - DNA, 1523 bp, Artificial sequence
  DNA replication origin
gaggcgtagaggggaagggaggggcaccagggccagagcaatggcccagaggggacacacacagggcagcctcctggtcgcaccctgagtaaccccggcctgcccctcactcgccggctgcggtctcagtcttcttacctggcgggtggggctggtaagcacagagcctgcccctgacacatggggagcatttagggagacacacacagagggctctcggtacgcccagccccatgagcgggagaaatgtgatgcgaaagccctaccttcacacccagagtctggggaggcaggagagctgggcagcaggctgggtcctccacctgcgtagttcaaaactgtaccctcaagcaagccctcaggcctgacctggggcagtagggagaccccaggtggggtctagagctggtgccagagggtcctaagcctcagaacagcttgcccttggcctcaggtcagcagtgaggagtggaggcaaaccctagggctgcctctctgagtggctttctgagctggccagggttgggcaggaggagggtgaggctgcttccatttcacctgcacccagagctgtacctggtagaggaaggaagagatgactgtgctgaggccgggaactgcctggaagacacaggcccacaaacatctctggcctcagccttgggaggcaagatggcgtgggtactgcctgaccacaggaggacttgggggcactggggtgagcaaccccacggccctgctattctccgcagcctgacatcatgccatcagggcaatggactccttgttggctgtctgtgcctccagctgtgagtctgcagttgcccgtctgctacgtggccaatgcccagcacagtggctaacctggggcactcaagaacaatggaacgaccatcaacaggtccctgtctttctcagttggccatcaattaaaatgcggagaatagctctacttttgaggatgaagtgatagaacagatgtacagcaggtagcacagggtgacaccctgtctgtggaaacttctggagtgaaggctggcttgtaaggactaagacttgccagatagcaggttcattagatgtgatggaaggtaagagagatggggactgctaacacccagaattctggtgtcaacaactgaggggctgggatggttattccttgagatgggaggaagagcttcacatgctagtggataaactgagcaggcattggatctacgtgcccaatctcaagagggcgaaacaagagttccacgtttgggagtcttcaggacatatgccatcatcaaagctgtggtgtggaagagttcatccagggggtgaagttggaggaagggaaggatagaggaagcccaggccaggatgaggccagtgcttaatggaagggagagcaacaaggaaaacaaaatgacgggacagtaaaactggaccaagtggccacaggagccaaagggatagcacatttcagggtttaaggaatgttattccattgtcttccagcccccatggtttctgaccag

SEQ ID NO: 20384 - DNA, 1227 bp, Artificial sequence
  DNA replication origin
ccaaatgcagaccctggctcctcagctggggggagtatggggagcagggagctcctcctgcctcaggccctgggggcaacccaggtctgcccactctcaggctggctggctcccccgcctggctgggagcatcacttcgggaaggtctggccgagtacctctgcttcccttcccctgccttgtcgtccctggcctcccgtctatcaggaacagatgtgcctctgagcaggaatcctagctatttggtttagccagccactctcgggaatttctgataaggcaaattggttctctgcagagtcggtggaggtagtgggggagaagacaagcagtgcccacccccacctttctcctgccgaggacggggcctaggatacgccccagcctggtccctggccccagctcagcagcactgtggggaggaagactttcgaggcctctcctgatgctccgtggcgctgcagtggctgagggctggccggccccagcaggtgggagcgggctgagaccacaggggtttcccccacccctggacctgggctcagagctttgtgggagggaaagaaatctacactggagccctctgtggtgttgaagcaagcagccgcaaccctccccagcacccagccctcagcggccacatgtcccatgttccgggctctgtgcgggaccttccacgacactctggtccttcctgccttcatcatctgttcaatacacatatgccaggccctgtacaaagccctagaatcatgaagatggataaagttccattcctgccctcaaaacaactctaggaagtggcacatcaacataaatgtaacaaacagcagggctgaggaggggcccggctagcaccttgtaaattattcactcagatcttccctggatcccagaacatcgtcttatcttgttctattctgtccatggttttagcctgtggaggccatttaaagtatcagtttggtcttccagccacttagcttatatttctcagccttggaccttcaatgtgggctccatgaatggatgggtgggttggtggatggataagcagatgggcagatgggtagatgtatggataggtagatgatggagtgggtgggtgatggatgggtgaatagatgtgtgtgtgggtgaatggatgtatggatggataaatggatgtgtggataggtgcaagtcagctgtaggtcaacaagtgtctacctggattctcttctgaca

SEQ ID NO: 20385 - DNA, 5033 bp, Artificial sequence
  DNA replication origin
gggagccgggggacaggctggagactacactctgagcctggggctgcagccccggcctgggccagaggggagtgggcagggccaggggcccagctgagaaggtggagaccaggcttgaggggtggggctgtcagcctgtgggtgccagccctggcctggccgcacctgtgtgggagctgggaagagcggggaccctgggggccagacccagagggacaggttcctccaggatgaggcctgctgagcgggccggtgggcaacctcagcaaggatgcctggcagctgggtctccccggcaagctaacccggggggcagggggcaagctaacctggggggcagggggcaggggccaagctaacccaggggcaggggccaagctaacccggggggcaggggccaagctaacccaggggcaggggccaatctaacccggggggcaggggacaagctaacccggggggcaggggacaagctaacccaggggcagggggcaagctaacccaggggtagggggcaagggggaagctaacacaggggcaggggacaagctaacccggggagcagggagttagccattggtggggtgccagagtccctcgaggcaccctccagggccttctgtctgacccctctggtctgggagccccagacagagccccagggatcctggagaggacttgccagcaggcgtcttgggaccatggttagcagtgtctctggcggatggtggggggctcaatgccagaacaaacaggaagggagaccagggaggccagactcctgggggtcaggatggcacagtacagcagagggcgtgcgtgagttaccaggacaagggtgataccagagggcctgggcaagagggcagcaggtgcagcctgggactgggagtggaggggtgggtgggaggaccagggatggggccaggtgctggaaagcctggccagggcctggatttgccagtggcccacgggattcacggagggctctaagtggagagaggcagactctggccccactgctctggtcccatatggagcatggccagaggggctggctctacaggaggctggacagcagcaggggccagggcctggtggagtccgtggatctcctcaactaactcaatgtgaggtgtggtggagggcagtggtggaccggcagacgcatgctgggtgaggggtctgcaggacatcctggaggagtgaagctggccacagcaggtgccattggaagtgtgtcctcttcattctcagagcgtttgtgggacaggtccacacgggctgccattgtgcagaggaattccaaggcagactccatgccgagggtgcaaccacgccaagatgacctgggcaaaggtctgcaggggaaggggtctaggcaggggcaacccaacctgggaccactgtggctgggcaggtgtcatagcggtggtggtgatgggtagtgtgggtcaggtggcctcatgggtcatcatgagggtgttgcttgtcaccaaggaaataaggtaccactgctggactatgaaccgagctgtgccacgaggccacgtgggtgctgcgtggaggttgggttagggttagggttaggttaggctggagtgcagtgtctgttcacaggtgccatcgcagctcactataaccttggactcctgggctcaagtgatcctcctggctcagcctcctgggtagctgggattacaggttcgagtcactgcacatgacgggacagacctttctgagggccacaattcaccccatggcctcagggtcccatggtgtctgttgaacaaacggcatggcctatgcagcccaggccatctgccccccattacagctctgacctcagccccctacacaggccctccacctcttcctgctgcagctcccaccaacccaaacccccgacttcctgctgtggctcaaacactcccagaccactcatgttttatccctgtgaggaagaacgctctttctggatgcttcatactccttcctcagctccttccagtctctgcccccacgccaacttctccatgaggcctcagctccgtccagtctctgcccccacgccaacttctccatgaggcctgtcttgcttaaaagagcaccgaacacctttcgctttcttccctccatgacgctgagcttatctcttggctgaaagtccagcatgtgggtagtgcctgtccatgtgtttgtatacgtggatgagtgggtgggtggatggaggagtgagtggatggatggatgagtgggtgagtgagagtcaagtgggtagatggacagatgagtagacagatgactgggggtggatggagggcgagtggatagatggatgagtgggtgagtgggtagatggatagatgaatagatgaatagatagatgactgggtgggtggatggagggtgagtggatggatggatgagtgggtgagtgggtaagtgggtgaatgggtagacggatagatggatagatgactgggtgggtggatggagggtgagtggttggatggatgagtgggcgagtgagaggtaagtgggtgagtggatagatggatagatgaatagatagatgactgggtgggtggatggagggtgagtggatggatggatgagtgggcaagtgagaggtaagtgggtgagtgggtagatggatagatgaatagatagatgagtgggtgggtggatggagggtgagtggatggatggatgagtgggcgagtgagaggtaagtgggtagatggacagatgagtagacagatgactggggggtggatggagggcgagtggatggatggatgagtgggtgagtgagagttaagtgggtagatggacagatgagtagacagatgactggggggtggatggagggcgagtggatggatggatgagtgggtgagcgggtaagtgggtgagtgggtagatggatagatggatagatagatgagtgggtggatggatggagggtgagtggatggatggatgagtgggtgagtgggtgagtgggtagatggatagatgaatagatgaatagatagatgactgggtgggtggatggagggtgagtggatggatggatgagtgggtgagcgggtaagtgggtgaatgggtagatggatagatggatagatgactgggtgggtggatggagggtgagtggttggatggatgagtgggcgagtgagaggtaagtgggtgagtggatagatggatagatgaatagatagatgactgggtgggtggatggagggtgagtggatggatggatgagtgggtgagtgggtaagtgggtgagtgggtagatggatagatgaatagatagatgagtgggtgggtggatggagggtgagtggatggatggatgagtgggcgagtgagaggtaagtgggtgagtgggtggatggacagatgaatagatagatgactgggtgagtggatggagggtgagtggatggatggatgagtgggtgagtgagagttaagtgggtggatggacaggtgagtagatagatgagtgggtgggtggatggagggtgcgtggatggatggatgagtgggtgagtgagtgggtaagtgggtgaatgggtagatggatagatgactgggtgggtggatgggagggtgagtggatggatggatgagtgggtgagtttgtgggtaagtgggtgagtgggtggatgatgagtgggcgagtgggtagatggatagatgagtggatgggtagatgggagggtgagtggatggatggatgagtgcgtgagtgagtggataagtgggtgagtgggtgggtgggatggatgaataggtggatggatgggtgagtggatgggtgggtgggtggactgttgggtggacgaatagatgggtggatggatgagtgggtgagactgggtaagtgggtgagtgggtagatgggatggatgaatagatggatgaatgggtggatgggtggaggggtaagtaaatggatgaatgagtgggtgagtgagtagtaggtggggtgtttgtggatgggatggatgaataggtggatgggtgggtgagtggatggttgggtgggtggatgaatagatgggtgaatgggtgcgtgggtgagtgagtgggtgagtgggtggaagaatagatggatgagtgggtgggtggatggaggggtgagtaaatggatggatgagtgggtgagtgagtggtaagtgggtggatgggatggataaataggtgaatgggtggatggtgagtggatggtttggtgggcagatggaccagtggatggatgagttggtgaatgagtgggtaagtggatgggtggagggatgggtggatggatgggtggagggatgggtggttggatggttggatggatgggtggagggatgggtggatggatgggtggagggatgggtggatggatgggtggctggatgggtaggggatgggtggagggatgagtggatggatgagtggagggatgggtggagggatggttggatggatgggtggatggatgggtggagggatgggtggagggatgagtggatggatgagtggagggatgggtggagggatgggtggatggatggggggatggatgggtggagggatgggtggggggatggatgggtggagggatggggggatggatgggtggagggatggagagttggagctgccaggatgaactgagaatttgcaaagcagggagaggggagaagagagggccctgcagtctcagaagccctggaatgaggctgggcccagtgaagcaggatgaaggctgggcagccctgagtgggtgtcaagagaccaggctaaacccgggggaaccagggtgagtggctttgcccagttctgcagagaggtcagggaaggtcacaaggggtccggggaagcagagggcaggcaggctgcaagtgaaaggaaagaagctgcacagaagctcctggctgtgggcaagagtggctgagcaggcccagggtgcggggagagccagtgtggaagtgacctggggccagtggggacaggagcaggagggc

SEQ ID NO: 20386 - DNA, 922 bp, Artificial sequence
  DNA replication origin
ccccagtcctctaaggctgttggtgggggaggcattccctggagttggtactgatggtactttgctttttctctgaaaaagccccccaggctcctacccttcgtggcacccccatctttgagaacttggtgcctgacactgtcccagaccccctggcttcaggtgcacgacagtgagtctgagagtctggcttccagctctctcatttctccatgtatgtgatcaggggacggagagaggtgtccacacccctaaggccttccttccccttccctcttctatccccctctgcctgcttccaggtgctcagccccttccctccctctggcagtccagtacccaagtcagagagtggaacactcagaagatcatgacttttaatgctttattgggattgcaagcgttacaaggttaaagacaaaacccaagcatgggattttgccggaaatattagcgttaaaggagttgagttgagtcaaacacgggccgcaaggtggaccgaggcggcaggcacaggtgacattcagtgtttggcgtgggggtcttcaggtgatggcagaggaggggacccaagagggggccccccactgaagacattggggacacggggaggagacaagatggagagccacgactaggcacggaggtcagacaggcagcccgggccaggatggttagtggcccaggggagagctgcaaacctggggacgcaaggggctggtcggcaagtgcccccgggaacacccactccggcgaggcagaatataacactgggtgggtgggtgtcctgacgaatgggcaggtaatttggggtgcctcgaagcgttttggatctcaggccaatgtgggttccacaattgtgacaatttggctctttgggcttctgtccaatgttccgaatggcccactcacagggcgcttg

SEQ ID NO: 20387 - DNA, 850 bp, Artificial sequence
  DNA replication origin
gggccaggatggttagtggcccaggggagagctgcaaacctggggacgcaaggggctggtcggcaagtgcccccgggaacacccactccggcgaggcagaatataacactgggtgggtgggtgtcctgacgaatgggcaggtaatttggggtgcctcgaagcgttttggatctcaggccaatgtgggttccacaattgtgacaatttggctctttgggcttctgtccaatgttccgaatggcccactcacagggcgcttgccgagggaccctctgcgactgaggcggactggcatggacgacccccggggtcatgccagccccgtcaccaggacccagaagcctcaggcctctagactgctagtcgggctgcgtgcaggggggctgagctgggggcacaagtgggggcgaggtaaacctcccagaggccgagtccctgccgcagccctaggcgccgcggtggtggctgctatggcatcaccagacccgtgggctccggggcccaagcaacctggtcgatgggcagacctggcagctctcctgctctgtgggctcagacccgcctgacctccctactccccggcctcaccccaccttgcccccaagaggtcccacagagcttcggacctcctggagacaaggcagggtgctgaggggcgggcaagatgtcaccgagggagaggggagggttcctcaagtgtgcggaaggcggccaccctgccccagcctgatggaaccctctgtttacacacctgctagccccttcccctccggccagcctcaggccagccaggagccccctcctgtggcctccgagcaccctcctgacacctgaggagaccctgcccaac

SEQ ID NO: 20388 - DNA, 1552 bp, Artificial sequence
  DNA replication origin
atcagtgcacggcccccgaggactccacatttcttggggggtccccaggagacgggcaaagatgatccctaggtgtgctccggtgggggggtccccaagatcttccttccaggagcacaccagggagtcaggctactcgtgggggcatgtctgctcagctaccgccatctccaatgtggccaaactccttcctcactctggctgggccaacacacagtaagtaaggtgtatcgggaatgggtggggtatggggagcatcgtggctcacgctgcgggggccgtggggacaggcgccaaggaggccagcctcacaagggcatctctgtcatggtggaaagatggaattaggcctgggacacaccccgcccaccctacgggtgtatcccaaatgccgccggccgcacactcaggccgcaccatctgagccccctcctctgagaggcagggcacagacagggccgaggggcagtggagatgggaacaggagcggggctcagaccatgaaaacattggagaatcttagcgggactttggcctgatccatacagatatcgtagttgcttagatatgcttattgttttcatccaattttgtgggggtgtgcgtgtgtgtgcgcatgtgtgtgtgcaggtgggtgcttgcgtgtgcaacgtgtgtgctgcgtgtttgtgtgctgtgagctgtgttcatgtatgtgctgcgcatgagtgtgtgtgctgtgtgtgcatgtgtgtgctgtgtgtttgtgtgtgtgctgtgttcatgtgtgctgtgcatgcgtgtgtgctgtgtgtgcatgtgtgtgctgtgtgctgtgttcatgtgtgtgctgtgtgtgcgtgtgctgtgtgcatgtgtgtgctgtgtttgtgtgtgtgctgtgtgtgctgtgttcgtgtgtgctgtgttcgcgtgtgtgtgctgtgtgtgcatgtgtgtgctgtgtctttgtgtgtgtgctgtgtgctagtgtgtgtgctgtgtgtgcatgtgtgtgcgtgtgctgtgcgtttgtgtgctgtgtgctcgtgtgtgtgctgtgtgtgcgtgtgtgctgtgcgtttgtgtgtgctgtgcgtttgtgtgtgtgctgtgtgtgcatgtgtgtgcgtgtgtgtgccgtgcgtttgtgtgctgtgtgtgcatgtgtgtgcgtgtgtgtgctgtgcgtttgtgtgtgtgctgtgtgctcatctgtgtgctgtgtgtgctgtgcgtttgtgtgtgtgctgtgctcgtgtgtgtgctgtgttcatgcgtgtgctgtgtgttgtgtgtgtgtagctgcggggatgcataaagtatgagtgctttttaggatgggaattgagatgtaagatttgggggtgagggtcgtgccaattacatttcatttgcatggattttggttttcatgctctgtcctcccctcctttggtcttactgggtccctctgactgctctgtgatttttagtgatggaaaagggagtgaggagccagtctgggttgttgctattttcggatggccagtttaccctgaaaattcccgtgagaagggagatggcggtagca

SEQ ID NO: 20389 - DNA, 923 bp, Artificial sequence
  DNA replication origin
aggtgggaaggagacccccccccccttcactgccctgtgcagagatgagccgggggtgcaggatgggagcccatggcacttcgctacgggatggtccagggctcccggttgggggtgcaggagagaagagactggctgggaggagggagagggcgggagcaaaggcgcgggggagtggtcagcagggagaggggtggggggtagggtggagcccgggctgggaggagtcggctcacacataaaagctgaggcactgaccagcctgcaaactggacattagcttctcctgtgaaagagacttccagcttcctcctcctcctcttcctcctcctcctcctgccccagcgagccttctgctgagctgtaggtaaccagggctgtggagtgaggacccccgctgccatcccactccagcctgaggcagggcagcagggggcacggcccacgcctgggcctcgggccctgcagccgccagcccgctgcctctcggacagcacccccctcccctcttttcctctgcccctgcccccacctggtctctgctccctcacctgctccttccctttctgttccttcccttcggccccctccttgcccagctcaggacttttcctgggccctcacctgctccgcaccgctgcatgcttcctgtcctgctttctgccggtcccctgacccggacctccaagttcagagtggtggggcttgttgcggaagcgcggcgagggctagagtggccagctggcggagtgtgctcttagaatttggaagggggtggcagagggggcggtgagaggactggccagggtccagtcaaggagatgaccaaggaggctttcagatcctcggcgcagctgcccactagtctttagagagggcatgcaaagttgtgcttctgtcccactgcctgctcagtcgctcac

SEQ ID NO: 20390 - DNA, 1291 bp, Artificial sequence
  DNA replication origin
ctgacctcatttcccgataccttttcccccccgaaaagtacaacatctggcccgccccagcccgaagacagcccgtcctccctggacaatcagacgaattctccccccccccccaaaaaaaagccatccccccgctctgccccgtcgcacattcggcccccgcgactcggccagagcggcgctggcagaggagtgtccggcaggagggccaacgcccgctgttcggtttgcgacacgcagcagggaggtgggcggcagcgtcgccggcttccaggtaagcggcgtgtgcgggccgggccggggccggggctggggcggcgcgggcttgcgccggacgcccggcccttcctccgcccgctcccggcccggggcctgcggggctcggcggggcggctgagcccgggggggaggaggaggaggaggaggaggacggacggctgcgggtcccgttccctgcgcggagccccgcgctcaccctggcggcggagctgggggtggggtgggggcgtcgggaagggccgagggaggtgtgaggtgtctgcaggggcgacttcccggtcggtctgtgggtgcagggggtgccgcctcacatgtgtgattcgtgccttgcgggccctggcctccggggtgctgggtaacgaggaggggcgcggagccgcagaagcccaccctggtatgttgacgcggtgccagcgagaccgcgagaggaagacgggggtgggcggggccaggatggagaggggccgagttggcaggagtcatggcagacgccacattcgcgacatctcccccacaccccctctggctctgtccgcaacatttccaaacaggagtcccgggagagggggagaggggctgctggtctgaggctaagaagggcagagccttcgacccggagagaggccgcggcccctgcccagtgggcagcgtggaagtttccatacaaggaggtgggaaggagacccccccccccttcactgccctgtgcagagatgagccgggggtgcaggatgggagcccatggcacttcgctacgggatggtccagggctcccggttgggggtgcaggagagaagagactggctgggaggagggagagggcgggagcaaaggcgcgggggagtggtcagcagggagaggggtggggggtagggtggagcccgggctgggaggagtcggctcacacataaaagctgaggcactgaccagcctgcaaactggacattagcttctcctgtgaaagagacttccagcttcctcctcctcctcttcctcctcctcctcctgcccc

SEQ ID NO: 20391 - DNA, 956 bp, Artificial sequence
  DNA replication origin
cctgcacccacagaccgaccgggaagtcgcccctgcagacacctcacacctccctcggcccttcccgacgcccccaccccacccccagctccgccgccagggtgagcgcggggctccgcgcagggaacgggacccgcagccgtccgtcctcctcctcctcctcctcctcccccccgggctcagccgccccgccgagccccgcaggccccgggccgggagcgggcggaggaagggccgggcgtccggcgcaagcccgcgccgccccagccccggccccggcccggcccgcacacgccgcttacctggaagccggcgacgctgccgcccacctccctgctgcgtgtcgcaaaccgaacagcgggcgttggccctcctgccggacactcctctgccagcgccgctctggccgagtcgcgggggccgaatgtgcgacggggcagagcggggggatggcttttttttggggggggggggagaattcgtctgattgtccagggaggacgggctgtcttcgggctggggcgggccagatgttgtacttttcgggggggaaaaggtatcgggaaatgaggtcagctgttgtatcaaggatagaggggggcagagatagtgggagagacagagtgaacgtgaaaggggggggccgaagagagggcgagggggagagaggacagcgagaggcgggcaggcgcacagcgggagagaacagcacggagagaaacagaaagcgtgtaattaatccactttggttcggcgaaggcgagagggcgggcgtgagggggggagggagtcggaggctaggagctgggggggacgggagggagcgaagggaaggttgcgggagaaagagcgggggccggggccagacgccaagaggggcgcggggagcacagagaagcggagggaagggcgccacgtcgaggggccgggggaggcggtgactggggggcggagtg

SEQ ID NO: 20392 - DNA, 795 bp, Artificial sequence
  DNA replication origin
ggcggcggtcgcaggggctggggggtgcgcgggggcgaggctgggtggggggcagggagccgcagagcgccaaggccatgctgaatgcccgttctagagaattcaggggccccatcccgggtttctggggtgcccgggcggcctgtgctcgtgagctggggtctccgggcaggcaggggcaggcgggctcccagcgccccaccaggaggctgcactgcgggtgcgccccgtctgagtgcagatgcaggtggcttggggctgagtcggggggtccttgctggttgttgcggctgagggggcccctgggctcgggcggggcgcgcagccgccacctgccccagcaggaggagccggccacgcggcgcttggagcctcagccagatcccgagcgccccccggtgccgcgccggagccccggagcccccgccaggtgcgggacgcgcggaaggccggctgcgccgggccgaatctgggccaggcttggagcctacggaggctccggccgccagaggagagaggatcagggcgggaaacacagctcaaatcctacctgcatggccgagctcaccggggtgcgtctaagtagctcgcctttgcggcccacccaaaatatctggataatggttaccccgtcctcagtgcgttggacttgcatagacgcgagttcggtctcgggggccaccacgataatttgggggtctggggaaaccatctcctggagagtttgaacgatgtaagaaagcactgtgatttttaccaagtcaaaaaccacgcacaaaatcccgcaccccgcca

SEQ ID NO: 20393 - DNA, 977 bp, Artificial sequence
  DNA replication origin
gcgccccactcgcctccgcgctgcgagcctaggcgaagccgcggccgagccgccaccgggggcaggctagtccccggcttggcttgggggcccggagcacccccggtggccacctccggcctgccccggagctttgcgcgcgccgttcgggccttcgccagcaccaaacaagggtgaaaccagttttgtttgggtaacactgaagagcagaggaagtggggaggaaaatgagaaacacggggcccgggaggaggggggtgcagggctgcacgccgctggggtgccaggggtctcttttcgttctctccaagcgaattttcagggaaagtctgtccactccggctggggaaagcccagttccttataggcaaatattaaacccgcatgcaggcgcccaacggccctgtcggcaggaacaaggtcaccccttggcgttgggcaatgtcgggcgatggggcagtggccctaaggggacctgtggggtgggtgggggtactgccagagagggggcaccgctggggaccagcagaatggtgggggatcctggggcaactacagtgggcattgcttgtccccattgtcaccccataggaggaccccggctagaaggggggcatctcaaagcctgacactggggaggcagaagttaatggccttggacaggtgtggggagctgggcaggatgaggcatctctttcacattagcttggcaagacagggagaacccgcccccaccatgaaaaacagcccattttccacccacagaacaagacacgtgggaatgtccccttcaaatttctgtctgcatcaatcacccccatgtcccattccaagaacatctggcccatctctccccacccatcactgccccccttcccaccagccttctgcagcctccccgtgtccccagctctctggcctctccggctgtgcctatagaagggggagcctccagcagagaacccctggctgtgttg

SEQ ID NO: 20394 - DNA, 1536 bp, Artificial sequence
  DNA replication origin
gccacgctgggctcctgcttccagggccgcagacccagcccagcactgcccatgctgcccttgccagggacccttacagagctagcacctgggtccctccccctggctgggcatgggctggtctcgacaacaaagaaggggtagctgtggcctcaaggtctacaacaggttgtgatctgtgggtgccaagaagtcatgggccctcagcatcctcagggccagtgagtgtccacctgggccagtgtggggctgaagggtgagagctgagaggcggggctgacatcctggctctgctgccagtggctgtgtggccttgggaaagtcacttagcatctctgggccttggtttcctcatccatcagaagggaaccaaagaaggccctgcctgcctcagctgctggatggtgtagctcagtgttgtctgtgagaggcaggcccttcggcagccgcgcctctggcttcagtacacccgtgagctgctttctgtgcccaggccttcaaatcacggggacagccccgtgggtgtggttcaggtctgggcaccacaggcaaggggaagctgacatgtcctccgtgggaagtggcagtccccatggctaccgggcatgcacagggcgtgtggaagggaccttggagggaggagcagctcctcgagggaggagcccggggctggggtacggaggcctctgcacatcttagagtaaaacaagcaggagaggctgggtgcggtggctcatgcctataatcccagcactttaggaggctgaggcgggcagatcacctgaggtcgggagttcaagaccagcctgaccaacagggagaaaccccatctttactaaaactacaaaattagctgggtgtggtggcacatgcctgtaatcccagatattcgggaggctgaggcaggagaatcgcttgaacctgggaagcagaggttgcgctgagccgagatggcaccattgcactccagcctgggcaacgagagcgaaactccgtctcaaaaaaacaaaaacaaaaaaatcaaaacaatcaaaaaaacaagcaggaggggctctgaggtgcctgcaacacccaggtacaatccgtggccctgaggcccatcacagggaaggggtctttgcagctctttcaacccccagcccagcatccaaggaagcccagggcagggagaaacctcagctgcaccatcagagctcagaacagagaaggcagaaattagcagggagtggggctggggaggcttcctggaagacgtgtctcccgccttgctggcactgaggccttgaggatgggtccatactgggcccccactgccagggatgcagatccggcccactgctgaaatctgtgctcctggagcctccctcctgttcatgggccacaggctgtgaaaaccccagagtcctcccaggcagcaagttttgttttgttttttgtttgtttgcttgtttgttttttgagagtcttgctctgtcatccaggctggagtccaatggtgcgatctcagctcactgcaacccctgccagccagcaagt

SEQ ID NO: 20395 - DNA, 1241 bp, Artificial sequence
  DNA replication origin
atggggtccccaggatcttctcccagccccgtcctcaccacccaccgagccacccatgtgtaacgggcccatgccaggaaccccgcgctctagagaggatcaggggatgcccaaggtccctccgaaactgggcagcagcgggcctggatgtgggcaggtggtggccctgtggaggccgggctggggtgggaccgagctttgaagtgaaggtggactttgaagacagaagggtgcgatttgagtcccagcgtgagcagccgcaagctggcagggccgcggggggctctggctctgttttccaaaaacacagatgggctgggaagggggtcagagagaggcctgggcggaatgtggggcccgcggcgcccccgaggttctgatgactcagcagcctgggccacacagggccacagggagcagagcctccccgaagcccacaggcctgtggacccccagggcttggcctcctcgaggccggtctccatccctggcaagggctgggctggctctgcctaggggtcacagccacccgggtttagacattctcagcccccctgggcgaggagagcctggcaggcaccacctacgttaccctcggcctgagggaccccgactctgacttagtccttgatccatgggcaccctgagatccctgctatcaacctgccttggagtggggactgtggggtgaccttttggtacagccccaagccagcttctaggggcagcctcggggacactgggaggcttggaggctgcctcagcagtccctggggtcagggagagggtctcccaacagcggcagatgggcaggaagtggggagtccaagcgaggtggggtgaggactggggccacctgggagcagaggagtgagctgaggacgcggaggagcgcgtgggaggccggcggggagcttggcgccagcacagcacggctgggccgcgagagggacgatggggtgccgcctccggccggccccactttcgaaggaatctgccttgctgttcctgcggccgaggccagaaacaatagtgggaggaagggcggagggtgcggaggcggcaccccagtgtgtcatctccgcgttcccagaccctgtctacccctgccctcaaacattctttccagagtggacctccctctcctcacggcgctggcggaggggagcgtgggaacgcactaaccctcagccgcctggaccccagctccaggccttcggtgcccccaggtcccagcccct

SEQ ID NO: 20396 - DNA, 1629 bp, Artificial sequence
  DNA replication origin
cccaagagtgtctggcagggcccccacaggccccacagcccccgggagtgcccggcaggggcaggatgcagctgctcagaccctgggtggtggccagaacctggacccgtggctggtggccggagtgcatcaaaagtgaggctctgatgccatctgctggtcgcacccgtgaatggcggctcctggccacattgctgggtgtggaaaggtgcccatcctggaaacagctacctcacagcctggctggagagagacactggccaacgttcggcccaagttctgcccagggctacctttcccagaaactcaggcttaaacactgcctgtcctggcctcagtctcttccctgggctggacccctgctgggcaccaggacccgaagggcagggggctaccctcagcaccgctgagtccacactcatccccccggggtctgctcaggcctggagagtcctggagacggaggacagtaaatatttgctgccgacaggggaaggcaaacactgccccaacggccaggcaaaggcgccagttatccatgccaggagcagacgcaatctagggggccagcctggaggcagccacaccgcagtgtgtcctgggtgggtgggagcacgtgccatgtgcctggctccaggcttcagtctctgcttaaggaatgtggtataagagtttcctccctgtgcagcatgtgtgaaggcaggacgcccagacagaaggctgtgtgcgggatggcatgcaggctgccctcggtcctccaggaatggacagaggcttctagaggggccagcaggtttggggagacttggggagcagctgccttgtgactggggagcagttagatggacccaatgccagggtgaccgccggggctggaggcagctgagtgcccctgccagcccggtgggcatgtgaaaccgaggctccaaggccaggcaggtctctggacactgaagggctgtcttttagcttcccagaaggggtggagcatgggcagcagcccagcaggcattgcagagccaagctctgtgggcctggctcacatggggtgacctgggggctccgggagcatgcacactccccgccagggcatctggggaccggcacccaaggtggtgcctgacaggagactgggtctgatgctgcctctgccacctggatcaccttggccaactgcttctcattgggcctggggggatggaggggcgatacctcgccctggctgcggtctcccgtgtccacgttttccaggacacagtatatgaggggtggggtcaaggcgctggcgaagacaggcttgggggacagagtcctgggtctcaacaaggtgaaagctagccccagctctggcccagggcagccgagggcaccgcgaaccatggctgcatctcttttgggtgggcggccttgccctctcctgaggcctcaggtcagaggtcccccaggacagaagtcacagaaaatttggcccctcaaaagacactcctcagcccccagcaccagccagtgccagctgccctgcaagtcctggaaggctggggcagctccaggagtccctggacaccaaagggctcctcctgctgccctccactccaacacacggtcccccacagagcactgaccctcccc

SEQ ID NO: 20397 - DNA, 1011 bp, Artificial sequence
  DNA replication origin
accaccttggcccatccatggcggcatcttgggccatccgggactggggacaggggtcctggggacaggggtgtggggacaggggtcctggggacaggggtctggggacaggggtcctggggacaggggtgtggggacaggggtgtggggacaggggtgtggggacaggggtcctggggacaggggtctggggacaggggtctgaggacaggggtgtggggacaggggtgtggggacaggggtgtggggacaggggtgtggggacaggggtctggggacaggggtccgggggacaggggtgtggggacaggggtgtggggacaggggtgtggggacaggggtctggggacaggggtgtggggacaggggtcctggggacaggggtgtggggataggggtgtggggacaggggtgtggggacaggggtgtggggacaggggtctggggacagcagcgcaaagagccccgccctgcagcctccagctctcctggtctaatgtggaaagtggcccaggtgagggctttgctctcctggagacatttgcccccagctgtgagcagggacaggtctggccaccgggcccctggttaagactctaatgacccgctggtcctgaggaagaggtgctgacgaccaaggagatcttcccacagacccagcaccagggaaatggtccggaaattgcagcctcagcccccagccatctgccgacccccccaccccaggccctaatgggccaggcggcaggggttgagaggtaggggagatgggctctgagactataaagccagcgggggcccagcagccctcagccctccaggacaggctgcatcagaagaggccatcaagcaggtctgttccaagggcctttgcgtcaggtgggctcaggattccagggtggctggaccccaggccccagctctgcagcagggaggacgtggctgggctcgtgaagcatgtgggggtgagcccaggggccccaaggcagggcacctggccttcagcctgcc

SEQ ID NO: 20398 - DNA, 2434 bp, Artificial sequence
  DNA replication origin
gtctgaaatccagcccccatcctgcctcgctggggagacaggcccagaccatctgcctgggcaccagctcagccagaccctccccatcagcacacatgctgggggccacactgaggttccccttggttcgcagggcctgctccgggtgggtgagggcatcagggcagctgttcctccatccctgtttctctcaagggctgggagccctgtcagcagggagggttaggcctgcaggcccacctctgagaccacccccagccagcacagtttgtgacccctgctccctgccaggcctgagagaggccctcccactgtcacgtggctccccaccttgggagggcaccccacggagatggggcagctcggccagggtgcccgagcctctggagctgcttggggctcagagctgggcggggcctcagggtgagcggggaaaccaggcccggaggggccagctgcctggccagggcggccagccatctcccagaggaggaaggaggccagggcgaaacctctgagtgaggctggggtgggggtgtgggagtctgaggatcccagggtctgtctctgtggcacagatgtggggccaggcaggtgtagagaccacagtttcttttattgtgacggtgattggggcagcagacagtgtcagggaagggcggagggcagtgcagcagcccccaggaccctgggagccaggacaggacctcaccacaggcagcacaacctcaccacgggcacacacagctgttgcgctgagaagcaggtgcaggggcagtgggagcctggcagcagggagggcatggggggcacccgggacccagcccctcaccagggcctgagctccgggacagtgcaggaccaggggaggttgggaagggccctcagggacgccgtgcacctagccaatggcactcagcgcatgggcaagggtgtccagctcatcctggacaccctccagggagcgccgcacggcctgggggctgtccagcacgtcgatggccagcgtgtacgggtcgaacttcacggagaaggggcgctggatgcgtgaggcatagctcctggggaggagagcggcagagccctcgtcaactggcgggcagagtctgcagcctccaggagaggggaggccaggggccgcgtttccaccttcacagtggctcagagctcccagggcttttctgagccaactggtcacaggcgggacactgaggcctcttccagggctgggtgagggggttcatgggggagataggctaggcgccttttccactagagactgccgggcaccccatccctccctgaacctccactgggcctcctccaggaagctttccttgaccatatccctaagcctgtgggtggaattcagcacccctgtccgctggacacatagcccctggcctcagtttccccagtgcataagaggctggagggaaaatgatgagaccttttatgaggatgaggctagagggctttgctcccctctcctgacactctggtcactgcaccaaaggcccccagccctggggaccccactcccgccctgtcccccaccttgactctgtctatccccctgacttctccccatcccagggcagggggccgggacaggttccacaggacgtcctcacaaagctcaggctctgtcagcacctccaagactggccttgacccggccacccagcagcccccagtcctgtaggtctgcccctccccagacgctggggtccttctcacggatggtgtccctgctgtgtgggggctgctgcaaccaggggtcggttttctcatctgtgacctgggctcacaggtccagccctgctcaaggccagaaggaaggcctggctggcccagtttgggggcaccatggggggcttgccctagcagcctagcccacctgagcttgtccttggcgtcactgaagctctcagacacgaagtagactgactggtacgtctggtcttggtagggctgcacggccgcagcctcagggtcgaaggcccgaatctcaggctcctcagacaggcagtgctggcaggaggccaatggcatcactgactccactgcacccaggtccccgagggaactggggcaccgtggcctgacgctgggtgggttccttgggtagagtcacccccatctcccccgccgggccttcggaggcctgggataatgtggggtgaggactgggcagagacaagccttctcccaaacagagcctgagtcctggaggtccaggcctcagtttcctcccactgggagcctgtcccctccctgcaccgtcccccagccctgcccctctgctgggggctgcagcaaggagagactctcaccaggagctccccgtaggaggacagcagcccggcaccataggccttcacctccccgttctgcttacacagcccgaactccaccgtgaaccagtacagct

SEQ ID NO: 20399 - DNA, 2132 bp, Artificial sequence
  DNA replication origin
tccttggcggggcccgggagcaggcagcacacttcacccacccgcacatcgatccccgcccgcccccggcgccaagccagcccctgggtgaccccggctccctccgaggccgcggcgtacctgcgagaactgcgcgaaggtgcggtcggccagcatgggcacgtgccccagcagctcgtggcagcagtccctgcgcgtaggagggagaagggggctgaggggccgcccgtcgcaccccccaccctcgggctggcggccagggcgcgcactcacggctcaggggagtgcatgggcgaggacgcgtggcggatatactgggtgcactggaacacgcggaaggccaggctggccaggaagtcccgggcggacagcaggccggccacaggccgcagctggaagcccgtgcgctctgcaaggggccacgcgggtcactgccgagccgggacgggctggagccgcgctggggtggggcgcttggctgaccatccccggccccccggctctgcgcccctcccgtctgggcacacccttcaggaagcgggagacgtcctccagctgggggatattgtcttcccggtagccgctgaagcgctccagcaaagcaaaggcctccaggtgctccccgcaggcgtgcgtggcgtagaggcccttcagcgtggtgtagacctccttcctgcgggcagccaggctcagggccctctaatgccccaccccagtgcccgaaacccccctcctgaactgtgggtgcctctgcctgcctgagcccctaccaacgcaggcctcttggggacccctgaagacccaggcccccgggaggggcttttgctggtggctttagggaatcccaggggatagggggccatgaggggcggtccctcagcacactggggatggcccgacaggatgggtagcctcttcctcccaacccaacattctgagccctgcaagtccctcttcttcccggccttagtctctcctgttgtgccaaggtccctggaggcggccctcacacgccaggattccaggaggcatcccccgggctcctccccagcccctagctgcacggaggtctcaccaggtggcaatctcctcggcggtgtactccacacggggaatcgggtcgccgctggggagggggccagtggtcagcaggtcccctcggggagtgagaagggcaggagggagggagggagcttcactgggcacaggtccacacccgcctagtgcagcgaggcctttgggttggaggatggacaggagggtgcaccccagctgactgtgccgtgagccggctatgtggcctcggcaggttgctctagcccccctgggcctcagtttccccactgggatttggggacatggaaagccctggagcagagctgcctggcaggaggcactgatgctggtgacaagatgggtcctcccctttgtccttccctcccaccccccaggtccagcgtcagcctgcaggacggagtctgggtcccgagcgcaggggcccctcactgcctgtactggaaggcgatctcagcaatcagcttcctgcgctggcggtacacctggtccgagaagccctgagggcagaggggatgcacgggtcaggaggctgtgctggggtgggggcacaggccacggaggctcctggagccgacagactcctgtccagggttgggctaagggtaggggatgtgatcaggggcaggaggcctgagtgaggggcgcaccactcaccgggtggtccaagtccaggtcagggtcgaacttggtgaccaggtgatgacacttgtccagctctgacacttttcttgggaaccaggggactttatgggtgatggaggaagagatcttggtgagctcggagccgtggggctgtgtcacccaccttgaagcagcctcccctacaagacttccggggggcagaggcagccggggctgtgagagctgcggggggatcctggagtggccccaggcccggacacggatgtgtagcaaaacggggtgcggagtggagcccgcagagagggaaccaggccaccaccacgtggtcactgtagggtccccctgcaggagcccctgcaccccagcctctcaaggtcatttggtggccctcaaggacagaaaaccgcctcacc

SEQ ID NO: 20400 - DNA, 1188 bp, Artificial sequence
  DNA replication origin
cctccccggcagccgatgccactgtccatcaagacatcgccctcttcccatcactaatccagttagcgcctggcctggggatgagtgacacagcgtctctgtctgtctgctcgccacagagtggggagcaggcgagcaccttcccagcccccactcctcccccaccaccactgcttctgactgggctgcccccatcgggaagggcgtgcaatgcccgcaggcacctcggctagcatctgccccagcaggcacacagtaggcgctcaaaaacgtgctctcatcccctgcctctgtgtgccatcagcgctgcccgactgtgggaccagctgtgggtggaggtccccgggtctcagcaggtggaggaggcatgggtgccccttgtccccacagtccccgcggttcattgggcgcaggcagagcctcatcgaggacgcccgcaaggagcgggaggcggcggtggcagcagcggccgctgcagtcccctcggagcccggggaccccctggaggctgtggcctttgaggagaaggaggggaaggccgtgctaaacctgctcttctccccgagggccaccaagccctcggcgctgtcccgagctgtgaaggtgtttgaggtgagctggtggccttcgtgtccctggggcaagttcacctgtgggtggggctgtgtgggctgagttcctgacccctctatagcagaggtgcagctgcccaggcccccgaggccggcacaggatgcagcaggggagtctcaggcctcagctcagcccccatggcatctagccacacccccgtgtttttgagggatcctgagcccacccctagggctgaggctaccaagccccactgtgcctcttgccttgcccatcccctggatccccctcacccaccatttcccacgtggggggctcccagcagggcagcacaagaggcaggggcagggcagtgtgccctctcccacccacccagcacagtggctcaggtgaccactgattgcattagtcactccggccccactgtgccccgggaggcaggtgacccagctcccggaagaagctcccaaatgacattaaagccagactccccgccccccagctcccagagccagttttgtggcccgagggccactgcgacccaccgcccttgttgctaggcaacaggaggtgggggtggagcggacccttctggcc

SEQ ID NO: 20401 - DNA, 1316 bp, Artificial sequence
  DNA replication origin
gagccccccacgtgggaaatggtgggtgagggggatccaggggatgggcaaggcaagaggcacagtggggcttggtagcctcagccctaggggtgggctcaggatccctcaaaaacacgggggtgtggctagatgccatgggggctgagctgaggcctgagactcccctgctgcatcctgtgccggcctcgggggcctgggcagctgcacctctgctatagaggggtcaggaactcagcccacacagccccacccacaggtgaacttgccccagggacacgaaggccaccagctcacctcaaacaccttcacagctcgggacagcgccgagggcttggtggccctcggggagaagagcaggtttagcacggccttcccctccttctcctcaaaggccacagcctccagggggtccccgggctccgaggggactgcagcggccgctgctgccaccgccgcctcccgctccttgcgggcgtcctcgatgaggctctgcctgcgcccaatgaaccgcggggactgtggggacaaggggcacccatgcctcctccacctgctgagacccggggacctccacccacagctggtcccacagtcgggcagcgctgatggcacacagaggcaggggatgagagcacgtttttgagcgcctactgtgtgcctgctggggcagatgctagccgaggtgcctgcgggcattgcacgcccttcccgatgggggcagcccagtcagaagcagtggtggtgggggaggagtgggggctgggaaggtgctcgcctgctccccactctgtggcgagcagacagacagagacgctgtgtcactcatccccaggccaggcgctaactggattagtgatgggaagagggcgatgtcttgatggacagtggcatcggctgccggggagggaacggcagctcaggaaggagctgcccccacagggccccagtgaacaacccccctaccctcctggctgccgcacaggggaccctttctcacactcccatcaggacacctgtcctcgggccctgcccctctgtgccaccccgcaggcgcccgctcctggctgccttgtcatccctccaccctttgtcatagctctgggcgcaggtgtctctccctgggctcagcgcctctgacccctcgatcccagagccgtcccaggcctggacagagggggacttggcagacacctggggctcatcccttggagctgaactcccaagaaggctctgggccccttgtaagagaagaatcagcttcatcctgagcttccagggttgtggaacatgaaggggagcagcagaagcccctc

SEQ ID NO: 20402 - DNA, 1261 bp, Artificial sequence
  DNA replication origin
gttcccatcgggcttccatgaaagcacaactggcccggcaggaaaccgaattaaaaagcaatatttgtatcagtggaagacatttgctgaaaggttaaatccacatccggcagtgtgggccatgagcctccggcgtggtgttcatcaggcatgtctctcctcctggcctgggcacctgagcactggggccgccctgggcagagctggggcggggtgctggggggcctggagctgcctcaccgagggatcctcagcagccgaccctgggggaggcaaatgagactctttctggggaccttgaggggagctcgggggagccatgcagagcttcaccaggcctggacactgggcatggaggctgggccacccaagggccatcaccagggactcaggtgggtgggcctcagccctgggtgacagaagctcacgggccgcagggcgaggccagaggctgagccttcaggctgaggtcttggaggcaaatccctccaacgcccttctgagcaggcacccagacctactgtgggcaggacccacaggaggtggaggcctttggggaacactgtggaggggcatagcatctccgagagaggacagggtctgcactgggtgctgagagacagcaggggccgagcggtaggcttccctgcccccagggatgttccagaggagcgcaagggaggggcattaatatcgtggcaagaaagggcaggcattgcagagtgagcagcgacggaactgggttttgtgggatgcataggagttcacccggataagaggtgggtgaggaatgacactgcaaaccggggatcacggagccccaaatccttctgggccaggaagtgggaagggttggggggtcttccctttgctttgactgagcactcagcctgcctgcagagggcagcgaggagccacggaggggtgtgggacagggatgccatggctgaagcagttttaggaaaggtcccaggggctattgttgaagagagaacggggagcggggagtcccacagctgacaggagcagagtgggccctgagagatgccagctctggctgccacagtgaccagccggggtaggccttcgagaagtcagggagcgtctagggcttctggctcctgctgggcccagggtgtcatcttgggctgccaacaccagaaagcccagcagatacaggaagccccaagccctgtcggaaacggttcttctccaggagggacagcggtggcagcgttcagccgcaggccatgcactctgg

SEQ ID NO: 20403 - DNA, 1813 bp, Artificial sequence
  DNA replication origin
ctgatttctccacattctcgtgagcacttgctattttgtgttctgcattgtttgggtttgttgacggtggccaccctaacgggtgtggaatcctgtcgcgccgtgattttgattggcattgccctaatgattcgtggcattgagcacctttccctgcggctgctgtcctggatacaccttccctggagaggcgcccgtctacgtccttcgcccacttttgaatctggtgtttggcggttgtgttttaggggttctctgtgggttccgggtactactccccgatcaggtgtgtgatttgcggcattttctcctgttctgggagttgcctttttacggttgatgatgtcctctgatgcacaaagttgtttgtttgtttgtttgtttgttttaattttcaagcccaatttatctctttgttgcttgcacctttggtgtcacatctgggaaatcactgccaggtgtgaggccatgaagcttttgccctgtgtgttctctctaccgtctcaggccctacgtccaggccgttgacctgtttgggggtaatttttggatgggaagggagggttccagcgtcacacttctgcatgtgggcatcccggtttcccagccccgtctgtggaggaggctgtcctttccccactgaatggccttggcacctgtgccaaagatcacgggactgcatttgccagggggattgccagtctctcctctacgtatttgtgaatagggatctatacacattccacgaacacacaacagggccacgggacagccctgtgccaggttcctacctccccgcccagaggctgtgtggatagagcacacgtgtgtgggtatggcatgtgtagtatgtggtgtgttcatgtgtgtgacatgtggagttgtgtggggtgagtgtgctgtgtgtatgatgtgtgtttgtgatgtgtgtggtatatggtgtgtgtggtatgtgtggagtgtgtggggtgtgtgtggttgtgtgtgtggtgtgtagcgtgtggtgtgtatgtgtgtggtgtgtatgtaggtaagtgtgttgtgtgtgcggtgtgtattgtgtgtagtgtatgtggtgtgtggtgtgtgtggtgtgtgtgtatgattggtgtagtttgtgtggcatgtgtgtggcgtgtatgtaggtgtgtgtgttgtgtggtgtgtgtggtgtgtatgtgtggtgtgtgtgtagtgtctggtgtgtgtgtggtgtgtggtttatgtgtgttgcatgtggcatgtggtttgtgtctatgtggtatgtatgtaggcgtgtgtggtatgtgcggtgtgtgtggtttgtgtgtgttgtgtgtggcgtgtagcttgtgtgtatgtggggcatggtatgtatgtaggtgtgtgtggtgtttgtgtgtggtgtgtgtatggtgtgtgtggcatgtagcttgtgtgtatgtggtgtgtggtgtgtgtgtgtggtgtgtatgtggcatgtggtgtttgtgtgtgtggtgtgcatgtgcgtatgtgtgcgtatgtggcgtgtggtgtttgtgtgtatggtgtgtatatgtgtggtttgtgtgtggtgtgtttgtatgtgatgtggtgtggtgtgtgtggtgtgcatgtgtgtggtgtgtatgtggtgtgtgtggtttgtgtgtgttgtatgtggcgtgtggtgtgtgtatggtgtggtgtgcatctgtgtgtgtgtgtggtgtgtggtgtgtggtgtgtatgtggtgtgtggtgtgtttgtgtgtgtgtgtgtctgtgtgtgtgcacgcacttagatatcttgtgttcgcagcttgtcatggagagcagtcagtccctggct

SEQ ID NO: 20404 - DNA, 1634 bp, Artificial sequence
  DNA replication origin
atgcgacgtgcctgtagagaaagtgtgtctgggggccccacgtcctcaggcctggcgcccattgacccccgttaagcccaagccccatggctagattgtaggcgggactgagttgcttcggagacctctgcactcgactgtgggagtcttatgggggcctcctgggacgtgagcaacccctgccctgcctggcagtgtcagcacctcgggcggcccacgcctggccccgccacccttcccctgccccactcctgtggcagtcacggttgagccgcacctcctgcggtcctgtccctccctcggggtcctggggaccagcctggttccctgagagcaatctgatggagaccccctgagtcccaccccagctcccctttcctgaccccttcccagcccctctcctccttgaggaaccagcaccctcctcctgcagcccggccacctggacatgggacgagggccccaccgtgtggccacctggacaccctgcagggcggctcctcggcctgacttctgccttcagcacccagggctcctcctcctctccgactgtacatgtgagatgggagacagagacacggggacggggacacagagacagggagacagagatgcagagagatggaggcggggagacagagacgcagagagacagagacagagagacagggagacagagacacagagagacagagatgaggagacagaggcgcagagacagggacacagagatggggagacagagatgcagagagacagaagagagatggaggtggggagacagagatgcagagatggagacagagacagggagacagagacacagagagacaaagacagggagacagagacacagagagacagagagatggagaaggggagacagagacatagagatgaagacagagatgaggagacagagacacagagacaaggacacagagatggggagacagagatgcagagagacagaagagagatggaggcggggagacagagacacagagatggagacagagagacagaaacagagagacagggagacagagacacagagagacagagggatggagacggggagacagagacgcggagacgaagacagagatgaggagacagagacgcagggagacagaagagagatggaggcggggagacagagatgcagagatggagacagagacggggagacagagacacagggagacaaagacagagagacagggagacagagggaaggagacggggagacagaggcacagagatgaagacagagacaagcagacggagatgcagagacagggacacagacacggggagatagacagacagaaacagagagacgggggaacagagacgcagagacagggagacacagatggggagacagagatgcagaaatggagaaagagatggagatacaaagacagaattagagagagacagagatgggaagagaaacagagacagagacagaagcagagaaatagagacgcaaagatagagacagatggggaagagacagatagagatggagacagacagacagagacacagatagagatagacagagatggggagagaggcaggtagagacagaggcaaacagagaaacagagactgatgaggccaca

SEQ ID NO: 20405 - DNA, 1152 bp, Artificial sequence
  DNA replication origin
cagttgtattcccagccagtagccaggcctagcgctagttaaaggagggatgctggccctgtggaggcgagaggcccagcaccaggtggcctcgtcttgctgtccaccagaactgggacgacatggggctgggctggcctgtgaatgaccacatggcaggcccagctcctagttctgtggagcaggggccacgaccccttccctgccagtggctgtgaggacaggatcctggagggggaagggatgcacccgacatccctggggtgggttttgaggaggagccctcctgatcccaggtgaagatactggccaggcctggtccctggacagcccctagaaaggtgccgcctgccaggtctctgggtccttgaggtgggctcaaggccacctcagcagacgactcatgccatgtccccaccccgacgtgcatgccaagtccagtgactgtggggactccaggggcccccactggccccctcctctgtcccctgagctgggctttgccctgggagaaaggaagcagcgaggtcctgagtgggatggcacagggcacgtggggtgtgggtgatggaggacgttgagctgggtggggaggggtggggcatgtgtgcggcctggccatgtggatcctcccaggggagctgaagcccaggggccaagatgccccggcagttggtgcctggttagggagctggggttgcggaccggcccccgtttgtcacttgctggcctctcccctgctaccctgcaggctgggctgtggtgccacacggtggtctctttctgggctggggtgtgattctttcctttctcctgtggtgtaagagtgcacagctgtgcaggaggccgccgagggcgtgtgtgtgactgtgtgtgctgcgcgtagggccgtgtgtgctggcatctgcgcacgcgtgtttgcagggcccgcaagtgtgtgtgtgcatgtgtggtgtgtggcatgcgacgtgcctgtagagaaagtgtgtctgggggccccacgtcctcaggcctggcgcccattgacccccgttaagcccaagccccatggctagattgtaggcgggactgagttgcttcggagacctctgcactcgactgtgggagtcttatgggggcctcctgggacgtgagcaacccctgccctgcctg

SEQ ID NO: 20406 - DNA, 943 bp, Artificial sequence
  DNA replication origin
ggggtctcttcttataaggatactcactgtatggggtcagagcccacacttgtgccctcatttagccttgactacctccaccaaggccacacctacgccctttacagaacccccacgatgggccacggtcctgttggatcctcaccctcttcccacaaagcagacactcccagacttcaccaaggagacacggaggctgcagaggtggacgcatgggcaaggccatcagctggggaaggactgccctggcgtctgggcttgttgcctgcctcctggccccagacagcctattccaacagcccttcctcccagccgcccacccacatctgtccaccttcccgggggtgtcctgtcatctgccagttccttttttcaccctcgagcagcccccacaagagaggacggggaccacccaactgcagaacaaacctggactcagagtcgaccaacaaccaaaggtcaattctctatgaaggtgaaaaagagatattttcaaagcaactgaattaataaaacagtccaactgctttaggaagatttattcatgaaagaacttctgggacccctcccatatgattatgggcacactgagacatgtactctctggaccccaaaagctcttaagctaataagagataagttgtgatttaacccatgcccatctgctcataaaagtggtgagagttaatggatagatggatgaatagatacataaatgtgtagataggtgcctaaagatagatgcacagacagatcaaaggatgacgggaggaagagagggagagatgggtaaagggatgaatgaatggatggcaaaatggatggatggataagtggatgggtggatggatggatggatggatggatggatgaggtggatggatggatggatagatggatggatggatggatggatggatggatggatggatggatgaggtgg

SEQ ID NO: 20407 - DNA, 1793 bp, Artificial sequence
  DNA replication origin
gaaactctgtctcacaaaaaaaaaaaaaaaaaaaaaaaaagaaatggaacttaaacaaggaaatagtgttttccttgttttgtttcttgcttattgaaagcaccttgcctgatgggttgagggagggattttcataaatcactgttgtatacacacgtagagagaaaataccagcaagtaagggttactgtccccacatttgagtccacttcctccgggtcaattttgtctagagtcattgcaccgaggctgtccctcatacactcttcctttgggccatgtacagggctgggggacacccgttccccaagaggggcctccacgattgacccgggaacttttgcttgctctgccggtatctagatcttaccagcaggtgccagcaaatgatctctggacggcgccccagactcactgtccttccctagatgggcccttgaggcttgggatggaagtgtagaggggtcactgccaggtgatacagtcaggttcatccgtgttgagctggggccaccatgtcatgaacctggctgttggcagcattcacatgaaacctgctttcagagacaataagtgtaaacaaatgtcttaggatcagtgcattgtgtcccggataagccccttctcccaatgtccctccacaacactcacacgaggaaaggaggctgggaggtggggaggctgggaggtggggaggctgacaggctgggaggtggggaggctgagaggtagggaggtggggaggctggaaggtaggggcgtggggaggctgggaggtagggaggtgaggaggctgggaggtagggaggctgggaagtagggagatggggaggctgggaggtagggaggtaaggaggctgggaggcagggaggctgggaagtagggagatggggaggctgggaggtagggaggtggggaggctgaaaggtggcaggctgggaagtgaggatgctgggaggtggggaggctgagaggtagggaggtgaggaggctgggaggtagggagactgagaggtagggaggtggggaggctgggaggtaaggaggcagggaggctgggaagtagggaggtggggaggctgggaggtggggaggctgagaggtagggaggtggggaggctgggaggtggggaggctgagaggtagggaggtggggaggcttggaggtagaaaggtgggcaggctgggaggtggggaggctgggagttggggaggttggaaggcagaggggctaggaagtggggaggctggaagactgggctgttgggaggtagggaggctggaggctgggcagtagggaggtggagaggctgggaggtggggaggctgagaggtggggaggtggggaggcttggaggtagaaggtgggcaggctgggaggtggggagcctgggaggtggggaggctggaaggctgggaagtagggaggttggaaggcagaggggctgggaagtggggaggctggaaggctgggctgctgggaggtagggaggctggaggctgggagggagggaggtggggaggctggaggctgggagggagggaggtggggaggatggctggctgggatgtgaggaggtgtggaggctgagccttggcagaatgtgggcttttttcagcgaatcactagcccctgaagacagcccaggtcaggtgcagcaccgccccagaggccaattagtgatttgtcaccctctgccttggggaacaaggctgccaggagtcctgcccccagccacagcatccagctatgctccctgccctctggcaggaggtagggaaacctctgctt

SEQ ID NO: 20408 - DNA, 1380 bp, Artificial sequence
  DNA replication origin
aagggccaggcggagcagaggctggtatagggacccagtgggcacagggcatgaggacccagtgaggcgctggcagcatgctgcaggctggacagctccaggcacctttctcattaccacgtgtcctcctcgcaccgggcattgtgaagcttccaaggctgggtccacagggcgttggaacagggggagcccacagagagcctgccaggcatgggggctgtcctgggaagctgctctggccccaagaggtgccttgggaaggcttggcctggccacagtcctgcagcaccccctgggcatgggacgggggtgcccagctcagccaggctcagaggtcctggccccctacagcaggcagcgggcagcatccacacctgtaggtctccttgtcccagcaggtgggactccaggcacactcgctgcagcagcggtgtctgtctgagcctgccggcctgggtgggcaccgctgaggacgttttttgggcgttggtgccagggtgtcggtgctgggcgttggtagtggtgtccctgtgggcaggcagctgtgctgggagggcgggtgttgctgggtgcccatgggtgtggctgtggctgtgggtacgtgtggctgtgagaggatgggcacgtctctgcgtgcctgtgtgtgcccctgttttgtgtgtctgtgtgtgcccatacgtctctgtgcacctgcatgtgtctgagcatacctgtgtgtgtccgtgtgtggctgtgcgtccctgttgtttgtgcatgatggtgtgtatttgtgtttatctgtgtgtggctctgtgtgtctgtgttttgtctgttcatgtctgtgtggctatgtgtactgtgtgtggctgtgtgtatttgtgtttatctgggtatggctatgtgtgcccatgtgtggctgtgtgtgtctgtgtgtacctttgtgtgcccatgtgtggctgtgtgtgctgtgcatggctgtgtatatttgtgtttatctgtgtgtggctgtgcaagtctctgtgtgtctgtgtgtctgtgtgtgtctgtgtggctgtgtgtctgtgcgtgtccgtgtgtgtctttgtggctgtgtgtctgtgtgtgtctttgtggctgtgtggctgtgtgtgctgtgcatagctgtgtgtgtttgtgtttatctgtgtgtggctgtgcatgtctgtgcgtgtctgtgtgtgtgccttgcgtgtttgtgtgtgtacctgtgtgtgcctggtgccctccaggagaaagggggcagggagcccattgcaaggatgggcggtgtacgacctgtctccctgaggatttctgagggtgtgagggtggggtagccacaagtgtgtctatgccgggctccctgctgtttagagggtggggtgataggcagctgagaaagga

SEQ ID NO: 20409 - DNA, 1466 bp, Artificial sequence
  DNA replication origin
ggcacacctcttcaagggagcgtgaactttataaataaatcagttctgtttaccagtggctcctatcacctacacttcccaggtgacggccagacttccgtggtcactactcctcaaaccctgctgcctcctccgtagggtgggtctgggtgagatctggagtgcagccaggccgttgatagcggagccattgggacaccttgtgaggctgggggcatcctccaggaggtggtgggctggtgggttgtccagacagggctactcgctggcttggaagctgcaggctggaggctgctgacccatcccgagggctggggtaagtgctgggtgtggggctaggctgaggtggtctgaccagagagcaccggctgtggggctgagggcatgggctcctgcgcaggccaccacgctcagatctccactaacgtggcagctgggcagcccagggcaagtgggttaacttgcaaatgggtttgaccagacccacctcaacggcctctgggaggagttagtgagaggtgcctggaggctgccctctcgctagctttgggttttgcccgcactggggaggccctgcaggtctccgctcacctgaattctaagagcggctcttgaaaggaacaaggaaggcttggaagctttgcgccaggctccccgcagccggagagctggcactgggatattacacggctatacctttgactcagggcctaggaggctttgatgtctcactgtaccgaaagctgccttttagtgtcctggtgggggaggggttgtggggctcccccggtttctttagggcgcagaggcaccccttccttcagaaaggagtggttgggacagagccgtgggagccctgcgaggtgggagcagctggtgttgtcccagagtgggtggctcctgaataaccacggcaacaggacacccaggctaccgggatgcctgggtctcaaacgtcaggctggccaggtcccttcttatcagaggagctcagggctcctctctcgccagctgcagcctcagtccaggtgggggctcctcagcagccaaggtcaaagccgagtctgtagcgggggtcaaaggggtcagctggtctgatgaggaccaggctcaactggggtcagtggaccagctgtggcttggggctgcagggctcagggaactggccttggccaagggacaggagggggcacattgccgtggtcacccagggagggacatcccacaggcttctcccagaatccacacccgggtcggtggcctccctgagccctccccaggactccacaccttgacctcaaggaaaggcccacagctgccaggaccacagggggctgttgggtgggtgaagagggtaggggggaaacgatggaaggccagggcagaggaaacgactgccacccactggcgtgaagcggacaaaactctgcagagggtaagtagtgctgccatttttgttttcccat

SEQ ID NO: 20410 - DNA, 1247 bp, Artificial sequence
  DNA replication origin
ctcccgggccggggcggcagaaatgagtcggcgggcgcggagccctgactcaccgcggctccgagcgcccgccccgcccccgccgtgtctcagaccgagtcgcggcacccacggactcaagactccaaaaccaaccgagcaaacgaaactgccgacttcgcttgggggaggtgcgggcagggccggcccgggcggggtctgccccgggcccgcgcccgcgttgacgcgcgtttggttccccaccttccccccgcagcctcagccccggaagccgagcgagcggccggcgcgctcatcgccggggagcccgccaggtggaccggcccgcgctccgcccccagcgagccggggacccacccaccaccccccgcaccgccgacgccgcctcgttcgtccggcccagcctgaccaatgccgcggtggaaacgggcttggagctggccccataagggctggcggcttcctccgacgccgcccctccccacagcttctcgactgcagtggggcggggggcaccaacacttggagatttttccggaggggagaggattttctaagggcacagagaatccattttctacacattaacttgagctgctggagggacactgctggcaaacggagacctatttttgtacaaagaacccttgacctggggcgtaataaagatgacctggacccctgcccccactatctggagttttccatgctggccaagatctggacacgagcagtccctgaggggcggggtccctggcgtgaggcccccgtgacagcccaccctggggtgggtttgtgggcactgctgctctgctagggagaagcctgtgtggggcacacctcttcaagggagcgtgaactttataaataaatcagttctgtttaccagtggctcctatcacctacacttcccaggtgacggccagacttccgtggtcactactcctcaaaccctgctgcctcctccgtagggtgggtctgggtgagatctggagtgcagccaggccgttgatagcggagccattgggacaccttgtgaggctgggggcatcctccaggaggtggtgggctggtgggttgtccagacagggctactcgctggcttggaagctgcaggctggaggctgctgacccatcccgagggctggggtaagtgctgggtgtggggctaggctgaggtggtctgaccagagagcaccggctgtggggctgagggcatgggctcctgcgcaggccaccacgctcag

SEQ ID NO: 20411 - DNA, 939 bp, Artificial sequence
  DNA replication origin
gggaaggcgccccgggaacctgaacctcccaccccgcctcagtctcgaccactccttaagccccaccccgccccaggtaaggcgcagtccacccccattcccagtagattaacgcacaggtgggggcgcgctcgggacatagctgcgctaggggacagcgcgcccagcccagtcgcgggggcgaggagcagggcggggcccagcaggaacccagctttgttagcgatgctccccgtgagccacgcgccacgcgtacgcgcttcctcaatggggccgggcgtggagccgcgccctgcgcgattggccaaacgggtggcccacgattggctgagaccctggcccccgcctcctcggccccaggagggtggggcgtgggtgtgggctgcgcggcgcgtgctgcccccggggatcttgcgcgcctcccgaacagccgtgttgtcgccagggccgcgccttccctcccacagcgcgcgctgcgcgtgcgaaggtctggcggctcttgggactggcggggctgcgcgcggggttagggtgggggtacgggaaggctcaacccaggacctgcgtaccttgctttgggggcgcactaagcacctgccgggagcagggggcgcaccgggaactcgcagatttcgccagttgggcgcactggggatctgtggactgcgtccgggggatgggctagggggacatgcgcacgctttgggccttacagaatgtgatcgcgcgagggggagggcgaagcgtggcgggagggcgaggcgaaggaaggagggcgtgagaaaggcgacggcggcggcgcggaggagggttatctatacatttaaaaaccagccgcctgcgccgcgcctgcggagacctgggagagtccggccgcacgcgcgggacacgagcgtcccacgctccctggcgcgtacggcctgccaccactaggcctcc

SEQ ID NO: 20412 - DNA, 1989 bp, Artificial sequence
  DNA replication origin
gatagtgtggagactcaccagtccaggagacagcatgcttccgaattaaggggggtgctgcagtgtcaaatgctgcacagccggaggcacccaggaatgaaggaggggccgaggcagggagagacacaggtccctagggaattatttttaagctaggctttgggggcagacggggtttccacagcggtgggaggaccagattgggaagaggatgaagatagagagaggtgttggtggtggggggggactggcctggacatggcacagcagacgcaggtgggtgcaggactgtgcctgagggcagggtagcaagaagccatgcctgggcagtgagaggcttcagtttttagacaggaagttctggggtgatctgaagagggcttgcaggtcctgctccggagatcttaccagctgtggaggggcttggacgaagaccgggtagagagcaacccagccgctgtaccgctcgtccctgttgacccccggggtgtatgcagccacacccagagcagcagagggcccacccatcaagtcacagaatcctgagaaataatacatcgttgttcagaccgctaaaatcctggtggctccttacacagcaacagatgaccgaggggctcccagcccgggaggtggaaatccagcagggatttccaaggcctagtttgcagggctccaggatcgttcctagatcctggtcttgcagccttgacaaggggaaggagggaggcagcagaaggagggcagaacaatccatgccaggctgtgatttgccaagtgaccatctgggaagaatgggctctcagaccagggacagggagcagaggcaagcccgcatctgccctggttgcagaacccggattcagactcagggccccgatttctgcctggatcgctccactgggcggaggagtgactgtggacacatccagggttctctccaagtcggcttcctcatctgccaaatagagaccgcagaccaccagctcccaggcaggtgctactcttccggcccctcccaaggcaggagggccaggcgtactcgagacacaggtgtgctgggggcccaggtgggccagccagcagcatcctgcagggtaatgggagcaggtgggcaccccgaggctggcagtaaacactggctatctgcccccaggctcccaggaggggtcttgggcctcacctcctccggccggaacaggaaagcagctccaggcagctgggtccacaaaaatctccgttccctgaggtctcagaggcagtggcccaggagcatctggtcaccttcgggaaaaaccggcttggcaaaggctcccccgagggcacgcgtttcccggacagtgaggcaggacctaaactcttccgttaacactacatttttcgcatttctgcagtgtttgcactctcaggccccaccatttccccgcatctcttagggagaagttctcgacgtcccacctcccctggaagggtgctgctcccagagaccttcaggccaatggcccaatctcagtgccctcaggggagaggggggtgcagaaaaacagcctgggtcacaaaagaggtgcgagggctgtgagatcccggaggcaccgacgggaagcgagacggagaacaggagggcaggacgggctggaggtgggggatactgcagatggagggagccacggtgggggagggcgtggacctgaccgtcctggcacaaggcggtcgggtgcagacctccaggccctccgggttaaggtgccgcccagagccctcaggccgggggcgcacggaaaccacaggcagggtgcgcgtggagggacggggaaagcggggcgggttggggaaggcgccccgggaacctgaacctcccaccccgcctcagtctcgaccactccttaagccccaccccgccccaggtaaggcgcagtccacccccattcccagtagattaacgcacaggtgggggcgcgctcgggacatagctgcgctaggggacagcgc

SEQ ID NO: 20413 - DNA, 1129 bp, Artificial sequence
  DNA replication origin
cccaggctggagtgcagtggtgcaatcttggctcactgcaagctccgcctcccaggtttccaccattctcctgcctcagcctcccgagtagctgggactacaggcacgcgccaccacgcccggctaattttttgtatttttagtagagacggggtttcaccgtgttaaccaggatggtctcgatctcctgacctaatgatctgcccaccttggcctcccaaagtgctgggactacaggcgtgagccaccgcgcccctgccgcctctagtattcttagagatgtgccacattgttgatttttcctcaaggctgtttctccctctagatgctggagcttctccagcattgattttggggacggaagcctgggcgaggtacacattccggcagccagtgccagctcttagaaggtcacactgcctattgtgtggacagattagatggggtgggggtgggacttgtgagtccagcaagggggctattgtaggcagagctgcaagaggcaccagcaggctgcatgggctccaggagagaggtgcgacctgagagccattctggacactgggctcagtgaaagaagccggtcagaaaaggacaaatcctgtgtgattccctgggtagaaggtccctagggtggtcaaatccatagagacagaaagtggatggtgggtgccagggcctaggagaggggatggggaacgagtgtttaatggggatagagtttcagtttgggaagatgagaaagttctggagatgaagggtggtgacagctgcacaacagcacgaatgtgtctaatgacgctgaagtgtagtttaaaatggttaagatggtcagttttgtattatgtcgattttaccacactgtttttaaaaagaagcatcctggagaaagcgtcagtactgctcatgggggtggggtgaggagtcagctccagtggctgctgggctctcgtccgagaggagaagggaggctggccctcgggggaagggctgcagggatccagggttcctgggtggatgtgcggagtctggggtacctgggaactatccccacagaaatgggaggccaccactgaaattccaatgaggggctcgaagttaaaacttaacacatgaaagataagtgggg

SEQ ID NO: 20414 - DNA, 682 bp, Artificial sequence
  DNA replication origin
ctcctcctccctgggctcaggagaggctgcaaaggcagctcctgggacgtggatttcagaatcagggcaaaggacagacatgagccagattcaggtgcccgcgtggcccccacaggtctcttcaagctccaggccccactcgctgtgacgcaggtgggaagctcttgagtgcctccccggtgggaggggccgcgctcacagacagcacaggggcccccaggctccagcctcagagcccggctgctcacctctgatggacagaaaagggtccctgtctcaggaaggtagaggctgccacctcctggcccgaggacacagctttccagaggaggggcctgcttctaagtccaagtcccatcccagccggatagccaggggcaactgcccaggtaaactgagacagcagcagcaggcaagccagtgcagagctgggtgatccacaggttcatgagcggtggcaggtggaacaagggcaccatgggcggagggttgggcagctgcaggtggcatcattgagccaggggcctcctggtgggtaaggacattgtagagtgagcgggcgcacctgggacccaggaattcacaggaaggagagaggaaaaaggaagtccctggcgggtaaacacatatgcatgcacacacatccacgtctgcacacgcatccacgcctgcacacgcatcc

SEQ ID NO: 20415 - DNA, 1083 bp, Artificial sequence
  DNA replication origin
aacccgctgctcgaggggtcttccaggctcccagcggccggcaccacctctagagcaggtgggcaggggtgtgtggggtgggcaggggtttgtgagggtgggcaggggtgtgtggggtgggcaggggtgtgtggggtgggcaggggcatgtggggtgggcaggggtgtgtgaggttgggcaggggcgtgtggggtgggcaggggtgtgtgagggtgggcaggggtgtgtggggtgggcaggggtgtgtaaggttgggtaggggtgtgtggggtgggcagggatgtgtggggtgggcagcggtgtgcggggtgggcaggggtgtgcggggtgggcaggagggtgtggggtgggcagcagcctgcacagtggcttcccctcaacaagccacttcctcttgcagagggaatgttggggtgggagggtgtggctcagcaaagggcgtgggggttccaccggctccctgcccccgctggtggggcacagtgaggggggctgtggtcagacctggtctctggagggccagccgggggttcccgtccacctgtcagggggttcgacgccactttgagatgacaagtgaggccacctgggcacagcgctggtgtgagaaggaggccatcaggacaggtcaagaacccaggcccgccctgctccgaaattcttcagacctgatgaagaggtgtcccagaagcgggtggtgctccaggcccgcctcaccagctccagggaggtcaaggttggagagagacaattctaggggcgaaccagacatagccaagagcagctcatcttccctggagaggacgggctgcccacttgcacagcccgggggcctcctgcccctagacctggtaccttcactcttgttgccacccctacattcatacctgcgccccagtctgagccacacctaggcccccagctgaagtgacactgtgggtgccaggcatctgaggtctccacaagcccccacagactcagggtgggaattcctgggggccagagctgcagagggtgctgcctgggggtgctgggctggacgggggtcctggttgtccctcctggttctcctggttctccct

SEQ ID NO: 20416 - DNA, 920 bp, Artificial sequence
  DNA replication origin
cagcagctcggtcctagggcgatgttgacagacagacagaggggcggatgcagcctacctcctgggcagtgagctgcggtctgaggcccctgcccagctggaaaccacagggaggggaagggaggggaggagaggagaggagaggaaccgtcatggggccttggagtcgagtcagggttgccaaatgccagatgctggtcacctgcttctttatcttggtaacaggcaggtcgggcaggagtgggtggtgggtgggggtgagcaggggtgaggggtggcagggcctcagcacagggattatccctcccctgacacacacaccagccctactgtccctgtcctgcccttgcagacatgtgtcctgcccttgcagacagccgcaggcaggcagggaccaccatgagcaaccccgtctctcctcctgaggggcagcacagagcctggaggaggcctgagtggggctgaggcctggggcgagctggggtggaggggcactggctgccgggctccagggatcttctccccttcctgccccggagggtgctggcacaggggtggggctcactcccactccgtagacacaatgatcagaggtcctgggtgtctggggaagctgggctgtgcgtgtatgcgtctaccatgtgggggtgcctgtgagtgtgctggggcgtctgcagtgaaggcctcctgagaccactccacggaaacaccgggaatccctgcagctgagcctgtctctcacgggaccgggaagctggagagagccccaaccctgcccgctggggccgagctccctgctcctgcagcagtcccatgccccacactctgagtctgccctatccacagctgctgggcctctctgtggccaccatggtgactcttacctacttcggggcccactttgctgtcatccgccgagc

SEQ ID NO: 20417 - DNA, 1403 bp, Artificial sequence
  DNA replication origin
agccagatagcacaggccggggttgtccctgcccatgctcgtgtgccccggagcaggaatcctggctagtgctggagctgctgggtcctcctctgcccaccatgggcccacccagggctggttggcccggcagcagctccaggaggtgactctattcctattcttggagacatttataaaccagggtcattaaacaagcatttgctgaacttgaaggctgagctgaaaaccctgccagccctggggacccaggaggctctgccctcagggacccccagagtggtccagcttcacaggctaaacagggaagcaaagcccccagcacaagctcctcatggctggaaaggggagacgggaggctagagggacaggtgggagcccggggcgccagggaggagctgccccagctggggtgagagaagagggctgtgggcctagcaggggcaggacaggcgtggggaggctgccgccaggtggggtctgcgatgaccatcgagtggcagggaccaagacagaagcccatggggaggagtaggaatgagggtgacaagaggccactgctatggggtggggtggaggggcctatgggacctcggggctggggagacacctccggcagctgggaaggagagtgtgcagctccggagagcccaggctggagagctcaaggggcgtttcctgagcctggcccggcctcctccgaacaggaaatgggatgctcccagtgccctcccagagcttgctgggcaatagaaccagaccctcccagggactttggaaacagctcccagggtcaggagggccgtctctctctttcagagctcctataggaacccttgttgggcgtgtagatgacagggtgaggtagggcctggtggaggggccttggctacccaggtagggggtctcggctggctagcatccctggggcctctgtttctgcctagatactcaggtgtggggttgacgtgggggtctcggctggccagcatccctggggcctctggttctgcctggtcactcaggtgtgggggtggcacacagccctgccagctcttcactcctttctaattcttttctgggggcctgggcatctgggaacacaatgaactcacccctgccatgaggccctgggcctccctcacggtggctgcagcgctcagcacggctcccagagtcaggaggcccaccaggctcaaccccgcagagaaggctggttgggaggagagaggaggagggttaggggtgcccaggacaggtcctgagtgcacacagcctgggtgtgaaatctaacttgggagtcaggggccgtgagggactcctggggggctctgaatgggcctgtctctccatcagacggccctgagggaaggaggagggaggtgggactcgttcagcctggg

SEQ ID NO: 20418 - DNA, 2580 bp, Artificial sequence
  DNA replication origin
tggaccagctgcatcacccgggaatgcggtagaaatgcagattctcaggccctgcccaggcctcccaaattaaggatgctggggtggagcctagcaatctgcgtctaaaaagctctccagggcaatctgaaggctgttcctggccaggcacagtggctcatgtctgtaatcccagcactttgggattacttgagaggaccttcttgccgtgtcctcacatggcagaaaatgaaagggcacacagggggatcgaggcgggtggatcacttgaagtcaggagttggagacaagcctggccaacatgatgaaaccccatctctattaaaaatacaaaaattagccaggtgtggtggtgcatgcctatagtcctagctactcaggaggccgaggcaggagaattgcttgaacccaggaggtggaggttgcagtgagccgagatcgtaccactacgctcccgcctgggcgacagagccagattccatctcaaaataaataaataaataaaggctgttccaactatataggagttcaggatactggcaagggtgtgattaaagtgaaggaccaggtgttcccagctgtgcaggcaaagaagtgcagtgaggaaagcatgcagtacggctgcgtagagcactcccagcaaagcaggtgggcaaagcaaacacacagggcctggaggtgtggaaggggtgcaaggtttggactttaaatctcagagaggaagcaacccaaaattaaagagaccccagggatggtgatgggcacagtggggcagatgaagttcactggacaggggaggtcaggggcctaggggccgtggtgtggggttgcttgtcccagctgggatggacacaggaattgggctggagaagatgtacatgaggtggtcttgtctaaaccctgcacatccagctccaagcatgcaggtaaattcccccggaaccaactcccatgccaacgtcagactcgaacaagtccaaggatgctgagtaacagtcagggttctccagagaaaccgagtcagtaagatgtgtacatacacacagagagagattattgtaaggacttggctcacacaattacagaggctgagcagtcccaagatccgtagttgggaaccttggagacccaggaggactgatggtgtaagctcccgtctgaaaggcagcaggctcaagacccaaggagagccaatgtttcagtttgagtttgaagacaggaaaaaaccaatgtcccagctcacccaggtaagaggacttccctcttatttgtcacgcgcctctgtgtgaagagaccaccaaataggttttgtgtgagcaatgaagctttttaatcacctgggtgcaggcagactgggtccaaaaaaggagtcagcaaagggagataggggtggggcagttttataggatttgggtaggtagtggaaaattacagttaaagggggtttttcttttgtgggcaggggcgggggggttacaaagtgctcggtggggaccttctgatactcattgaccaggagaaggaatttcacaaggtcaattgattagttagggtggggcaggaacaaatcaccatggtggaatgtcatcagttaaggcagcaactgtctactttcacttcttttgtggttcttcagttgcttcaggccatctggatgtatacatgcaggcttgggctcagaaccctgacaccactcagccattttgttctatgcaggccttcagtgggtgggatgaggccctctagaaaataaaaggtttcgctctccctctccctctccttctccctctccgtctccctctccctctccccacggtctccctctcatgcggagccgaagctggactgtactgctgccatctcggctcactgcaacctccctgcctgattctcctgcctcagcctgccgagtgcctgcgattgcaggcacgcgccaccacgcctgactggttttggtggagacgggattttgctgtgatggccgggccggtctccagcccctaaccgcgagtgatccgccagccttggcctcccgaggtgccgggattgcagacggactctcgttcactcagtgctcaatggtgcccaggctggagtgcagtggtgtgatctcggctcactacaacctacacctcccagccgcctgccttggcctcccaaagtgctgagattgcagcctctgcccggccgccaccccgtctgggaagtgaggagtgtctctgcctggccgcccatcgtctgggatgtgaggagcccctctgcctggctgcccagtctggaaagtgaggagcgtctccgcccggccgccatcccatctaggaagtgaggagcgcctcttcccagccgccatcacatctaggaagtgaggagtgtctctgcccggccgcccatcgtctgagatgtggggagcgcctctgacccgccgccccatctgggatgtgaggagcgcctctgcccggccgagaccccgtctgggaggtgaggagcgtctctgcccggccgccctgtctgagaagtgaggagaccctctgcctggcaaccaccccgtctgagaagtgaggagcctctccgcccggcagc

SEQ ID NO: 20419 - DNA, 913 bp, Artificial sequence
  DNA replication origin
tgcccggccgccctgtctgagaagtgaggagaccctctgcctggcaaccaccccgtctgagaagtgaggagcctctccgcccggcagccaccccatctgggaagtgaggagcgtctccacccggcagccaccccgtccgggagggaggtggggggggtcagccccccgcccggccagtcgccccatccgggagggaggtggggggggtcagccccctgcccggccagtcgccccatccgggagggaggtgggggggtcagcccccagcccggccagccgccccgtctgggaggtgaggggcgcctctgcccggccgtccctactgggaagtgaggagcccctctgcctggccagccgccccgtccgggagggaggtcagggggtcagccccccgcccggccagccgccccgtccgggaggtgaggggcgcctctgcccggccgcccctactgggaagtgaggagcccctctgccctctgggcccgtctgggaggtgtgcccaacagctcattgagaacgggccaggatgacaatggcggctttgtggaatagaaaggtgggaaaggtggggaaaagattgagaaatcggatggttgccgtgtctgtgtagaaagaagtagacatgggagacttttcattttgttctgcactaagaaaaattcttctgccttgggatcctgttgatctgtgaccttacccccaaacctgtgctctctgaaacatgtgctgtgtccactcagggttaaatggattaagggtggtgcaagatgtgctttgttaaacagatgcttgaaggcagcatgctcgttaagagtcatcaccaatccctaatctcaagtaatcagggacacaaacactgcggaaggccggaaggccgcagggtcctctgcctaggaaaaccagagacctttgt

SEQ ID NO: 20420 - DNA, 1039 bp, Artificial sequence
  DNA replication origin
cttccaggccccgggtatagcaaaggcccaaggccagagagtgttggaggggaccctggggcgaggcggggctgggagcctccgttactgcgcgggtgctcagaggtgtggagccctggggagcagggcacgcagggcccgagttgtgctttcaaacctctctggtcgaagggcaagaacagaccttggggccagatgggaaacagggagaccagtgattgcttcctgcaggggccaggccagagctgacagcagctgggagtggaggcagagatggcggagaggtcccaagaaaagggccctctctgctttcaggacagaaatagttcccccttgtgaggtttgcagggggatgcaaggcttggggggcagggaggggaggggaccccagggaggaggggaggactgagcaccagagggtgtggggtgctttcaggttcatgcatgcatgcatggatatggggtgagatgcgggactgggcacaccccatggggtgggccaggggtgggaagcctgagcatgcagtgcccaggggggtctcgatgagatgtcccgggggtctctttggagaccccaagtcgtgggatcccctaaactctccggcagtttgtgttgatggcatgcggggtggggatgggagtctctcccggcgctgcagggctctgggggcctccccttcgttcttgctctgggtgggagacaggaggaaggagcaattcagaagcccggcagtagagaggatgctgtaggcacaggctgaggcctggttggcctctgagggtccatgatcttgaccaagagcagcgggcagtggccaggcagggccacggaagcccaggatggacatcagagtggtgccctcccatggagatctcgtcccctcagaggatcccggccagcacctgcacagcctggcgcacacactgttatcatcatgaggactcctgggtatgagaagggctggtgaggctctgataccatctcctcctcaggatccctggcaggcagcagaatccagaaatccgggctgagctgagc

SEQ ID NO: 20421 - DNA, 1411 bp, Artificial sequence
  DNA replication origin
ggggcgcgggccggtcctgggcggcgggcgggccggcgcggggcctggcgggtggccggcaagggggcctggcgggccgaggggcgggggcgcgaagaaaggggcgcgggggcgcgggggcgcgggggcgcgtggggcgctgggcgccggaggcctggcaggatgcgcggtggggtcgccgccgtcgccgccgttgcgcgctcgctctctggccgggcgcgcgcctcgctccgcagtacttatagggcgccgcggtcccgcccctccataggccccgccccggccagctcacgccccgcccccggccccgcctcctgccgccagggcgcgcagccgaggggtatggggtcgctgcacctacccccaacttggcgcgtttcggccaggacctcagggcccaggtgcaccgtgctgggcgcgggaggcgtccccaagctgctgtcgcgctccgagcccccaagggggtggcagcagggccgcgcctgaggacaggcatgcagcgtctgcccaggagtgcagccccggtgccgggagaacaacccattcctccctccctcaagcaccttggacaatctgggagggctccccaaaggaggtgagcaccttggacaatccgggagggcttcctgaaggagttgatgccacagtggttggctttgcaaagacagcaagctttgctcacattgctctccggggctggaacctgggcaggcatgaggccccctagtcagtgttggcctcaaggtcctagtacaggtaaccaatccctgtctcacggaaggggagaattgctgacccatgctgtgggagtctgcatctgaaaaggtcactggggcctgagagggcagctcccagaacagtgtgaagtgtccaggaggccagagacacctataggagaacctccagatattgcatctatttcgtctacatcctggttgtgtcgtgccccagggatgccagcctcacaccgtggctcttccggaaggtgtggggccaggcctgctgcacttactgctttgggctaatgattcagagagtgaagggtgctttctccccagaggaaggagcgaaggcctttgcaggagatgacacactgacgaaggtttcccatgccctctccaagaaaactgatggacaacggggctgcatcctgggcgggggcttacctgggaaccacgtgggaccaggtccggagaaccatcctctagccagctcgtcttggcaagtgtcgtccaacccagtgctagctgatagaaccttctgcaacgatgggaatgttctgtacctggataaccccctggcacagatgactactgggtactggaaatgtggccacaaggaaccaaatttttcattgtgtttcatcgtaatttaaattcacatggccctgggtggccagtagcgctcacat

SEQ ID NO: 20422 - DNA, 1235 bp, Artificial sequence
  DNA replication origin
gctgcgagccgagtttcggggcctctgtgctcgggggcccacctctgcggccgggccggggcttctgggggccgccgggcagttcccgctgtggtggtgatgggtgcggtggtcgcgggtcgggacccgagtacccggccgcccctcagctaaggaggggcctgcgcgggtccctggccgcggattccggactgctgcttcgcggggacgaggggggggctcgcgggcgggactcctggcgccccgcccccatgagctcatcaagagccgccgcccctggatggtggggcgggggcgcacactttgccggaggttgggggcgatccgcctcactctttccccagcccagctcactctccaatctgcggtcaccacccgagaccttcctgggggtcgcgcctaaaaggagcgcagactcccgccgggatggcccagaagctggggtgcgcgcaccctggccgtccctgcctgggagccgatctccctctcctcacccagacacgttccagcggaggcctcctcccagaagggctctggaggcctcgcaggagtggggatcccgcggttctgagttggcacaaggaagagagtggcaccaggggcctggagtggatggcagggtccgggagtggggccgctgctttgcaagaggggcccccacgctgggcatctttgggtgccagcgtgggtggaggagggtcttttgctgagaatggctttctcctgaccgcagtctttgctgctgggaagtgactgatgggctttcgccttttgtttccatttcctgtcggtgttagaattggggagggggtggaaatcccttcttggcctggaaggactggagtgggtgtccatggccgcggcctccccgtggccacgcccctgggcatagactgcaagcccctccccgtgccccccaggctgtcacccccttctcgtggaagactcggctgatgtcccagtggaccgagtgtttctcaagttgaggcagggagggcaaactttttaaatggcccctggagccagtgtgtgggaccagagacatctgtttcccatctggacggctgaggatcccagtgcggatgattatttggagggggaaggacggaggctgaactgaactctcagctgggagatgagtggggcagtcacatcccaccttccccaagccgggctgttctgcacagcctgcttgggacgctggtgggagtcactgtggccttcggcactgccct

SEQ ID NO: 20423 - DNA, 1066 bp, Artificial sequence
  DNA replication origin
ctgatgtcccagtggaccgagtgtttctcaagttgaggcagggagggcaaactttttaaatggcccctggagccagtgtgtgggaccagagacatctgtttcccatctggacggctgaggatcccagtgcggatgattatttggagggggaaggacggaggctgaactgaactctcagctgggagatgagtggggcagtcacatcccaccttccccaagccgggctgttctgcacagcctgcttgggacgctggtgggagtcactgtggccttcggcactgccctggcagtgggggcagctaggccatttgggaggggctcgccttccccaggcccggccctgggacctcagccgttgcttagtggtggcctgcttcagcccaggcatgtgggagaggcaccagacacaggatgtccctctgccagcccctgaagccccgtcccctgacgaggcgagtgtggacctgggggtgggggctgagggagactgtggacctgggggtgggggctgagggagggtgtggacctgggggcaggggccgagggagggtgtaggcctgggggtagtaggggctgagggagagtgtggacctgggagtaggggctgagggagggtgtaggcctgggggtgggggctgagggagagtgtggacctgggggtaggggctgagggagagtgtggacctgggggtgggggttgagggagggtgtggacctgggggcaggggctgagggagagtgtggacctaggggcagaggctgaaggggagtcacgggaggggacttctccggaggtggatttttgctctctggacggtgtgtcagcactgggtgagcccctcctgcctgcccaggctgagaggtctccctggcagccccctgggagtgtcgccagggcgggcctggaagtttcccaggcagctggggtggagacctgacacatcccaagggtgcttgttattaaggctcaaggaaatgtctctgaggcctcaccgctcctctccccagggcctgctccctgcaaagcattgagaactgagtccgtccacagtcactgtggacccac

SEQ ID NO: 20424 - DNA, 1014 bp, Artificial sequence
  DNA replication origin
aggggctgagggagagtgtggacctaggggcagaggctgaaggggagtcacgggaggggacttctccggaggtggatttttgctctctggacggtgtgtcagcactgggtgagcccctcctgcctgcccaggctgagaggtctccctggcagccccctgggagtgtcgccagggcgggcctggaagtttcccaggcagctggggtggagacctgacacatcccaagggtgcttgttattaaggctcaaggaaatgtctctgaggcctcaccgctcctctccccagggcctgctccctgcaaagcattgagaactgagtccgtccacagtcactgtggacccacccatccactggggctcagtggtagccagcaatgccaggctgggtgaggtggggttggtgggcaccaccctggtggacccccctccaccctggtgtcgcagggtgtgtggctgagagcacagtgccatgggcttgggcctccttggtggagtccccaacacactgctctggtcctgggcctcggccttccccgtctgcagtgggggcccacagtgagcctacctcctggtggtgttggtggatttgctgacatgcctgagtgttgacagggggcttggtgcaggaagggctcagggcgtgggtgttggccaggggtccaaagggacctctgcctcagagagcccagcccagacaggcaggatgtgcagtggggaaggggctgcgggaaccctgcagggtccagaaggacacagtgcagtcctgtgggctctggggaggctggtggggaggaggttgacaatggatatctgggtggggcacttgttagaagttccattttagagaggaaagaggccttgcctgtgggagaaggcagctggggtagcctgacctctttcccaggaaggagcccacacacacacgcacaggcactcacacacacgaatgtgcacacacacacactcccaccttcacacacactcacactcttgctgtctcccttcccaagccaag

SEQ ID NO: 20425 - DNA, 922 bp, Artificial sequence
  DNA replication origin
ccaggaaggagaaagaaagaaacaatccttcatagagtacaaacactgcttttagtagccttgcaaggagccctccaggaaccccacaggttacctgggctccatcctgagagccaccctccatccccaatccccagcagagcatcttgtggggtggggcggcttgtggggcggggcgccttgggaggcggggtgtctcgggaagcggggcgtctcgggaggtggggtggcttgtggggtggggcatttcctggggtggggcgtctcgtggggtgggacagcttggggggtggggcatctcgggaggcggggcgtcttgtggggtagggcggcttgtggggtggggcatcttgtggggtagggcggcttgtggggtggggcatcttgtggggtgggacggcttgtggggtggggcatctcgggaggtggggcatctctggggcccggccacttgggaggcggggcatcctgggggcggggcatctcagagggcgcctccggaggctggagtatcttgggaggtgggagcaggtggcagagaggcttcccacaggtgagctttgagcagggaggtgcctgtatggatggctctgtggggagaggggtgacaggagttccagattccggcacttatgaaacctcacagtgatggagagccgagtgctgctgtgcaggctaagttgtgtgcatgtcagcttctgcacttttatttccttgtttgtagacaaggcagagagaagctgagatgggcctgaggtcgccttggtgaaaggcactcagcagccagggccttgggctgccctccctcatcaccgtgaaagcgggactctcttttaactgacatcgggctccatagttactccagtcctaactttgatggatcctaaaagtgcacttctaaggacgcggcttcggtgtttcc

SEQ ID NO: 20426 - DNA, 1544 bp, Artificial sequence
  DNA replication origin
tcctgttcttggtcaattccggtcttgtttccccaacaaatgccgtcgtttccggggctgcttccgagccggacccaagggccggggcgtggaggagtagaggggcgagcgcatgcgcacaggactacacgtcccgacaggcgtcgggagcggcggcccagttccttgtgggagctgtagttctgcaggcgcggaagccgtggtgctcggccggcagagcactcggtttcccagagggctgagcgcgccgcacggaggtgcggcgccgaccaagatggagactgccgagcagccttgagccggtaggtttgtggtgagggaggacgggccgcgcgggccggccgagcctccgggaggtcaccgagcgcagctttaatacctgagctcgaaggccccgctgtgctcgccgacccccgtacctcgcggccgggcccttgggacccacagcatccttgtgaggcccggaggcctgtccagcccgactggacagtgccgaggggcaccgagagccagcttggcaccgagagttcgtttgttctctggcggggaggtcttgctggcacatatagtggagaaaggccgggctctgcgttcatgtggagaaagagacggcttccttcagcctacggacatgaaggagtcaactctaccttccactcgttgccggctttcgccgagaaccccgagaaacggactaccggagtccctatcttgcagcccgatccccgctacccgtcggagtgccccgctgaccaggctgcttctggccgcggcggcgttccgctgcagaggacgggagtgcgaatctgggaagcagggttctggttgaactccagcttcgtctgcaacatactgtgtgacttgggcaaattatttcccccgccccgttcctgccagctttaaaacggtcatcagtggggggtgctgcgtatcccctttcactggggtggcttcttcactgaggagagtcgcgcctcagaggaactgaggtcctgcctgtgttcgacctggtggggggcactaagagcccctgatagtacccctgaccccatccttattgggtgcacaagacacaggtcactctgggcgggcaaggagttttggtagcaggagaggagtcggtggatggatggctgaggacagtgcagaagggtgtggctgggccgtctttttttgcctggaaattcaagttctgaggcacccagtcactccagcactaaatgggtgcaggaggcagcacttgtctgcccagctggaaaggcagggtatgtgctgagtgttacaggtggaaggccactggaggtcgctccaggagccgcggggatttacctctgcctaacagggctgctcaaggtgatggtcgacaccccactttcctgagagcttgaccctcagatgccagggccttggctgcagattccttgggagctcccggggatcttccagcaaataggagcaaatcttttccccgtggatcaggaaggtgcacgctctttgtggaatacgactgctcaccccgcacagcaagcagcttataagtggcc

SEQ ID NO: 20427 - DNA, 2814 bp, Artificial sequence
  DNA replication origin
acgcctgccgaggcttctaccaggacggccggccaggggaccgcaggagggcggtgagcgggggctccgtggggatggagggcgaggctggggccgcagcaggaggccgacgcccgtgtcctccaggagaagggcccggccaagcggcccacgggccagaagtggctgctggacctgaaccagaagagcgagaacccctggcgggacctgttcctgtgggccgtgctgcagaaccgccacgagatggccacctacttctgggccatggtgagcccaggccgcgggcccagcgcgggggcaggggaggggcggcctcctgagaccaggtctcgtagggccaggaaggtgtggcagccgcactggccgcctgcaaaatcctcaaagagatgtcgcacctggagacggaggccgaggcggcccgagccacgcgcgaggcgaaatacgagcggctggcccttggtgagtgaccggcggctggggccgggcccgcgcgcgggggaggatgtgacggaggggtcggacgaagggtcctgggcctcgccagggctgcctgttaccgccgtggggctccaggtgccctcaggggcctcctccataggagaggacagacggctctgcctggggtggaggcggccccagaccctgagtgtgggaccgctgtgcacgtggtgaggacgatacagcctcacaccccgggcatacactgggccctgccgcaggacgagggacatttagcgtggcagaggttccctttgtcctgctgggggagggacagagccggagaaggacggaggttcaggaagggcccggagcaggccggagggggcagaaggcctggctgggccctgcgtgttgaacgcagggtgcggctgcagagcccaggtctgggcaggggatggaggaggggcgtcgggggccgggccgggcatcggcgtctcgtcctagcggccagggcctccgggggcagacctcttctccgagtgctacagcaacagtgaggcccgcgccttcgccctgctggtgcgccggaaccgctgctggagcaagaccacctgcctgcacctggccaccgaggctgacgccaaggccttctttgcccacgacggcgttcaggtgagtgccagctgtcctcgaggagagctgccagggggtggggtgggcgggcgagctgggcccagcttgagttgacttcccagcctgcagctgccctgtcactcccgtcctcagcacagagggggcggggtggggcttctgttcctggaaggcgcccacctggcttcctccaccaggcacactcctcctgcctctggcctcagtggaagtggcacttcctcctctcagtcctccccaacccccaagcccaatcttttccctagtgaagggtacagcagctcaacccacacccctgggatgagtggcccaaggagcacatgcccaccaggacgggggctccgggagggagggctgggctgggcaccccttcagctcacgtgggccaggcacctgggggaagggcattcctggggcagggcgcagcctgggcaaaggtgcagagttggagccgacagttttgccttcacctcaggccttcctgaccaggatctggtggggggacatggccgcaggcacgcccatcctgcggctgctaggagccttcctctgccccgccctcgtctataccaacctcatcaccttcaggtgggtgaggcctgtgagctgcccggccaggacaggcagcagtgcgagtgccggagctacggggagggcctgggcctcgcaggtgctggtggtagcctgactctgtagcccccaagtccagcctccctgcgggtcccactccccacagcccctgcatcccagtgggcactttgatggccaagcgcctggagccaggcaggcgcctctgggagcccttcctgcgggccctgagctctcctgtgctcgcagtgaggaagctcccctgaggacaggcctggaggacctgcaggacctggacagcctggacacggagaagagcccgctgtatggcctgcagagccggtgcgaggcacagggccaggcagggtggaggggactggcgggtggtggctgggaggctggactctggtggggcacccggctgggcgccagcctcaccactgcgaacttctctgcggcacagggtggaggagctggtggaggcgccgagggctcagggtgaccgaggcccacgtgctgtcttcctgctcacacgctggcggaaattctggggcgctcccgtgactgtgttcctggggaacgtggtcatgtacttcgccttcctcttcctgttcacctacgtcctgctggtggacttcaggccgcccccccagggcccctcagggcccgaggtcaccctctacttctgggtctttacgctggtgctggaggaaatccggcaggtcggtggccacactagcctaggtcccctccactctgcagcttcaggttgggcaacctaagctgggtcctgccctcgcagggtggggctccccaactgtaaaacaagaacagcatgggggcctcccatcttcccagtcaccagcggccatgatcctggtcaaagaccgagccctgagccctgctccagactgagcatgaccatggtctccctcgtcagagtctgaaccctgacctgtatcacggactgagtccagacactgcataaactgatccctagaccctgggcacaaagaggccctggccccaagtggagactgacctcaccttctgtccccagacagccctggaatagcttcagtggacccctagtcccactggtagcctcggccctgg

SEQ ID NO: 20428 - DNA, 2411 bp, Artificial sequence
  DNA replication origin
ggtctcaggaggccgcccctcccctgcccccgcgctgggcccgcggcctgggctcaccatggcccagaagtaggtggccatctcgtggcggttctgcagcacggcccacaggaacaggtcccgccaggggttctcgctcttctggttcaggtccagcagccacttctggcccgtgggccgcttggccgggcccttctcctggaggacacgggcgtcggcctcctgctgcggccccagcctcgccctccatccccacggagcccccgctcaccgccctcctgcggtcccctggccggccgtcctggtagaagcctcggcaggcgtcctgcaggaagtccttgagtacgcgggagacctcgtgcagggagaaggccggtggccccgcgggtggctcccgggcctgctgggtgcccaggccggccagcgtcagccgggcctcctcctgcttccgctgcagcaggtcgaagagcaggctcttgcgtgacacggagcggtagagctcctgcagccgcccatacgtcaggaagtcggccacgtctgcgccgttgtccacaaagaggcgcacaaactcgggcttgttgctgaccagggcgtccaccatcacctcctccaggtcacaggacttggcggccatgggcacccgagggaagggggacaagagagtgagcgagagacaggaggagggggtccaaggaaggagagagcagggagcatggggatccatccccagggccaggtcacgcagaccctctcgctctcctgcaccccagcctgccccctgcattggggcgggcacagaggggccagtcgtgagcaaatgctgagggtgtcacaacccccttgggctttggggacagccggcacccagccagctctgcctgggccagtgagcgaggcagaagcccgggcagaaccgtggcctggtcttgccccggaccttgggacagctgggcagaacgggctcagccaagcagcccacagggtgcaggagcaggcagcgtgggcagctcgggcagtgccatgatggggaggtgggtaggcagggctgggaggcaccttccactccacgtccccattgaagatctcactcttggcgatgtccacgcggtcccaggccacggccagcttgagctcatccagatagtcctgaggctcctggctgtggctcttgcaggctgtgggcagagcaggcaggcactggtgagggtggagctgagggcctcacagagccggggcacagggtccccaaaggtgcgctgcctagagacgcggaaacgggaacttcacgctgggacttgagggggcacatgcgccacctctgagcaccagcaggaggcacgagactttgtacaaaccgcaggagaaagcgtgctgccctggtctgcgtcgggacggcccgtctgctcccatgtgaggcaacttcctcggctgcaacgggggtaccccagctaacacctgggcctcgaggccacttcctggcactgaaggtccaggacacccttcctggatgttgtcgggggagcaagctgggccacgtttcctccacgggcaagggcatttggccatgacttggtgaggtcaccagggtcactcaaggggggcctgcagcacctgggctgggtgcgcctgctggaaaccgctgtcctcaccagactcgcacgtgaggctcaccagcctcagcctccacaaccatggaccccgtaagactacggtgcctctctcaggccactgggaccaaactgagactggtgagaagaggcgggggagttcctaaacggggaggtttctttgacctccttgtcctggtgaggtttctaaacccagagccacccgcagtccagacacccttcccagagcgtcccctcaaggtgtccccagcccctgcttagcagtgcctctccctgctggggctgtgtctgcctgccagcgtccagcccttcagcacgcgttcgtctccagcaaaaagcacatcaaatgctcatcaaaattttccatcagcgggtgaacagacgcatcaaccacggtctgtccacaggctggaacctgactccgccttacaaaaggaatgaagcatggaatggcatacgcttcaacacggaggaaccgtcaaaccctcccgctgcctgcagggaaccatggacacgaaatgcccgtcagcaaatctatagagacaggaagcagatcgatggttcccaggggctgggggaaatggggagtgagtgccaaggggtatgggctctttctggggcgatgaaggcttctggaattagataaaagtgatggtcgccccacctcacgaatatactaaaaaccactgaattggctagtgcggtggctcacgcctgtaacctcagcactttgggaggccgaggcaggcggatcacgaggtcaggagatcgagaccatcctgg

SEQ ID NO: 20429 - DNA, 1051 bp, Artificial sequence
  DNA replication origin
gagggatcctgaaacctcaagtccttttctcctgggtgttgtataggccaagctgcctcaaaaaacagcccagccattggactctggcccctgcagctggcggcccgactgcttccccaaggggtcccaccctgtatacacccgggtgctctggtcccaggtgagtgggagcagggacatctcatggcggcccatgggccctgctagtggagggggcagctctaaggaagggccaggcccagctgggggaggtcctggtccagtacgtaggcactgctgcacctgtgggtactgcagaggacgggctgagagtttcgggaaatgttctcgtgatggcctggagagtcagggggtctggctgccgtgtggggtgggagcattgcctgtgccgggtggggggacagtcagggggtctggctgccctgtggggtgggagcactgcctgtgccgggttgcggggacagtcagggggtcgggctgccctgtggggtgggagcgctgcctgtgccgggtggggcctcacctgtgctctgagccgccttcaccagccccttgcgcagcacatcccgcagccaggacttcatggcgaaaggctgctcctcacccaccagggacaccaccaggttgggggccggcaggtgccactcagcaagcagcaggtcaaagagcacagacggggccactccgctcggcacccgtacaaactgcaaggcaggtctgcagctcagggctttcggggcacggggcatgggagctgctgggcattggggggggctggacacaagggggcactggggaggtgctgagcatggggggacactgggcactgggaggtgctgggcatcaagggggctggacacagggggtaccggggaggtgctgggcattgggggcaggtagcaggaggagagtggcccccaatatcccttctgggacagggccagtcctcccttgacctgctgtgtgacctgggcagtcctgacccctctctgggctggcatccccctcagtgagccgagggcgctggacagaggtggggccctggatgcac

SEQ ID NO: 20430 - DNA, 2026 bp, Artificial sequence
  DNA replication origin
gcacacgtctcatgccggggtgctgggcccagctgtcctgtggaggacagggaggcagagggactgtctcctccctgctgtggccctgcgaggccgtggggcatcggcccccatggtgtctcatctgtgctggaaaggctgcacagccgtgggccagctgtgagtgatgtccattcaccggtcagcaccagggatgctctgtgaggactgtccctgcatccggagtcaggacagggtgccagtgggacagagtgtgcctctggaatcccgcagtcctgggattggatcctgcatagctgttgagctacttagccacttgggcctcagtaccttggagtgtcaaacagggactctaatagcctggcttctgggaggttgcaggtaacacatgaggagaacagagcctgggggatacctctgtgtgccccttcccaaagagactccaaggaccccctgttcggggcccctcaaaccataaactccaggaatggtgggggacagtatctgggacttgctctctgggaccctggtggcctctctagtctggcctgtcagccaccagagggcgctaaaggaccatgggcagagtctgaggcagtggtggtaacgggtgaaggtgatggtggtggtggtgatgatggtggcagtagtggtggtggtggtgatgatgatattgatggtcatgatggtggtggtgacaatgatcatggggaccgtgctgatggcggtgtttgtgatgatggtggcggtggtggtgatggtggtgggcatgagggtagttggggtggtgatggcattaccgttgatgagggtggtgatgatagtgatggtgatggtggtgggaatgatgacgaagatgatgatgatagtggtgcaaatggcagtggtggtggtagtgactgtggtgttgttgatggtattagtgctgataaaggtggtgatgatgatgatggtggtgggtgacgaaggtggtggtggtgatgattgtggtggggataatggtggtgatggtggttattgcagtggtagtgttgatcatggtggtggtagtgatggtggtcatgatgttggtggtgttggtgttggtattggtgttggtgatggtgatggtggtggtaataatcatgggatgatgatagtagtcatggtggtagtgacaatggtgacagtggaggggatggtggtggtgataatgattgtggtggtgatggtgatagtgttggtactggtggtggtgatgatggttgtggtggtggtgatgatagtggaggtggtagtaatgatgatggtggtggtagctggtagtggtggcagtggtggtgatggtgatgattgtggtgatggtgatggggtagtggtggttatggtggtgttggttgttatggtggtagtgatgatcatggtggtggtgactatagtcactggtgatgctggtgttcatggtgatggtgatgatgatagtggtggtggttgtggcagtgctgctgctgatggtggtggtgatgatgagggtgatgatgacaatgagtatgatgatggtggtggtgatgatcgtggttgtggtgtgttgatggtggtgtttattgtggcggtgatgatgatagtgttaataattgtggtgatgttggtgatggtggtgatggagacgatgatggtgatgattgtactggtggtgttggtgatggtgtggtacgatggtggtgctgatggtcatgatggtggtgggggtgataatgatcctggtggtggccatggtggtgtttttgataacgtgataatgttggagatggtggtgattgtggtggtgataatggtggtcatggtgatggtgatatcagtgtgggtgatgtagtggtggggatggttcagatgttggtgatggtggtggtgatggcagtgatagttaggatgatggtgatgatgatgatggcatgggtgcttgatatggtttggctctgtgttcccttccaagttgtaatcaccataatccccatgtgtcaaaggcgggaccaggtggaggtaatcg

SEQ ID NO: 20431 - DNA, 1189 bp, Artificial sequence
  DNA replication origin
ttataagcatctggcatttcccctcactccatcctgctgccctgtgaagaaggtgcctctaagtctatggagttggggggcacagtccttcatctatcctggtccttccctccacctctgtctcctggacacccaaaaaaactgcagaagttcttccccagccaactctggttcagtgccaggtcatgttcctccccgcctacaaccttccatggctccctattaccctgacaataaaacccaaagaagccttggagccttggcttctggtgatctgctaggatcacttttccttggaactcctgctggctccctcttgccactcagatactggcagaacctggagtgggtgctggcttgcactcactccatcctgctgccctgtgaagaaggtgacttgcttccccttcatctccgtcatgattgtaagtttgctgaggccaccccagccatactgaactgtgagtcaactcaacctctttcctcggtaaattactcagtctcaggcagttctaatacagtggtgatactagtggtggtggtggtggtggtggtggctggttgtggtaattacagtggtagtggtgatggtggtagtaatgatgatgatagtgctggtggtgatgttggtggcagcggtgagggtggtggcggtgatggtgacggtgttgatggtggtggtggttttggtggtggtgatgttggtggcagtgatgagggtggtggcagtgatggtgacagtgttgatggtggtggtggttttggtggtggtgatggaggcggtgttggtgttggtggtggttttggtggcggtgatggtgatggtgttggtggtggtggttttggtggtggtgatggtggtgttgatggtggtggtggttttggtggcggtgatggtgatggtgttgatggtggtggtggttttggtggtggtgatggaggtggtgttggtggtggtggttttggtgatggtgacggtattggtggtggtggttttggtggtggtgatggaggtggtagtgatgatggtggtcatgtttatggtagtgatgacagggatgatgctggtcgtggtaatagtggttatggtagcaggccatgttataacgctagcagctttgctctggatgggaaggctccaggtactcccaaagtaggcacctatgggctgctctgtaaatgtcccttt

SEQ ID NO: 20432 - DNA, 1272 bp, Artificial sequence
  DNA replication origin
ggtgtagccttcttagtgtgcgcaagggctgcccggccaactccaccattgagggcagatgctggctgtggagaggccgagcgctgcccgggcccagtggctggggtagggggctccatgcactgtccatgagggcatgtccatctggcatatgtgcacctgtgtgagtgtgctgtgtgtggagcgggcactgggccagtggtcaaggctgcagtaggactttcagtgattccagatcctgtctggaaatggggatcatgagaattccttccactgaagggtgcgtaaggcctgagccagtgtgcctggaacgtcctgaggaccagcggggccggggccaagacctggacagggcctgggtaattgcgagaagcaaggaccagcgtgtgcctgtgtgtgtcactgtgcgcacatggtgtgtgtgtgtgcatgcatatgtgtggacaccgtgggcatttctgtgtggatgttgtgtgtgtgtagctgcactgtgtgtgcggacagcaggtgtgcctgtgggtgtgtctgtgtgacactgtatatgagtgtatgtagacattgtgtgtggctgtgtgtggacacagtgtgtgagtgtatatgtgtgtgtaggtggactgtatgtgtctgtgtggatctgtgtggatgctgtgtgtgtgtatgtagacactgtgtgtggctgtgtgtgtggacgcagtgtgcgcgtgcatgtttgtgtaggtgcactgtgtgtgtctgtgtggatgctgtgtgtgagtgtatgtagacactgtgtgtggctgtgtgtgtggaggctgtgtgtgtaggtgtaccatgtgtctgtgtggacggtgtatgtgtgtgtatgtgcaccatgtgtgtctgtgtggacgctgtgagtgcatgtgtgtgcgtggacactgtgtgtgcgtctgtgtggacactgtgtgactgcatgtgtgtggctgcactgtgtgtgtgtggacactgtgtgtgcaaatgctgtgtgtgtgtgaatgtgtgtaggtacaccgtgtgtgtctgtgtggatgctgtttgtgagagtgtgtgtgtgtgtaggtgcactgtgtgcggacactgtgtgtccggctgtgtgtgtgtgtgtggacactgtgtgagtgcatgtgtgtatagccgcactgtgtgtgtgtgtgtggatgctgtgtctgtgagaatgctgtgtatgagtgtgtgtgagtgtatgtgtaggtacgctgtgtctgtgtggacgctgtatgtgaaagtgtatgtgtgtgtgtgtaggtgcactgtgtg

SEQ ID NO: 20433 - DNA, 883 bp, Artificial sequence
  DNA replication origin
taggggaggaggaggtgggatgactcagccagcctgccgggatttattgggcacctactgaattcccagccttgctgggttacggtgtgggggaggtcaggggagcggaaggtgaggctcctggcctcgaggatagtgacctcttctgggagatacgctggctggggagaaaccacgagaactgcctacgctcttggggtgctctggccaatcccccatggctacctgctgcctgttccccagagtgtgggcatcctgagaccagagactgactcgccatcctggagagactaggcactgtggagaagttagtaagtggtgagtgggtaactggagagaggagaaaacaggtgggtgaagtgatggacagacgggtagagagatggacagatggatggatgggtgggtgggtggacagatggacagtttgatacatggatacacagattggtggatggatggatggatagatggacagatggacagatgcacatggacagatggatgaacagacagatggatgcatggatagattggtggatgggtggatggatggatggatggatggatggatggatggatggacagacagatggacggatagatggatgaatcgacagacagacgggtggatggatggacagacgaatggacagatggacggatggagggatggattgccatgggtgcatgggtgaatgacaggtgggcaggctggtggaaggctggatggctgggtgggtggtgatgggtgaggaggtgcatatgtgctggtggatgtgtgcatgagtgggtgggtgagtgagtgggtggatagaccagcagatgggccgcccttcgtccagttatttgcacagatggcagcctctccatgaattcttcc

SEQ ID NO: 20434 - DNA, 787 bp, Artificial sequence
  DNA replication origin
ccaggagcacgggcccctctgctgaccctcccgtcactggccgccaagcttcccacccccagtgggagtgctggggaccagccccacaatctaaaggtctgaggcctccccagccctggcggggcccctgcccagggcagcagcctgccacctacacacatagccctttcctgggcccaggcaggcctgtccgggacgtgtgacaggccagcccctcccctccctggagagtggtggtggctgtcctagccactcagagaaggagggcaaatgggggtgggcagcctgtccctacatccttccaggccaaggtgggccactactgaccagggcactcatccgtcttgccagactggtacaatggtgtggggggctcaccctctgaagcccaccatggcccatcacgggctggagcccagagctggccccgagctgagagtggatgtgaggtggcggctgagcagatcacccaaaggctggcagggtttgggcaatggggccaggagctgaatgggtgatcagtaggggaggaggaggtgggatgactcagccagcctgccgggatttattgggcacctactgaattcccagccttgctgggttacggtgtgggggaggtcaggggagcggaaggtgaggctcctggcctcgaggatagtgacctcttctgggagatacgctggctggggagaaaccacgagaactgcctacgctcttggggtgctctggccaatcccccatggctacctgctgcctgttccccagagtgtgggcatcctgagaccag

SEQ ID NO: 20435 - DNA, 2146 bp, Artificial sequence
  DNA replication origin
tgccccgccgggcgcctggcaggcggccccaaccccagcgcttcctctcggccctgggcggggaggaggccgcggccataacgaggagggcctgccggggggccggcccgagcggcggcaccgggagctgcagcgaaggcgagcgcccgggcgcagtgcgggcagccactgctgccagccccgccgcggggggccgctgccggcccagcccgggcgctcggggcggggccggagggggcagtggccgagggccggtcccatgggacggcgtgccccgcccccgcctgcacgccccgcccccgccggtccggcgcgcacagggcgtccctgcccgcgcccaccggcttggcccgccctctccccacggaccggcctggccctgcctccgcctcaccccctggcttggcctgtccgcgcccccgcccccgcctgcgcccccgcccccacccccacccccgcccgagcccacctgcttagccccgctcgtgtcatctatcccgcttggccccgccccctcctcgcccacctgtttggccccgttccagtgtgcatttaccccgcctggccccgccccctccccgcccacctgcttggccccgccctcacccacctgcttggccccgccccgtctgcatctcccctgcttgctcctgccctgccctcacccacctgcttggcccccacttctgatgcccgcctgctctgcctggcccggaggaggaccccagctgcgccagggaggaaggggtaaggcctggccgataccacgaccgagaacggcacagcgggggcaggaggggcggggtagggtgccggcatctactttccctccctctgagccactccggagttggggttggggggaggaaagggatgtcctgggtgagggtgtgctggccccgcgatcactgtgagcgcccccgggtgcccaggcgcgcgagctgcgggcggcgaatacgctcgggtcgcttcccaccagggcccttggaccgggagggtgagatgggaccaccactgtcaggtacctcccagtgggagctgtgtgggtggggagccggcagggctgctggggggtgggggcggcacagccggggtctggacctggtttgactgccgggcatagcaggcggggctgcctgggcagttaaagggagaggcgcttgcgccaccctagtaacttggagaatgggcgccttgtcctccccaccgtcgagaccgcgctgccgctgcgccccgtggattcccctgggtgggggtgggttggtcacatcggaagattttcacaggtctctgcactgcctcccgcccgctactggcatttgggtctcagcacgtctcaggcttggggggggggtggggggcagccaacagaagagaccggcttttttcaggatactgcacacagccctgaggcagggactaaaggtggagctcagcggtgactctccgccccgccaggagacccataactcatgtgacacttccaggtcgtccctgagcaccctgggtcaatttgatgtatctaccaccccctgccaaaagtctgctcttttatcgtggacggagtccagcccaggcccttgacgcctgactccccaccctagtgaggtgccacacaggagtgcacagtctgtatttgcagcaagagtggatggagtgggtcccagcttgtgctgggcgctgtgataacacaagggaggccgaggagagggtaccttcctgggaagcatatcagtgaaggtgcagaagggcagcgggtcagaagatgggggcagtcagtcagctctgcagggcacacagcacgcattcagcagttactttccgggtgaacatacatacacctgcatggagtctctgccttcccctcccacctcagcaggaggaaggtgagctttgaataagcagcgtttggacaactggacagtcataaagaaagaaaaagcataccttgggtccatctcaccgcacacgagaataaatctcaaatgaatcagaggctcaagtgtaaagggtgagatgaagccatgcaaattctacaagaatgtacaggtcaattcctcaagaacctgtgaatcgggaaaacatttccaactatgacttgaaatccaaaagcaacagataaaataagaaaaattaaaatagaagc

SEQ ID NO: 20436 - DNA, 1082 bp, Artificial sequence
  DNA replication origin
ggctgcccgcactgcgcccgggcgctcgccttcgctgcagctcccggtgccgccgctcgggccggccccccggcaggccctcctcgttatggccgcggcctcctccccgcccagggccgagaggaagcgctggggttggggccgcctgccaggcgcccggcggggcagcgcgggcctggccaagaagtgccccttctcgctggagctggcggagggcggcccggcgggcggcgcgctctacgcgcccatcgcgcccggcgccccaggtcccgcgccccctgcgtccccggccgcgcccgccgcgcccccagttgcctccgaccttggcccgcggccgccggtgagcctagacccgcgcgtctccatctacagcacgcgccgcccggtgttggcgcgcacccacgtccagggccgcgtctacaacttcctcgagcgtcccaccggctggaaatgcttcgtttaccacttcgccgtgtgagtatcgccaccggcgacggccggcacgaaggtgcttcctgagagctggtgtgggggagctctgtcccagcgccacctgccccgtcggagctgcgaccccggagcagaggagggaaggaagtggggaaacgcagaaacacaaactctgcactctcccttgaagttcagaggcgctgctgtgtctgggggtgcgcatcttctcgcaggcccggcgtggggagggagccggctggggaggggaccacctggagcccagaatttggctccacacctccgggagggtagtccaggtgtgaatccttctgggaagagaagcgtgctggggagcgcacccttgggtgcagtaagataactcctcaaggtcggctgagactcgaggctcaggagcccccaagagagaaggcccctgatgtccggtgccgcatctcagaccccctgaggcccaggtggactctggggcagggggctgtccaggataggaaggtgacggtggcggtgctccctgagggctcagcatgccacgggccgtccccacgggccccacattaactaattgaaccaagctcatgaaaacctggcttgatgcagagagcggagaggcacgt

SEQ ID NO: 20437 - DNA, 1638 bp, Artificial sequence
  DNA replication origin
aggataggaaggtgacggtggcggtgctccctgagggctcagcatgccacgggccgtccccacgggccccacattaactaattgaaccaagctcatgaaaacctggcttgatgcagagagcggagaggcacgtttgcagctctcactaagaggcagctgtgctcccggagaaagcagcgctggtagcagaggcacctggcccccctgttaccaggtggttccaattcccggtacagcgtgcctgagcagggctgggcactggatttctcagggacaggcctgggaagtcacctccgggaaggtccaggctgctctcctccatgcctgcctggggccttcccccgctgccccagtggccctacttcctggctgcccagccagcggccttttggtgtggtgccagcctctggcctgggagcctctacccagacatcccatggctgatggctgtggggctcacctgagggctgaagggtggtctccctgagcgtcctcaggtggaagcatctcctctgcctcgggcaggctcagtagagaactggctggagggcatccagaggcctgtccatgcctgctggcagctgccaccagggcctcagggcgggtgacagcaggagccaggccccaaatggcttcaagcatcgtctcaggtgagggggtggggtaggggtcgcagggctactgccttccttgctaagaggtggccttccacatcaggaaggggaagtcttacccacctccctcctcaaagatgtggttggggggtgatcttggagacttttccccaccccagctcccaagcccctgtctcctgacatgtcagtgggtgcctgagccacagccgctgctggtctgtgagaggagctggctctgctcgtggctgcaacagcgggggctcggcttggggtttgggagatatttgtgtgcagtgaccccaggggaacccagtccgatgccactgtgcaaatgtctagcagatgccaggttcacaggtgctgtgtgctggtggccacctgcctcccggaccccagactctctgagatgtccaagggtgggaagacctcctcagccagaggccaaggcaaagtgcccgcagaccccctcaattctcacttgtattcaggtttgtggacacatgcctccgggctcactgcagccacccgtgtggaggaagaggaggaagagggctcgccacgccccagaggaagtctctgcttgcacttgtgttttcttcctcatttggattgtttaggtctcggaagtttgctcagcaagagtctaccttcgcccagcctccgcagagctggcaaggcaggggtggcttctggggacaggggcaggatggcttctgtgaaggggtggccaggaaagggatgcttctgtgaagtggccagatctggggctggtcctttccagttctgggtcctgtccttgtaagacgtgtgcctggccctgggaagttgtcatgaacagcctccaacccaggtacctccatgtggggtgggactggaggtggaccctgactgggcaggacatgtggcttggtgggggcctgggagatgcgctcccaccctcagtgccctaggaggttggcaggaccagtctcttgaggggagacctggtcatagaaccaggatg

SEQ ID NO: 20438 - DNA, 1016 bp, Artificial sequence
  DNA replication origin
ctctgaagctctgtccgggaagggaaccttgagtgtggaggagataagcctgctgactgggtgagccggccggggcgggggtggcccctcttcccttcctcccctgcagcttccatggcctggggctgtgagaggcccgggaaggcactgtctttgcgcctgcacatgtgtgtgtctggagtgtaggatggcactggtgccgggcctggatttactcagcccagatcacggctgcttttgtttacgtggcccctgctctcacccacaactccaggtttctggctctcgggaatttgaggcctgtggctgctgtggaccctgggaaagagcctgtgcttcctgagccagtgcggggcctggcatggagtaggtaccccgggggtggacagataggcagaggaagggatgggcaggtggatggggggctgaattgtggtcagttatgggtggcgggtagatgggtggacagctggatagatgaagtactgggtgggtggagagagaaaggggtgggtggacggagggatgggcagggagagaaatggatggggcatgctgcttccagcacccactgggtgcagctgtctgctgtctgctgtcctgggggaaggtctggagagggcctctcggtgagtgtggactcagccagcctagtcccaatacagctgggatgcattgctgctccttccgccatcccagcagctgtccagagatgagacccagccccactgtgtctttctgggattcacaagaatccttccctgggctgagggggcgttgctgtgggtgtatctcatggagagccccaaggagccagggaggagccttctggtggtttgggttctggattggtgggtgctgggtgggtcttcatggctgttcttggggctgccaggcctgcaaggtagacaggcctctggacttgagtgtggctgtggacgagggcagcgtcgccatcagaggcgatgtctagggccaccccctctgacttgcctcctcctccttctgacttgcct

SEQ ID NO: 20439 - DNA, 783 bp, Artificial sequence
  DNA replication origin
cccaccatgtgccccccgtgaggcccccacctgttactgagtggcagggacgtgctcccacacccccatgcgccatcctgcaggtgctttctgctgacttctgtgtgccctggggcctgctctcttggtaggggttgaccctgcctgtgacttagacagcttggagggccaggactgaggggagggggcggtggagtgaaggggagggtgggcgctgctggcaagaaccacaggcaaagagggtgccgggggcagggaaggcctggaggtttgaggagcagaaagtagacccttgaccctccctgggctggtgagtcggggcccagcccagagtgacagggaccaaacctgggtccatgtgccgtgcccagcctggggttcaggtttcttccccgtgagctgagcagacagggagggtcttgggggaaggctgtgggcccttgggtggaagagtcttgggtgaggcccctgaactggtaagcggggcagcggcggcagggggcccagggaagtggggccagtcgggggtcctcaggggtccttcagggatatacctgctgtcagggtgtggggagtgggaagtgggggacggggtggattccaggattccgggttgtgcttggtcagagtggggaactggacgctccgtccctggctcagcctctcccggctgtgaccttgggggaccattgactttactgtgtgcctggagagcctaatccctacctgccagtgggtgacacagaaggcaggaatgcagaaggcctttcagaagttctcact

SEQ ID NO: 20440 - DNA, 967 bp, Artificial sequence
  DNA replication origin
ttccaacttcttccattgggtttttggttcttggtctctcaatttttaagtcatttatattgtgggaacgtttgtctggactaatgtgaattgttttcccagctggtcacttgtctttgactttgcttatggtgctttttgctatgagaaatttcgcatgtttatatcatcaaatttatcatgcttctttctactgactccggattcagggccacagttgagagctttttcctccaccgaggttaaggggaatccactgtgttttcttctggaggtttggggtcttgtcttcagcatttagctccttgtccgtttggagtttgctcttgtgcatgatctaaggtaatcttttctcagagagtggcctgagacctcttccttagaagttcaccccactggctggggccttcacgaggcccctctggcctctaagtggagcatggagtgtggggtcatcgggcaggacacgagatgcgcaggaggctgtgactgaggtggctgtgggatgggacggcgtggtttgctctagagggtttgaaggaagggtgagaagtcaggaccactgctgtagaaaacagggtttgcaggtagataaggtggcgggtgcagcgggaggaagagaaaaggatgctgctgggacccctcgcacctgggaggatgcactttctgtttctgacatgggtcagggttggggcgaaggagtccagctggggacatgttattttggaggtgtttgtgaggcagccaggtgaggtgggttgaaggcagtaagacctgcaggtgggagctctggggagagagtgcgggctgggctcacaagttaggggaggtgtcagtgtgtaaatgacatgagcgcaggggctagacagggcctcctgtagcctgggtgggtggaagggcagagggcaagggccaagtgatggcagctgtggaggctgagggcaaggaaggcaagtccgggaggttg

SEQ ID NO: 20441 - DNA, 1950 bp, Artificial sequence
  DNA replication origin
gcagcttggcacaaagactcttctaagaacctggagggaaccctgctccggcagtgggcagcatgctgtgtgcaaggtgagccagtctgagcccattcccagtgcccggaatggtgcccagtgcagatgggcactcacccttccaaccaacctttgcttgtgtccccgtgagatccacagattcaccctacggagggctccccacagggttggcccggaggctccagctgtgtctgttgaacaaattactctgcatccaccgcgtgctagcgctgtgcggattatagtcccagagacagatgagagcaggggtggtcagtgtaggagcacccagagggagcctggcagggcctggacatcctgtccaagctggccaggaggagtcctcagagccaaagcagtgtggagggtgggggtgcagagagcgtccctggctggaagcaccgcgtttgcaaatgccaggcagcttatgcagccagcgctttgggcaggcgggagtcagggggactgaggcccaaggaggggtagggctgcatgccagccttccaggtgctcctgggaaccacgtggctgatcagacttgtgctttgggtcgaatgtcccagtgggggagtaacctcagggagcagaggaagggtcatggtggtggggatgaagcagcagcattggggcttagagattaaatgaaggaagtcccacggggctgatcacctactgtgcaccaggctgcgtcccgggcatggactgcagcccacagccccactcttggggtgctcatggtctagggggtggacaacagactctggtcccagcgatgatgcttgagtataaaggacacagttggggtgttgtgggggccagggtcagacatcagagctggcctctgcctatgagacagggcccgctggcaggaccctcaagctgggcttttaggctgggcagcagcaggtgcacgggccctgaggtgggccgggctgggcacagtcaggactggcaacaagggccgggaggagctggggtgatctggggccatcgtggtgtaaatactggggcacgacatggagggttcactgactggctgggtgtgtgggctgggggcgccgagggtggaggtgggcactgtggtcagggggagatgaggatggatgggcagggtgcagacaggggctggctgggttcggctctgcaggtagagctgaccggtgtggcagggacagggtgtcggtgaggcaggtggctgaggaaatggtagctgcaggttttggccccagtcccagcagcgggactatggctgtggggagggaggaacccagggagggggcctgagcagggtctttggctgagtgagccctcaagggcctttgggtagggctaccagaggccaggaaaggattgtcctgtccacaggagcttggggaagggggtggggggccagagccccaccttccccagaaacctccgtgcagcaggaggatgagccgaggcaggctgtgctgggaggtagcctgtttgttgtgggctctgggggcctggggagggtgggctgggctgtccacatctggacaggtggaagaggatgggttctgggtggggctgacttcaggaggctggatgagaggcaatgcagggggccttctggctgtcctggggtgggttagaagccactcaggatggcaggatctcagggagcggagggagcctggggcaccctatgccaggcagaggatctatgccggggcccccagggtctgtgtgtggctttctctgtttgtgtctcccctggccctgggggccatgtggccatctcctggctctccggtcgctgaggatccacgggggtccctggagtctccggagcccgtgggaatccccctagaggcgggaggaaggccgggcgggccctggagggtacgtttgcagtggcagcagctccctatctttatggttccg

SEQ ID NO: 20442 - DNA, 731 bp, Artificial sequence
  DNA replication origin
ccttgggggatgggggggtgacgtccatcctgggggagtgggggcggtgacgtccatcctgggggagtgggggcggtgacgtccatcctgagggaacaggggggtgacgtccatcctgggggaatggggggggtgacatccatcttgggggtactggggggtggcgtccatcctgggactggggggtgacgtccatcctggggggacggtgggggatgtccatcctggggggacggggggtgacgtccatcctgggggcgggtgatgttcatccttgggggacgggggaaggtgatgttccttctgggggggcgggggggggtgacgtccatcctgggggagacagtaacatcccaaacatgggggatgatgtccagagtgggggtcttcaggtctttacgggcccctcagcctccccttccacaccccaagtacagcacccacaaggcaggtgcctgggagggagacacacctgtcccctgcctgaagtttctcagcaggattttgggcacaaggtgggtagtgagctggtctcagcactgagcttgcaggtggagaaggcgggcccctgactttagggcgctctgggtgggatgaggacagacgtggaggaaaggagggatcccagcagaggcagcagtggatgggggagggcttcactgcagggagagtgaggctgcgcggtgccctgcaggacagataggaactcccaggcctgtaatcccagcact

SEQ ID NO: 20443 - DNA, 2166 bp, Artificial sequence
  DNA replication origin
ctctgtccacaaacctgtgcttggagccgctggcacaggtccccacgctcagtgttgagtcctttggcatcaccatcttgaagttctgaatggtctcatccttgaacttgagatttgagagggaaatcggaggggtcactggagcgtgtgttgggggcttagcggtttcggctcccccatggctctgcctcccgccatcgtcctaggttgcccattccctgcctccaccgtggccctcaccctggcagggcccaaggagagcggcgtcagatgcatacctcgcgtgtctctgagggtccacacaggccctgtaagtgcccctgtccccaaggagccagacatgagacagcaaacaggaaagaccatgatggctcaagagaccccagcagagatcagagagcccccgtgtttccagtggatgctgggcctgcaagttctggagccgggcctgggcagtggcgacataggtgcagctgggcctagggaagcagggacccggcctgtgggcccagaggctgcccctggctgtgaaggtgggttccggccacctagagcagcccgggagccttggggaagccggtgtgcagcaggcagatcccgcactggaacaccgagccacccaaagctcagagaggctgtgcgggaggggtggggcagggtgtcttgggccgtgtctgtgggggcttccttgagggactcaggcttgcacgtgggagagggagatgttccgatgaggatgcagctgcaggaatcagggtgcgccctccgagctgcaggctccccaagtcccaagtcactggcctgtgggcccagcagcagtttctcatggctcagaggacgctggctgaggcatttttagggggcaggcctagcttgccagtgtccctctgggagctggtggctgccttcaaatcctccagtgaaagtcggcgtttatatatgcatggagctcaagggctgcttctagggggaacacgtgggtaccccgaggggagtagctggctggaggccagagtgcagggagggaatgactccatcccatctccccccacagctgcagggccaggtgggccgtccacaggccactaaggcccagggtggcaccatcacaccttggggagtggccctgggtggggaccgagaagcccaagtgccgaggtgacagggtgacccctactctgccgccacaagcctgcccccgcgtctgcccttgtctaccgacctccgggctcactcagtccgataacaggttagatggaatcgtggtagcaacaggggctgggggctggggaggaggccgtcgaagcccacacagggtgggagccaaggcctgggggccgcacgggggctggaggtgggggcgggcagggcagccgtgggaaacacgtggtggtgccaggacccagtccgtctgccccgagtcctccttccagaaaggaccggacttgctggctctcgggaccccccaccaccatcagagcatatctgggtggggtgagaagcctcccggtggctccccaggcaggcacgtgtccctgcgattgctgtgcctcctccctccccctcaaccgccgcttcccccatgaggccagacactcagcagtggctcctgacgtaggccaagtcagcaggttttctggaagcttccaaagtgctgcaatgctcagggatggcaggggcatgctgacacagctcctgggttggggcaggccccactttcggcctcttcccgccttcctgggggcctgtgtccccgaaggccccagtgtggcaggcctgagcaggtttgggcagcagggcccagcccccctgcgggagcctgcctgcagtgagtgtggatgggtagggcgtgctcgggggatggacggcccagagccaggagagttcccgggaggctggtggcaaggtgggcagtgaggagctggcggtgcagcaaaagccagtgggtactggccccggcacggctgataagcagtgcccagccttcgctgctgccctgcctgccttcccagccgcccactggagctgtgggcagcggacgctactccccagccccccagcccgcagcagagcggcactcccactcccacacctgtgcaaacatccgcccgctggccgggaacacggcccctttgtgcccggcttggcatcagtgccccggcccac

SEQ ID NO: 20444 - DNA, 970 bp, Artificial sequence
  DNA replication origin
cttcctgttccttcactgagcgtgcttgcttatgaggcttctggaaaccaggagagttcagtgggcctcattattgagcgtatgggcaggacaacctgcttgggacataggccatgctacagttgattttagccagcttgctgcatctacacagcacagtgccttcccaggcagtgaattatgtctaacaggcaggggaatgatcattgcctcatgttagggatgcagtcattcaagaaatatttgtcaaacactcagcaggtactagaccctggcccagagggagggatttgataggagcagggacctgcctaccctcccagggttagtggacaaaggggagaaagactaactaatgttgaaggaccgtttgcaccctgaggggagtgctgaggcctgggagcacagcaggtgtatagcaggaacccactggaactagcctggggtctgaaaaactcccttggggaaagtggcaggggcaggccaagggccctctggtggtagggagcctgtgagcacctgggatggaaagaagccaagcatctgaactaccagaaaggcagctgcaggattaagcaagacccacaggtctctaaactttgaaaggatgtctgtccactgagtagataattgattggaatggggcaggggatgtgagaatgccagttaggagatgcctgcagtacagagaaatggtggcctatcaggacagtggcaatagggatggagggaagcagggaacctctagaactatggatgggtgaagtaagcctggcttggtgatgggcttgaggtgatgggcaggtggtgaggaagcgggtgtatcggaaatgaccccagaacttctgacttgtgccactgaaaggatgggtgacactgaaaggacaggggccttcagtagagtgggctataaaatgatggaggctgtggagaggaggtgggggcaggtgactggaatgtgggtctggct

SEQ ID NO: 20445 - DNA, 2001 bp, Artificial sequence
  DNA replication origin
cttggcctggcaaccccactgctaagagtactcaaggagacctcacacaagcacacaaggtgaggtgcccatggaatatcacaggcggggaatttgtcagggaaaaatccaagtgcccaggagcttggggtctgaggttccagggttaggtagagggtggaggcaagcccagaacatgaaaatctatataaatgaatcaactacttgtaagatatgtccccatccaggcccacaattagaacccacagttttgttaagtgtaagaccaaataagctcaattttcatgactttacaaatcagttttcaagataaaaatcctaaccaacaccctttgtcactctttagtaggagggtggacaccattttaagtgaaattgatttagggagcttttcagcctgtgttcgacatccttggagaacacaacaacaaaggctgggagacagctctgtgtccaagagcgaggactgaaggagtccaccaggctacctcctccatctgatgcagctaacaaaggcccaaagaaaaatggccacgtttcgaaaatctgtctttcccaccagaatgtaaaccccacatgagtgggacttttattctggtgaaatctgtgaaatgactctgaagacctgggatcctgctcccctgacctcctggggaggtagaaatggacatgcagggagggtgatcaggggaggattctggcctcctgaggaaggctgaggaaggccagaggaggcctgggggccacagtgaggctggaattgagctgcaccccaagcagcaaaaaggagcaggacaggggcctgaggccaccctcaactcaacattcctgaccctgtcttctcacataatctctctcgtttcctatctcaatggctccaagaggctgtcagcatcacctccatcctacaggcggggaaatgagacttgcaggtatctctgcattgcagagtccaggccagggtcaggactccagccctgccctgctctttttggtcaggggcagagaataatagtggtcactgagtgggagttgtgatcctttggatgtcaagagagaggctgggcacagaggaagcaggcagacaggcagctgataatctgtcctgaggaggcaggaaggtgggaaagccacttgggagctgaagttccaagctccattttcccctcagacttcacttctaaaacacaagttcaaagatagtaactatcaagaatttcaagacagtgacattatagcgtgaaaccctgagtctggggtgcacctgagcactggctctgagtgatggcactggttgcacagctgcctctcggacaggcagatgacaaaaacttcccagctagatagtgagggtggactgcgccctctgatcagacacatgaactccctgggccagtgcgaagggacaggcgcccaggggatgtgtcacttgtgcccagattgcctgtgggctgagcaggaggcagggagtggactcatctgggcgtcgttgctgaaggcctgaaaggaatcacttgctgcctgaaaaaatgacaccattttctctttctcttctgggctgaagaacaacaaaacccccaacccggtcacccttggagagagattcctggctctcccgtagacgtatattttcggcagaggcagtgaagatgaatggcctccttgcgtgccttggtggggggacggctggctcgcttggctggctccagcctcccccttcctcctgtgtttgaggtcaaccctgggttggggttgtaacaactttcgagaacatacccagagtcctgcattccaacactgtttttgcagtccacatggaagggccaaacggcccccagccttgccagggaagcctcagggtgtgaacttctagagggggcttttgtgacccaggcttttgtccccggagtttatggcaatgcttggcattcagaaggcgcgcgccagcggcgcggaggggacggacaaggggaggggccggcagacgcggtcaagtgtcac

SEQ ID NO: 20446 - DNA, 848 bp, Artificial sequence
  DNA replication origin
cctcttcccaggaccctggctggcttgctgcctgtgggtggtcaccagcccccagcaggagcctcgagtttctgggcctccagagggtgggtgggaccagagccacccctgcctcaggcaagatggggctggggcccatggggcaggggagaccgccagggcaggggtcccctccctgggccccagtgggtgggacagaggcccccaggctccggctgcaaggcgaggcctcggtggcggccacaataaatatgtttgttcaagggaagccaggctgggagctgtgtgcgccggcccggtgaggaagaaaaggccgcttgtgccttgcacactggggcgattgttcctgctcacgcaactgctgccccgtggccggaaaggtcagacggccctcgggccccgtcggaagcaccggtgcctcgggccccttcgctcgcgcctgctgtaacattcgcctgcgctcctcactgcccggctgcatccacatcacctccaggccttggcacggggagagaaggtaccaggcaaggtctgaaagatggcccagcaaaggcgagggaagaaacgaagccaggagtcccctgcccagcccaggcgtcaggaatagtgtggaaagaggaggccccagctggtggcctcagcaccctgagggagtggctctggccccgagggtcttcgcagtgcccacggggcagcttgttttgtggactattgtttggatattgggggatgccaaggtgagggttggggagaggcccaggagcacatgagaggtgccagcaatgctcctgaggcaagaccaagcatcgtcctcacccaccaaacagaaggctgagaggcactgcctg

SEQ ID NO: 20447 - DNA, 786 bp, Artificial sequence
  DNA replication origin
tgccagggagagtggggctgcagcagggtgcgaccgtcacagccctaactctgtgatggatgcctgctgttgtgatcatggacatgaggatgtgaggcggtcataatacaggagtgggctggaggcagggaaaggggttggtgccccctgcccaggggaggcacacctgggggcacagaatgacactgggtcctctcagcttcatccatttcctgctccaggcagggccctgggcctgggctgcagggattcaagggagaaccacaccctcctccactgctgggaggggccgagcctggcctggactgctggccccaggagcctgggcctgtggtcagggcaggaaatggagaagatgaacgaggaaaggagaaactgctccaaatggtggggagggaggagagacgagggcagaagtgagcccctggctcggtgggggtgggctgtggagtgtgggggcacagcgggttccttactgagcccagggggaggcagggtctggagtgtgggggcacagcgggttccttggccatgggggtgggcagacgtgttatcatgaagccgggagatcaaggaaggctctctgagggaggtgacatttgtaccaagcaaggaaagaggcagaagatccttcttccaggctaagcgccatgtgagaatgcagcaggtcggggccactggcactagcgtgtgtgacaagggaatctcaggcttctgctcacctctgctgggggcagagaccctggccagagccatggccaacctccccccactcccagccaggcc

SEQ ID NO: 20448 - DNA, 1430 bp, Artificial sequence
  DNA replication origin
acagccccatggggccaggcacctgaacaccagccttcgctctttctgcatgacccaatttgctggtctcagggccccacggccgccccaggccatgggcagatggtgccaggtggggagagggtgacgctgcaggtcctgggggccaggacgggtggggcaggagcaggagcctgggccgggctgtgcctgccccgcctgcccggctgcagccgagatggaagcaggccagagccaggcgttgccagggaaaccgggcggcagacgcactccctgcccaactgaaactcctctatttttagcctctcagctactttcagataaagtccatgtagacggacttgctgttcggcaagataacagcccgcttcaaaccacagagacttcaaagggcagtggtgggctcagccatgggcccgagaaaggccctcccaccgcccagatcccccggcagctcccagggtgcctgggggagaggctccggcctgagggaccgagtgatgggcacagagcctggtggggagtgggggcctggtgggttcggggtgaacagaagatgcctctcttcccatgaacccatcccagctgggccctgcacctccctgagccctcggccggccccaagtggaggccccagacagctgggcccaggagaaggctgggatgtgaggccagcttctgccaccctccactcaggacacagccaggaggctcgcagagcacaaagcagactacgagaggcagcgggaaagagctggggggagggggcacttggtgccacctgccagtaaagacgccacttgtcagaggatgagaaaccagcctggcctggctccttccatgggggaccaatgccccgccaggtgggcagtgggcctgggcccctcttgggagttgctgggcaggctgcagtaggcactggcgggaaggtggggaggcctgcaggagcttcacgttcacacgcagaccacagggaggtgcctgctggccccaggacgctaaccagaaccaccgcaggccggcgcgtgagcctaccttgtcttctactcggttcaggcgggcgccgatcgtgttgctgccgcgatccttgctcttttctatgggggataaaacacccaaatcagggccaagtgctggggtgggccggggaccccagctgggcttgggaagtggggtggtagggctgggggaggtagctgagagtcaaaatgcctaaacctactaggacatttttaaaaagcatgctatgacaaaaataccaggggtggtacggtggccgggcatggctgcagctggggacctgggctccatcctgctccacgctctccacctctgacctctgagagccctagggggctgcctaagctggccacactgccagctgtgcaagcccatgccattccactcccagggcgacacaggcctgactc

SEQ ID NO: 20449 - DNA, 1844 bp, Artificial sequence
  DNA replication origin
aaggtagttgggaggtctgtgttggagcagacactgcactgtcaagcaagagttttgacgagcccgcaggactgtgacgagaagggagacccccagacccctctctccaatgtgggtccctggccaggacaccaaggaagaagagggctccctgccagggaaactgaggcagccctgaacaagctcagctggcctgcactggtgaactccctgcagggggacactctaggcctccctggaggggtgccagccagctgtgcatcccggagacctctcatcctatggctaggcaagctggcctggggtgggactcactgcacagcccagctgaggggctgagctgagctgagaaaacagttggaggctggggccttgactcccttccggcaggcagccagaccagcgggatgaggtgggggagggtgctggtagggaaggccaggggctctggctggggttggcagggccggcgggcattggcaccgctgcacgcctgctgggcctccgagggccgggcggctgctggatttcctgcccctacttcccgaagtcagcaggattgcgcttggggtatttacggtcccgatggctgcactgataacggagaaaactcgagccaggctgtgccaccaagccctccaggcccagccaggccctttcctagggtctgtccctgaggggtgcaccagtcagtggcagggcaaggaccgggtaggctaccacctacccacctaggtcagcacagctctgtcaactccttgatgggcagccaggttccaggtagacccctcagcggggctgagatttagtgtcgactgtgggtgccactcaccacctcagagaccccaggcagaggactcgaatgtaatggcagggagccagggcccaccagggctgtgcatgcagaatctaccagaatcctcgtggccccggctcagagcctgacagggcaccaggatgtggccccagccttgttcttaaaccttgccctagggatcagggactccggaaaatgcttccctttgttgctcagatgtgaagaaattgggtgcataattttgtgccttcaaggccagcgctggcccctctgcaggcccccacaccgaccttggctgactgaggactgtgtccttgttcccaggccccagcaggctgctggacggctgctgtgcacgtcaggaaggggccattgcacttcaggaggccctgtctgccacccaccatcacccccgcaggatgccagactccaggtctgggcttagagggtggcctgtcccatggagcaggggcagagccgtaagaaaggtctgggacagtagtgtaggcaatggaaccagagcttggcagggagtggcggggaaaggcgggggctgtccccagcctgtgctgtccagaaagggccaccgacactcctgcacgtcagggatgttcacgccccgcctgcctggctgcagccgagatggaagcaggagtggaggctggggaactgggtgccactccctgtctctaccacggctttccttgatgtctagaaactcctggccatgccaacaacacagggtacccggccctgctgtactgggtgtgccagccaggagtcacccagcccttgcgcaaagagaaagccagggaaacaccgtgttccccgggcagcagagaggccaaggcttctgggcctctgagcttgccaatcctgtgagctgacctctcccgggtcttgcttcctgtcctgccagatgggcgctatctcccactgggccatctgcctggcaaaggtctgcaccagccctgctcaggtctgtgctgacagagggtggccaggcccatgggactcagggtactgt

SEQ ID NO: 20450 - DNA, 1277 bp, Artificial sequence
  DNA replication origin
gacgctagtgtggggaaaagaacagttcttgggggattgctgagggtaagagaagcaggaagccgctggatagctggggaaagcaagacctggattcaggaggcctggccagggccacgtagtagggttgaggcggaacttgaacttgcagagagacccctgatgccatcctcatgctcacaccctctgagctctgccatcagccaagcaggcctcctgggccaggagcttgtgacactgcccacgccacagggcctttgcacgcgagcgatcggcataatggtgcctgtcccctccactgggggccaggaggctgaggcgctgagagcccacgtgactcgccgagtctcacagccatcgcgtgtagggggcagagcttgcaccccagccactggctccaaaggcgtgagaggaggtcaggcttttgccctgtgtgggatgggaaggggggatgggaaaggggtctgtgtgtggccctgtgtgcacagctggatgctgggtgtggatgggccacacctggatgaggaccctgagtgatgagcccctcctatggggttcagggtcccatgggtaaccaagagtgacaaagtgagactgcacctgcaggatggggcttggcccggctgtctcagtaggtgctgggccaggctagggcactgctgccagggctgtccagagcagtagaaccagaggcaatgccagctcctggtgtcaccgagtggggacagtgtagacaaccccagcagaggaggacgggagccacatcagacaggcttctcctctgagctgggcactctccacggtcccatcacccagtggcagttagtgggggctgtctctgtggcaggttgagggtcatttgggctcatggtatggcagagggtcattgggatatgatctgggggtcatgacctggtggtcaaagggatatgatcccctccaagtcccagggcagggctggaatctgcagctgacaagtgccctttgccagcctctggcaacctcatggcaacctatccgaggatgggtggcacagagaggagcctctgagtggggaggacctcacaggatgttaggattgggggtggtcctcccaggggagaccagaggaccaaggtgggaccttgtttctgaggttccctttcccatcacactcacctccacgtgacatcactttactggggggaaaaagaaacacctcgaaatgagcacaccaactacctggcgcatctcaatcttggacaaagcgagaactcatggtggatctcagagccaag

SEQ ID NO: 20451 - DNA, 1304 bp, Artificial sequence
  DNA replication origin
ccgtgtttaatccacaaaaatttccatctgcctctggagcactcggaacccgggcaacgaaaggctgttcgcgcggcaaagtaaacaccggctccgtgcagggacggccgtgcgccgcgtcagccattttgtggacgccaccgtccaaagtgaggcggaagcccccacctgcgggctcggagccagggcaggaagccggtcccaccgcccggagcggcgcggcgaggacctgggcatccacctgccgccagcgccacctctgacctggggccagaacccgagcccgggaggcccgggccccccacccccacccgcagctgccgccaagcccccgcacaacctcggggtccacacctgacggggagggcccgggacgtgctgggcctgtgccgccggttcgccccgtccttccttccccgcccgcggtttcccagcccagccggcacggccaggtcccctccccgggagggaggggaggctcgggtcgggacatctatttttgatggtgaccaagccactgcttaatatgcagaaccggctgggggcaggctgtgccctgacccacggggtgacaagtttgaaaaggggcccattttgaccaaaatacatgtttttctgaggttggccagggcagccaggcagggtttgccgcacagacaaggctccgcaccgccctcacgccctggcccctgcaggcggccagcccagccggactcccgcaattgatgctgtcgattatagatccgcacacggtgcccagtgagggctcggccgctgcgggctccggccaccgtcctgctcgggcacctgacacgcccctgccgcctgctgtcctatcccagcctctctctgaagcagttgcactcacagaagttgacacacacttgagctgaatttttaaaaagacttaaatttcctctctggccaatattggaggcctataaatagagtcattcaggagaggcttgagggtggcaactgtcccccacaggcaggctaagagagaaacaccccaagaaagagagacgctagtgtggggaaaagaacagttcttgggggattgctgagggtaagagaagcaggaagccgctggatagctggggaaagcaagacctggattcaggaggcctggccagggccacgtagtagggttgaggcggaacttgaacttgcagagagacccctgatgccatcctcatgctcacaccctctgagctctgccatcagccaagcaggcctcctgggccaggagcttgtgacactgcccacgccacagggcctttgcacgcgagcgatcggcataa

SEQ ID NO: 20452 - DNA, 1720 bp, Artificial sequence
  DNA replication origin
tcccgggctcgggttctggccccaggtcagaggtggcgctggcggcaggtggatgcccaggtcctcgccgcgccgctccgggcggtgggaccggcttcctgccctggctccgagcccgcaggtgggggcttccgcctcactttggacggtggcgtccacaaaatggctgacgcggcgcacggccgtccctgcacggagccggtgtttactttgccgcgcgaacagcctttcgttgcccgggttccgagtgctccagaggcagatggaaatttttgtggattaaacacggggccgaggcgcgctgggctgtttgggttggcaacctgagccctccccaccccgttccgcgtccgctgcttcccgccctggtccggcgcttccattcatgccttcccgggtccctccgccacccctgcaggcccggcgtcccctcccgcactcccgcggcctccagggggtggccctgcaggcccagagcagcgtgggcctgaacccctctccacgtgtggaagacgctgcagcaataggaaggggctgctcctttgagggcccttctcaaacctggagcccctctggccgccagatctttgtctgtgaaacagcagccagtgtgtggaccaggcaggagtggatggggtgtgtgcccacaagtccagcacccagaaaacccccagcacacggtcccttttacagtggcctctgctctcaggaaggtggaaagcgccaggtggataggagggacggggccgtgacccctccctctgcccaagagaaactctctccctcaggtcagacccaggcctttcaagaagaggttgcagggtgtgcgggctgccaggaaaaggtctgtgcgggtgagggagcgcatcctatggatatctagaggaagagcgttctgggcggagggcacagcggttgtggggtgcgggctgaggcagtgcctggaccaccttggcaacagcaggaggcactggccagagccacggacaagggggagcctgggggcgcagaccaccctgtgaggcctcaattagaggagatgggggcttggggccccggagggctgagatccagctcatggctttggcagcattgttcttgcacgttcaggattagccgagtaaggtgagcctgacagcggggccagcacgcagccccctgcccctcgccccctccctgcccccagtcccccacataggtgtcaaagtgcacagcaccccctctcttccccgccccccgggagccgcaggtcaggcacacaagagccatctgtgtgggcggcaaggtggctgcctgtctgctgcccgcaaagggatgcttgtccagcagggtgaacaccccgtcagggcaggagctgctgaggagatgctgatgcctgggtgactcatgctacctggccacccatcctcgctgggctacaaatgggttcagcctcatgggcatcaggcagggcccgcctgggtgcacccgacaaacacaagggctcttgttctaaggctctgtgatagcccctcttactgagagggaccatatccaataacgggtggaaattgcactagcagggtcatgtgagggctccgagctttctccagaacccaggaatatcctcaaaactgaggctgggcacagtggctcacacctgtaatcccagctctttaggaggccaagacggggggatggcttgaggccaggagttcacgaccaccctgggcaacatagc

SEQ ID NO: 20453 - DNA, 1089 bp, Artificial sequence
  DNA replication origin
tggctcagggctgggttgatctatgcatgtacatttgcctaatttgggacaggggaaggggctggaggagcaggaacaggacgggggaaggagaggaagaagaggaaggagagcagagggtacccgcgtgaagggtacccacgaggaaggggacattagacaagaatgcaggtggtcaggcggcacttacctggcaggtgaaatctaaacaggcaccttcaaaggaggacaaagcagctcccttgggtaactaggaagaggacaccagctggcgaggggcaaagcaaaggacctgggacaggcacgtgcctggaacagaaagggagccagtgtgtctgcatcaaagtgagtgagagagcagcgcaggagagaaactctcagaggcaggcaggggccggaccacgggggcggtggtgctcagattccatgtggctgtccatccatggtgggccaggaggtcactgttgtggtgacaaccagcgctctttggaatggactgaagtggaatgtgatgtttaacttctgtagctgtaagttcgagtgtgtgtgtgtgtgtgtgtgtgtgtggtgtggtgtgtagcatgcttgcatgcctggacacagtgtgtgttggcatgtgtggtgtggtgtgtttgtatgtgagggcagtgtgtgtgttttgttgtatgtggtgtgtcttctacgtgtgagtgtggtgtgtgttgtgtctgcatgtatcgtgtgtgtggtgtttgtgtgtgtgagtgtggtgtgtatatgttgtatccaagacagccaaagggaagttccaaggggctcgtgcactcggtgtccagggagcagcatctgtgctgtctgcaggtagtcaccgttctccatcctgttacagcaaataccctcctctgcatttttcccttgtgtttgatttgccaggagcagaatttctgggttggaatcgggaacatttagaggagcttctcagtagagttgtacagagtggaaatgagtcggcaggctgcatggggggttccagtcacagcacagagggtgtgtgttttcggtgcctgccctcctgagctccaagtgtcccacgcctgcccgtcagtcctc

SEQ ID NO: 20454 - DNA, 1333 bp, Artificial sequence
  DNA replication origin
cccctcccccgccatcttttcatgactctcccccttcctcaaccctgcgcctggtcaccaagtcctgacaacacctccagcccctgtctctatggtcccctccttgatctggagccattcagccacatggagtatgtcctctgtcgagggggcagggactcaaaggatgagagaaggaacagaggggaggaccaacatctcggctgatcctggtctatttttagtcggtggtgggctgtcactccggaggccagtgactgcgtcatcagtgccttttgatcttgttgccgcaagatacacaggaggcagctgctcactgcttgtggaaagaatgagggcgggcacataggcctggggtgtggggagcattaatgagtgtgagtgagtggcggatgagtaggtagatggacggggagctgcagggagggagggttgcagaaagggatgcgtggaaggatggttgatggatggatggttagatggatgaagagatagatgaatggataaagaggtgaaaggatgaatagagagatggagggaaggagggctgaataaagaaatggatggatggatggatgatggatggatgggtgtgtgggtatgtggatggagagatggatgaatggttaaagaggtggatggatgaatggagagatggagggaaggagggatgaataaagggatgggtggataatggatggatgaatgggtaggtgggtgaatggatggatagatggttgagtgggggggtagatggagagatgcatgaatggatagaggtggatggataaatgcagagatagagggaaggagggctgaataaaggatggatggatggtgggatggatggatggatggatggatagatggatggatggatcgatgggtgtgtgggtgggtggagagatggatgaatggataaagaggtggatagataaatggagggaaggagagctgaataaaaggatggtgggtgggtggatggatggatggggaaatgaagagatgggtgggtggatggatggatgagtggtgaatgaatggatggatggggagatggagggaagggaaggctggataaagagacggctgggtgggtgagctgatggagaaatgatggataggtggatgggtagattgagaaatgatggataggtggatgggtagatggatggaaggagacaaggaaggaaggaaggaaggaaggaaggaaggaagggtggaggtaagggagggagggagagggagcaagcaggcttggatgagtagctaaagcacctcaagcaagggtgtctcccttagaaatacatgtgcctccaagtcctcgaggctg

SEQ ID NO: 20455 - DNA, 821 bp, Artificial sequence
  DNA replication origin
cttcccgggagtggagctgggcatgcacactaaggcctggaggcttgtgcttatccatcatatagcaggcctgccctttccacagcacaaacaccttgacacacaccgtcacacacacccatattcgacacacacattcacacaaacacacccagacacatgcatgcacatggataactaactcttccagcaagagccaccccctggctgaagtgtgaggctgtccatggaggggccagagtagaggggaggtgggtgaggaggctacgcagaggccctgggaggagggaggctaggcccaggggtggaaagaagacagatacgagaggggatttggagacacaatccccagacttggggacgagctggatatggtggtgaaggaggggagtcttcaggaaagacccccaggttctggcttggccatatgttggaggctgaaacgattcatccagacaggagcagggaggaggacacgcagggcctgaaaggttctgaggtgtccacgtggaggtgtttgcccggcagtttaggctgcaaggctcagcagggagattggagctgaaaacagaggctgcaacatggaggtggtacctgaagaaggggtgtggatgaggttgcctggcaagagattgcagggagaggagagagtgagaatggggccactcaaggggtgaacagggccttgcagtacaggaagcagctgggggtggcgggaagaagacagtcaggagcttgggcatcctagaggcccccgggacagctttgaggaaggaacgtcccctgggttccacaccacagagccatagaattctgtactt

SEQ ID NO: 20456 - DNA, 1380 bp, Artificial sequence
  DNA replication origin
cctggggacagcccaaataagagagaactttgccacccgcagggtcccagagtagcagaagcttcagggctgatgtgtgcctggtgaatcagcctggccccagacctcctctctctgcttgctttcctgtccacaatccagtgcttctgtcctatggtccccagcggctgctcctgcattcaccatcacatctgcattccagcagcaggagggaggtaaaagacatgaaggacaggccccactcctgtaaaaccctacacagaagcggcccacgtcatccccctttctgtccacccgccggaatgtgacgcacgcctgagtcgctgcaagggcccctggggacggagtctctattccaggcaggcaaacactcagcttaattcagggttctgttgattaaaaaaaaaaagtggggtcgggggggcgggggagagcggctatggagacaagtggctgttttgccagagggaaaattccacatgtggcttggaggccagaccagaaggactcagataggagttgggcgcttgagggaggaaatgggggtacacttcagcggctcaggccagggtgtaagtagcaggtatgtggtggtactgttttccggaatgaagaggaaggggcgggcagaaggcagcgagagctttgtttggggtgtgtcgaattcaagatgcctctgagacatggaagtggtgaggtcaggggccgggaaccctatggtggtgttggccctgagtccaagccaggcaccaccgggcacatagaggtcttgaaagctcgaatgtggggaggccagcaacagagggaacactacctgcaaaggggcgagggcaggacaaaggctggcagcaccacacaggagccagcagggaaggggccacagccgggactcagaggaggcagccacgtgcagaaaggcacccatgggaacatggctcctgggagctggaggacctcagcaggcagggactagcacccaagaagaaaactctgagaagtcaggacaggagatggtgtcgtcagggggctgctggaaggtttggtgaccggagcagcaggtgccagagctgaaagcactggttaaacgtgatgggtaaacacatgtctatttcagcttctttgaatcccactaaggtgacagtaaaggcatgaaaaacatggaaacatgtaaatcaactagggtaaagtggtcaggagaaaagaggagaccaaaaatatgttgacaaaggtttggaagctgggaagcaggaggacagatggagactggcctaggagactggagagggtagacaccaagccctgcaggaagaagagccaccaagaatgaggcagttcccaacccaggaccctgacaggcaggtctcaccccagcccatgaag

SEQ ID NO: 20457 - DNA, 759 bp, Artificial sequence
  DNA replication origin
ggggacaatgaagctatcacctgtcaggaaggctgggggtagtctaggcagttgtcccaggtcctaagcctgaggcccagctgtccacctgcagggctgcctggaggtggaggtctgcctgggcctcaggccacccccctggagcagaggctcctggtacacgggcagggcctcctttccagcttcctaccaggggcatgtccagctcaggccactgcaagaccatgtgccaggggctgagtcaggcatatcccatggaccctggacaggtgagactcttgaggctcagagaagtgaaatcactgggggtcatggagtggccacttcctcgctgtacctagccttccagggctctggtgggggagggaggagggggcaacggagagaggcagaggagggcagcggggaggggaggggagggcagcggggagaagggtgctggaggaaggaggggagcagtggtggggaaggggaaaggggaggaggggcaatgtggaaggaagcgggggagagaggagcggaggggacactatggttgtggccatccaggacatcaagaggaaactgactgaagtctagagaaggatcaggaatagatctgggcctaagggtggtggttcagggcacagagtaccagagggacccagagacctggagagcttcttgtgtctccacagtcagggagggcttcctggaggcagaagcaccttcgacagccccacagtgttccaggcctacaaggcattcaccccttctctc

SEQ ID NO: 20458 - DNA, 1662 bp, Artificial sequence
  DNA replication origin
aaggatcccttggctgccccaggaatgcaggttccggggcaagaatccagccctggctggttgaagtccatcccaagtctccctccccacgaggctcctgcagatgccaggaatggggctggattccagattccaagcctggccgcccagcccctatctgggaccccagcccagggcccccaggcctggcctccaacctggccccagcctcaggggagctgaattcagagaatcctgtcctaggagccagaagcgggggagggagggagggcggccctgtcctgggtgcaggcccgggggctgggggctgcccgcccgtctgggtcagccgcagctgcaaaccggccctggctgagtcatggggcctccatctccaggcctggcttgaggtgggaatagcagtgaggttggacatccaggcacctggagggtgggcagggctccctgcggctggggtggccagtggcacctggctgttgcccccctgcaccccagccctttggcccccaagtctctgccacctccctggggttctgctcccatattcctcacacccagcacagaacccagcatgtctcctgtagacacctgcatataaaccctgactcacacacacacacacacacacacacacacacgcacacatgcaggccaggctcctcggccagtcaccctaccggcagagctctagacatttctggcctctggtgactattcttcaggcagctcaccctgcaagtctttattgagcacctactgtgtgccaggcagtggtacagcaagggcagaagccccacctccaaggagctgaccccctgccgtggcagagacagaaaacaaaggcagcaccacagcgacgagggcctgagaggaaagtggagcaggagcctgcagcatgctggggcaggggtgtctttagaaagggtactgggagggccctggcaagggacttaagtaattacttaaaggagggaaagggtggcctggggctcacagaggaaaagccttcctcatggaggcggcggggcagcgggctcagcctgcagtgtccaggagcgacgggaagcctcgtggggctgttgggagacagcaagacctgggtcagcagagcaccgtgtggggtaagcagatgacagggcagtgacagggtgatcgggcccggtcagtggtcccaggggtcggggacaggtgggaatcgaagtcataggaggcggggcaaaggccacggggaaagggacagagctgctcccaaggacgcaccaccatggggtgccccgtggcgtggcgggggtgggggtcaggacctttagcagaaggtaaagatgagaccaagaggcagatgggtggaagagttgaaagcagccaagtgtcaccaaggcatttctgagggagagggacacgactagtggctcaaatctttagaaatgaggggatgggtctggtagagcaccccagattcaaggcgggtggcttggggaaagcagggagaagggtctggaaactgctgctgagcaggagcccccacacccacagagcaggtgcagggaggcccatctgtccatccgtctgtctgtggggaggcatggtgacgtttcaggccggaggtagaagttttcacccaggaggtagagggtgaggccggactgcactccaaggggagga

SEQ ID NO: 20459 - DNA, 882 bp, Artificial sequence
  DNA replication origin
agcccccaggctgcactgtgccacagaacagactccccggcccctccctgctcgagaggtgaccaaggcccagggtctcccagcgagcaagaggccattgaactgttgttggctgtgcagtgccctgccctcggggaggcggcctctaagaagcacacaccaccagcaggaaccgggcagacagaggtgggggatggaaagcaggggaagtggccacagccaaaccaggagggggaagggagggggcctcaccaaggagaccctcacctggggcctggagaatgagaagggtctggaggctaaggagaggggtggatgctccaggaggcagggccagcccatgtgagggtcctgaggtaggaaccagaggaaaccggctctggggcgagaagggcggcgcccagggggccacaggggccggcggcgagggaccctcagccgaggctggtatctcgagaacagcagggatgcctcaaaggttctcgcccagcaagtggacattgtggtgtgggagatcagcaggtgccggtgctttctctgtctgcaggaaggagagggggtcatgggccccagaggcctctgtcttagagaaaaatggtggcaacgtgggacagactgaggaagccagcccagaaacgtcccgtcccaaattcaggaatatttagggtatacctgctgcacgccaagggcagtttcaggaaggggacctacttctgagaagcaaacaccaccagtagggaccaggcagacagaggtggggatggaaggaagccagactgacctcacgtggctcacagccactggcagggtcgggggacaggtgccaaactatccacatgcccgtcaggcacctggaggagtgtgaaacggcatgcagaaaga

SEQ ID NO: 20460 - DNA, 787 bp, Artificial sequence
  DNA replication origin
ctcaaaggttctcgcccagcaagtggacattgtggtgtgggagatcagcaggtgccggtgctttctctgtctgcaggaaggagagggggtcatgggccccagaggcctctgtcttagagaaaaatggtggcaacgtgggacagactgaggaagccagcccagaaacgtcccgtcccaaattcaggaatatttagggtatacctgctgcacgccaagggcagtttcaggaaggggacctacttctgagaagcaaacaccaccagtagggaccaggcagacagaggtggggatggaaggaagccagactgacctcacgtggctcacagccactggcagggtcgggggacaggtgccaaactatccacatgcccgtcaggcacctggaggagtgtgaaacggcatgcagaaagaaggaagcaggcttggggctgggggccagggaccggcgcgccgggaagcaggctgcagagtgaggccagggatgggggctgggccagaccacagggttgtgagcggactctggcattgatccggagccactgagggttagagcctatgactgacaggggtctgacttccagtggtatggggccaccctgctgggctggggaagggaggcgagaggaagtatctaaggtctgcttgtggacttccggggacagcgaggggtattgctggggtcctaggggctggtgcgctcagaggttccagatggcccagcaagtggctgagggcccagggtaggggaggatgtgggggcagcagggccgatgtgggcagacctgga

SEQ ID NO: 20461 - DNA, 1001 bp, Artificial sequence
  DNA replication origin
cagcctgcccgacgttcctgcccgcctggcccccaaacagaggccgatgggacgagccctgcccggggttgcactaggtgggcaggtgggcaggtgggcaggtgggcagctgcctcgggctcttggacagagccgcccctgcctggcgtctgccggcaggaagctcctgaggccgggctagggataggccagcccttgggggaggctcgagaccccatcccagcctggggcttccccaccccctcccacctgcctggcagtgaggcagctccctggcctctgggtgcacctgggcctcctgcccaggccccttccaagggaagagggcaaaggggctccagtgccacccagggagtgttgtgccacgtgggcccccctggctctgccactgactccctccatgacctctgtccccaccctgaagttgacatgaatgtccgcacggagcagcctctgcaggtctgtgaggctgtggatgtgacagctctggctctggcacaaacgtcagccccaacccagatgcagggagggaggtggctgcgtgtccaggagcacggggccatgtggcaccggctcatgtcagcagacacggcacacatagaccccctgggggctatgacgaggtgagggctgagccgagggagaatccaggaaggcgtgcgggccgagaggaagaggaagggaggctctggtggctggagccagctgggggagggaaggcagcaggggctgggatccctcagcccccacagccgtggtgcggactttgttgtttgctcagagtacaaagaagaggccttctccgggttcttagcagacgagcgcgacctctccgaccagggagacagacaagaggggaggttatgaggtcacctgggagaggtgtgggttccagctcccgtcgccactccccgactggatgccagaacgagcctgtcgtctttcacctccagacagcagggccctggctcccagtatcaaagcatgtacaagagcggtct

SEQ ID NO: 20462 - DNA, 943 bp, Artificial sequence
  DNA replication origin
ccgtgcactccaggggtctgcaccctaggctgcgccgggcgggcctggtccctcatgcgcccggccccactgctgatccagccggataggcttggggtgaggtgtgggccagggctgggttctgtgcgggtgagacaaccccagggaagatgctgctgggtgacgtgggcacaagccccgggatggccagagagggagcaaccagtttgctagggtctgggtggacccgggccagcttcaaaggctgggtgctgtggtcgtcacccacagcacctaccacggaggctgagcaggctaaggaagaggcggccaacagggtgctgtgagaggctgagatgagaggggggcgcctgcctgagtggggccgagcgtctgtctagagggctaggtgggcagcctccacctgggagggtgggactgtgccctgcccagagcaggagcccaggggacccacttccagccctgggtggtgggggctgcagtgtggaggctccctggctcccctgtggttctgccttgcaggtatggggtgagtctgagacccaactgtcctgaacacaagggcaggtgtacatccgaggtctgacggtccaggccagagggagccccatgttttatttttcccagataaacctgatgtgaggcccagactatggaggaaaggggtgcaggacttctgtggtttggcaggggcaggggcccagggccatccaccggggtctctcacacccaaggacccgccagcacttcagtgctctgcaaagccacttggggacgagccacagaggcccacactccatcccacagatgcagacactgaggcccaggaaaagagggtcagagtcactggctgaaagtgccatgtctcccatcctgtccccacagctcccaccccaaggctccatctcgagaccacggagctgccatatggggggacacagtg

SEQ ID NO: 20463 - DNA, 1563 bp, Artificial sequence
  DNA replication origin
gccaggccctgtgccctgccactgggtcccaaccaccatgccagtgatgtcaacatcaccatgtgggggccagggcgcttggggtaacaactcagacctgagacggggcccccacaccggccaggaagaggtggccttgctgagcccccaagtgcaggctgtgccagacagcatggtccatggggtattggggcctctgagagtggggctcttctctctgggccttttaggaggtggcctccttcagagagggccaggtggggccactcttggcctcccctctcactcaggcccatcccccagccccatcccctcctcaggacccctcatcggggcccctcctgggcacggtcagctgctcgtaggtgggcagggtgttgctgggcaggaagagctcagggtcgacggagccgccactgccgcagggctgggtgatgtgggccccgccctctctgggggggccgccgctgccgggggtgctgccaccgtgcaaggagagcagctggtgaagcatgtcggtgatgagtgccagcctctggtccagctgcgtcacctgcggggacaaaggcagacgagagagtcagtggtgggaagcacccaggtgtgcagacagcctcagggcccaggtttggggccagagaagggaaggtgccaaccgtctctgcaagtgcatgctgtatgcaggcggcacgcacgtgtgcaccctatgtctgcaaggccctcggtcgcgcctgtgtgtgtgcaaggaatgtgcatgtgtgccgattggagtccatcccgtgcgtgctgggagtccctatatgtgtccacaggcattcaggctcagggccaggagctctcctctcctccttctctgctccccaggctggccggccttctgtgccacatccccgcatggcagggtctgcaccagggacccggacctgaaatatttgggtttgcggcagcctttggcttcttgaggccaggcttggggacatttgggttaagggtcaagaaaggctgggggctatgtctactgtgtctggaggagaactggacagagggcagagttcagcaaggctggctcatgggcagggcctggggtggttgaggaggcagagggcttgggctttgcctgggtgtgcaggggatgcccctgctgggccacttccaggaggggcttgcagggcacagggcttgtgcctctgtgatgctttctgcaagggggtgggggtgggtttttttgtcatcccccaggaaccattatgccatgtctttaacctagcggggacaccactattttcccagacaccatctgcacccacattctgtggtcagagcagtgccctagagcgtgccctctggctagccatgtggcctccaccttctcaggggctggttctgcagtgagctatgtgccagggtggctgccctgcaaagctggcagggaggtcaaggcaggacagaacccgaaatgcacccagcacagagagtaggtgatcagaggcctcgcagtgctgcggaggcagcagagaagccccaaacgagtggacagccaggtgatctgagagctccttggaa

SEQ ID NO: 20464 - DNA, 2026 bp, Artificial sequence
  DNA replication origin
gccgtgaatgggtcggggctgcacatgccaccgttgcccgggcgacggccctctcgcagagaggtctgccgggccattgtccggggcccgcaggacgtgccacacaccagatggtcgtgtgctgtctaggtcacttatcgggggacagagtgaaggaatgcggccggcacggcgggccgaggcgccatctgttccctcagtccacgggcaccggcgggcattgagcactcggccggccaggcccagcctccgccatggctttaattagctaattccataattgggctttatttcaggtaaattgcatttcacacccgagagggctgcaatggcccgtccaggagaggagtcctcgggcactttgtgcgcagtccataatatggacaacaaggcgggctgggtgccggggccgcgcccggcccagatgggcggccccacggagctccctgtgggccagggtcccggggtgggcggccggggctggggggcctgggcgctgtggagggccctgctttccggccggcatccccgggtttccacaaatatttacccaacaaggaaacaacagttcctgcctttcagtaactgctgctcccgctcctcccggaggggtgcaggccagggaagcctgggaagccccgtgctgcccctccacctcgtccatcccggtcagtgctggccaggccagatgccaagacccatgggttgggggcacgggcccagtgggcttggcaccaggtgggacccagggcctttccctctaacaagggcttccacccctactccacacagaaacctggggcccctgtccctgccacctgctgctggccgcctcctgcccccagtggactcaggacagccccatccttgatatctcagatgccccaagccctcatatcctgagacttcgggatgggctctggaaagaggacagaaggcggctgcagtcctgaaggactgagaaacggtccaatagctgaggtgggggcacagcagatgcacctgccccggttgagtgtgtctgtgccgagagtgaggcactctttccaccttaggagaggcgggcctcacagaaagctgcaggaacagggtcagggcgagcagggtggtggcccctctgtcccactcagagaactggacaggctaagggagcatcgtgttaccaatggggaaatagaggcccggaggaggccaggggtgagcatatgggagcctcaggggccccaggccttccttgcaccacaacccctccagagtttagcccttggcatcctggggaatgggcctgggtggggcctgctcccagagtggagcatgtgggtccttgatgaagggccaccctggcctgggaggggcagacagagaggcccagacagagcccatctgccgcaagggcatagagtctgctggaagacaggcagtgaccacactgtgactgcacttcatggccagggccagcccagggcccagaacaggagcgacgtcgctaagctagagccttcgatggcatcttgcagcccctctgaaccctgacctactcctcagtacacggacatagcgttcctattccacagccacctgggcactgcttccaggggaactgcaggggtcctgtctgtgagagaccccatggatgccccaggaaccaaggtgagagcagtgcccagcccagcctgtgattctccacgtttattaggaaaagcttgcacaattaataatcaaaatcacactgtgaaactcattaaaacacagatccaaatcaccacaaattattgatttctatgcgatgtaatgcccagaaggaacccctgtcctgtgtaggaaccgtcacttctctgcggctcagcagctggcaaggggaggtggcagtccccttctgtgtgtttggctggctgctgggactgggcgaggggttggaggcgggagccccacgcacagtgggctcaggggcggagaggcagggctcctctccagctaggaagagctggcagtctaacccagggaagtgggcgttccccccactcaa

SEQ ID NO: 20465 - DNA, 1387 bp, Artificial sequence
  DNA replication origin
ctggggggagcaggctttggcacagctcagatgggcactccaaattagggacttgatatagttgagaaagggcagtcttcatccctgcaggtgactcagcaaatcccctggagatgggggtgctgtgtgtggtggccccaggagccctggctcttgtctgccttcctgctccttcccccagctgtctggctgccccagatcaaaacacctggcctgatccctccttcagggcgcagggtgtggacccctctcctgtccattggagggacgcctggtgatgccctgcttgggtcctggtacctctgctgcacatgcagcactgggcagcctccttccaacttttcattttattccttaatttaactggcacttcctgagcacccagctggggccaggcttgtactaggcactgccagccccggctcctttttggggcctcaaaggcccagcacagcccctctcccagtggtgggcctgactcctgaccaccacgctggtgggggactgcctgccaagatggtgctcagaggaggtcctgagtagggaggggggctggacgtcaagtacagggtgaggatggggaagctgggctcatggcgggggatgcccagggtgagtggcagggttgcagcctgtggggcctcacaggcccactcagcagtggggagtcatggttggcttgagagcaggatggggaactgccagcttgggtttggacagctctccctggcaccgaggggcagggagcttggtggggtaaggctagatgcaggaggggcctcagaaaggagctccgaggcaacaggcaggagagcagcaaggaggcagagcccagtatcacccacccaggtggtttgtttggcttcctttattaagcacctactgtgtgctcacatgtctcatctccatcaagcccctgccccgtacgccccttctagggggcacttttactgttccccatttcgcagacaggactggggtgggagctgaggggctgcaggtcggccccgcccttgactcctcctcctcctggctccctggcccgaagatgggagaacctcgggcttggccagtgccagccctagagacgggcttccccatggccacgcccagcacccacgaggggacatctgggggcaggcaacgggggaggagagcctggcagaggaggtgggtgccccaggaagcaggagcagcccctcccccagtcacccccagcagatgctcctggcacccattggaccccgaggacctcaataagggagcccaatttggagacaaaggccggctctggggacaaacactcatggctatcctcagccagagcagccaggcagccgcggtgaggccacaaagggcccgaagaaaggggctgcgggaggggccg

SEQ ID NO: 20466 - DNA, 1517 bp, Artificial sequence
  DNA replication origin
aaacccaagcctggggataggtgggcggtggggctgggcttggctctgggaattaagggcggcctcgtcccctctgggagccatgggtgagggtctagaaggaagagtggggagcgggcccaagcatctcctggagtccagcagggctgccctgggccaggctgtccatctcctttacgctctgcctcactcaggtgccttgagctgtgggggctgcaggggaggggagttgtaggaggcctggtacggggtgctgaagaggagggccaggaggtcatagcaggacctactgagggagaaggatcttgagggcagagtggatgccccgcctcctattacccagccagtgcctgggtgggacaggctggggccttggcctctaaggccttgggctggggtggcagcccccagccctcctgcactgcccgactgagggccctctaggcttcctcaccaaggctccacagtggagttgggaagggccggggtgggacctgtcagcttccagggggccctggccccggctgtctgcactcagaggccagtggaaactgaagctctgtttggctttggctgccccaagcatcctccaggcctggctgcctgggaccctggctgacctgggtggggacaggaaaggtgaagggtgctgggacacaggccacaggcctgatctcccaactagctggccctccagggccacaagaatagggccagaggcaagagcggggttggtgcagttgggggccgagaatggtgaggctgagacacgcttaagatccccaaggaggccgggtgcggtggctcatgcctgtaatcccagcgctttgggaggccgaggcgggcggatcacgaggtcaggagatcgaggccatcctggctgacatggttaaaccccatctctactaaaaatacaaaaaaaaattagccgggcgtggtggtgggcgcctgtagtcccagctactcgggaggctgaggcaggagaatggcgggaggcggagcttgcagtgagctgagatcgtgccactgcactccagcctgagagacagagtgagactccgtctcaaaaaaaaaaaaaaaagattcgcaaggaacccctgggtcctagagcccggagggctgtgctgagaggaggctggggtgctggggggagcaggctttggcacagctcagatgggcactccaaattagggacttgatatagttgagaaagggcagtcttcatccctgcaggtgactcagcaaatcccctggagatgggggtgctgtgtgtggtggccccaggagccctggctcttgtctgccttcctgctccttcccccagctgtctggctgccccagatcaaaacacctggcctgatccctccttcagggcgcagggtgtggacccctctcctgtccattggagggacgcctggtgatgccctgcttgggtcctggtacctctgctgcacatgcagcactgggcagcctccttccaacttttcattttattccttaatttaactggcacttcc

SEQ ID NO: 20467 - DNA, 3118 bp, Artificial sequence
  DNA replication origin
gcccggcggcgcgtcgagtggagggacagcggccccctccctgccctcggccccagcacgcccggccgcggctcccggaggtccgaggaaggcggcgaggccgcgctcatctgcatgaagcgcacactcgcggcccatctgcaaaggcgcaattaaacgcgggggtgggggggcaggggcgcccgaaattagcatttccgcggccatctggcgcgaggagcgggcgcggccggacaaagggcgccgggcgaggggagaggcgagtgtgccgcggcattgacctgcaaatgaggctttgtgcgcgcattaaagctcgccggacccccgaccccggcccccgccccgcccgccaggcccgcggcccctagcggcccaggctcggactgggcaccccgaaggtctgggggtcgggccgggcagtgccgcgactgggcagggggccgggccgggccgggcctggccgggccaggacaggctgtggagcgtcggagccccccacccaggctgggttcctctgcagcctccaggagagcccctgggaccctggccccttgaaccctacccctgcccccatccggtcctcgcccctctgggccggtattccccagcctactcctggaaaggatttctcaggacgcaggggtcctggctagaatccctcggggtgggtaagtggagggggcgtggacaggtgggggctgcgtggtgggggcaattttgtattgggagctactaaaaactggccacctggacaggtttttgtttttgccatggtcattaatgccctcaatgtttgaaaaaggccatttcacagtgttttatgggccttaaaaatcagggactctttgaaaatggttgtggggcagcttagtgacagccagatgattagcaagagctcagtatcaggtctttaggggaccaagtgtgtggggtggtggtacaggaaatctgggactccccagctggtacaactgaggctgcagccagggccaatgggccggggagcaggaggccgggactgggagccctggggccagctgggctctgccagatacctgggtcacttggaggcccctggaaggccccctggactttctgccacattgctcaggctctgggtgcctacaaactgccccccatgccgttgggctgctcattaggggttgtggcccaaattaaactgcagtagccacccccagaacctccaaaggcctggggggcaatgaggggcacagaggacagtgtgtggctatctctgggtctctgttctcccaggtggaccagtgggggttgtggcgatgctgtccagggtgaggtccagctacggttgccgtcctgtctgtcagcaccagcacccagcacatctgtagggcctgggccccggacccagcctgagggttatgaggaggtttcctgaaggagaaaagccagagtggagtctggaatggagcaggggggaccatggcctgccctcagtctgctaggtggggctggaacctggggttttgcttgggtgtgaagaaggaagaggctggggatgcagctaggtgctggttcctcatagaccgagtcatgatttatggggaccctcaattatatccccttagcaggggccacaaagtctcaaatctgcccagaaatccacacctcggagctcaggtgaggtcttcttcaggttctccctctgcagtgcagatactgtcagaaagagcaagctacaaatggagaagtcaacaacactctagtgagaattaccctgccaattaattttctcagaaatcggggactcagggaccggtgtgtaaacacgagtcccttaatggggggttcagacagggtgggtgtgggcacacaggggtccgtgctaaagcctggcactggatcccaggtgtggggactccagctcctcccaaggggcaggggatctcccgtctgtgatgtggctgaatgactcaccgcctcatctgtgggccaacatgtgtggtggggcaaaggtctctggcctggtagccgtgtgagctggagggggggcacttctccatccaggccttacagtttcccttaggtaaatggggcagagtaaccccctccttcccctaccacaagggttctgggaggtgtggagcctggggtgtggtggtgcttggcactccgtgttctttggaagctggaatgaggttcctcaggccagttatgggtgtgagatgtctggaaaaacgaagtagactggacggtggcctcatctatctgtgctgggctgggcaccagcacctcgctctcccaacctcttggggtgcgcccatagaggagatggaagcacagaggatttcagaaactccccaccttcagtgttgccttcaaaagtatactgctgtggcatgtgggcaaggagggttctggggatgggtgggctgtggggggagtaggcgcatgggtggggtgggcccaggggagcaggcatgaacccagggagagggtgcatagatggggtggaaccctagggcttctgagggactgcagtgcggctggtctgtgtggacaggcgctggagggggcactgtgcagagagcaggatgtgggtgagcccctctttcccctctgtccttcccatcctccaggacagggaagcagccctcagcagacagtgtgaaccccatgcccagtgtgagcatgagcacagctccctgcgctttgtcttcaggaggtctcagatccagcctgcattggcttccagcagacccctatttcctaatcctcaagggttgttcttgtcaggcatcccatttgcaatgccctcgagggccgctgcccgtctggcagggagatcagcttcaaggacacagacagtgtctgcggtgggtgctgagtgccgtaggggagaccctgggctgcttttggaagaggagcatcatggaagaggagccctttcgctctgggctttggaggatgagtaggagtttgctaaacccagatggggaggagggccagtttggcaggtggcgtttgggaggacctggggcagctgccacagcatgcgccgggcctgaagatgcctcctgcgcctgggtttccagctcttgcttcctgagccgagttggagctgatatccatgcctccc

SEQ ID NO: 20468 - DNA, 872 bp, Artificial sequence
  DNA replication origin
ctgctccttccacacagagaggcagtgcctaaccaaaggtgcagagggaagagggcagcctcagggtccttgtctgtagccaggggccattgcctccttttctctacacaggtctgggcccgatctctggtgctcacctgaggctggccgtttaaagtaggacacttctccttgcctcttgcctcttgggaagcctttgatgggctgcaccctgacgcgacccctttccaggagtccaggcgcacccctggtggtggcatggggagttggtgctcggcagtgggtcctgaccacttcctgcccatcacagccacggcttctcccctctgaggagggattgctttctcagaagggcgagctggtgctgggcatgcacgcaagtgtccagaaagcgggaatccagggccctgagcctgcgtccctgccgactcagccccggctctgaaagggaagcagatgggagtggaggggaccccgtgcccggggcctgggaccaggccggctgggtgtggcttcaccaggatgcgccgggtttcagcctctgttctgggggctgcataagtcaactcggggcgagtcccaaactgtgctgggcttcggtttatcacagtggggctaccagacaccaggttacagccctggggtcggggggcagaggtgggttgattttcccaggccctgggggagcaagggagagcctgctgctccccaacacagcgattttccaggatccgacgctacaaacagcagcaacatccttggtggaaaagttcaagaatctggtccaaaggcagcctgagtgagccagccgggaccagaaccaggagccgcccagtggaagggtaggtgctggatgccctgcaggagggacg

SEQ ID NO: 20469 - DNA, 967 bp, Artificial sequence
  DNA replication origin
gctggcgtctgggcggggtatgaggagcagaccagccacgcagccacggcggccggagtcactcgaggtcagaaatgcccaagcaggaaatgagatgcaacttgtaacagacatcaaaggaaatggaaaaacattcttctaatatgtcagggaggctagaggaaggcggggggcgctggccctttattaggagactggggagggggcgataagagatggcactggaaggctagaaataattaaaatcaaagcaccagacacctgggggtgggagtgagtgtcctccctgcagccgggagacctaaggagcatgctcagagccctccaggagtgcctggagcagcagtggcgggcaaaggcctggcctcgggcccgcctctgtctcagccagctcctccaggcccagggatgtggtccccatggggtgcctgctgcaggcagccagcacagggctggtgttggcagagccctgggaactgaacacaagccttttcctggaagagagtcccagtgggatcggggtgccagcacgtgctggtcccgagggcacagcgtggccaaatggtcttgggaccgagtcctgctccttccacacagagaggcagtgcctaaccaaaggtgcagagggaagagggcagcctcagggtccttgtctgtagccaggggccattgcctccttttctctacacaggtctgggcccgatctctggtgctcacctgaggctggccgtttaaagtaggacacttctccttgcctcttgcctcttgggaagcctttgatgggctgcaccctgacgcgacccctttccaggagtccaggcgcacccctggtggtggcatggggagttggtgctcggcagtgggtcctgaccacttcctgcccatcacagccacggcttctcccctctgaggagggattgctttctcagaagggcgagctggtgctgggcatgcacgcaagtgtcca

SEQ ID NO: 20470 - DNA, 2002 bp, Artificial sequence
  DNA replication origin
cccattggccgcgcgcacacccaccgggggcggggcggggcgcgcggccggggcgcgcggctgattggcggccgcggggcgagcgcgctgtagcaggggaagggggcggtgagcggggcgggggcgggagttaaagggcgctgcgggcggtaacgtgacaccgcgacgcccgccccctcgccccatcccccctgcaacactcccccacccccccggctcccgccccccgccggctcctttgtctgcaggcgggggcctcagcccagcgcggcaggggccggctcctggcgggtccggtgtccggccaggcccaactcgaccccggcccggtccggaccccggcgcccagctccgtcccgcgctcgcccgtgggcctcctgcgccagctgacgaggcttggacccgccgctgccagctcggccctggcctgcgccggatggggtcttcggctgcccccgcgcggcctgctgctgctgggctggtgtcccttcgagggctccgcgcgcctggagccctcacacacctgctggccctaaggccctcgagtcgggaggggggacaggggtcagctccactctttccccgagggaccatgtgtgggacaccttgagagactcccaccagccccctggagctggagtctgaagccgctatctgcggaggcccaccctgcccagtagatggaacaggggctgagcccatcatgtcactgtcgggggtcccagcccttctcagccttgggccagaccactccagccccgggatctgcctgtccaggctggctggaagctgttgtactgggtaaaagtgaaagatctgcccgaggtcataggggaaggggctgtgaaggaccatgcccctcccccgcctgcagcccttcctggtacagacctcggtcgtgcgcgcacgcacacacacacacacacacacacgcacgcacacacacggtgcttcaccccagccaggccagaccaaaagagaccattatttcctgctgcctcccttttggcccacctaccatgaggcagggagccccctcctcaaaccaggagcctcccagatcgggatggggactgtcagacacctgttggagggtccagcagcccatgagatctaagcccctatctcaggtgagcctgtgagccagcagagagacctctgggagggagggaaggtgcggtcccctgaaccccaaccagcctgcctttgagtcccaagacacccccacccccatggaatgctgtggcagtgtgcagctgcagctgggggagcagggcgggtcttctgggtctcagggaagcgagatctgaagtgaggggggtgaactggatgggacagggcgttaacccaggagaggggccagggccattcttggctcttgatggtggaaccaaaagccatgatttatgtgcaatttcatattcttctctgtgcacaatttacaaatttcccgcaacaagcccagatgtcacaattttcatcttaggaaaacaaagagaagctgaagaaggctccccaggccctgcgaacccctcaagcagggctcatatcaactggcctgggggcagaaagaggcaaagtctagtctgctccatgcccctatgctgccacctccccagagactaggagcaaagggctagagtgggtagtgacctagaggcccccggatacccacactccaaccatcaggactcattggccttggtgacaccactcagagggtgtagctgccatcatcctgtgttatagaagagcagcagagaccgcgtcagccgctgaggccgcacagctggaaggaagcagggctcagaactcccgggctgcctggctttctggtttggtttccacttaggtttcctacttttatttttccactttaccagcttaattacagagtcaaacccagtgctgtggggattcctccgtcttggcctcgttagaagctgagaggtgacctgctctaagtctgtcactctgaattcgatcaaagatggtacccaat

SEQ ID NO: 20471 - DNA, 1073 bp, Artificial sequence
  DNA replication origin
gccctggacaggagcttgactggctgtgcccccaaaggccccagagctccctgcccccactgagcctccaccttcccatccataagatggggtggggagtcatccagcccagaggccccaggggcatggggagtgacagattaacccaaggccccccctcccgcaacaggcggctcagcacacacttggcggggggccatgctgggccaggagagctcccccgcaccagttccccgcgcgcaaggctcgccccgccccccaggacaggctgttcttggggcggctgccaggcacgtcctccgcaggtgccggcctccctgcggtgacgtggccacatgcggcacaagctccgattacagggactgccttgtgctgggggttccggccaggggtcctcactccccaggaaccgatgggcggagctgggcaggccctgaggagaggcccagtgggaatagggaacagtcacccctgctccagaacgggaccaggggctgcttcccttggggtctggaagagagggaccccctggtcccagcctgcctgagactgctggtttcggcactgaatgttccaggaaaccgagggccactggtcatcgtgggcttcacacggcgcctttctgggctaggaagggggctcccgggctaggaagcaggtaccgaggagggtctcaaggacatgtggggacctatgtcagacacccctgcagccagctctgagcccaccaggcctttcctcctctccctgccaatccacaggacacagacacaggggtcccaggcccagtggctcactttatcagggaaacagcaggaaaaacaaatctggtgtgagcagatctcccttcccaccaagccccctgacttcctgctggagctcggggagacccctgtgaccagcatctcctgcctacggggggcgccagggcctcaaagcctctccaagccactccctcccaccctgctttccacacccaagccacagcgttcagagaagctcagggcctatttgaaatgccagagagtggggatgcctccagagaggtggcatgagggcccccagatgcaccc

SEQ ID NO: 20472 - DNA, 1024 bp, Artificial sequence
  DNA replication origin
ttaagcacctactgtgtgcatgccccatgccagctgtttgggacgtcagctggcaaagctgaccgcctggtggtagcttgcatcattagagtgcatgtgcaggcttcggggaggcacatgatcccgggtcaccacaatgcctaaggaaatgactcactgcctatgagcacttgagttcttcctgtgtgtgcagtggacgccgctgcagggttctgagccccttctgttctccaaggagcctctggctgatgtgctgatgaggggttgaggggaggggcagtgcaggaggtctctgctgtggtccagatgagaggtggtgtggacttggatggggcatggggggatttgaggggcaggtttggaacctccctggaaggaggcctgacaggcttcctgctggttggggcctgggctgagagggccaactgagggggccttcaggtgcggctgggggcgacatgaggggaggcaaccctgcaggtccatccacgggaggggcctgtgggccagcagagagggcagagtgtgcagtgtgcagtttgcggcatgtggtctgagctggacgtgagggtgtcattgacactcatgtcctgtttagagctcccaccctggatgagatgaccaggagtggatggggctagagaggagaggggccaagggccaaggctggaccccagcatgaggaggaggtgcccagggttctgaccagggaaagggagggaaaaataaaggagctgggtctggagagagaggcaggtaagcgagtgaaggcctgggagcttccctggggccgagagctggagtcactggtggctttggcaagagcgtcatgagcatgggggctgaccctcgggattcaagcaggaggaatgggctggacacccttctgaagggttttgcaccaaaagggggctgagaaatgggactgtggctggaggggaagtgggatgaagagagagaacctttgtttacaattttaagatttaaaagagtgatgctgcagagaacggaagggtgatgtgga

SEQ ID NO: 20473 - DNA, 819 bp, Artificial sequence
  DNA replication origin
ggtgagcacggattgtttgggtatgggaagggcatcctggctgagagaatagcatagataacggcttagaggtgagcccaggcttggagtgttcaggaagctgagccactggaaggggctgggaccaagggtgtacagtggggtgacggggcagaaagtgagtctagagagaggggtgaccctgggagcgctgggcagggacacagccagacgtgcactgagaagtattgctctgaacactgcatcctggaggctgggacctctgaggggtctcccgaatgagaggaggccagcttcagagctgacccctgcctacaccactgcctggacatttgaaatggctttgggcctatcttaacccgacacacatttattaagcacctactgtgtgcatgccccatgccagctgtttgggacgtcagctggcaaagctgaccgcctggtggtagcttgcatcattagagtgcatgtgcaggcttcggggaggcacatgatcccgggtcaccacaatgcctaaggaaatgactcactgcctatgagcacttgagttcttcctgtgtgtgcagtggacgccgctgcagggttctgagccccttctgttctccaaggagcctctggctgatgtgctgatgaggggttgaggggaggggcagtgcaggaggtctctgctgtggtccagatgagaggtggtgtggacttggatggggcatggggggatttgaggggcaggtttggaacctccctggaaggaggcctgacaggcttcctgctggttggggcctgggctgagagggccaactgagggggccttcaggtgcg

SEQ ID NO: 20474 - DNA, 817 bp, Artificial sequence
  DNA replication origin
ggggaggatgggcatccacatgaacccttactcaatggggcaggtgtgagggactgtccccaacaggttccagacgcctcctgggttccctggggagggcttagaggatgaagcggcaggaggagatgggatgagttaccaaactgcccagaggtgtgcgagggaggctgagggtcctctggcgctgaggtgtggtggagatgctggaaacttaccactgtcttcctccaggtgaagcagggcctcaggtagccagggaactggttgagcagaggaaatcggagagacctttttttttgtcatgaacaggctcagtgtgaatgggggaacttcctggttctgagggaatgtgggaaaattgccctttaggctgggtgaagaagaaagcaagtggaaccctggcacccctggacttcctcctccagaggaagcggctttggttgtgggccagcgagcctgtgcgtccccagccccagggcattcaccgcttcagagaagcaaggcgacagttctgccggatgagaggatccaggctgactggaggaaggaagggctttggctcatctgggctcaggtttgggagaggtggcttctcagaggaggtgatgcctcagccagtcttaaaggtgagcacggattgtttgggtatgggaagggcatcctggctgagagaatagcatagataacggcttagaggtgagcccaggcttggagtgttcaggaagctgagccactggaaggggctgggaccaagggtgtacagtggggtgacggggcagaaagtgagtctagagagaggggtgaccctgggagcgct

SEQ ID NO: 20475 - DNA, 811 bp, Artificial sequence
  DNA replication origin
cacacacgtcaatcaatttggggaccaaatgccttttgtccaatcaatctgccctctgtgaggtggtttcttagcaagcccacgggtgcagtgtaccgctcgaggggattccagcccaaagagtgcaaacgtgtttgcatctggagtgcgtgtccccagatcctctgccaagctcgttttcaagaatagtcaccactggccgccctggggacttggggagagtgcagtcaagccgagagcccaggtccagccagagtttcctggaaggactgcacagaaaggccggctgtgtaaggtgggggtgggtgacaggagtctcagagtgtcttagatttgggactcctgggggaggatgggcatccacatgaacccttactcaatggggcaggtgtgagggactgtccccaacaggttccagacgcctcctgggttccctggggagggcttagaggatgaagcggcaggaggagatgggatgagttaccaaactgcccagaggtgtgcgagggaggctgagggtcctctggcgctgaggtgtggtggagatgctggaaacttaccactgtcttcctccaggtgaagcagggcctcaggtagccagggaactggttgagcagaggaaatcggagagacctttttttttgtcatgaacaggctcagtgtgaatgggggaacttcctggttctgagggaatgtgggaaaattgccctttaggctgggtgaagaagaaagcaagtggaaccctggcacccctggacttcctcctccagaggaagcggctttggttgtgggccagcgagcctgtgcgtcc

SEQ ID NO: 20476 - DNA, 1029 bp, Artificial sequence
  DNA replication origin
agagggtgtggtgtagcctggccctgccaaaggtctgcacagagccccagaagagtgaccaggagacagctctgggcccctcctcacttccctccccagacccggaggctgctaggagcagttgagagcccacttttccccatttcaccctgcctgccacttccccacccttgcaggggccaccagagatgccagcacacaggtaaacaagcctcatgccgccctccgcagcaggagccgctggagcacacacaccccacgctgcgcacacttggcccaagccctgcccttggcctgggcaccattctccgtgcccctgactgtcactaagtagggagatgctcattcaggactcctgccccacctcctccccaggcaagggctgggcacaggctcaaatgtcaaaaccagtgtccccctgccatgtgtcaatcatcgctccacagagcagaaaactgcaggggtgagacagggtgggacggacatcgcagaggcgagcgagagccggccaaagtcctggtgggcaggggggccagagccaggtggcccaaggccggctggctaagccattccaagtcaccgtgggagtggttcagcagctacccttcgttcagcagctcagatatgttgggcatcagaaaacaataccccaaaatgaaggcctcagaagcagcttcggaagaaaaagtgtttctctgaccttctcttgctctcctgtctctcagtgccattttccccgaagctggccttagaaactggaatccattttccccagggcaggtcatagaaatcagaaccccgcctttccacacagccagacatcaaacctaaaaatattgctctaactttccctccacctttgtgtttagaagctggccataaattatctgacctctcttgtttgactgtagggcataagaccccattccaggagggtcctgctccatgcccagaaggaaggaatgctgctcagaaagttcaagaaatctagaccaacagccctcgctgcgcttccccttgcggtccagg

SEQ ID NO: 20477 - DNA, 924 bp, Artificial sequence
  DNA replication origin
caggcacgtcaggggcacctcattgggcagaggtgcgacgctgcgccggagttcggggttcggggctcagaggccgccctctccggagtgtgctcgagtacctgcctttgcaggggcgggcttgggcacgggtgccggtggggtgagcgctccagggtgacctagacaccggtccttccgggatgagccccggccccgccctttcgggagatgacttgcaacagggaccgcccctctgggtctgagttccagccctcgcgctttgcaatcgccagttccgggagcgcccgtgccacggtttctgcgctctcactggccgagcccgcccctcccctcgaaggacccgcccctgccccgcccaccagcgggctcgccccgtgcccggcttcgcccgccccagccccctccagcttgaatcctgcccggtgcccgggctgctggaggtggacactctgaccctcaggcagcaccggtgtccactttgggcctgaggaggggcagtgtgggcaggggatgggaccgggaggtggagggaaggagagaatggaggggaggcaggggcggggagagaaaagcggaggaatggtggtgaggggttaggggaagaagtcaggggaggttgtagagggtgtggtgtagcctggccctgccaaaggtctgcacagagccccagaagagtgaccaggagacagctctgggcccctcctcacttccctccccagacccggaggctgctaggagcagttgagagcccacttttccccatttcaccctgcctgccacttccccacccttgcaggggccaccagagatgccagcacacaggtaaacaagcctcatgccgccctccgcagcaggagccgctggagcacacacaccccacgctgcgcacacttggcccaagccctgcccttggcctgggca

SEQ ID NO: 20478 - DNA, 894 bp, Artificial sequence
  DNA replication origin
gatggaggaggggcaaaggacccagcacagcccagagcagcagaccatcgtggaggagggaagaagccacgaaggcaactgtcactccagtgggaggcctgccaaagcggaccactggaggcagcagtgtggggtcaatggggacctcagggagaggggagacagcaggaggttttttgtccttgcaatagtttgctcagaatgaaggtttccagcttcatccatgtacaaagcacatgaactcatccttttttatggctgcatagtattccatggtttatatgtgccacattttcttaatccagtctgtcattgatggacatttgggttggttccaagtctttgctattgtaaacagtgccgcgataaaaatacgtgtgcatgtgtctttatagtatagtcccctggggcctgctccgagggctgggagagaaggaaagagatggaaagagaggaggctgcaaggtgaggcagctgctcagagctccgccctcaaatatgtgggagtagctgtaggggagggtcaagagaacgcaagagaagtaacaggatgtgagcatgctccattgccaccccctcaaaaggggattgtgcagagaaacggggagagaggagcactgggagcttggtccagtgggtgcccccacagaaggggactgtgcagagaaacggagagaggaacattgggagccctgcccttgaggaggcaaaaggttgggatgtgacgcaggcagggaggatgacttgggtaggcgaggacaggtgggcaggcttggggatgagaaactcagcatcctctatgaacagacacttctcaaaagaagacctttatgcagccaacagacacatgagaaaatgctcatcatcactggtcatcagagaaatgcaagtcaa

SEQ ID NO: 20479 - DNA, 2052 bp, Artificial sequence
  DNA replication origin
ctggggacggggcgggggagctgagcggcgaaagcccctcggtggggcccttccccccctgacccgcccctccacaagccacgccccacgtcgccccccacccccgtccagcccttagggccagaccccgcgcgcacgcagacctccctggaggtgtcccgggtcctccgcaggctgcccccgacccggccccacctggactccagtccccccggccctacctggcagcgtgtgcatgagcgctccgggcaggcgcgaggcgaagagcaggtagaccccgggcagggccgggctggaggcggccgccaggagcaggtagagcgccaaggcagccaggaaggagagcgtgagcgccgcccgcgccccgcgctggtctgcgaacctgggggccgaggggcgggtcggaccctcacggaggcggtcagtgtccccttccccccgtccaggggctgcccaggcggggctgaccagggaggctggagtgcgggatggggatggagggcgggggcgcctgggcggctgctgggaggcctccctcctctcagggcctcagtttccccagcgtcccagtggggctgtgcgcagacagcttcactgagctgggagtctgacccagggcaaagaccaactccgtgtaaaaataaatggtggaatcccaggggaccaaagggtgggcccgcgttttacagaaggcgtttgtcaggttgggtctgagaaagcagcgcctttctcccttctgttctgggccactggaaaccctcccagagatcgctgctggtctgctgcctgcggaacccttcatttctgcctacgggttgctctgaagaggcaactcccaatacgtgtcccttgctcccctgtctgctgtggcttgtgggaggatgtccctgtcctctctcaagctcagtgttcccacagcactgagacccggggtgtatggagcccccaaagtccctcctgcctggtctcggcaggcctacgggctggtgcttacagccacgaggtgttcaccagtcacactctctctctggccacaggcaggagtagtggaaggcgtgggtgggacacccgggagcctaccaggggccaaagttcttctgcacccccatcggcctgtgacacaggagtgccgtcatcccaggggggtccggtgtggggtcagggaacctggcccgtctgagcccatggcgtctgagagggggcctgggtcactgtggggagagcccctgtacacacacacactgtacctgccaaataccggcccgcccagcagctgcagcaccccgaaggtggtttgcaggtagccgaaggcaatggaatccaggcccagtttccgagacaggtactgaaacacaggagggagcccgggggaggggctgggaaagactgcagggcctagaatctggggtccctggatgggcagggggtgggaggggaccgagggcctgggttctgttgactgcacagtatgaccatcgaggggcccttcccagggggaccctgctcctcttctcctaggcggaagcctgttgtggtctctaaggtccttgcaactcctctcctaggcgggagcccagggtggcctctagggtccttcccctctgggggcacgccccagagaggcacctgacccccaccattttgtcttcattcattcaaaactttgtgggggacgccagcagcagtgtcctggccagcaacagattgtcccaaggcccccaagtgacctccaagaggtggcccattgcccagcaggacacagtctgctctgtgaggccccagcccttcagcccctccggaggagtaggtccatgacagcatccctcccagggacacccttatatcctgccctaattctctgtgatttggtccccctgcagccgctcctccccctgcccctgcctctgagttcccgactctccttccagtgatgtaacttattatgggcttcattgtgtaccccccaaattcatatgtcttaacctccagaacctcagaatgtgacattcttaggaaatggggttaatcaggttacagtgaggacatgaggga

SEQ ID NO: 20480 - DNA, 1955 bp, Artificial sequence
  DNA replication origin
gctcagctcccccgccccgtccccagccgcccagatggtcatcacggacctgtcggcacccgaggagcggcccgcggccctgggccggctgggcctctgcttcggcgtcggagtcatcctcggctccctgctgggcgggaccctggtctccgcgtacgggtgagtggtgggggccggggcggagtctgtgggtcaggacgcccgcggctgggtcggccccgccccgcctcctcttggcctcggtttcctcttttgctcgtggggcgcgagtggccacgtgatgtggctactggggacgtctggccccgcgcgaggcctaggcctgacctcccgggctggctggccctggatagggccaggtgatgtcccagtgctgtccggggcgcgactggactgccaagctgtccacgcacagccccactgggacgctggggaaactgaggccctgagaggagggaggcctcccagcagcctcctgctggggacaggagcaccctgggactgggatgctgtggcagcggggctgagctgttggacggtgcccagagcacacctccctctccggaggtctctagggctgtgctgccggccttgtttgagtccccgaacgttctcccagcattttcactggagcctgggctggggactgatggctgctgatggctgtgagcaggaggtggagtggggtggggtgggtagtttgaacacctcaacattgcccccaggactctggttctagaatacagcggcagacaacacaggctgagtccctgggatgaagggaatgtgataggaattcccgtaacatcaggctgagctacatggagcaaaaagtcacaaagtagaactgggggctcgatggatgggatcactagggcctgtctgaggaggcggcatctgagtcgaggcctgaagcaggagagggaggcaaagaaaccacggtgcagaggccctgggtgtggaagccagggggccgtgtggctggagggaggaagaaggggcaggcaccaggccggggtgccctgggtggcacagcaggggtgagaatggggggtgagctcccctgcagggagaccggtaggacagccattgtgccggccgaggtgggggaggacagtggctggaccagaggggaccgtgatgagagaaagcagagggtagattctggctgggttttgccagtgggtgggatgtgggtgggaactcaagatggcagtgccaaggccgtgcctgaccctggggagcctggcgccttgcgcagaggcccaagcagcctggggtgccactgggatttgggtcttgttcaggcccagcctgggtgcctgtcaggcactccagggagctactgagtaggcacccagataagggggagaaatggggtgcatcttcaagtgtggatggctcggagccctgcgccccccagcacttcatgtttcggggctgggaggtgaggagggagcacgtcctgggagccaagggccactggatttgtgggggtcagggacccgtgcctctaccgctggtggccaaggaagccacagtggcccaccatctgcagcagggaggccaccccagtgctggaccagcaccaccccctcaagtcagtgccagccgcagaagcctcatgcaatagacggatcaagggaaatggggagaaaagagagggggtcgggaagtcgtgctataaatgggggcagaggtgggtccaggaggctatgctcagggtgggaggagccatggggaggcgccccagggagagggaagggctgatgtgggagccaagcacactgctgggagggtgtccctggaggatggggcttagggcacttgtgtgggcagctctggtgggacagcagggacggctcaccctggggccagggggctggcaggtgtgaggtgtggggagccggcaccacccagggcctgtctctccagggtggccagggtgaggaagg

SEQ ID NO: 20481 - DNA, 1045 bp, Artificial sequence
  DNA replication origin
tggtggccaaggaagccacagtggcccaccatctgcagcagggaggccaccccagtgctggaccagcaccaccccctcaagtcagtgccagccgcagaagcctcatgcaatagacggatcaagggaaatggggagaaaagagagggggtcgggaagtcgtgctataaatgggggcagaggtgggtccaggaggctatgctcagggtgggaggagccatggggaggcgccccagggagagggaagggctgatgtgggagccaagcacactgctgggagggtgtccctggaggatggggcttagggcacttgtgtgggcagctctggtgggacagcagggacggctcaccctggggccagggggctggcaggtgtgaggtgtggggagccggcaccacccagggcctgtctctccagggtggccagggtgaggaagggcgtgaggagggcacggggaggagcactgggccccagcaggtggctgagctgggcggctgccatcccagggtgctgcccacccccaggtactctgccggctcagggcccagccgcctgctgccgcctccttccctggccagccttcctcacctatgaaatgggccctcccctgcccttactcacccacaacgatgctgggagggtccgagctcgctcaggcagtaagccgtggccatggtgctggagcagctcagcacacatgcctcctgcaggcccgtctacgaggccacaggtcccctcctgtcctcacctgccctttcccccatcacagctgctgacccagaagacaccactcatgtccctctccctcccagtagctgccaagacggcctctacctctgcccacacctgccagaacattccattcgcttccctgcctccattcatcccaagatctgaggcgctttacaatcttgacgtttcataatcagaccagctgtgacatttcctttgatgggaggggtaaccgaggcccaggagatgatgaggctccctccatggagctccccagtccccgtccaaggcccaggcagtgtgggactccctcag

SEQ ID NO: 20482 - DNA, 1172 bp, Artificial sequence
  DNA replication origin
cagcgtgggcccctttggaggtcccataggagcaagacgccagccctcagaggccacgctgtcatggtaggataagacgccagccctcagaggccacactgtcatggaaggatgccctgaaaccctggcagctccgatgcggcaggtgtctgtctgccagccccccagaaccgctcagctcccgggccggggcgagacacctccaccaccagctcctctgggcttctggaccagaccctgggtggtggggacaggtgatgatttgccaccacccaggatggctgcctgacagccagagtgcggggcgggggggctattctgggacccgccagggtgggggtgggggctctcggcctctccggaagcctgtggcattcctggcacctccaagccatctgctcttcagcctctgggcccaggactagactagtgctaaaatagctgctcctgggaggggctggacccccaccgtgggcagagagggcctctgctttttggggcaggaggggccaccctggcagggtaaaaagagataaacagaaaaacaacagcaacaataatagtaacaatccggggttgttgccatggggcctgttctgaacaggctgcgcccagctcactgcgaggaaggacgcttagccaggccctggctgaagcctgcagctgggctggacacagcagtcattggcctgtgttgtgggggacttgggcctgccatggctgcagtggggaccctgcctgagacagacagagctggggtggtgaccaacaccgtcggggcaccctcgcaggaactgggcctggtgaactgcccagggacggggaaggagcagggtgaggcatggggaccccgacacaggttgagcagcgggagaggaggctgaggaggggaaggagggggcccgcagagtagcccccagaccccaagtccggtcagggacaagcttgttagctccaggttcatgtcacaacctgcagggctcctaagttcaagcttttttaaacttaatgggcaaactgagacgcaacacaaataggcttctgaccttggtgtctgagtcctggatctgaagtccttcacggcactcactgtgagcccctcttagacgcactgcacgaagtgagcttgccagctcttcctttaagaaacgtgttaggccgggcgcggtggc

SEQ ID NO: 20483 - DNA, 1044 bp, Artificial sequence
  DNA replication origin
gagcagcctgcggccgagcctgtcccaccgagcccatccccgggagcagcctgcggccgagcctgtcccaccgagcccatccccgggagcagcctgcggccgagcctgtcccaccgagcccatccccgggagcagcctgcggccgagcctgtcccaccgagcccatccccgggagcagcctgcggccgagcctgtcccaccgagcccatccccgggagcagcctgcggccgagcctgtcccaccgagcccatccccggtgtccctggtgtgggcctttccttcctcccttgtggagaggagccccgactcctcagggatctcagacccatcctgacgcagtcactgctggcggagtagggagagaccccggggcttgcagatgctgaggggccttctctgcagaggggccctggccaccacaggccagtctggaggtccccagctttgggggctggccacagtccagacgcccctccctcgcctcccccatacccacttctaccctctctgtctggctctaggtgacccagggcctggtcatcgggcagctgagcagccacttctcggaggaggtgctgctccgggccagcgtgctggtcttcatcgtggtgggcctggccatggtgagggctccccgctttgggcccactcacctgaccctctcactgggcaaggccacctgggcggtaccatctgtgcttaagcccttggggactcctccagccccccacacccacccggggccagctcttcagcagggacagcagtcagggtggggagggacaggtaagaccccagagaggagcctggtcccgtgaggcccccactcagctcggcccccgcctgccgtcccaggcctggatgtccagcgtcttccacttctgcctcctggtgcccggcctggtgttcagcctctgcaccctcaacgtggtcaccgacagcatgctgatcaaggctgtctccacctcggacacaggtgagtgtggccagcgagtggagcagcctcctccaggaagccctaggagctacccggtggggatggg

SEQ ID NO: 20484 - DNA, 1534 bp, Artificial sequence
  DNA replication origin
ccacccggggccagctcttcagcagggacagcagtcagggtggggagggacaggtaagaccccagagaggagcctggtcccgtgaggcccccactcagctcggcccccgcctgccgtcccaggcctggatgtccagcgtcttccacttctgcctcctggtgcccggcctggtgttcagcctctgcaccctcaacgtggtcaccgacagcatgctgatcaaggctgtctccacctcggacacaggtgagtgtggccagcgagtggagcagcctcctccaggaagccctaggagctacccggtggggatggggtgggcagcctagggtctgtgtggggtgggtagggtggggggcctggggtctgtgtgggttgagtggagtgggtggggtgggggcttggggtctgtgtgggatgagtaaggtggggagcctgggtcttgcatgagactcctgccctaccacctagcccagctgggggcaggccaggggcctgggagggggctgcccgcaggtggcagttggcttggccctgagaagcacctgaggactttgcctgccaggcctggaggccccggggacttctgggccctcccccagcacggggagtggggcacacaagtgctcaggagcttcctgaatgaatgagggagtgaatgaatgcataccagtaattaaatccaggaatcccctaggccactgcaggggacacaggtcccctagacatagattcccccagtccccacttccgacccagctttctttcttgaggccgaagagagccgctcatgcagactgggggtgtcctgggcccgatgttatccaggctcctgccccaccccaggcacagtgtgggtacacactggccagtgcagggggctcctgtgggctggttgaggtcaaaggactcaggagtcctttggagtactggagattcttccaggcctccccagcagcagatccagaaagctcagggcacacatctgacactccatccacctgcctgtctgggaggcagcagatccagaaactcagggcacacatctgacactccatccacctgcctgtctgggaggcagcagatccagaaactcagggcacacatctgacactccatccacctgcctgtctgggaggcagcagatccagaaactcagggcacacatctgacactccatccacctgcctgtctgggaggcagcagaccaaggtctagaggcccggatgtggccgggctgcaaagggcaggcctattctcagggctgcctgggaacctccaaggccttcggggactgtgactccatggtgcatgggctgatgcaggctgagccaggagggcttcctggaggaggttgggcagcactttggagaggccaggaggatggcacaggagaggaaggcctggggagatgaggacccggcctggctgggaagaggcccctggaggctgagggagaccaggcccaggccattgggccacgtcatgcgcagacaccacccctggcctggtaggagccagcatctggttcccagcagca

SEQ ID NO: 20485 - DNA, 1228 bp, Artificial sequence
  DNA replication origin
tcccagcagcagcttggaaacccagcgacagaaggggcaggaactgcaccctgagtctgcagaagaggctgctcttaatggtcctccatgctgggccctgagcccaggtggggcctggccagctcctcatcacagctgaccagccctgggagttccaactccaggagacctgggctctgaagtccctggagccagagaccctctgggcacgggaccagaggcagtgtcctcccacctggagtcctggggggtcctcccgcttggcgagtgctgccccccttgttgcccgagtgttgacaacagccacagatagtgcccacgtgcccgtccatgctgcgggtagctggccacaggggcgtggagatgcggtgtcagggacagagcaggctgctgcgcaggtcggggctgtctggggagcctcggaagccgctcggtcttgctctggggacaggaggggcaggtggaggggccctgcatgggcttccaaagcccctcccagccctgtgagggggagttccatggagtagtaggagctccgcagggtggggcggctggaggaagggctgatggccaggaggggccgtgggatgggggtgtcatgcccactctgaactcaagccccaacggtgtctcacaggccaggcttagcctccccactgcatcaccagccctcggtggtggcaggcaccctgggaaagagccgtgagagccagctccctgacagcctgggcgggaggttccgggccccaggcacagatgccatctcccttggcaggcctggcagggcggggccttctgcggtgacctgtggtcccattcccaggctcctcctgtgcttggaaactttctggagcagggaagagactcagcccaatgccctgggaagcaccctgcatggctgagaggtcctcggggaacagaccagtgggtagagagagctgtgtttgctccaaaggctgggcgggtggcagggggtgggggactggaggttagaagctggcaggtggaaaggatgggtgttcaggggagtatttcaccagactatgcaaggtgcggactgcgccgtgaggtcagggtgggtcaggagagatgggaggccatggctgtgttcaggaagtgggcagttggcccagggagctgcccagggcctgactacccccatgcaccccccagggaccatgctgggcctctgcgcctctgtacaaccactgctccgaactctgggacc

SEQ ID NO: 20486 - DNA, 1346 bp, Artificial sequence
  DNA replication origin
gacagtggaattctaaggtttggggagtccatgtttcaacagcttcttttaaaagcagcccgaggagaggaggggcggccttcatggtctcaggggcagctgcagaccctcgctgaggctgtggaaagcctgtcctctccagatgggtcaatcggtcacagcggctgggctggcctcctcatgcccagttctcctccccagagcccaggaccagggggtgggggtgaggggtcgggaagtgctgtggtcaggaggctgggaaggcaacggtacatggcctggccagcaaatcagctatagaagggacccccagttcccaggccatggatgggtactggtccatagcctgttagtagctgggccgcacagcaggaggtgagcagcggggcaagcatgaccgcctgaattccacctctcgccagatcagcggcagcagtagattctcacagggacgagaaccttgttgtgaactgtgcacaagagggatcaaggttgagcactccccatgagaatctaataccagatgatctggggtgaaacagtttcatctggcccacccacatccgtggaaaaattgccttccataaaactggtccctggtgcggaaaatgttgggggccactgagctgtaggatgaagaggctgagataaggggacaccagaggagttctggggttcatgtggctggcagtgtctggtgcggttctggggttcgggtggctggcagtgtctggtgcagttctgggattcgggtggctggcagtgtctggtacggttctggggttcgggtggctggcagtgtctggtacggttctggggttcgggtggctggcagtgtctggtacggttctggggttcgggtggctggcagtgtctggtgcggttctggggttcgggtggctggcagtgtctggtgcggttctggggttcgggtggctggcagtgtctggtgcggttctggggttcgggtggctggcactgtctggtgcggttctggggttcgggtggctggcagtgtctggtgcggttctggggttcgggtggctggcactgtctggtgcggttctggggttcgggtggctggcagtgtctggtgcggttctggggttcgggtggctggcagtgtctggtgcggttctggggttcgggtggctggcagtgtctggtgcggttctggggttcgggtggctggcagcctccttggtacagttctgcgaccagggtttgggtctgtgtgctggactgttcagcagaatgagggcatttttccttccatctaggaaggcctcagttccctgatcttttttttttttttgagatggagtctcgctctgttgccaggctgg

SEQ ID NO: 20487 - DNA, 1094 bp, Artificial sequence
  DNA replication origin
tccccgccctgagcccagaccagctaccaggcttcgtcggcctcctagcaacagagattagggtccaattctggtacttctctgcctcccctactggcatccctccaaccacgaaggttccagaaatgaaggccccattgtggggtgaggagtcatgcctgtaccccttatcacctcctcagcttgttcatcaccaggagcccttctgggtgggggacacacttcctgaaccctaactgtctcagaccatccctgtctttcaaagagcacagccagaccggagggcagaaagccgtggtcagctatctcagaaagaggggcagggatttgctgcactcaggcctctccaccccaatgtcctgggccagtacctggaggtgcagggacctctgcctcctgccccaccatcggagacagcccagaactctctcctgttcccccagaagcaaaggcgaccctgcccgccccacactgcgggcactggcaaggagcggctggcggcgggcagccagagggctgagggattccttctggtctgactgcgcgggtggtttgtgggcaggaagtgctgctggggaaggttcccccaccacaggcagcagcagctcggacccagggcccttgtcctccccaggttcaattcctcaggacacaccaaggagcagaaggtagccagggtcaagccccagggcacttcctggcctctggggaggctgcttggaaaagagggtgtggaccaggcccagcagatgacacgattcatttattcattcaaagccggttcccagcgcctttcacaccagccccgcaggactggatgagggtgtcctgcccgcccattcctgggcctccaccctcccagcaggagtctcactgagccacagccggatggtagaaaagcaaactggccaagtgatttatttgcaatgggcacagtgatgcaaaaacaagatattaagactataaaatatgtgactacaaagaaccagcgaaataaatacatagatattagatagtccaataacttaaggcgcccgtgcaacggagcgaggatccgcgcgcacgggaagttcttctgctgcagggctggagag

SEQ ID NO: 20488 - DNA, 869 bp, Artificial sequence
  DNA replication origin
ggtctggggcgctcctctgagccggacgtctctttatcctttacagtgaccctgaagggcaggtggaggtagggctggtcccaggtctgggttttacgctctgctgccactgtcttgacattttaaatacattttgaatcaggggactctcgttttcattttgcgtgagccccgtcattgaggccaattctgaccccagagttgggacttcctgctgtaaccaccccagggcgcagctagggggcaggggtgcgggaaggtgggagacgtggagtagtagccggggtctctggggtcctctcggccggctccacccccacccctgggaacccgggaagagccggctttcgcttcctgtctattaaaccctttaaaggaagagggtaaataaaaccgcccgtctgcccagctggaaagcgatgactcagccgcccccgccgaccctcgcccccaggctgatcccagagagcgggcgtcgcggcccagcccgaacccctcagctcctgggacctctctccggtccgggtcgtgggggcgcggtcggagcagtccgtaccccagttcgggacactacgagggcgcagggaggagaacgggcttcctcttccccttccattttctgagctctatgggttgctggtctagccctttccacgtgttccctaatccagcaaaggttactgttcccatttcacagaagcgaaaaccgaggctaagagaggtggtcgttcttggcgcagcccgtgggtggcaagataggagctcggtccgctagggcagggccactttcggagagggtctctgggcggccctgggaaaggcccccgaacaggacggaacggccagggctcgggagtaaggaagggggc

SEQ ID NO: 20489 - DNA, 2670 bp, Artificial sequence
  DNA replication origin
ggaccagaccttcaccctccaggcgccccaagtccagccctgccgctctcgggctcccggggcagaaggagggtcgaggcccccttccttactcccgagccctggccgttccgtcctgttcgggggcctttcccagggccgcccagagaccctctccgaaagtggccctgccctagcggaccgagctcctatcttgccacccacgggctgcgccaagaacgaccacctctcttagcctcggttttcgcttctgtgaaatgggaacagtaacctttgctggattagggaacacgtggaaagggctagaccagcaacccatagagctcagaaaatggaaggggaagaggaagcccgttctcctccctgcgccctcgtagtgtcccgaactggggtacggactgctccgaccgcgcccccacgacccggaccggagagaggtcccaggagctgaggggttcgggctgggccgcgacgcccgctctctgggatcagcctgggggcgagggtcggcgggggcggctgagtcatcgctttccagctgggcagacgggcggttttatttaccctcttcctttaaagggtttaatagacaggaagcgaaagccggctcttcccgggttcccaggggtgggggtggagccggccgagaggaccccagagaccccggctactactccacgtctcccaccttcccgcacccctgccccctagctgcgccctggggtggttacagcaggaagtcccaactctggggtcagaattggcctcaatgacggggctcacgcaaaatgaaaacgagagtcccctgattcaaaatgtatttaaaatgtcaagacagtggcagcagagcgtaaaacccagacctgggaccagccctacctccacctgcccttcagggtcactgtaaaggataaagagacgtccggctcagaggagcgccccagacccggttctgtgaatggcatgcaggtagcagctgcccggtggtcccaccggtgtggccagaggacctggcagtgggcagggatgtggtgtggaggggcagtgccggcagagggcagggttgggctgtgccagggttctggcctgggagtgagacacctgcctggggccggcgggtcaacactgccccctacctgacacctgtccttgcagcagggctgggatcctgtggtgagggagcagcaggtagggtgggtgggtgaggggaggtcagcctttggcggggagaggggattcgagcattgttccggagaggctgcaggaaggattcggactctggtgtcccttcttttgcttccagagggccctgggctgccggacagtgggacctgggcaagaggcacctctgggcagtgggagaccaggagaagcggccgggggcagagcgctctgtcactgcgccagcccacaggtgcctggaacacctccaggcccaccagcctgcctaccccattgaggggccagccagtggaacttcggctccaggcaaatcccccgacactcgtggttgcttaagcacctactgtgtgcctgcaggcctggctggtgctgggaccccagaggaggggagaggaatccctctaaaccccaggggcacagcaggtacatgaggatggggataggggtcgggggtactggaggccaggaggacagcttggaggactctgtggggagggcgtgccctcgaagattccaaggagaccttgaagggccagtggtgcccgtatgccaccactgtgcccagcctccacctaacccagagaactccccaaagtgggcactccagcccctgttccacagaagaggaaactggttcaggatggagagggccttggggaagggacagagaacaggcaggagcagataaggggctgagagaaatgagggggaggaagagggtttggaaaccaggtgaggccaggtgaggtgtgctcccccagccccgcccagctcctctctttgcctgtaccccagtggccctctcaagggaggctgggaaactcactcccctgggggcaggacttacaacccaggggtgatgctctgacaggtggggcaggagctgggaggccagggggcagggtgtgcagccgagattcagaggccctgccctccctaggggatttcctgcccactcagcccctctctgctattcccctcatggacactgtgaagacctggggggtatgggggtggatggccctttaggggctgctggaaatcaggtctgagccctggaggccaggcctccccaggcagcttctctgcccacagtccctgccccaggggctcagttgtagtggccctggcctccccagcagctgctagacaccctgggcccctgctcggccaaaccagcctgaacctggttgccaatgtgggggctggagggagccgactcccaagccttaccagccctggaccagcaggtgacttcaggagcccccagggtgtctttatggacatgggcaaaaataaaccacggccttaggaggtgagaggggcttggaggacaccatgccaacttggcaggtacttgcacacaggggctgccccatcctctctgcgtccaccatccacccgaggggctttaccaccaccactaactcacactgccgtctgcccctctgagccacccgccctctgccagcccccgctcggcctccc

SEQ ID NO: 20490 - DNA, 1329 bp, Artificial sequence
  DNA replication origin
gccggcgttgttggaggccacggcggcgcagccccaaagcgagcgaagctagggtcgccgccactgccgcaggaggcgtgaggtgcggagacacgggtgctgggccggtaacggcgcgctggggagggcggccgggcccggacgggcgggtggggccgcgggtccggcgcgggcgcggcggcggccatctctggaagcctcggggcggtggggcaggggcggggccgcgttctggtcggggcaggcagcggcggccgcggcggggcctggggcttggggcctggagcccgggcctggggcgctggcgggaggcccctcccaactcccggcgcgcctcgcccggctgcccgcctcactgaaggtcaaggcgctttgttctgcgccgcgggcggcctcctgggcggcggccccttggaggaggcgaagacggcgagaggcggcggccgctcaaatctcccgctagcccagcccgccccgcgtgcgggggctgtggcggttacacggccgggcgcgccggagcgttcaggcttcccgtttttaaggtggagacgtccaggacttctttattagatgtttaggaatttgagtttttccgtagggcggttgtcatcgtgagcctctgtggggtcaggctgggctaactggggttttgatgtcagtttggtgtggccgagggcatgtctgacggggaagaaagtccttggcgttgcttcttagctgttgggagctgtgcggtgggagcgagctgggcggcgtgcgctccccgaggactggcctgagtggccttagactagttactcacgggacttggtttcccagccaaggtgggcagcaagtctgtttactatttaaaaccgtctttcacaagggaaaagcaaaatctccaaaaaaaaaaattgtacatgttatggatgggaaagtgccatgcttttctttcagttcagagatggtggaagaggtcacatttgtattttttgacctgaccagagtctttgttgttttcaattttccccttctgaatgctttccgttcaccccagcgaaggatggcctggtcatgataagactttccaccgtccacagttctctaagtctgattgcggggcaggaggcagacatgtttagggtccagtaaaggggactccagccttgggacctttagaccctaacgtgtgtgtcacatcacctgcctgggtgactgtgcgctcctctggcaggaaggtccgccatttcattatgttctcggaggaatcgtcggggcacattcgtctgtgctttggttcgcatcccccagtctgcattactttttcctgtagtaacccgtgcctta

SEQ ID NO: 20491 - DNA, 1181 bp, Artificial sequence
  DNA replication origin
ctgggcaggactcaggcgtggatccgctgctctccgtggcctggctgtggccggagggctggtcgctggccttgcgaagccgctggtctgggccagacctctgcagagaaatggagctgctgcagctgaaagccacccacgccccctgcccaggccccagggacatggtggcatgcttatgccaggacagtgctagaggtggcagccagcagggagggcagctgctgggctgtggagctggctggaggggtctgtctcagccccggcatggcctggagtagccatggtccctttgagcctgtttcctcatgggtgagacagagctactgacccctcacagtgagcaagggcctgcaaggtggtgcagacacgcctgccctgtgctcaccatggcgttgcatccaataaatgcagagatgatggcatggggggccgagggtggttctgacccctgagccatgaggacagatgaaagccgaggccactgtgggagctgggaggttcataggaaccccagatggctagggttccccatgtcaaggggcatctccaggggggaacccccacactcagccggctgctcacaaccccaggagtgcaggcagggctcatccattcagcccttacttgagctcacaaggaacccaggacaggaactgatgctcaggggtggggaaaaagcagaacctggctgtgggaccaccatgtaacaacaggcgtttggggccagagaggtgccagggacgctctgcattgggtgtggtcagcgacggggcaggtggggtcagagccaggacaggtggggtcagaggcggggcaggtgggtttggccacaaggtactccatgggatggtttttgaggcatggcagggcccaggctgactgacctcagcaggggctgcggggtgggaggctgcagagggcattgggggtggacatctgctggagattggtggggagaggctgaggagcgggactgcgagggtctggggccaagggaaggcaggagctagcagtctggcctgagcccggggggatggagactgtgctgcagacatagggggtgcatctgtctaccttcctgaggcttcttccctagtcccttggcaggcagagcatgggacatgcagccaaggagataccgcggcccccagcttgctggagaagttagggccatcagg

SEQ ID NO: 20492 - DNA, 1331 bp, Artificial sequence
  DNA replication origin
tggcgcacgcatgtaatgctagctactcgggaggctgaggcaggagaatcgtttgaactcaggaggcggaggttgcagtgagctgagattgcaccattgcactctagcctgggcaacacagcaagactctgtcaaaaaaaaaaaaagacagaaagaaagaaagaaagaagggaaatccttaactttagtgatataaaataaaataaaatacacaaatgacatgacatgatatttgggatttacttccaattaattcaggggagagcatgaaggtgggtgcattgctgtgctgtgggtatatggggtgtactgtactttgatatatgtttgaactttgccataataaaaagttgaaaaaatatatgaagcatggatgagtcaatgagcatgcaagaaaagatgggaattctcccacaagaaaaaataaaggggagaagacgggaggaggagaggaaagagggaggagatgggaggaggagaagaggaaagagggggaaggtgggaggaggagaagaggaaagagggggaagacgggagggggaggagaggaaagagggaagacaggagaaggagaggaaagggggaagatggaaggaggagaagaggaaagagggggaagatgggaggaggaggagaggaaagaaggggaagatgggaggaggaggagaggaaaaggggggaagagaaagaggggcatttgtcgatctgagatcttggtttctgaggttgccgtggaaagtggtagacaggtccttgggtcagagtaaccaggagagattttttccgagacatttccactaagcaggcactctcacatggctacaccctcaacagaaggaacagtcgcagaaaggccgttcattccagagggagagtcaaggaaacatttgtattgggcctgcgctccggggttaaaaagaaaccccagaactctccatgaatgtgtagggtaagtttgggattcaaatctatacttcctctgtgtcccagaaacaacctactaagaaaatgtgagagccaacaaaacaatttcagccaacaaaacgaaaacaaacaaacacaaaactagcaaattagaatcccaaggttttactaaatacagccattctttgaataattatcgagcaccttcaagggcaacactatggtcagtgaggacacagcagcaaacaaaacagaatatgagagtgaccagctagagatgataaaacaactgtgcttattacaatgctcaaagatttatgagaaaggattggaaacatgaccaaggaacaatgcacgagtataaaaagaacaggcaaggccgagcgcactggctcacacctgtaatc

SEQ ID NO: 20493 - DNA, 1250 bp, Artificial sequence
  DNA replication origin
ttccgggcagggcctgactgcagcctgtctgctgcagctgggcgaggcgtcccaggtggagacagtgtcagaggagaacaagagtctgatgtggaccctgctgaagcagctacggccaggcatggacctgtcccgcgtggtgctacccacgttcgtactggagccgcgctccttcctgaacaagctctccgactactactaccacgcagacctgctctccaggtgcgcgccatgccgggaggggcaccccacacctcgtcctgcatctgcatgagaccctgcagcacccccagcccctacctgccctgtgggggcttccagagaatcccatggctgatctcagcccactgtttctgcagctgtagcctcccagggggccctgtctccaagatgggcctgggaggagccagccatccgtggtgagaggggggtcagtcccaagcacttgccatgcaccctgagccctgcaccctcgagctggatgggatgggctgcagaggcaggaagggggctgcagaggcaggaatggggctacagaggcaggaagggggctgcgcagactggaaaggggctgcagaggctggaagggggctgcgcaggcaggaagagggctgcagaggcaggaagggactgcagaggctggaagggggctgcagagctggaagagggttgcagaggcaggaaggggcagcagagcctggaagggggtacgcaggctggaagggggctgcagagactggaagggggcaacagaggcaggaagggggctgcaggctcaggagccaggcagagggagcaggtgggaacaagagcatgggcagggaggcttcctggagacaggggcaccctggcagcccaggtcagcagtgtcctctctgccccagcgtgggagcagccctggcactttctgattagaagaacccacttccccagagaaaattatcctgcttgggggtgaccagagcgcctgggccaagtggcctgtttccagctgagtggttggaggtcgggatggtaggagggaagggtcagggaaagggagggtggcccacggcccccggagctggggtcagcgttctcctgccccatggcagggctgcggtggaggaggatgcctacagccgcatgaagctggtgctgcggtggtacctgtctggcttctacaagaagcccaaggtgagcccctgccagccagggagggtggggctccggcccaggagtctgtctgctcagccctcgtcccttggcac

SEQ ID NO: 20494 - DNA, 819 bp, Artificial sequence
  DNA replication origin
gggggctcctccgtggtccgtgaaatccttgtgttcagtggaacaccatggcctccctgcgggctgctgttcccacagagctcaggctcctgtgcggggatgggaaggttaggatgggcctatggggagtggaccgagggccctgggggcctcaggctgagagtattggggaagccaccggcgggttaggcaagggcctcgggacagccgaggggcgggggtggacactgggccacccgtagggaagacccattgttaggagaaagctgaggacaccctggacccagctgtgatggagaagggagaagtgggcagactcagggtatttcggaagttggattgggtagatctcagccagatggtgatgagcgacgctgctgtgagccaggcagagcgggctgctgcaggtgcgagcctggggctccgggcagagggcatggagcgggcagccaaggggcccgggcacccaaccttcagaggccgagcacagataaggcttcacagaggtggggcagggaggtgggaggatccaggagcccaggtgtctcagagccagctggtccgagaggtggggcaggatgagaagcagggatggctgctggaccagtgaggagtggtggggacctacggcaagacagtctcagtagagaagacggcagaagcctggtggagagggttaaggaggacgggacgggagcacatggacagagcaggattcctgacagccgaagctacccatgatttccaagccccaaagctacagcactgggctccccatgacccctcatggggtcagacatggctcctgggtgtccacac

SEQ ID NO: 20495 - DNA, 982 bp, Artificial sequence
  DNA replication origin
ggcacctgcacacctggtgctctcctggggccctgggagagccatgaatgagacagacctgggctctgggcccccagtgtatgggcagcaggaaacatagatgataaacccacaaacacaagaggaggctggggagcaggtgagggaggcaaaccgggccatgggctctttctgaagacgtgagtgacgggagggaggatggcgttccaagaagaaggaccaccagcgcacgagctcaagggaggcagcaggcggtgggcagcagtgtccccagagcatgcctgcagatgaacagccagggcagctgactccccgcagctggagagaactcacgtggccctgggcaccgtggggcgcctcaggaaggggagtccggaaggaatcacaggatctaagcttccgctgggtgacgggtgcaggctgaggaagccgggctctggggtgggggctgcgctctggggtgggggctgtcaggaacggggggctctgtgatctgggatcttgtcattctcacccgggaggcgagacaagagcaaggccgtggctgtcactgagggcaaggggcagtcccggtttcagcaggaaaggggaattcgttccttgctgttgtttggacagcgtcgtgttcgcatcttgctctgcacagggacagagggggctcctccgtggtccgtgaaatccttgtgttcagtggaacaccatggcctccctgcgggctgctgttcccacagagctcaggctcctgtgcggggatgggaaggttaggatgggcctatggggagtggaccgagggccctgggggcctcaggctgagagtattggggaagccaccggcgggttaggcaagggcctcgggacagccgaggggcgggggtggacactgggccacccgtagggaagacccattgttaggagaaagctgaggacaccctggacccagctgtgatggagaagggagaagtgggcagactcagggtatttc

SEQ ID NO: 20496 - DNA, 1294 bp, Artificial sequence
  DNA replication origin
gcggcctcaggcaggtctcctccctggtgtgcaagcccctcctcagccttccccaccctcctccctggactccaggctggcaggagcccctggcaccctgaccagtgcttcccagtgagggaggaccctcctccctaactccacctgcagaaacctgtgggtggccatcagggtgggaggctggttccgagtgttctgggtttgtgacctggaggggtcacttatgccagcccctcgtcagcaatgtgggtggtggaggtgcgtggggatgtgctgtgagcatccccaggtgcctctgcagggctgcctcccctggcacacctgtccccaggccgggtctgcctccttgggaagtcctcaatcctcaggggttcccgatgtctgcccccacacaatctgcagctggatgtgggggcaggaagggagggcatgtccctgctggggcagggccaggggtgggtctgggatggagggggtgggtccctgaagagtcagagtgagggggagcctcctggtggccccttgggggatgcgggatatacagaggtgggggtggggcatgctcatcccgtgtgccccgcaggtcgctgctggctggacgccctggagctggccctgcgctgctctagcctactgagactgggcacctgcaagccgggccgagacggggagccagggacctcgccagacgcatcaccctcatcgctctgtgggctgccagcctcagccaccgtccacccagaccaagacctgttcccgtgagtggggcgagggcacaggggctggtggtgattcacggggtctccttgtaggcgaggaagaggggagaggacagccccagccactgctctggtgggctgcaggctgcacgcagggacttgttcgctgcagtgtgccctgggagcctcggttccttcctctaaaacggggctgatcgtgtcaaatgtgggttgtggaggtgacgacaggcaggaacgtatgtgaagtgcggagcagcgaggggtgggcagcccagagggctgtgctgggctctcacctgtgacagggacccactggcaccatccaccttccagactgaacgggtcttccctggagaacgatgcattctcagacaagtcggagagagagaaccctgaggagtcagataccgagacccaggaccatagccggaagacggagagtggcagcgaccagtcagagacccctggggccccggtgcggagagggaccacctatgtggagcaggtccaggaggagctgggggaggtgagagccccccagccaggagccccaa

SEQ ID NO: 20497 - DNA, 933 bp, Artificial sequence
  DNA replication origin
gtgggtgaatggatggatggatggatggatggatggatggatggatggatgcctgaaagggagggagggtgggtggatgggtgggtggatggatggatggatggatggatggatggatggatggatggatggacaggaggatggatggatgcctgaaagggagggagggtgggtggatgggtggatggatggatggatggatggtttggtgggtggatggatagatgagtgggtagatggatggatggatggatgaatgaatgggtaggtggatggatggatggatggatgggaagatggtggatggatggatggatgcctgggaggatggatggatggatggatggatggatggatggatagatgaatgggtgggtgggtggatggatggatgggaggacagtagatggatggatgaatagacgggtggatgaatagacagatggatgaatgggtggatggatggatgaatgggtggatggatggatggatggatgaatgaatgggtgggtggatggatggatggatggatgaatgggtggatggatggatagatgggaggatggtagatggatggatggatggacgaatgggtggatggatgaatgggtagatggatggatggatggattgatggatagatgggatgacagtagatggatggatggatggatggatgaatgggtgggtgggtggatggatggatggatggatgcctggaagggagatgtatgtatgtatagatggagggatacaagggagcgggagactggtgtatagatgagactggtgtatagatgagtggatggtggcactcacagactaagaagtcccactggctgtcattggtgctgggagaaggtatgtggggtatctgagcagaaaggtaccaagatcccctatggcctttctaccttggcccaggtggaactg

SEQ ID NO: 20498 - DNA, 1751 bp, Artificial sequence
  DNA replication origin
aacagggcctgagagatgaaggtggccagctgaggccacacaaccactggagtcatggctgggcccttttccccagctctgcggtccccaggcctctgcaggaggacagaggaggaattgggcacaggaaggatgcggaatgagtccaggactcagctggattccttctcagagcttcagcctttcccagagctgaggcagtgtctgcccctggccaaggttcagctaagtgtggccccagctgatggctctatgtggcctgaggaggcgccagtgacctttctttacaagaatccctttatcctagcctgaaggcgagcgtctgggaggcagggggtaaggagcactttggaggctggattactgctgggaaggcagctggcggaggcaggggggccatgtgcactggctctgggtggggcccccattgggcctgggccccatgctgccaaacagctggccttggcgtggggtcagagagcatggcccctccccaggtgtccagaggcaagcatcctcagggacacagggctggccaggcagaggcagaacctgacctgtccctccccatctgctctgggctggcaccacatgggacctcttgtctcccagtggtggaaggggtctttcatgccccacatgagaaatggaaggaagagcctgctccagcctatgcagtgggggttggggaggggtggtcagcccagagtcagagctcactcccttcctgtgccctcgcctctgtcccctccgcaactcctaggtggcccaggaaactcagcagggcaggaggaagtgggagccatgaggaggggaccaggaggtgcctgtggttaacaggaaggggggtcaagcagtggctctgggtgtgggtgggaccctgccgcaggcaaggcggcccccaggcgctgccaccacggggcggtgtcttagctgtggtctcaggagtgcagcagctgcacgacaccatcacggccacctgcagtccccgagagccccacatgtccatctggcctgggcattctgcagctttgggcacaggcaggggtgggagtctggggctagcctggaggagggtgctggggtctcaggagaggacctggaaggggcacccatccctgcctgcctgggcatccacctccttgcccagaggagggcctcaggagtggcctctgcctggctgccacggttctggctctctgtcccccttactctctggccctccagaacgttccccggcccttagcagctccagcgtctctcaagcccccttccagccatgagcgaattcattctagagatgcagagttggcccctgtgtgtgccccgcccaactgggtccagaggtgcttgagtagtcaaggaagtcagctgggccagtgtccccttggcggaagcacggccctgcccagcccagcacagctcagttcaggggaacccacccaggccaaagcgaagcaccgccagggcgcacttcaggtccaaagagacgcacgggggcggtcagctgctcctgaggactgacagctggggaaacgttcttggacaaaggggctgggtctccgaggaagaaggaggagccccctgcagagggccaggcagaagcaaaggcccagctcgggggctggggtgcagagaaaggggggccttccatgggccgagcttctcccgcgtcccctctccagcctagtgggaccacaagtgggattgtcagctctcccaggctggtggttggccctgcccacgggcct

SEQ ID NO: 20499 - DNA, 987 bp, Artificial sequence
  DNA replication origin
gccccatgcagccttgcgggtagaagggcagtgactgcccactccttgcacacaaggaaacagtgagaccagaggaaaaggacaaaaccagtcacccaggacagcggacggcacacggggtgggggtgtgtgagcagagacccttgggacccagcatctgggtctggacggtcctggagcctgcagagcagggcagaggaggcaggtgcagaggggggcagaggaggcaggtgcgggggggggcagaggaggcaggtgcggagcggggcagaggaggcaggtgcagaggggggcagaggaggcaggtgcagagccgggcagaggaggcaggtgcagaggggggcagaggaggcaggtgcagagccgggcagaggaggcaggtgcagagccgggcagaggaggcaggtgcagaggggggcagaggaggcaggtgcggggggggcagaggaggcaggtgcggagcggggcagaggaggcaggtacagcccagtgcgtggaccagcgaccggctccaggggcccatggggggctgcactgtgggcgaaaacgcacggacgcgacacacccaagagaaacaagcacacgcccccaggtggtccgcgcacgcacgctcccagcagcatggctcagggccatcagagagcggacacagccagacatccacatgggtgaacggataaacatggatcacatctgtgcaacggatggaagaacattcggccttcaggaggcaggaagcacggcactcacacatgcgacgacacggatgagccgcagagatgcaccaagtcaaagaagccagataccaaaggccacatcttgtccgcttccacgcccacgcagtgtccaggacgggcaggtctggacacggaacgcagactggtgcttgccagggcccggcccggttctgtcccggtttcctggggctctttggggaaagagcatgggctttggagtccactatgactggaggctgaccagatgatc

SEQ ID NO: 20500 - DNA, 930 bp, Artificial sequence
  DNA replication origin
atagaaatgacactcggcttctgtgggctcctggggccaaggcccctgggtctggcttgctcccggcagggcggaggggcccccaggtgaatcctcccatccgcaagtggaacggcagctgagggtggtgttcagagcacatttgccgattgtgaccccgggaggatgtaccagtgtccctgtaaccctcagcccacccagagtcatctaggagtgtcgtggagttgtgactttcctccaggtaacaaagttaagtgaacgcaggctgggctaccaggtgcccattgccaaccactgagggcgacaggccggggttctggtccggtcttgttcggccaggccccacttcccaccagggcctccctcttctcatctgtaaactgcacaggggctgtaaatgcctcgctggccctgctggtctggggtctgagggtgcgagtctgtgaatgtcctccaggaagcagcccccagcgcagacccctgctcttgtgtgtgggtctcagccggcactgggactgcagccgggtccgatgtctcccagccctcaagaggccaaacccccaccccaagaacatcatggccaggacagcaggcaagtgagtgccaactcgctgggcaggggtggcttccagaaggttcagtggaggctgtggggcagtgggagacagtgctggcccgggaggaggggatgtgaccaagggaatggggctcgtgaagtggcctggcctgtgggactggttgcaggggctgccagtgtgacagaattgtgggccctgctgaggtggcacagctggtggtggagggaggggcagggccccaggcttcatccggaggctggagccctgggggaggttcatcaaggggctgacggggttgaaaaggtggctctgccacaggcgatgggaggcagtggggcaagttgatgggctt

SEQ ID NO: 20501 - DNA, 990 bp, Artificial sequence
  DNA replication origin
cagcgccccgtctcctccacctggacagccgctggaaagagactccgcactcacctccgttcctctctcttctgtgacctctgttcttccatcttgttacccgccttcagggctgccagcaggaaggtgtggggggcaaagtacgtgtcatgggaggggcacttcctctccaccctccctgactcctcggcccttgcctccccaggtcaggggtgggggcccacatgtcagtgttggatagtagaaggaatggggaaggttctggaagatcccaccccgatgcccctcatgaccttggggagtatgtagtggggtccagcccaccttcccaaaagacaactaagaaagtcagcaggtgcggtttccgacctgctccccggggagtcccggctgtactgtatacacatcgtggtcagactcccccaggaggcattcactggcacctactccatgttcgggcactgggggtgcagggagagctgtctgcaccatgcaatgggagcctctgcagccagtgtgccaagtctgggtgccgggggcgtgcggaggatgaggaacaggagagtgaccaggcaggagcccagctagtggccccagaggtcctgggaaccgagggcagctcggtgaggccagggccatggtgggcgttcagtcgcaagaacaggctcttggtggtggagacccagacgagacagaagggcccgggtcactcgcatcaactcccacttgccgaggctggtcctgttcctccccagcgcctttcatgcccctgtgccctgtctagggccacgcccggccttccctgccccgacgcacccacgcgtccctggacacgctcactcccataaatgcctctgccagccgtccgcctctcttccagcagatattgattacagggggttttagtcccaagggtaaatttctggaagtccatccctggcttaaaggacacgtgagcacttggcgcctcgattcgagttcacaaacggc

SEQ ID NO: 20502 - DNA, 1641 bp, Artificial sequence
  DNA replication origin
tccagctccccaggcctctccgggagaaccctgagctgggtccacaacatttctcagctgcggtcacaggctcagattcacctgtcccttgaacaataaatgggaatgggggcggggggcaccttctgtcatcttgggtaagttttccacctgcacactgtgcctgtatgtgtgcaaacgtgtgcaggcttaaccacagaatcagcagagagcaccagtccccaaaacacagctggcagagacacacacagcccttccacccgccggcttgtcacagagtgtttctccctcccccaagcgttacatgtcagattactatcagcgctcagagtgaggccaggatctcaggagagaaactgataccaggcattctcagcatagtaaatacaatcctgggtaggggttgggtggggggggcggtcttgcgttggtattctgtaaagagctgaaagcagtcctttgaagaacatggcctattcatggcccaatctggacccagaaaggagcctccactggacatgcaggatggctgcccggggttcgacatctgcagggcagcctctctgagaccaggcccaggactgcaggtcagaggctcctcatccggcctatctgctgtgtcacctttcttaaacacagcctggcaagacagacacacgcggtgcctgcctcctggcaccccaggccagccccacacgcgtgcaggcagacaataggatctgcagttctggagcctgagaccagaagggagcagctgggcacatgatgccaccccaggttgccacaaacctgcccgatgcctgcaaagcccccactcacctggcaggttcaaggaacagcaaggccctgtgtaccaaggaggtgggataaaaacgtgcagaggggccttactcctggggttggggagcagagtttctgttcagtctgggatctggatcagccctggtgcaggcagacccaagagcatctatctaggatcccaaaggctggcccacttctccaggctttgggaggctgtatcaggtggggtgggacccttacagaagtcttcctgtaaaaggcaccttgaagagactggggcagacacacagaggggagcaagttgcgaaacggcaagagaggaaatccacccagccgcttcggcggggcagacccgctcagcccaaggatgagggaggggctgggctcagcccagggacgagggaggggcaggtaagcccaccctgtgacccctccatacccccaggagtcaccccaaaccctaactccagttggcttctgacaggaggcagcccagcggtctgggtgggggttgggggcggtgcctgggaagcccaggacgggcctgttgcccggggggctgcagactccagcctccttcctgcctgccccaccctcctgcaccccgctccccgggaggaatcttcaagtgcacaagaccctcttgaggactcaggcacctcaacaatccctaaggctccacatcttcagggggtcagtgccccagagatgggggctgtgggcaaggtccttccctagcctgtaatccaggcagccccctgactctgcggactcagacacagcagtcctcccaagcccgcagctgggacgccagactcagatcccagaccccctgcagac

SEQ ID NO: 20503 - DNA, 1216 bp, Artificial sequence
  DNA replication origin
ggttccccgcactggctactgccagggtccgcggggctgcggcgcgagctcctggatcccttcggccggccccccgcggccctcggttcgctccggccctgcccggcggggccctccggatccttcccagcccgccatccccccgccgccctgccgccccccgggccgccgcgctcctacctcctaccgtgccgcgagctcggtgctccgggccggccgggcgcgcgggggctccactggcggcgcgggcctggctgcaggaaatgccagcagatggtccccccgcgcgaggcggagcgagggcgcggcggagggaggaggcccagggagcccggaggcgggaggaggaggcgcggcggccgcaaaacccgggccgaatcgccgcgcggagcgggcgcccaggggctgccccccaccggctgccgcttctcctcatcccccaaccccccgcgcgcgctccggggctcacacccacccgggcggccagaggtcgggacactccgctgaaaatggccaggaggcttggcggggtgggcagcggtgagtggggtcagcttcgtggggttctccaacttaggggtgcaggcccccagcccaccctagccagggtgcgaggcgcctcctctcccttcctgaacccaggaaactgtcgccgtttctccccgtctcaggagccatcagaacacaagaggagccccagacatctgagcccgttgtccctgccccttatgtgctaagaaggaccctcagtcacactctaactgtacgtctttctcaggacccttttgacaagaacctcccctcatgtgcatttcttcctgtgttttctcctcaccttcttctaccccccagagacctttttagacccctcagttctcttgtatataaaagacattctaattcccctaaacagcatccccttgggagctgagaagtcctcccctggcccctggctccctgcctgtagaccctaaattgggtgtgggcccagggctggccccagggcgtttgcatccctagtgtccaagcctgaggtgcactgcaggtccttcctatggtatgtccccaaatgaccagaaaaactgggagctgggctcgggcatccccagatgtaggtagaccccaagagggcgtggagtcttttccacacagaaccttaacagggacagaactgaccctccgcagagagccctgggctcctccccaggcagaactg

SEQ ID NO: 20504 - DNA, 1322 bp, Artificial sequence
  DNA replication origin
gcctgcaaggcagcagaggtgtcctgaggttggaaggtggcagtggggggaggggagaggaagaggaggccaggggctgtgcgggtcttcacctccccagcatgggagctgatggggttttgttctgggtggaggttgatcctagaggcaggtcctgccccagaactaagactcccagccccgcacagccagaggggcctcagaagagccaaggacctcacagcctccatgtgtccgccccaggtgccccaagggccttccaagcaggccactggctcattcctcccttcccagcagggctgcgccccgtccatgagggccaggtagcaaggggctcagtcaaatctcactcctctgaccgcctcagcttaggagacccccagagcccttccctgcagggggcccgggctgtgctgagcctggttcctgcctctgccaggttccttgcctgacgttgcctcctctgtgacttggtggctccaacccatgaggaaagctcagccctgccctaccctcaaggaggcacaactctgcctggagagtcggggggcttcctggaggagttggtggagagtcagggggccttcctggaggaggtggtggagagtcagggggcttcctggaggaggtggtgaagagtcaggggggcttcctggaggaggtggtgaagagtcgggcggggggggggcttcctggaggaggtggcggagagtcagggggcttcctgcaggaggtaaggctcacccagactctccagggagttggaactgcccagggactcagagtatcaggaagctattccaggccaaggggctccacgttcaaagcatggtggtgtggatgctccttcccctcttcattctgctctgagggagctctgctgggcaccaaggagggtgtgtgcctgggatgatcgggactaggccagaggggccagcattggccagatcacagagagcatcagactccaggctcgtgagcttagagtcggtcctaagaacagcagagacgggagggttccaagccaggggacaatgtggacaatgtaggttctagaaggtcctcaggctgcatcctgggggctcccaaggtgtggggaaggcgggaggtgaggagcagagggggccgagcaggactcccatgatcctgctcagggaccttggtcatgccaggcagccctgttccactcagcacccctgctgctttctttccccttgttctctgacccgtcaccctctctagcccccagggcagagaaatctgttcctgggctttcagccctgggctatccttgctgtattccccacctggagagcaaacag

SEQ ID NO: 20505 - DNA, 2062 bp, Artificial sequence
  DNA replication origin
aggggcctgtccttgtgactgtctgtcctgctctgtgatgcccagggcttcctggcagcagaagctgaattctcagctcctctagtgtgcacctgccctgtcagcacccacggtgaccactgtgcccaagcagcccccacccctagccagcacagtccaatgtgtcatgtgcttcccatccctgcttattcgctcctgtgtttgcctctttagtgtctgtgtctccctagaagatgagctccatgagggcacagagccagcagctgacttgctgctgtctccctgggactggcaggtaaagcggcttgatgagttgttgtcaaatggatggacaagtggatggatggctaagtggatggatggatggatggatggatggatggatggatggatggatggataagtggatggatggatggatggatggatggatggatgggtgggtgggtggatggatggatggatgggtgggtgggtggatgggtgggtgggtggatggatggatggatggatggatggatggatggatggaccattgaaagagatgtggtcaaatgaataaatgatgtggcgaagacagagtgcagctaactggaatcagaccaggctggtcctggattatggaagcttcctctccactcttgtcctgaccactgacctgaaagctgagcagatcatcagaagaggggcccaggttttctcacagcagagtccagtgctccaggccctctccctcccctttgggttcacaaacatcactaagttagctccatgctgggcactgggcctagggctcaagatgtggacccaccatgctatgacccctgtccccagagagcttgacgtctggagaagacacagacataaacacaattcaaagacagtgtgctgagggtgcacgtggtgtacagaaacgctggggagccgccatttgtcccagcttgccctcagcgctcccagttcatggctgtggcccagtggccttagtgtcccctttattggcgagggcccagttggacctcaaatcatcccgtggtcctaatgttagaggagcaggagggtcacatgtccccactcggaacgcaggggaggcttcctggaagtgtgttgtctgcgacttccaagggcagtgtgggtgcagaagaaagagtgaccgtctctagcacagtcaggtcaatctaagaaccttgaagggaaggcagaccctcccagggaaacggagccaaggcagggtaaggtacggaggcgcaacccgggcaccatgaagaagaaggaaccccgatgctagagcccggtaaggaagctgaggtggccaaagacaccgaggggagatgagaaagggctgtgacgaggggcgtggctttaaagggctgtgacgaggggcgtggcttttcctcggttgctctgtgggggattgcaaatggattgtaagcaggagagggataatatcagacgtatatgaaagaaataaaactaacaactgagagggggtcagcgggggtgggggtccaggctgagcaggggacacacaggaagctgctgcagcagcagcaatgcagggaagagggaagagctggtgcagcctccaaagaggacaatggcaggaaggctgcaggagaggatctgaggtctggggggagacgtagcgtagaatttgcagtggaacaaggtccgatcaggaaaggaagaagtcaggagccttcacagaggggaagggtaggaaaataaaacacaggcacctgccaagaagaacagaaagatcaggatcctgagagggggctgtggatcctgagatggggctgtggaccctgggagggggctgttgatcctgagagggggctgtcgatcctgagagggggctgtggatcctgggagggggctgttgatcctgagagggggctgttggcagctgaccctgggatgggaatagggatgtatcaagcatggaaaaaagacacccaggggccaatgggtaaactcccaggtttgcatttcctgtgttcatctcagattaaatgtaggtggtgagagatgatgatcaaagttcattttgtctgtttct

SEQ ID NO: 20506 - DNA, 1115 bp, Artificial sequence
  DNA replication origin
ttctcttctctttctttctttcttgctttcttgctttcttgctttcttgctttctttctttctttttccttcctttcttccttcctttctttctttctttctttctttctttctttctttctttctttctttctttttccttccttccttctttccttcttttcttttctctctctctctttctctctctctctgtctctctctctctctctgtctctctctctctctctccaaagcaaacacttggggcaaaagctccagatgatccagggctgaggagggagggtgagagcagaggtgggagacgggagcaacccgcagagagcggatggccctggggacgcaggagaggccgggtggggaccagtgtgggaggggatgggaggggaccgaggggatggaggctcctgcatccgccggcccacggggctgggtctgttctgtgcagaagcagcaccacctggtggcctctgctggtgacatcaggcacctgccagtcctgggcctcagagagggggacagagccctgggtgtggtccccgcggggtgggcaggacaatgatggctgagcagggcggggagtaaggagtagttccacctcaactctgtagggggcgaatcagagcctcagccagcaggtggcatggacggcgcccacctagcccaggagtccggaagcctgggttccaatccggccactgtgggctggtggctggctctgttttattgtgcagttttctcccctgtgactcaggtgcagcagggtggggaggggccgggtaaggggatctgggctgggcctgggggcgtggtgcctgtcctcacccctattcaggaggcttctcctttctctctccttgcctgacctctctccagctccattttctgcctccctcatcctcagcaggcctggctggggggtggtcagggccaagtctctccagctgtgtccagcccttgggtgctcagggtaagagctaggtggtgggcggggctcctcctggtcctgaaagcatctgggtgtggggtgagcgagggtcggtgggggtgggcacctcctggcaggccctgtgggcggggcaagcccacttataggagacccatgggcagggact

SEQ ID NO: 20507 - DNA, 945 bp, Artificial sequence
  DNA replication origin
ccagggccctccgcagtaccgacctcagcggctcccgcttcccgggctgtcggcccaaccccgagtagatgaggggcttggagctgctgttgacgcaggccagcagcgtggccagcggggaaaacacgggcagcaggaagttcagcaggggctgcaggctccagtagaagaccgagggcaggccacagaagaagagcaggagcagcgcgcccaggacgatgccgtagagcctgggccgcgggcgagtggagcagcaggtcacccagacaaagaggaccacgccagccgtccaggcgacgcgggccagcaccaggaaccaggtgacgctggccacgtggtagcgcgggcagaccagggggcacgcgctgttgcgcagcaggccgcaggcgttggcgggcagcggcacggccggcagggtcggggtccacaccagggcgcagaggacggccgaggcgtgtctgggccggcagccctggtagcaggcggggaagaggtcggagaggcagcgctccacgctgaaggccgccagcagccagagccccaccgcgaaccacaggaaggtgagcacgaagtagagtgtgtcctgggcgcccagggcagcctgagccacggagaagcccacacggcaggagaggaacaggaagtcggcggcggccaggtgcagcaggtagatggagaaggggcccttcttgatgcggaagccgaggttccagagcaccagcccgttacctaccggtcccccgaggcccacgatcagcgtcaggtagaagaccacactgtcgaaggttctccagaggccgaacagcccaaacatcctggccggctcagagggtgctggcgagggacctgcaagatggagacagacatggtcctcaggagtcttttgtgcccccgctgggggcacagggagtggcatccatggccctgcaggtgccctctgggtgc

SEQ ID NO: 20508 - DNA, 1036 bp, Artificial sequence
  DNA replication origin
tgtgtggacaccagagctcaagggcgtcgctggagcgggccgagcaggtgaacctgttctgataacaatgaagatgccccctcctgccgccgggccactcctctctgtaactctctctccaggaatagagcctaacctcaccccagcatggggggcctgagcgccggcctcacccccagcctcagactctgagccagagccagagcacagccaggagagtctggtttcctccttgaggaaattgaggctcagagaggggaggtgtgtttccaccccaccaccccacccccagtcaccacactcaccaccacaagccagggcccggccgaggtctcccactgcccctggttgggctcggaggacaggccaccatcaccgtgtgcccggccatggcaaggcacaggagccaaggcccgagccgcactccccaacccctgactaggggcaatgacaagcacaaagaaggtgccgggggatgctcagccatgaggcagggggctcacgggggtcggaggaagctgcagggggttgcaggcccctgagaaggagcaaaaccttgaagtagggtgggacctgggtcaggggagaggtattcagggctgtctgggcaggggacacagcccaggcaaagatgtgacagggagggctccaggtgtgtgttggcggcttgatggctctctctctgtctgtctctctctctctcacacacacacagtctgtctcatctctgtttctctgtgtctatctctgtctctatctctctgtagctctctgtctctgtctctctgtctctgtctctcaatgtctgtctacatctctgtctctccctgtctctctgtctctctctatctctcttctctctcccgtgtctctcaccgctgacgccgccactgctgagcctggtcctgatgcatctcccaggactaagaacatgacccatgtggatcctgggggaggagggatggctggaaagggaagggctgctctgagaccctctgcctttcagcgcagcttccggtggccaatctctctcgca

SEQ ID NO: 20509 - DNA, 1376 bp, Artificial sequence
  DNA replication origin
gaagtagacgacgggcttggccgcgcagtgcacggcggccatgaggaagctgaagtggtagaagtagtgggggatgtaccagagcaggttccgggacagccagtagatgccgaagggcaggccgcagaagaggaagaggaggacggtgaggaggatgagcccagggaagccccggggtgggggccgctgggggcctcgctccacccgcagcagcagcataaggctggccccacacatggtgcaacacagcagagccagcagcaccgctgccaccagccacagcgtccggcacaagtggcggctgggctccccgaagaactgggtgcaggcgccgctgagcagcaggtgcagcagcaggcagagggcccaggtgagggcgcacacacaggtggtcaggtggcgtgggcggcggcacgagtaccaggctgggaagagggcggccaggcactgctccacgctgacggccgccaggagactcaggcccacgatgtagcagaagaagcgcagcgttgccaggctggtctgcacgaagcccgggaagtccagccggccttgcagcaagtcggggacgatggccaccatgtggcagccaaggaagatgagatccgcgcaggccacgtccaggaggtagatggcgaaggggtttctgtagacattggagctgagcagccagaggactgccccattccccagcagcccaccgaggccgagcccctcggtgagggacaggatgatgaggttgaaggccacatcctcctgggcgccgttggcggcccccacgtgctgtccagcttctctgggctccatcatggggcggggggccaggggatgctgcaggagtgtgttctgctcgctctctctcctgatgcccctgtaaaccacaacagttgagtctggggctcaggaatccatgccccctgctcctccccacatcaggggagatgagagttgggtgggtgaccaagggaatggtgagaccctccaggagaagacccctctctcatttccaccctcagccacctgacctaagcttctcttccctaagacactcaggaggaaggtgtccccattcctcccctccccatggttacctggcctcaagagccttccgtggggctggtccctgtaggccaggtgggggcagggaccaggagatgtggggagagggtctgagacccatggggctccctgttgctagtggtgccttgatcctcagaatgggctttttttttttttttttttttttttttttggagatggagtctggctctgttgccccaggctagagtgcaatggcaccatctcggctcactgcaacctctgcctcccgggttcaagtgattctcctgtctcagcctcccgaagagctgggatta

SEQ ID NO: 20510 - DNA, 1724 bp, Artificial sequence
  DNA replication origin
cacatgaggaggctgcatcctgctcaacgttgcccgccctttccccatggggagaagagggagctgtctgatgatggggctgggaggggccctgagcttccatggcgtctccagcctccctccatcccctcccaaggcagtcggctcacggggacaggtcctgcgggaggggtactgagtcctgggaggcagcacaaatcccaggggacctaggctggaatcggagtcttcatcacagctttgccagaaatacagcaagtaatagactctaggagactgccaggtgctcagagccggagacatgcctgcagatacccggccccatgctgcccctgtggttacctggcccgtcatgtgtctctgagtgcttggtgaccccagcttctcctcttggggttgggggagaggggatggggccttgcctctccccagagactggctggggtcaggggccgacaccaggtgcccctcccaccttggtggtggctggtcctcctgtgtcctgggagggctggggtttggggtgaggagggtgggggtacaagcagaaacccccatagctggtcttagcggcttcttcccacctcaaggttgtgctcagaacccctgctgtctccctccagtgataggagcacccgagaccatgcagggggacgctgcggtgctgggatgctggggagaggtggcccggggcggggctatcgctgagcacagaggtgccagccaccccgtgaggtgctggtcatctccctcggcttacaccctcagctctgtggtcttttgtttgactggggtgaaatgacagcctgaggttgtccccgcctcaggggtgggcatgggggtggggggctcagtggagaggaggccccagtcccagcacctcaggaagctgagtcctgcccgtggtccagtctgaatctcctgcgggtggagtcaagcctggttggagatatagggctcttcctcctgtccctgtgctccatcctagcacccaaggccccgggaaggcagaccatgggtgggaggtgaggtggtggtggagggagccccacctgggccagcatcatcaggaggacaccctgagtggggcagacggggcatcactgccatggcaggtggggagatgtggggagggggacagatgctctcctactcaggatagcttgggggggtcaccaaccctcaggcccagagggaggcagagatgagttttgggaggtcttaagtctgttgatggtggaccccctcccaggcacaagtcccgtccacccatggacggagctatctccgggatctaccagcaagctccagccccaaagcaacaggtggggtttctccagcctgtggcccaccaagggccatggtccctctcctatctcacctcctgcatggctgaggaggacacgggcctcatgggtgggccccagggagagagcatggcagggaagcgatggacatagagggagaggggagagtgcaggaaggggagaggcatgaagagatgggggacagagaaggaaacagggaggagaacagggggacaaggggttagagccacggagctcagccagaccctgctgctgccccctctctgctgtgaccctggaggaggtctccctgtgggaccatgtgccccactgggggctcgggagggaggcagagctctgtaggaagggtcgccacagttgggttacaggactgtggggagtagaggagtttgttgc

SEQ ID NO: 20511 - DNA, 1737 bp, Artificial sequence
  DNA replication origin
aggtggagaaagttgctgcgggccaggcatggtggctcacagctataatcccagcaccttcggaggccaaggcaggaggattgcttgagatcaggaactagagacaagcctaggcaatgtatcgagaccctatctctataaagttaaaaatttaaaaattagccagacaagcctctggtagcctggcacttggtgcatgcctgaagtcccagctactcaggaagctgaggaaaaaatgcttcagcttgcaagttggaggctgcagtgagctgtgatcatgccactgcacctcagcctggccaacagagtggcattctgtctcaaaaagagagagagagagagttgctggggcaactctgacagggagtgaaagtgaagctcgaaaacataaaggaagatggactaattggaaagagtcagacaattggaggggtaggggaactggaaggagtgggacaataggaggggtgggacaattggaagagtgggacagttggaagggtgggacaactagaatggtaggacaattaaaaaggtagaacaattggaaggagtgggacaattgggagggttggacaattggaacggtgagacaattggaagggtgggacaattgaaagagtgggacaattaaaactgtggggaaattggaagggtgggacaattggaagagtgaggcaattggaaggcagtacaattgataggagtgggacaactggaaggagtgggacaactggaaggtgagaccattggaaaggtggatcaattggaaggtaagaccattggaaaggtgggtcaattgaaagagggggacaattgcaagggaagggcaatttaaaaagtgggaccattggaaagaatggggcaattggaaggagggggacaactaaaagagtgggataattaaaaggatgaggcaattggaaggctgggacaattggaaagagtgggaaaattggaagggtgggacagttggaaggctaatgcaattggaaggtgggataattggagggtgggacaactggaaggagtgggacaaatggaagagtgggacaattggaaggagtgggacaaatggaagagtgggacaattggaaggagtgggacaattggaagagtgggacaattggaaggagtgggacaaatggaagagtgggacaattggaaggagtgggacaaatggaagagtgggacaattggaaggagtgggacaattggaagagtgggacaattggaaggagtgggacaaatggaagagtgggacaaatggaagagtgggacagttggaaggagtgggacaattggaagggtcgggcatttggaagggtgggacagctttaaggtgtaagacaagtggaaggcatggaacttatgaaagggtgggatggacaattgaaaggagtggcactattggaactgtgggacaactggagggagtgtggcacttagaagggtgagatatttggaacgtgtggggcgattgggagcacttcccccacacccctgggccatccttgagtgaccacccactggtagggcctcccagagcggtggcagagcccaggcatggtttacagagcctcgggcacctggcagctcggatcctggtttaggaagggaggatttgaagctgagacacaactcagcaagcggcactgctgcctgtcagataccagccccgcatggacgtcagacaccagcgcgacacattcatcagacaccagcattgcacagacg

SEQ ID NO: 20512 - DNA, 812 bp, Artificial sequence
  DNA replication origin
agtgcagtggggcgatcctggctcactgcaaccctcacctcctggggccaagcgatcgtcccacctcagcctctcaagtagctgggactacaggcgctcgctgccacgtctaattgtttgaattttttgtagagatggggttttgctatgatgcccaggctggtctcagattcctggactcaagcgatctgcccaccttgggccccgaaagtgctgggattatgggcgtgagctgtgttatttcatgccccgtgacagcccaacgaaaaggaaggaaccccgcgggtccatagtgtactcacgtggctggactgatggctgggaaaccccagcacgaggaaccaaaagagcagccaccgcagccgcatgtcctggtcctctcagggcgccctgaggtggccagggcacaggtgggggtggcttagggctgggggagggaaggggatagggatggggatggggatgggatcgcagttggggaagggaagggagaggagaggaggggaggggactgaaggggggctgttgggcacctggaggaggaggaggtggaggagaaaggggtctgggaaaggaaccagttcaaactaagtcctcaagccctggtgggaggttcagctacaggtcagtgggacagtcgatcagcagagcagcaggacgcatggggtagagtagcgggaggctccggagcagttggagggagaccagggctctggtttccaccaaaccagctcctgtctgggagctgcgtcagcaaccctggggctttatcctccctctccaccaatccccggccctggtgggtggtgcct

SEQ ID NO: 20513 - DNA, 1261 bp, Artificial sequence
  DNA replication origin
tttgcggaagttggggagtatgttatgtgaggagtttaggagtttattgagggggcctttggctgctttataaagggggtgagctaggggggcaaagttgggaatccatatttttaaaaagcctgttagccctaggaaggaaaggatttagttttttgaagaaggtggagatagactgtctattaaggctgcccatgccggggtcatggctcgagacctgggggaaggttgaactcctaagtaggtcccggtaggggtggaaagctgttctttagaggggagaccctatagcctttattagtaaggaaattcagaagggtggcagtgtgagtttgggagttttttagggaggggctacagagaaggaggtcatctagatattgaagaaggcggctgggggaaagatccaaggaggcaaggtcttgggctagggcttgcccgaagaaaagaaggctatcctggaagccctgagggaggacagtccacgtgagttgttgtgactggagggtgttggggtcagtctgggtgaaagcaaagaggttttgggaatcggggtgtaggggaatggtgaagaaggcatctttcaggtcaattgtggtgtagtgggtggtgctggaggggatgagagggagaagtgtataggggttagggactacaggatgaatagggaggacagcctgattgataactcggaggtcctgaacgagttggtatgagctgtcagattttttaatagggaggatggggttgttatatggagtgttggtctaagacgactgtgtgagcagagcttatgatgggttgtaagtcctttggtgtgttagggaagtggggtattggggaatgttgggaaatttagaggggtcttttaactggattttgatgaggtcctggtgagcagctatggaaggggtgatggtgtcccacactactgggttaatgagggaggcgggtagcgggtgctggggagtggggttcaggggccagactagcagagaggagcaggagggactctggttgagggggacaggaaaacatgatagaagctttgaatttggttaaaatgtcttggcctagcattggggtggggcaatgaggcatgataaggaaggagtgtgaaaaagcagtattaaacagggaacaaataaataattcagtagcacgtggacaccagaccagtccatcaacccctacaacagagacctgggaagggcaagtgggtcctaaagattcaggtaaaaccaagtaggtggccccacta

SEQ ID NO: 20514 - DNA, 2228 bp, Artificial sequence
  DNA replication origin
gtgaactgtaccccacaacgagtgcgcgtctgccccccaagacggtggagaggcccccagcttctcccgccagctcgcggggcaggaggggtgcgagcaactctggccaggccccagggacggggaccgggtcgcgcggacctgaccggcgggagcccaggcattcacgtggcgggagcgctggaggcttcagcacggagacccatcccgtctgcccctggactcccgcgagccccgcgggcctctccgctcgccccgccgcccacctgccaggggaaggaacgcagtgcgcgcgccgccaggaagcggcgctcgaaactctgcagcaagagttcggtccccgcgttctcctcgggcaccatgacgggggcggggccgcagcgttgccgggagaccgggcggaagccgagcctggactgaaaagggggcgggcccagggcagtgcgcgggggcagagagggggcggggcctgggggtaggcttaggatgagagtcgtgggagcggctctagggcggggccaggatgagcgttatgaggcgggggcctggggtggggccagaatgagcgtcttgagggcgaggcctggggtagggccaggagaagcgtcgttggggcaggtcctggggagagttcaggttggcgtgtcctggggcggggccaggacagggcgatcctggaagcggggcttcggaaacatccaggttggagacgtcctggaggcggggccttgcgtgggggcaggataagagtcctggaggcgggcgttagggtgggggtaaaggacgattgggttcaggaggcgagactcggagcagagcccaggagacaggtcctagggcggggctaaggccagacccggagaacggctcaggaggcggggccagggcggggcgttgactatgtcgtagcacgtggccaggcgctgctcggactctgggaggcggagcttaggacgggcctacgtggggaggggcccagggtccgggaggcggggccgagtccgggctgctggctgcgctcaggaggcgggccctgggaggcggagcttagggaggggccggtgtcgggagggacccagggactgggaggcgggtcggggctgggctcaggggccgagagggagctgggcttggggcggggccgagacggagcgaggggtccagggtgtgagaaacggggaggggtttgaggaggggattggagcgtggctcaagttcgggaggcgttacctgcggagagtttgaggcaggcccaggagcgagcccacggtctgccgacgcggagccagggacgggccccaggatccggagcttcaggcggggccgagtccgggtttggggcccgggagtcggggccggttagggcgagggtccccgggatcgtccggtcaggccttgggccaacgtaggcactctcgcagttcctccgccttcaggaaggtctttttggcaggggccttatgggtgcgcgcttcggtcctggaggcgttatcctagcctcctctccatcagcgccacccgtccggggcccgataggagggagttttccctctgtcccccaccctttggactgtcaccaaacaagccattcgttcaccaaatacttattaagcgcctaccatgtgtctggcaagggagatgtaacagtgagaaaaactaggtgtggtccaggccctccaggggctcaggggctcgtggaagaagtggacattgaggtacttatcacacaaataagtataaaagtacaatagcgatatctgccacgaaggcgagcagacagagctagcggggcttccaggaggagttttgatcttgcagggacaggaaggaggagttagctcctggggggcgggattgggggtggtggtgatatagacgtgggggacagagtggaaaacaacaaaaatataattattttagttcaaagttattgtgtcttgagttgaaaggctgggcagttagcaacacagttcagatttcagtactgcccctgaaatctgaactgtgttcaaagtctaaaacgtttaccttagcaaatccctcataaaactccatttggaagagtcccgagagctaatttgttcagtgtacttgcaaaaggtagatgaggagacagacaaaatcttattacctctttcagatgagaggcacttgagccctgctcagctgcgagaataagagaggggaattaattctatttgaatacacgtgttctctcacagctgttg

SEQ ID NO: 20515 - DNA, 2132 bp, Artificial sequence
  DNA replication origin
cgcaggccagggcccggcgtgtccgcggtgcgcgcgagcggccagcagagggcgccagagagccaggagcggcccgcggaggagccagcgcccgccccgatgcccagctccgcgccgcgcggacccaccgagcccgcgctcagacgccccagctccgccgagaggccgctcgcgccgggtccttcctcttccccaggtgcaggcagaacccccggagccatggccagcccttccggcagctccgaagccactggcaagccccgaggcagggatggccggcccaggagggaggaggacgacgtccctcccgaggagaagaggctgcggctgttgctggaggggggaagcgcacagcccgaggacggggaggacgcgccgcggccgggcaggaaggagaccggcacccagacaggtggcgacggcagaggagtaagtgacgcgggcgctggggtccgggggtcccgggggcgcagggtaggggcggcgggaggctccgtggccggccccgggttgaagttggtaattgagcggcaactcaggcgggcgcggagtgacagctcgtgacggcctccgagacgccagctgccccttctcggctgtgtggcttcgacttcctgattctcccacgacgtccctggccgggagacgcgctggactctgcggctggccaaaaggggagggggagccccgcgtcctgggggcccctagcaggggaaggggcgggggttgcgccgggcatcctgtctggggcatctgtctgggactctgccggtgcctctcacctggcgaggggcctgtggtgggggtaggggggaagtccctggcgccaggcttggccaagccctgctctgctggactgcgggctggcggcgctcacccagctcctcacctgtcccgcatcttcctgtttttcttccctttctggttgggcagcgagagttgagaggaggcagatggcttccatcccagaaatcgctctcctctttccatccctacagagagggacagagaggcaaagttccttgcatcccccggggcgctgtccctgtgagctcccggtgtcgtgcacacgtgagcccctgagtcaccgggcttgtgtgtgtgcgatggggctccgtggccagcctggcctcctggggttcactttctgctttcctaccccagctcttcctgtgtggctttgctggccttccactgaggaggcacatgggtttggagggcagatgagagcccactggagagctgtacccctcagtgagggccgccaccttgatggtttttgatggatattggggttgacctgtttgttccttccacatgtttttttgtttgaccatttgctcagctgagcttgtcttaataattggattcgtggttaatgagccccacatgggcgagagagcggccttcattctgaacccatttaggcagcacgggcagccctcctcgccgtgggcggcattagagcccaccctgcccagtcttggggttgctccttgatgctgtctgggaggcttgctcatggtgacatccttatctctccgtgcacgttaccgcattcagagcttgggtcacgtggacactgaactcaggcgaattttctctgagatcccgggagaaggaggacagttctttggaaggttttccagggctgatcacggaaaggatgagaagggagaggtcctggtcggggacacaattacgatggcagtgtaacgccgggaaactttattgcatgaagtccctctcactccctctacctccttcttttacgtggactctgccaaagaccaggataccagaatgcagtggagtgaccaagtgtagtgggaccttgggaacccgagtctggagccaggcagctggggtttgcatcctggttctgcccctccttagctggctgacatggcacaagccacttaccctctctgagccttactgtcttcggtggcaaatggatctgtcaacaggccccattgcctggggttgttactgctgagattaagggaagctcatccatagaagcacttagcgttgtgcctggcacatagtgtatggtggataaatgggaattaggactgaaactcatgccttggtgtgtttttgcagtgatgttttgttctggggtgcat

SEQ ID NO: 20516 - DNA, 1697 bp, Artificial sequence
  DNA replication origin
ccggtctccttcctgcccggccgcggcgcgtcctccccgtcctcgggctgtgcgcttcccccctccagcaacagccgcagcctcttctcctcgggagggacgtcgtcctcctccctcctgggccggccatccctgcctcggggcttgccagtggcttcggagctgccggaagggctggccatggctccgggggttctgcctgcacctggggaagaggaaggacccggcgcgagcggcctctcggcggagctggggcgtctgagcgcgggctcggtgggtccgcgcggcgcggagctgggcatcggggcgggcgctggctcctccgcgggccgctcctggctctctggcgccctctgctggccgctcgcgcgcaccgcggacacgccgggccctggcctgcgctgcgctcacctgccccggcccaagcggtcgctgtcccctgcctgtggccatacccgctctgaccaggccctgcccctcctccccgctgcagccaggttgcaccccgatggtctccctccccaaggaggagagaagagaagggaagccccgagagggtggacatcggccacagccaccttgtctttgctcttaccctgtgtcttccatgatttggaggtggtgggaaaaccgaggctgctccaaactcgtggagaattccgcctgcaggatgacacgaatgcaccttctctttgctaccaacagatcttttttgagcatcactgtggaccaggcgtggtgatgggggaggggatattgtggtgaacatgacaggcattgccttcacccagtggggctcagcgctgggtgagaaggcattgagaatggacattgtcaattgggcaaaaggaggccacgaagaagtgttgggtgcatgggaactgaaaaagacaggaggctcagcaggtcttggagctgggagagggacagcagcagcggctgttccaaaggaagtaaaagttgagagaggtctcaaagagttgttctcagcccagtggagggtgttcaggcagagggaacagcgtgtgcaaaagcccaggggctgggaaagaagcagaaagaggactgtggggctggagcatggagggcgaggggagagaggtgtggtgggcacacagattgcctgggacccagccgtgcaggggcagaggagataggggatccttgcagacccccagccggggctgaagcacagagacaatgcaggtgggcaaagggaggagacgtggagaaatattttggaggcatgccctgatgaatgagcctaggatgcacccttagtgtcagtgtggagctccttccctggctgtgtgatgagctgaactcgggggtattttctggacattgaggtgctacacccagagtccaggacaggctaagtgagcaccagcagctcctggcctacctcaaaagcaggagagacaggggagactgggaaggctggcgtggaaggggaagccaggaaggcaggagaggccagggaagcagaggaggccagggaggcagtggaggcaggagaggctggggaggctgtgtcctttccatgattctgcccaggatcctaggcccctctactccctgagcttccccaccccaagcgctggaaacatgttgcacaatggtctccccactaagctcctgatggcggcccctaccctgctgtgctccctatttcaaccctaacagctctcacagtg

SEQ ID NO: 20517 - DNA, 855 bp, Artificial sequence
  DNA replication origin
cagcctcccaaagtgctgggattacaggagtgagccaccgcgcgcaggctgaaatcttgactttaccacctattagctgtgaggccttgggcaagtgtcataacttttctggacttgaggatacttccaacctcacagttattatgaagacagcataaagagcattacttctgtacaacctaaaaggggtcatcctgtcattagaaaggttcttgcagtcggtgggaggtgggactagatgactatcaagcacttttccggctgtaagatctggcaggcaggtgatgtgcaaatattacacacagccagtgtccagctgcctaacccccagccccattctcctcgggctctctttccctctcatccagcaggaagcccttgcaggtaggtgctcagccaccacaccaaatcactgtgagctctgagacgcctgagtcctcccctgctctgtacccacatttggggtaggggtggtggggaggccaagccttggttgggacgggctgccaggactgcagcacacaggtaacccaaggaggctttgccgggctgtgcctgcgctgggagatgagaggtggggaggagaacgttggaggcatccagagagggatggagatgggggttctaggagacagaatgggaacttggggctccctgcagagatggaggttcctgagaggaagagagttaagagtggaatcctagggaagagtccctgggagagggatgtgaggagtcagccccgggtccacttcctcagggtctgtcccttaatgtcccccttggggctaggagatggttcctggagttacctgccaggtgtggaggccgaggctgccgagggcgatcatcaaa

SEQ ID NO: 20518 - DNA, 877 bp, Artificial sequence
  DNA replication origin
atttgatgaaaaagcctaaacgctctgattcgggagaggtcggataaagaaaaaggagcattaaccttgactacgcctttagcttcagccacctttttaagaggaaattgctgggcaggttggggagggctagtcatgaaatgaaatggtaaaccagaccgggtgtgaggaggggaggtgataaaaagattacagggtggaggagctgaggctgaggaagaattgggacctagctcagcctggcgaggagcagcctggggaggaggggagacgtcagacgggtctgtagaaaaggaagattagaaagactcagcgacacttggggttgggactgaggggacaggcgggagggaaagaaggaagatttgggacaagttgcattgggcagagactagggagggactgatgtgtaaaagaatgccttgacgtcaggcacctcagaccgtttgtccattttacgacaagaattatttagatcttgcaggatggaaaaattgaaagtgccgttttctggctatttggaaccactgtcgagtttgtattggggtcaagcagccttgcagaagaaaataaggcatttaggttttaggtcaggtgtgagttgaagaggttttaagttcttgagagcacaggctaagggagacggaggaacggagggtggaaggttgcccgtagtgaaggaggcaagcccagagaaaagagagagtagagaaacggagggaaggggttcaggggttcttaccctccagaaaagcgggaaaggggtcagggcgtggaaataaggggtttgggcgcagagataagaggtcggggcacggaaataagggatggggcacagagataagaggtcggggcgtggaaataagggattggggca

SEQ ID NO: 20519 - DNA, 1584 bp, Artificial sequence
  DNA replication origin
ctgtctgactttgccgctccctgacttgtatttcttgggatcactttacaaagaagctcactgcacccatgtacttgtctgtgggtctgcttttgggggaaggaaactgagagtcttttctttggaagattcttctttagtctggacccccagaatgaacacgtgaggaacagacctgagcccagcccagagcaaggaagaccccagctgagccagaccggcggcctgagcagagctgcccaaccaagtccagtttagataagccacttgccgtcaacccaaagaccatgagcctgggagtaaatgtttgtttgccactgagattttgtggcacacggcaaaatagttatgcagcaaaagcccactgggccagctgtatctctcattgtgtctccacagctctgtttctgtctgcatctgctctacaataaacaagatacatcagaggcttgaggggaggagaggcttgaaggcagactgaggacatggaattagtggacctgagtaagagaatggcagtgaggacagacagaggtaggaggtggaatttacaagacttgatgtctgatgggagaatggcagtgaggatagacagaggtaggaggtggaatttacaagacttgatgtctgatgggagaatggcagtgaggatagacagaggtaggaggtggaatttacaagacttgatgtctgatgggagaatggcagtgaggatagacagaggtaggaggtggaatttacaagacttgatgtctgatgggagaatggcagtgaggacagacagaggtaggaggtggaatttacaagacttgatgtctgatgggagaatggcagtgaggacagacagaggtaggaggtggaatttacaagacttgatgtctgatgggagaatggcagtgaggatagacagaggtaggaggtggaatttacaagacttgatgtctgatgggagaatggcagtgaggacagacagaggtaggaggtggaatttacaagacttgatgtctgatgggagaatggcagtgaggatagacagaggtaggaggtggaatttacaagacttgatgtctgatgggagaatggcagtgaggatagacagaggtaggaggtggaatttacaagacttgatgtctgatgggagaatggcagtgaggatagacagaggtaggaggtggaatttacaagacttgatgtctgatgggagaatggcagtgaggatagacagaggtaggagttggaatttacaaaacttgatgtctgatgggagaatggcagtgagtacagacagaggtaggaggtggaatttacaagacttgatgtctgatgggagaatggcagtgaggacagacagaggtaggaggtggaatttacaagacttgatgtctgatgggagaatggcagtgaggatagacagaggtaggaggtggaatttacaagacttgatgtctgatgggagaatggcagtgaggatagacagaggtaggaggtggaatttacaagacttgatgtctgatgggagaatggcagtgaggatagacagaggtaggaggtggaatttacaagacttgatgtctgatgggctat

SEQ ID NO: 20520 - DNA, 984 bp, Artificial sequence
  DNA replication origin
gctctggacttcctttagttagggtgtgtagacaatgagtgctcccttgtggattgtgaagtcaagtgtctcaggatcttaggagcagtggggagagactggctggcccaaagaccagcaaccacttggccgtggctgtccctttctggaggagctgtggctgcagcagatccctgtgacttagtcccagccctcacagggcctgcaccagcaccaggaggctcatgaccagggccatggagaagaagatggccaggaagaagcggtccatcacacgggccaggcgcttccagtcctcatggcagcgctgggcagctcggtggctgcggaaggtattggcaatggtggctacgtggtgcagtagggcttcctggcggcacagacatcgtggctcgtggcaagggcccgctggggggccagcccctccttcaggcgactgggggctaggagataactcaggtggcctggactgcccacagggctcccctctttcccgcacgcacaggccccgtgccaggtgtcccagcaggagggccctagcccaggctggcactgggcggacactgggaccacagtaatgcaggttcatgataaggatggtgagtgctgttgagaatgtgaccatggtcatagtggccatgtagtacttccctgcaagagagagagaaagccaattgactcaaaacaaaagcctgtggttcctgagcttcccagccacctctgcacaaatggaaataagcccaccatgaagctctccagaccctccaagccccatggatggaagcaggaaggaggtaagggccgagttctccccatccttcattcctacacgtgggtcatcggaagctactgctctctaattgctcccgtcactgctggaggctgcactcatacacaatccaggacagtcccgctctcaaataacgacgggcatgagctggggcaagatacgaatcctttttgtacaaatgggatacccagagg

SEQ ID NO: 20521 - DNA, 1302 bp, Artificial sequence
  DNA replication origin
cgctcctaccctgtgcctccccgaactccttctgcccctcctcttccctctcgccccttcccccttcagttcggtttcaaaagacgcgttgcccaatgaataacagggtcgacccagagtggcggccgcgtccaccaattcgcggacggcgagggcggagcgtccgcaacgagcctctgacgccgggcggcgtgtgacgcagtcgggccctctgcgcgctgcgcccgaagcggcggtcggtggcaggggtggtagcggcggcggcgacggtttcgtgggggccgcgcgctgctctgtgagcggcgggtggcagcaggggactcctgacacttccccttccccaccgaaccgcggtaagtcgggagcccgagctgcagcggccgagaccggcaggtttctccccccttccgggcgggcggacgcgcggggcgtctcagggcctctccgcttcgaagtctagcgccgctgcgcgcaccttctggcctgagagaggggcggtgctgaggacccgggggcccggagcccgggaggcccggctttggaggccctgggagagaatggacatcagtggggtctaggcctggaggtctccagttgctgcccacgcgagtgggtgtctgtctggttgtactcattcattcagtggtgtaaggaccccacggtgggctggcctttccggggtcagcgccttgaaaccctgaatacggtctgccccgcacttccttgaccgtcatgtgggactgggctttatttgccttggcttctccataagggaagtgggcaccccgaggattagggtgagtccgaagtttgggagatttttaagataatatctgagaataggagtcggttcggtggagcaaaaggttcttttctattttcccacgtgttcagtgtaaagccagatgaggagacagattgagtttctggattactatagccataaggactttagaaattgtttaagtcaatccccctaccttacatcagttttgtagatggggaaaccgaggcccggagtaacaggcaggattagccaatgccagatttttgacagtctaaacagttttctactacctcaccctccctggatatttcagtctcccattattaagaattccctttaggaggtcggtgcggcatggacattaggtagctaaacgtagatgtagtcttcacagcgttttccgtttagttgctaccagctctgttcacgggtaaggtggaagcttcgttagtggtaccctaacctagagcttgagaactaaacttagaagatggttaaagaacgtcagcgttgtt

SEQ ID NO: 20522 - DNA, 1278 bp, Artificial sequence
  DNA replication origin
gggaacatttgaaatacccgtcctttaagaataagtaggggttcggctgggcgcggtggctcacgcctgtaaggccagcactgtgggaggccgaggcgggcggatcacctgagttccggagttcgagaccagcctggccaacatggtgaaaccccatctctactaaaaatacaaaatcagctgggcgcggcggcgagtgcctgtaatcccagctactcgggaggctacgacaggagactctcttgtacctgggaggcggagattgcagtgagccgagatcgtgccactgcactccagcctgggagaaagaggagacagagcaagactccatctcaaaaaaaaaaaaaaaaattagttcatgggcgaggtggctcacgtctgtaatcccagcactttgggaggccgaggcgggtggatcacttgagatcaggagttcgagaccagcctgaccaacacagtgaaatccccgtctctactataaatacaaaaattagctgggcctggtggcggacgcctgtaatcccagctacttgggaggctaaggcgggagaatcgcttgaacccgggaggcagaggttgcagtgagccgagattgcgccaatgcactccaccctaggcgacaacgcgagacttcatctcaaaagaaaaagaaaaaaaaagaattaggggttctccacgtgcagctgggaaagacgttccaacaatcctcatttgtaccaggccctttggtgggccagtcccttagggcatctctaatgctcctaatgtccatcctagaaattcagggagggaaagaaagtgctggggcgagcatgggtcaggagagaatagggtcaggatttagggccctgaagaagcctcgggcaaactctttggacagacagaccttccaagagggccctcaggctccgcacgtggtctgggcgggaagtgcgggcagagagactaggaagccttcccagcagcgccggcggaccggggcaaggaaagggtcgaatagttaccatgccattctggggccgtccctctgattggcccgagctccctcagcccgagtcgcggcgctccaaggaagggggcggagtctctatgttgcgtcaccacccttcccgacaccccgccggtgcttcccaatctagccattcacaagcccacttcgagaggccctgtgtgacgtcacgacacgctcccgccaaccgcggcggcgaggggcgggactccacggccctctcaccgctcctaccctgtgcctccccgaactccttctgcccctcctct

SEQ ID NO: 20523 - DNA, 1417 bp, Artificial sequence
  DNA replication origin
agccaaggcgggggcagatcacgaggtcaggagtttgacaccagcctggccaaaatggcaaaacctcgcctctactaaaaactacaaaaattagctgggcgcagtagcgggcgcctgttaattccagctactcgggaggctgaggcaggagaatcgcttgaaccctggaagcggaggttgcagtgagccgagatcgtatctattttcacaggtttttttttttttttttaatggagtttcgctcttgtcgcccatgcttgagtgcagtggtacgatctcagctcactgcaacctctgcctcccgggttcaagcgattctcctgcctcagcctcccaagtagctgggattacgggcgcccgccaccgtgcccggctaatttttgtatttttagtagagacggggtttcgccatgttggccaggctggtgtcaaactcctgacctcaggtgatccgcccgcctcggcctcctaaagtgctgggattacaggcgtgagctaccgcgcctggccctcacagggtttttatgaggattaaataaatgagataagaagtaagagtgcctgggatatactgggtgttcagaatgtgttattgctgtgaggatttaagtggaaaagtgcgatgttaggtatggctaacttagaggtcctccacccgctgcagatgctctgactacccaccagtgtgcttgcaggaggaattcttggtcccttcaccctccttccctgttgggctgggatggtctttgcaaagggagccaggggtccccctcaagttctttcatgggtcagtcatggtcagggtagggagggaactctggcagctggttttgggggatcaatcctctcattgtggggagacccaaggctggtggctggaaatcctttctgcgctacgtaggacagggcgccctctcctgaacaaaggcgggaacagctctaggccagagtttctgggatgtgcctcaccgggtctcactgcctgcaaaggtgctcttcccattgctgaaatgtccccaaccgccctgacgagcaaagtttgggggaggggcgccagggctgggaggaaactggcttaatgtttcagaagggcgaggctggatagttcggttagaatggaggtgcgaggcaggagagacgggcggatgagaaagaaatccggcccctgttgaattaattttgtgttctttcaacaggtagatggaacgcagctgagaggtaaggcgacaaggtggcttatccaacatgctcaaactcaggtatccagagctcttccggctgccctcacgcagccgaaattagtgggggcagacccgggctgtaaagcatggtttgaggacacgccagattgaggaggagagccaggggtcggggtctccagaagcggggaggagccagcggaggatctgggcgcagt

SEQ ID NO: 20524 - DNA, 940 bp, Artificial sequence
  DNA replication origin
gttggggtgattttgatttcccacggcctctcttacaagtcttattcctgtgtcaccctaccctgactgctacaaacggcttcctcctgcctaaccacaacctcactcactgcaggttcccttcattctgctggcttcccttgctctgggccctctcaaggctgagggcagttattttgtctgtaagagataaagatgtagtcacacagacacgcgcgcgcgaacacacacacacacacacacacacacacacacacacacaggctttccatctctttaatccatctctaagagatgaagatgtagatacacagacacgcgcgtgcgaacacacacgcaaacacacacacacacacacacacacacaggctttccagctctttaatccgtctctatcactgggaggctgcagactgcctctccaagctagggaggtttgaaaagactctagaactcactaagtcttcaacaactgattccaaagctggagataagtgggtgggagggaaggatacagagagggtgacaggctgagggttcaaaaggaatgaggggtgatggaagaaaccaggaggtgcatgtgtgtgggtgccagagctgggaagggaagggatggggcaggttgcagaggaccaagacgaacatggggcagggtaggtgaagacaggtcaaggcctaggtatgaccgtatgtttggaggaaaagagactggaagggatgagaagagagtgatggcggatttgtgggtagaaactaaagaaggtgtggagggagacgacaggagcatgtgtataattcagggactaagaatgaagaggaacactaggagatggttctcaattgtccccaaaagacacaacaaaaacttgtcagggactatcagtacctctgaatgagagtccttccacttccagttacagggcaagaccaagttactccc

SEQ ID NO: 20525 - DNA, 801 bp, Artificial sequence
  DNA replication origin
tgggaggcctgacttactgaccgcaggggcagcggactgggaggggaacgtggcaagcccgggactgggccgggggcgaggctgggggcgggccggggctggagagggggagatcggccctcggacttcctggtcgggccccgccccggcccgccccgcctcgccggcccgccccccccacttcctccggcctcccgctctcacttccttctcgagcccggagccgctgccgccgcccccagctcccccgcctcggggagggcaccaggtgaggcccggccggggctggcgggtaggggtccgggggaggagagcccggccggcccaggactcggcgcgggcgccggctcatgagtttgctggcggaggccgcgggcgggagcttctcggttcagtccaagtagggcgggcgcggccggccgggcggggcgggaacggggccactgcgagccggcggaggctcggcgagggtggcttcccggcggctgtaccgcctctagggagccgagagggacccctgaggtcggagggtcccgggctccaagataagtgtctctgaagtggaagagctcagagctgggagatcggacgcaggtggggtgtcctcagaagttggtggggggggtgttgagaagtgcgtgaggggagagggcttctgggctggaaaaggcgctccctctgctctggcagttgtgacacttggggtgagaggggcggtgtctggggcctccgaaagctctctccctgtcagatggatgctaatacagacccacactcggtctgcagccccaaggccctctg

SEQ ID NO: 20526 - DNA, 1269 bp, Artificial sequence
  DNA replication origin
ccgtattactcctacctacttttcttaattgaattacctacctgcccattttgccatttgaatttaagacccctggctcagagaataggtctaggagaacctaggtagggtttcaactgttctggtcaattttccaatattccggtattagtttttagtatctgagtgttcaagtgaattaactcatgtaatccagcttttacagagaacttactatgtgcagggtctatggctgggtcctagtgtcacagagatgaataaggcacagtctctgacctgaaaagtggcaatcactatctgttgggggaggggcagacagatgtaatggtccaattttggccacagactgattttgaaggggtgggcagagtaaaagtttctaaggagacacattgagctgtatctggaagagtaagagaccagctacatgaggaactgggagcaggcgagagtgtttcatgcagaagcaacagcagatacaaaggctgtgaggtggctgagtttgacgtggttaggaacttaacgaaggctagtgtgacaggagcttaacagagccgggagagtggtagtaggttacattagccatgtatttttatatcaacggcctaacccttaagccaggcagctgttgggcaaattcgtgttcccagtcttcaggggccttgctcagaacaggtagctggtttagcactgtcagtcagaggagggactgggcctgatcctttcccctgcgtctggtgccaaggacagggtagggcacagaggtttcagtcaagatctgctgacagcacgcttgagaagagaacaggaagtgcaggctttgttgaaggaggctcaggcgtggctctgtcttctttggcgcactcattctcaagtcgctgacacctcctccaccagagaggtagctgggagaatgagatgcagggaggaagcatttacaggccccaccgaaaaaccttaaagggctgagagcttgagggcaggtaggaaaaagggctgtgagagctaagggagggcatcccacttagcttggaggggaagggaggcggggtcgggaaagcagatggcaccctttagcccagactcaaggaatgtgtaggggaattttagctagagtggtttggacatttcattttgctttctggcatcatcatttcctcagaaaacactcgcaggccccagtggccctcgtgggcctcccccggggcgggtcttagcttcactcggcaaccctctgcaaaagagcaggccctcccaggagcgccgagt

SEQ ID NO: 20527 - DNA, 1462 bp, Artificial sequence
  DNA replication origin
tcgctggggaccgggcggcgcggggcgggcgcggagacgcacgcccccgcccgccccgggcccgccccgcgccgcccgcccgcctggaagccgctgtcctgggcctggccggtgtgcgtccgcctgctggacctgggcaccgccagccgcctgggcacgggactgggcgggggcgctgacctcggcctaggaggcccaggatcccggagacgcccgcgccctcaggaccctgcgggtcgcacgccctccccagcttctgctgctcgccgctcttcggcagggcgaggtcaggtgcccccttctcgcctctcttctcttctcttctcttcctcctccacttctgtgcccgcggagactccggccgcccccttccgcaggggtgtagtaatctgcggagctgacagcagccccgcagccaccctgcccgaagtctccggaagcggcacgagctcaggccgccgcagccccggcggacccactgttggacctgaggagccagccctcctcccgcacccaaacttggagcacttgacctttggctgttggagggggcaggctcgcgggtggctggacagctgcggagccgcgagggcatcttgcctggagaccgtcggctgcactcccgggctcctggctttgcctctgggatcccgaggtgtccacatcagacgcatgttgactgagacctagagtcatggatgtatgcgtccgtcttgccctgtggctcctctggggactcctcctgcaccagggccagagcctcagccatagtcacagtgagaaggcgacaggaaccagctcgggggccaactctgaggagtccactgcagcaggtaaggccttgctgcgggctggactgggctggaggctttggctcaggactgagtggcccgaagtgggcaagttgaaatctaggtttgtacatgtgaggttcatggaggattcacacatggcactgcctgttccaagtagttcaagaagttctttctggtcagtagtcatggcaaatgcctgtatctttcctgaacaactttcctcatcccccgcactcaggattttttttgttggcagtaagaagaagcctttggggcaacttgaccttttagatcagcaaggaaagaccccatcttaggcctacttgtctggaagaatggcctggtgagatgataagttcattgctcctattcggttttagtactgagcagcatgggggaggttggggccacttatgttggaaagggaaagttaaggctgggccacctctgttgcctgaaagcctggtgttcaggtgtgcctattccaacaaccgtgggaaccctagtcccacccttcccttaggtagtcttgtctctttgctgtgcgcatttgaaatatccaggcggtttcttagatggaatcctatttacaactagggtgttaaatggccttttcttgacatagacatgatataattcctgggacc

SEQ ID NO: 20528 - DNA, 961 bp, Artificial sequence
  DNA replication origin
gccccgtccgggaggtgaggggcgcctctgcccggccgcccctactgggaagtgaggagcccctctgcccggccagccgccccgtccgggagggaggtgggggggtcagccccccgcccggccagccgccccgtccgggagggaggtggggggagtcagcccccagcccggccagccgccccgtccgggaggtgaggggcccctctgcccggccgcccctactgggaagtgaggagcccctctgcccggccagccgccccgtccgggagggaggtggggggttcagcccccggcccggccagccgccccgtccgggagggaggtgggggtgtgagccccccgcccggccagccgccccgtccgggagggaggtggggggtcagccccccgcctggccagccgccccgtctgggaggtgaggggcgcctctgccccgccgccccgtctgggatgtgaggagcacctctgcctggccaccaccccgtctgggaggtgtgcccaacagctcattgagaacgggccaagatgacaatggcggctttgtggaatagaagggcgggaaaggtggggaaaagattgagaaatcggatggttgccgtgtctgtgtagaaagaagtagacacgggagacttttcattttgttctgtactaagaaaaattcttctgccttgtgagcctgttgatcagtgaccttacccccaaccctgtgctctctgaaacatgtgctgtgtccactcagggttaaatggattaagggcggtgcaagatgtgctttgttaaacagatgcttgaaggcagcatgctcgttaagagtcatcaccactccctaatctcaagtacccagggacacaaacactgcggaaggccgcagggtcctctgcctaggaaaaccagagacctttgttcacttgtttatctgctgaccctccctctactattgtcctatgaccctgccaaatcc

SEQ ID NO: 20529 - DNA, 1637 bp, Artificial sequence
  DNA replication origin
atgtcagtcttcagctgctaagccgagaagatctgggaaggagtcagagagtcttgggccagagttccaggggttctggaagtggctgccaggtgagttgaacagtctggttttcagtggggtctcgcacagatgggacacggcttaggaggaatcctgggctgtgggcattcctcggcctagtggccagatttccagcacttgtagcaagctcctgggggaggaggttctggaggaacccctggcagcagcagttcaggcatttggagttcttgtgtgctggagatgtggctggggtttctctcacagtggaggcaaggaattggactcagaaatatgttgctacttggctgcctctactctattattgtacacctggaaggcgaggttaattagatcctgttgtggggtttgagggccggaatttaatttttgaagttttttcctaatgttgggagtggactgggtgataaaatgcatattaagaataaggcagccctctggcccttctgggtctagggcagtaaagcgtctaagggtcactgctaagcgggccatgtactgggctgggttttcatctttaccttgggtagtttctttcagcttgtcataattaacagctttgtaagctgccttttaaagcccttcaattaggcgggaaatcatgtaatctcgcctagctatacctggggaatctgcctgatagttccattggggatcctctcgaggaactgctctaatgccttcctggaggtctggctcatgaagccggtggttatcagcatgagattgggctagagaaaaaactcattctcgttcacctggggagagggtagaagtcaggatgacatttaagtcactccaggttaaattgtaggacagagtaagatattggaattcctgtatgtatttagtggggtctgatgagaaagagcctaaacgctgactgatctgagagaggtctgatagagaaaaaggtacatgtaccctgactatgccttcagctgcagccacttctctaagaggaaattgttgggcaggtggggaagagctagtcacggaactaaactgtaagctggactgggtgtgaagaggggaggtgatagaaggattacagggtggaggagtggaggctgaggaagaatggggacctggcttggcctggcgaggagcagcctggggaggaggggagaagtcagatgggtctgtagaaaaggaagattagaaagactcaactatgcttgggattgggactgagaggacaggagggagggaaagaaggaggatttgggatgagtcacactgggaacagagactagggagggaacaatgtgtaaaagaatgcctggacgtcaggcacctcagatcatttgcctattttacagtaagaattatctagatcttgtaggatggaaaaatcgaaagtgctgttttctggctatttggaaacactgttgagtttgtacaggggtcaggcggcattgtagaataaaataaggcatttaggtttaggtcaggtgtgagttgaaggggctttaagtttttgagaacacaggctaagggagaagaaggaggaatggagggtgaaaggctgcccatagtgaaggaggcaagcccagagaaaagagagagtagag

SEQ ID NO: 20530 - DNA, 1397 bp, Artificial sequence
  DNA replication origin
tgcaggttgtagcgagccgagatcacgctactgcactccagcctgggcaacattgagcactgagtgagcgagactccatccgcaatcccggcaccttgggaggccgaggcgggcagatcactcgcggtcaggagctggagaccagcccggccaacacggcgaaaccccttctccaccaaaaaatacaaaaaccagtcaggcgtggcggcgcgagcctgcaatcccaggcactcagcaggctgaggcaggagaatcaggcagggagtttgcagtgagccgagatggcggcagtacagtccagcctcagcttggcagcagagggagaccagggagagggagagggagaccgtggagagggagagggagagggatagggagagggagagggagagggagagcctccttcttcttcttcttttttgagacagagtctcgctctgttgcccaggctggagtgcagtggtgcgatcttggctcactcactgcaacatccgcctcccatgttcaagcaattctcctgcctcagcctcccaagtagctgggagtacaggtgcacagcaccacacttggttaatttttgtattttggattactggtgtgagccacagctcccggcgccatatccgatctaccccaaggtctgacctggattgtgtaatcaccatgtggcttgtttgtggttttacacaagtctaatccatgaagcagagaatgtaatacttcaagctcagtctgttggttgaagcgagtcgtaaggcaatgtccctggatagaaggggatgggtaatagactgcacatcattatggaatggcacgcgtgttcagcagagagaatggctggcagctatgttaacagatgtgcaaccacacctgataaactatcagattgacaaatcttcaaaagcttgacactataccctgctggcaagtttgtgagggaaaaggcatgtttgcccgtcgtaatgaaaattgttacaagctctatggagggcatcttgaatatctaataaatttaaaaacatgtttactctgtcttccaagtagccttataagtagctaggactcaggtgtgtgccaccacacttcgctaatttctattttttattgttttgtagagatagggcttcactatgttgctcaggctggtcttgaactcctggcctcaaggcgattctcctgcctcagcctctcaaggtgctgggattataggcatgagctgctgcttctggcctatacgtctctttgaccacagtaatcctacttctaaaaattaaccataaggtctatcagcagaattatccaactgaagaagtgagaaaaaaagaacaaaaagaaaagaaagagatcctcaggtactggaggaacaatatcaaaaggtctaacagatgtgtagtttg

SEQ ID NO: 20531 - DNA, 906 bp, Artificial sequence
  DNA replication origin
ttcctcacatttcccccctttctattcgacaaaaccgccatcgtcatcatggcccattcccaatgagctgttgagcacacctcccagacgtggtggtggcctggcagaggggctcctcacttcccagacggggcagccgggcagaggcgcccccaacttcccggacagggaggctgccgggcgggggctgccccccacctccctcccaggcagggcggctgctgggtggaggggctccttacttctcagatggggcgggggggcagagacactcctcagttcccacacgaggtcacggcctggcagaggggctccgcgtatctcagacgatgggcggccgggcagagacgctcctcacttcccagaccggatggctgccaggaagaggcgctcctcacttcccagactcggcggccgggcagagacactcctcagtttccagacggggtagcggccgggcagaagcgctattcacatctcagattgggcggctgtgcagaggggctcctcacatcccagacgatgggcggccaggcagagacgctcctcacttcccagacggggtggtggccgggcggaggctgcaatctcggcactttgggaggccaaggcaggcggctgggaggtgcaggttgtagcgagccgagatcacgctactgcactccagcctgggcaacattgagcactgagtgagcgagactccatccgcaatcccggcaccttgggaggccgaggcgggcagatcactcgcggtcaggagctggagaccagcccggccaacacggcgaaaccccttctccaccaaaaaatacaaaaaccagtcaggcgtggcggcgcgagcctgcaatcccaggcactcagcaggctgaggcaggagaatcaggcagggagtttgcagtgagccga

SEQ ID NO: 20532 - DNA, 948 bp, Artificial sequence
  DNA replication origin
gtcatcatggcccattcccaatgagctgttgagcacacctccaagacgtggtggtggcctggcagaggcgccccccacttcccagacggggcagccgggcagaggcgccccccacttcccggacggcgcggctgccgggaggggctgccacccacctccctcccaggaggggcggctgctgggcggaggggctccttacttctcagaaggggcggcggggcagagacactcctcacctcccagacggggtggcggtcgggcagagacactcctcagttcccacacgaggtcacggcctggcagaggcgctccgcatatctcagacgatgggcggccgggcagagacgctcctcacttcccagaccggatggctgccaggaagaggcgctcctcacttcccagactgggcggccgggcagagacactcctcagtttccagacggggtagcggccgggcagaagcgctattcacatctcagattgggcggctgtgcagaggggctcctcacatcccagacgatgggcggccaggcagagacgctcctcacttcccagacggggtggcggccgggcggaggctgcaatctcggcactttgggaggccaaggcaggcggctgggaggtgcaggttgtagcgagccgagatcacgccactgcactccagcctgggcaacattgagcactgagtgagcgagactccatccgcaatcccggcaccttgggaggccgaggcgggcagatcactcgcggtcaggagctggagaccagcccggccaacacggcgaaaccccttctccaccaaaaaacacaaaaaccagtcaggcgtggcggcgcgagcctgcaatcccaggcactgggcaggctgaggcaggagaatcaggcagggaggttgcagtgagccgagatggcggcagtacagtccagcctcagcttggcatcagagggaga

SEQ ID NO: 20533 - DNA, 1583 bp, Artificial sequence
  DNA replication origin
gaaggagtcagagagccttgggccagagttccaggggttctggaagtggctgccaggtgagttgaacagtttgattttcactggggtctcgcacagatgggacacggcttaggaggaatcctgggatgtgggcattccttggcctagtggccagatttccagcacttgtagcaagctcctgggggaggaggttctggaggaacccccggcagcagcagttcaggcatttggagttcttgtgtgctggagatgtggctggggtttcgctcacagtggaggcaaggaattgcaactcagaaatatgttgctacttggctgcctctactctattattgtacacctggaaggcgaggttaattagatcctgttgtggggtttgagggccggaatttaatttttgaagttttttcctaatgttgggagtggactgggtgataaaatgcatattaagaataaggcggccctctggcccttctgggtctagggcagtaaagcgtctaagggtcactgctaagtgggccatgtactgggctgggttttcatctttaccttgggtagtttctttcagcttgtcataattaacagctttgtaagctgccttttaaagccgttcaattaggcgggaaatcatgtaatctcacctagctatacctggggaatctgcctgatagttccattggggatcctctcgaggaactgctctaataccttcctggaggtctggctcatgaagccggtggttatcagcatgagattgggctagagaaaaaactcattctcgttcacctggggagagggtagaagtcaggatgacatttaagtcactccaggttaaattgtaggacagagtaagatattggaattcctgtatgtatttagtggggtctgatgagaaagagcctaaacgctgactgatctgagagaggtctgatagagaaaaaggtacatgtaccctgactatgccttcagctgcagccacttctctaagaggaaattgttgggcaggtggggaagagctagtcacggaactaaactgtaagctggactgggtgtgaagaggggaggtgatagaaggattacagggtggaggagtggaggctgaggaagaatggggacctggcttggcctggcgaggagcagcctggggaggaggggagaagtcagatgggtctgtagaaaaggaagattagaaagactcaactatgcttgggattgggactgagaggacaggagggagggaaagaaggagtatttgggatgagtcacactgggaacagagactagggaaggaacaatgtgtaaaagaatgcctggacatcaggcacctcagatcatttgcctattttacggtaagaattatgtagatcttgtaggatggaaaaatcgaaagtgctgttttctggctatttggaaacactgttgagtttgtattggggtcaggcggcattgtagaataaaataaggcatttaggtttaggtcaggtgtgagttgaagaggttttaagttcttgagaacacaggctaagggagaagaaggaggaatggagggtgaaaggctgcccatagtgaaggaggcaagccca

SEQ ID NO: 20534 - DNA, 1409 bp, Artificial sequence
  DNA replication origin
gtcacactgggaacagagactagggaaggaacaatgtgtaaaagaatgcctggacatcaggcacctcagatcatttgcctattttacggtaagaattatgtagatcttgtaggatggaaaaatcgaaagtgctgttttctggctatttggaaacactgttgagtttgtattggggtcaggcggcattgtagaataaaataaggcatttaggtttaggtcaggtgtgagttgaagaggttttaagttcttgagaacacaggctaagggagaagaaggaggaatggagggtgaaaggctgcccatagtgaaggaggcaagcccagagaaaagagagagtagagacatggagagaaggggtggggggtgcttgcacccaggaaagtggagaaggggtagagacatggagagaaggggttggggggtttttgccacccagaaaagcagagaaggggtagagacacggagagaaggggtggggggttcttgccctccagaaaagcggagaaggggtagagacacggagagaaggggtggggggttcttgccccccagaaaagtggtacttgccactaagggcgaaagaccaaggcaggcatccctgtgtggtcagacacctctgaaacgtggatgaataatcaggtgtccccgtgtgattaaacaccaagggaagactgtcttcccgagtccatgaccggcgctgaagttttgggtccacggataaaactcatctcctgtctgtaggagaaaagtaaagaaactgaaattaagagaagggagagattgaagtgtggtgccaagattgaaaggagcaagaagttgagggatagtgagagaggttggagaagagagtaaaaagaggccacttacctgattgaaaattggtgtgatgttccttgggctagttggtctgaggacatgaggtcgtaagtggatctttctcacagagtgaaaggcaggaggacacgggattgatctcccaagggaggtcccctgatccgagtcatggcaccaaaatttcattcacgtctgtgtgaagagaccaccaaacaggctttgcgtgagcaacaaggctggttatttcacctgggtgcaggcaggctgagtccgaaaagagtgtcagcgaagggagataggggtggggccgttttataagatttgggtaggtaaaggaaaaagggggttgttctctggtgggcaggagtgggggctcacaaggtgctcagtgggggagtttttgagccaggatgagccaggagaaggaatttcacaaagtaatgtcatcagttaaggcaaggacaggccattttgttttcttttgtggtggaatgtcatcagttaaggcaggaagaggccatttaaatatcacttcttttgtgattcttcagttgcttcaggccctctggatgtat

SEQ ID NO: 20535 - DNA, 991 bp, Artificial sequence
  DNA replication origin
tttctacacagacaccgcaacaatctgatttgtctttcttttccccacatttcccccctttctattcgacaaaaccgccatcgtcatcatggcccattcccaatgagctgttgagcacacctccaagacgtggtggtggcctggcagaggcgccccccacttcccagacggggcagccgggcagaagcgccccccacttcccggacggcgcggctgccgggagggggctgccacccacctccctcccaggaggggcggctgctgggcggaggggctccttacttctcagaaggggcggcggggcagagacactcctcacctcccagacggggtggcggtcgggcagagacactcctcagttcccacacgaggtcacggcctggcagaggggctccgcgtatctcagacgatgggcggccgggcagagacgctcctcacttcccagaccggatggctgccaggaagaggcgctcctcacttcccagactgggcggccgggcagagacactcctcagtttccagacggggtagcggccgggcagaagcgctattcacatctcagattgggcggctgtgcagaggggctcctcacatcccagacgatgggcggccaggcagagacgctcctcacttcccagacggggtggcggccgggcggaggctgcaatctcggcactttgggaggccaaggcaggcggctgggaggtgcaggttgtagcgagccgagatcacgccactgcactccagcctgggcaacattgagcactgagtgagcgagactccatccgcaatcccggcaccttgggaggccgaggcgggcagatcactcgcggtcaggagctggagaccagcccggccaacacggcgaaaccccttctccaccaaaaaacacaaaaaccagtcaggcgtggcggcgcgagcctgcaatcccaggcactgggcaggctgaggcaggagaatcaggcagggaggttgcagtgagccgagatgg

SEQ ID NO: 20536 - DNA, 1185 bp, Artificial sequence
  DNA replication origin
aatctcggcactttgggaggccaaggcaggcggctgggaggtgcaggttgtagcgagccgagatcacgccactgcactccagcctgggcaacattgagcactgagtgagcgagactccatccgcaatcccggcaccttgggaggccgaggcgggcagatcactcgcggtcaggagctggagaccagcccggccaacacggcgaaaccccttctccaccaaaaaacacaaaaaccagtcaggcgtggcggcgcgagcctgcaatcccaggcactgggcaggctgaggcaggagaatcaggcagggaggttgcagtgagccgagatggcggcagtacagtccagcctcagcttggcatcagagggagaccagggagagggagagggagaccgtggagagggagagggagagggagagcctccttcttcttcttcttttttgagacagagtctcgctctgttgcccaggctggagtgcagtggtgcgatcttggctcactcactgcaacatccgcctcccatgttcaagcaattctcctgcctcagcctcccaagtagctgggagtacaggtgcacagcaccacacttggttaatttttgtattttggattactggtgtgagccacagctcccggccccatgtccgatctaccccaaggtctgacctggattgtgtaatcaccatgtggcttgtttgtggttttacacaagtctaatccatgaagcagagcatgtaatacttcaagctcagtctgttggttgaagcgagtcataaggcaatgtccctggatagaaggggatgggtaatagactgcacatcatgatgggggaatggcacgagtgttcagcagagagaatggctggcagctatgttaacagatgcgcaaccatacctgataaactatcagattgataaatgttcaaaagcttgacactataccctgctggcaagtttgtgagggaaaaggcatgttttcccgtcataatgaaaaatgttacaagctctatggagggcatcttgaatatctaataaatctaaaaacatgtttactctgtcttccaagtagccttataagtagctaggactcaggtgtgtgccaccacacttcgctaatttctatttttaatttttttgtagagatagggcttcactgtgttgctcaggctggtcttgaactcctggcctca

SEQ ID NO: 20537 - DNA, 1198 bp, Artificial sequence
  DNA replication origin
tggtattattaatggttaataattgagcaacaataacattgagagtgattcctcaatgatctcattggatcaccccacccagtgaggtgggaaggactgggatttttgtccccacaacaagaaaccattcaaagaacggagaggttaagtgccttgtcaaggtcacaagctgagacaaacctagatctgtcacctattaccttaactcacagctctgtctgcaaacaaaaacatccaaactccaaataaaacaaagaatagataaccttgaccaagttatgcctgaactccacttttctgagtcacaactggaaagcatacccataagacagctgcttgtgcattcttaggaggctctattttgcagtttgcactgcagggaaggaaggggaggggagggtggagaaggaaggggagggtggagagggaagggcagggtggagagggaaggggagggtggagagggaaggggagggtggagagggaaggggagggtggagaaggaaggggagggtggagaaggaaggggagggtggagaagggtgcactgattactgaaatcacactccttcctgcctcgagggagaggcatgatcgaataccacagaatggtgagggagtagggcctgtaggaagccagaggcaggaatcccagaagaccggagcctgaagcagagaaggctcctagagttggccacagagaagagactaggctcatcatggggccctttcagggtattcctcagagacagggcctgtttcctttttcttttgggaaaagagtagctgattatgaggatatagccagaccctccctttccaactctctttcccaacccttctctaagagaggaaaactgcaccagttttccctaaagcgcatgccaaatgaattgagcttcctgctgaggggtgagcacaacttggggcaatggtggaaggggaagaccaggcagatggagggcacagtgagacagctaacacagctgggaccagggacaagacgactagggaggggtgcctatgctggaatcaactggctcctggggctggagcaagtcaggggcatatgagctgggggagcagtgaaaacaggaacaaccaggataatggcagaaatcagactgaaaataataatcactagagggaaaatccaaaggcagagcagagacctgatgggagaagaatgtttaatatt

SEQ ID NO: 20538 - DNA, 1316 bp, Artificial sequence
  DNA replication origin
gtttgaggtccagaatttaatttttggagttttatttaatgtcaggagcagattgggtaataaaatgtatattgagaataaagtggccttttgtccttttagggtctagggctgtaaagcgtctcagggttgctgccgaacgagccatgaactgggctgggtttttcatatttgatgaaagagcctaaacgctctgattcgggagaggtcggataaagaaaaaggagcattaaccttgactacgcctttagcttcagccaccttcttaataggaaattgctgggcaggttggggagggctagtcacggaatgaaactgtaaaccggaccgggtgtgaggaggggaggtgataaaaagattacagggtggaggagctgaggctgaggaagatttgggacctagctcggcctggcaaggagcagcctggggaggaggggagacgtcagatgggtctgtagaaaaggaagattagaaagactcagcgacgcttggagttgggactgaggggacaggcgggagggaaagaaggaagatttgggacaagttgcattgggaagagactagggagggaccaatgtgtaaaagaatgcctggacgtcaggcacctcagactgtttgcctgttttacgacaaaaattatttagatcttgaagaatggaaaaattgaaagtgccattttctggctatttggaaccactgtcgagtttgtattggagtcaagcggccttgcagaagaaaataaggcatttaggttttaggtcaggtgtgagttgaagaggttttaagttcttgagagcacaggctaagggagagggaggaatggagggtggaaggttgcccctagtgaaggaggcaagcccagagaaaagaaagagtacagacacggagggaaggggttcgggggttcttactcaccagaaaaatgggcaaggggttggggcacggaaataaggggttggggtgcagagataagaggtcagggcacagaaataaggggttggggtgcagagataagaggttggggcacagaaataagggatcggggtgcagagataagaggttggggtgcagaaataagggatcagggtgcagagataagaggtcggggtgcagaaataagggattggggtgcagagataagaggatggggcgtggaaataagggatggggtgctgagataagaggttggggcacagaaataagggattggggttcttgcccccagaaaagcagtgaaggggcagagacatggagagaaggggttggggtacttacccccctccagaaaagtgggatttgccgctaagggtgaagga

SEQ ID NO: 20539 - DNA, 877 bp, Artificial sequence
  DNA replication origin
aaggggttggggtgcagagataagaggtcagggcacagaaataaggggttggggtgcagagataagaggttggggcacagaaataagggatcggggtgcagagataagaggttggggtgcagaaataagggatcagggtgcagagataagaggtcggggtgcagaaataagggattggggtgcagagataagaggatggggcgtggaaataagggatggggtgctgagataagaggttggggcacagaaataagggattggggttcttgcccccagaaaagcagtgaaggggcagagacatggagagaaggggttggggtacttacccccctccagaaaagtgggatttgccgctaagggtgaaggaccaaggcaggcatccctgcgtggtctgacacctctgaaacatggtttaataatcagagaggtgtccctgcaatgattaaacaccaagggaaggctgccttcccagtccgtgactggcaccggagttttgggtccacggataaaacatgtctcctttgtctctactggaaaatgaaaggaattgaaattaagagaagggagaaattgaagtgtggtgccaagattgaaaggagaaagaagttgagggatagtgagggaggttggagaagacagtaaaaagaggccacttaccggatttgaaattggtgaaatgtttcttgggctggtcagtttgaggacctgaggtcgtaggtggatctttctcacggagcaaagagcaggaggacaggggattgatctcccaagggaggtcccccaatctgagtcacggcaccaaatttcatgcgcgtccatatgaagagactaccaaacaggctttgtgtaagcaacaaggctgtttatttcacctggg

SEQ ID NO: 20540 - DNA, 1124 bp, Artificial sequence
  DNA replication origin
aagactgccggattttcatccgggtattgtacaatttcctttagtttgtcaaagttgactgatttattggaggccacctgcatccctgccaggaggcattgaaccattatgtcccggcggcgacgccctgcttgcccaacttggtaatcccactctggatcggtggatggaaccgcctgtgttccaacgggtacgttggggtctgttagatgtaattgattggcatgctgccgtgctgcaattagaatgcgttctctttcctcaggggaaagggtggaggtaagaataatatggatatcgtgccaagtgaggtcataaacctgacagagatagtgaaattcttttgtgaaaagagtagggttggtggagaaagagcctaggtgtctttctattttggacaaatcaacgagggagaaaggcacatgaactcgaacaatgccttctgctccagccacttcgcgcagcggggcaaggagtgccggcctggcctgggtgtgtgcggccacaggggacttgggaggggcaggtgagggtagtggtggaggaggaggagatgatggaggtggaggaggaggtggcgtgattggcgaaggagggacccgtgaggaagtgggcggtgcgtgacctgaaggtggagccgaggggggtggggaagcgtatggtggcggcagagcatgggctgcagtttggaggggaggggaagataagttatctatggggtctgagagaggagaaagatcatctttgtccggatcaggagaggttttgggagaggttttagctaaaaggacttgcactagtgaacacggggcgcagaggtctggtggagagtgaaggtcccagaacccttgaacatatttgatttctgaccatttgccttgcttctgacaaaaattggtaaggtcgtttaggatattgaagttgagtgtgccttcggggggccagcgagattggttgtctaaggtatattgcggccaggcaactgtgcagaagaaaattagtcgctttcgttttaaatcttggtcgagttgtaaagttgggaggttgcgcaggaggcaccctaagggggtgttttgcacgattttggactgggtggaccccatccccttccctttatggccacg

SEQ ID NO: 20541 - DNA, 767 bp, Artificial sequence
  DNA replication origin
gtccctgggtacttgagattagggagtggtgatgactcttaacgagcatgctgccttcaagcatctgtttaacaaagcacatcttgcaccgcccttaatccatttaaccctgagtgaacacagcacatgtttcagagagcacagggttgggggtaaggtcacagatcaacaggatcccacggcagaagaagttttcttagtacagaacataatgaaaagtctcccatgtctacttctttctacacagacacggcaaccatccgatttctcaatcttttccccacctttcccgcccttctatccacaaagcctccattgtcatcttggcccgttctcaatgagctgttgggcacacctcccagacggggtggtggccgggcagaggtgctcctcacatcccagacggggtggcggggcagaggcgctccccacatctcagacgatgggcggccgggcagagacgctcctcacttcctagatgtgatggcagccaggaagaggtgctcctcacttcctaggtgggatggcggccgggcggagacgctcctcactttccagactgggcagccaggcagaggggctcctcacatcccagacgatgggcggccaggcagagacgctcctcacttcccagacggcgtggcagccgggcagaggctgcaatcttggcactttgggaggccaaggcaggcagctgggaggtggaggttgtagcgagccgagatcacgccactgcactccagcctgggcaccattgagcactgagt

SEQ ID NO: 20542 - DNA, 1042 bp, Artificial sequence
  DNA replication origin
tccttcctttcccatttcccccttttctattggacaaaaccgccattgtcatcatggcccgttctcaatgagctgttgggtacacctcccagatggggtggcggccggggaagaggggctcctcactttccagacggggtggccgggcagaggggccccccacctcccagactgggcggtggccgggcgggggctgccccccacctcccggacggggcggctggccgggcgcgggctgccccccagctcccggatggggcggctgccgggtggaggggctccccaattcccagacggggggcggctgccgggcggaggggctcctcacttctcagatggggcggccggtcagagacgctcctcacctcccagacagggtggcggtgaggcagagacactcctcagttcccagacagggtcacggccgggcagaggcactcttcacatctcagacggggcggcgaggcagaggcgctccccacatcccagatgatgggcagccggccgggcagagacgctcctcacttcctagatgggatgacggccgggaagacgcattcctcacttcccagactgggctgccgggcagaggggctcctcacatcccagacgatgggcagccaggcagagacgctcctcacttcctagacggggtggcggccgggcagaggctgcaatctcagcactttgggaggccaaggcaggcggctgggaggtggaggttgtagcgagccgagatcacgccactgcactccggcctgggcaacattgagcactgagtgagcgagactccgtctgcaatcccggcacctcgggaggccgaggctggcagaccactcgcggtcaggagctggagaccagcccggccaacagggcgaaacccggtctccaccaaaaaatacgacaaccagtcaggtgtggcggtgcgcgcctgcaatcccaggcactcggcaggctgaggcaggagaatcaggcagggaggctgcagtgagccgagatggtggcagtacagtccagcctcagctgggcatcagagggagac

SEQ ID NO: 20543 - DNA, 1118 bp, Artificial sequence
  DNA replication origin
aaagactcagagatgcttggggttggcactgaggggacaggcaggagggaaagaaggaagatttggtacgagttgcactggacacagagactaggaagggactgatgtgtaaaagactgcctggatgtcaggcacctcagaccatttgcctattttatgacaagaattatttagatcttgcaggatggaaaaattcaaagtgccattttctggctacttggaactactgtcgagtttgtattggggtcaagcagcattgcagaagaaaataaggcatttaggttttaggtcaggtgtgagttgaagaggttttaagtttttgagaacacaggccaagggagtagaaggaggaatggagagtggaaggttgcccatagtgaaggaagcaagcctagagaaaagagagagtagagaaatggagggaagggattcgggggttcttaccttccagaaaagtgagaaaaggtgttggggtgcagagataagaggtcagggtgcggaaataagggatggggcacagaaataaggggctggggcatggaaataaggggtcagggcatggaaataaggggttggggcacagaaataagggattggggcacagagataagaggttggggcacggaaatatgggattggggcgcagagataagaggttgggcatggaaataagggattggggcacagagataaaaggttggggtgcagagataagaggttggggtgcagaaataagggattggggtgcagagataagatgttggggtgcagaaataagggattggggcatagagataagaggttggggcgtggaagtaagggattgggggttcttgccccatagaaaagtgggacttgccactaagggtgaaggagaaggggttgaggggtacttgccccctcccagaaaagcgggacttgccactaagggtgaaggagaaggtgttgaggggtacttgcccctctcccagaaaagcagagaagcgatagagacaaggagagaaggggttgaggtacttgccccttccccagaaaagtgggacttgccgctaagggtgaaggaccaaggcaggcatcactgcgtggtctgacacccttgaaacgtgggtgtataatca

SEQ ID NO: 20544 - DNA, 1314 bp, Artificial sequence
  DNA replication origin
ctccacctgctcacgctgcgattccggctcaggctcccgccgccctcctctccctgccccctgccccgcctggtccccgcccccagcccaggcgcctgccctccactctcccgcggctcgccccgcctgggttcccgtccctccgccagcctctgtcccgccaggtgactgtgcaccccctccctggctcgggagttctgcccctccctgtgcgactgtcctccaggctcgccccctccctagatgtgtcccgtctcctcttagagatttctctcctgcccacctctctttatcacccgcccccacccccgattcccaggaatgagagagagagagagagagagagagagagagagagagagagagagagattgaagacaagagtattggcagcgtagggggaggtttcggggaagggagggtaggaggggttgggtagagacggctgccacggatccagcatctttctctggtgtatcagggaacgtggaggtggcgttggagaccaggtctgcgtgcgtcacctgctgaggcgcggatgctttagtctgagcctagagccgcatttaccgtactgtgttgcagtggccgcagtgaccgtgacactattgctaccgtagttccctgcagctcctcgctgcgggcctggggtagctcctgcatctgtctccgcaccctccatctcctgtctgaggcttaacactcaggcttgcacttaagggtcccaaggagccctccacagctgggcgggagtgggggtggggccggggccgagatttggctccagggaagccttgccagggaaaagggctcccgggaggaagcttctgacttgagtgttgagggcagttgggggtggtggcaagcactgacaaggataaaccagagtaaggtgaggatgggatataattctaacgccggcccagcgcaggcaaaagagaaggagaaggttggctttctccaccgtctccaggcagcgcccacgcccacccgacacgctaacgctccctgtttgctctcagtgcaggcagagctgcctgtgtagggtgtcaggttcccacgagagggggctagaaggggactgggtcactgcggtgcagcgggaacagggctgaagggtgcaggactgaactgggttcagcttctcggggcaggatttgcctcttctactatttcagccctgctccctatgcattctcctatccattccttttcttccccagattcctatctccagattcctatctccagattcctatccattcttcagattccggatgaactccaatacgatgtgaaattcttctgaccccc

SEQ ID NO: 20545 - DNA, 1780 bp, Artificial sequence
  DNA replication origin
cccagaacagtgtaatatagtaaccttgtaaagtatccccctgccttccatcttatgtcttccaatccgttctccacattatagaactaatcctggtagtactaccgaatcttttagtagttcctattgccctcgggagaaagtccatgttccatggtcaggcctagcaggctctctgcaaaccctctaggctggtctccagcctgttcattattcccttcttaagatatatgttctagtcactcaaaactatgtcacagtggataaaagtgccatgaattcaaactttgagcttcttatacatcttgtccttttatttgggatgctttctgcctcttctgcccgttcacttggctggctctcccatatgtatatgtgtgtgtgtgtgtgtgtgtgtgtgtgtgtgtgtgtatatatatttttttttttttttttttttgccaacaggaagcttagagccagcctccctaatttttttgactttgtagctcatttcctcaagaggccaactttaattctcaaggaggctgggctgggctagaggtgttccacttgtgttcccactatcttttccctgtcaaggctcttccactttgtgctgcaatcccctgcttttctgtctcgcccattaaactttgagctctgtgaagtaggaattgtgtcggttttgttcaacttacattcccactgcctagcacaatctctggttcaataaatattggctgaatgacagaatccaagtgtgagtgtgtaacaactcggctgagaaagcatagattatttcgtggggtaaataaatacttggattacaatttattccaactttccctttttgagtttagaaaaatttccttctgcttaacattgctccttcacctagaatcccactccttccttttctgcctactcaacttcaagacccagctctaaggttctagcctctgtgaagttcttttggtgcccacagtttagaccctttcatgggacttccattgtgtctgtgatttttccatttgcttggtttctctctgcacttggctatgggccatgagggtccagactgggtctagtttgccctgtgcccccagcacctagcctagggctggagagagagcttggaagatagctggagacattacttgcagacaaagagagagggcacagagcctcgaaagctccaactagggaggcagaggggtttgagaaggagtgaaatggaggcaggcagctctaaggagcatcccctagtgtccagcctaattcagatttgaggatcttttttgggatggctgggggctggggtgtcagatgtgatcacaacttcagcttcgcattcaagctttccagagtgctccctccctcaaccagcccccttcttttcccagtcctgccttcctttcttccttcccttctctgttgtggctctgtgaactggatgtaagagggaaaaggagatctgcagggttggcaagaggaggtcctcgccttctgactggtgtctaggaggggctgcgtgttggggaaggggctgtgctttggggtgagcaggggctctaggtgtattcaggggaccaggatgtgaaggagttccgaccaggtggtgtgaagctgtgatgaagttgtaggctgtgggggtgaaggtgtgaggggagctgtttgggggctgagggagtactatgagaggcacggtgtggacgtttgagaaggtagtgtggagctcgttggggggactctattagtgttctggggtacagtgagaaatagcttgtggggggggctg

SEQ ID NO: 20546 - DNA, 1111 bp, Artificial sequence
  DNA replication origin
caggactgggcttaaggaagggagggccagagcgcccgccttggtggatgtaggattcgctccttattagggcgtgagtgctacattctgaaaggatttattttgggacaaggcacaagcacaggggaggcaggcaacaccagccctcaggctacactctccatttggagcagagcttcttcggcagccccaggtctcccgggatcttcctcggtgtcctgcggaggctctggctccagcgtgggctccagcgcaggctgggcttccggctgggcttcagcgctccggccaggcccaaggcgaggcggcttgaccggggtgggcggtggcgctgcagggcctttccggcccgaaagggcccttcggaggctctgtaccttctgcaatccggtgcgccgcagccgctgggccctggactccaccggctcctcgtccgagctctctccaacttcggcctccagctgctctgggcccagctcggactggtccgccgggcccaagggctctggtgccttctggaaagcgctggctgggacttcaccctcctcctgcatgtgacggacacagcactgatcctggcagctccttacccccagcagcccgaaactcactccttaattacacaagggaaaccttttacctccgcagccagagtctggggggaaaggcaggcgtgggaaggtaaggggagggaaagctgcgtgcgaactgcaaaacgctgtaaagtaggtgaggcctggtgaggggcgagaagaggatagtgcccgcagtcacggaatgccctttcaaccaccgttattttagggattggctgggactcagaccaaattctgcggacgtggcctgagctagagctgggcgggcttggattggccaggcggggctcaggcgtgagagggagggatggggctgggtcttgggaagtgggtgcggctctgtgagtctgttccacagcaacagacggcgggaggggtcaggaatgtgggtgtggtaggtggatggaagcggggagcccccagctggtggcccacaggccggcaaaggcctcggattggggaccgtttgaggtcactgaccttgaagagcagaacgtggagcttcccgcgcgcca

SEQ ID NO: 20547 - DNA, 1565 bp, Artificial sequence
  DNA replication origin
cgccaccagcagcccgtggttggcctccagccgctgcacctgggctgcgcggcgcaccgcgcgctcttgggcggcgttggcgtgcgagctcacgcgctccgccttggccagcagctgcgccaaggtgttgctggtggtgtcgtggctgcgactcagagcgcccaggccgctctggatgcggcgcacggaccctgccaggcctccctgccttcgagccaggcctccctgccgctcccgcagagtctccagcatggaggccagcttctccagcagggtcaccaccgtcacggcgtgcacgggaccccccgccggcgcctcgggcacaggcccccgctccaacgcactctccctcatgatccctgaccgctctgctccgtctgcctgcaactgctggccgcactacggtcaggggcctcctttccctggctcctccccagctccagctgtgactcaggcaggcggagttggccttctggggcggcgggagggcgcgagggcgtggggatgttggcagcggggtctcttgaaagcgtttcgccttccgctgtcccgcgccgggggcctgctgggaagcctgttggccccaaatcggccccctgcaaaccctctcactctgagtttgagttaccctcctccgctccaattccctggtgtgcctgtttcagttctccactgcaaagggcgagtcacggaaatttttatttcatgcatcttagtgggcgcagagactgtgttggcacggcaaagagataaccagaggggcctccgtcgccgtccactttcggcctcccacaccagtgaagattgcccccaggctggatgcaggcgacagggaggccctggaacattctgcttacagatcgcgaactgtcaaggcccgaggccccgctttgtgacttggacaggctgctcattgtgggctggcgggcggggcatcctctggtgttttcctaatagtcatctccagggtttagcctcaggcttcgtttcctgcttctttatttcgtcctcttgggtagcattatctggtttcttttctctagttttctgccctctctttctttgggtttcactggtaaatctcagccgccccggccccagcacccaagcttggaggataagcaggacaccttcacctcttttaaaatccttaaaagcgttagactaggcactggtctttgctttgatagaggttacttgggctcctgcctgactttttttgcttgtttgtttgtttcttgtgttctgtggaactgcggagagtaaagatttgaaattgctgctgcagagagggagagagtgggcatggaggatccagttaatgatgtggattgtgaatttctaatgtcagcagttcgaaacatcccatgccttagccgggcgcggtggctcatgcttgtaatcccaccactttgggaggccgaggggggaggatcacgtgaggcagggagttccagaccagcctgggcaacatggcaaaaccccgtctctactaaaaatacaaaaattagcagggcgttgtgacacacgcctgtaatcccagctactcgggagggctgaggcag

SEQ ID NO: 20548 - DNA, 1036 bp, Artificial sequence
  DNA replication origin
cagtggaggcaaggaattgcaactcagaaatatgttgctacttggctgcctctactctattattgtacacctggaaggcgaggttaattagatcctgttgtggggtttgagggccggaatttaatttttggagctttatttaatgtcgggagcagattgggtaataaaataaaatgtatattgagaataagatggccttttgacctttcagggtctagggctgtagagcgtctcagggttgctgccgaacaggccatgaactgggcggggtttttcatatttgatgaagagcctaaacgctaactgattttgggagaggttggatagagaaaaaggagcattaaccttgactatgcttttagctctagccacctttttaagagaaattgctgggcaggtgggggagggctagtctcggaacgaaactgtaagctggaccgggtgtgaggaggggaagtgataaaaggattatagggtgggggagcagaggctgaggaagagctgggacttagctcggcttggcaaggagcagcctggggaggaggtcagatgggtctgtagaaaaggcagattagaaagactcagtgatgcttggggttgggactgaggggacacgcgggagggaaagaaggaagatttgggacaagttgcattgggaacagagactgggggggaccggtgtgtaaaagaatgcctggacgtcaggcacctcagactgcctattttacgacaataattatttagatcttgtaggttggaaaaatcaaaagcgctgttttctggctatttggaaccactgtcgagtttgtattggggtcaggcaggattatagaagaaaataaggtgtttaggttttaggtcaggtgtgaattgaagaggttttaagttcttgagaacacaggctaagggagtagagggaagaatggagggtggaagattgcccatagtgaaggaggcaagcccagagaaaagagagagtagagacacggagagaaggggcggggggttcttgccccctagaaaagcagagaagggg

SEQ ID NO: 20549 - DNA, 1299 bp, Artificial sequence
  DNA replication origin
gagagtcagacagagccagcgccagcgccagcgccagcgccagcgccagcaccaggcccatccaaaggagtccgggggctccggcggtcccgtcttgtccctgctcccggccggacctggggcagctctggcggagtgacgctccgtagcggggcattgtcgcgcttcctacacggggctggttcgtctgtcccgtcccccccggcctggaccctagccagccctcagggccccgggcggcgccggggacacccgattacccttctctgtagtcggctgactgctccgcggccggccgcaaagcagctccgccccttcctcttcctctgatctctgacagctgatctctcggtggcgggcggctgtcaacgctgcggaggcggagggggcggggcgctcccgggaccgccccgattccgccccctctccctgcccccgccctgccccgggcgcacgggctgcgggggtggggactctccctgaggtcaccaggggctccgccttgaggtcacagccgcgggaggccgtgctcgtgctttggagctccatgtgatgtggtcggtggaagacgtctcctttgtcagaatccgcgctcagattcccggaatagctgccagaccgaccccagcgtttagcccgggaaggggaggtaggagagagcagggcgggcaggatcctcccactgggtgtgttgcctctgacaggaaggcgccttccctcgattccccatgctctgccactggcaccagccctcttgagtcaccctgagaatcactcacctgtgattcagatgaggaaacaaaccttagagatggtgaagagactaggaagccgtaaagaccatatagccgtgggggccaataacatgggcgggaacccaattgggtctcccacctccgtgtatccacgacagtaaaagcgagcatttatggagttgtttatgatgtgccaagcaccaacccaggcactttataattaataatcttcaattctcacaacaaccctaagaagtacctattatattggggctcagaaatccatacccaaaatatggtggtttgacttactaagttaagccttaaggtgtgtctggccttcctactcccgcgccctctctcccaaagccgttacctagcgtccagacccatcaaaaggaacaacggtttttttcttcccctccctacaaaaccaagaatataatcacacctgaacagaccccttcacatgataatgtgctagttaatctgttccctgatccattccttctccctcagcagaattcctcttcccctcactccc

SEQ ID NO: 20550 - DNA, 1263 bp, Artificial sequence
  DNA replication origin
tggttgccctcaatgaaggggggagggaagctattgacaggtgtgctttcatggttacccacagcagggtacactggcactggccccaggaacttcctcacaagtgctgtgacggtggtcagggcccgcagttggtcctgacgagtctggtgccagacatcatgtgcggggatgtctcctgtccagtacaccatatcaaaagggccggctgggcccagcccactcaacaggctctccagggtcctcaggggcaggtcacacttgctgtattcgccccagtatccggcacctggccgggatgcgggcggcaggccagaaccccggcggcagcacagtgggtctgcacagtcagggtccgtgccctccaggtagtcatgatcccagtgcaggtcagtgaggaagaggatgcggctgacaggggcacctggggctggggggctagggggtttggggggcggcttcggcacagtaggcaaagagatgttccaagatgagaaaatgtcccagtgcccacaggtggagcccaggagcaggccacaggcctcagatgggctcagcactgagcgtctccacacctccaccatgtcatcctcaaagaggtggacaatggattggcacacggcaggtggtgctatcttcagcagattgcacagcttgatggccacggagcccacgcgagccacattgggttccttctgcagtgggaggagcgcatggtgagaaatcagaggcagagcagaggaaccaggccaacccctggccaccaccccttgggcctccatttccaaactggggctgggcaggactcagtgcaccaagctcagtgcacacctttgccttccagatattgccctgtaactcaggcagcaccaggccatcgcttcttctttagctcagcggcctgtggcatgaggcctttgcttggcaagctgacttcctcaggcactgtctgcattattttcttacttcacaaaggtcacaatggggtgatggtggcatgtagccatgggtgtccccaaaggggagcaaactcagtgatggattgtagatgccaccctctccatcagggatgcattctgagcccagcgcaccagcatcagccccagcccccagccccagcactcctttcggcctcctccactgcagccccttcagtgctcaccttcagcccgaggttgatggcggtgaatagacctttgcagattgggcaggtgaggttcccccacccaaagacatctcggagccggggcactatgcgatgta

SEQ ID NO: 20551 - DNA, 741 bp, Artificial sequence
  DNA replication origin
gggtgggatggagattcaggattgggggaggggagccagggcgaggaagaagaggtgtgagcagaaggggctggggtctcatgaacctccctttctcctcccttccccaccccccaaggagattccctagcatggtggtcctggcccctccctagcaagctccaagcgggggaggatcttgcctggcagacgctctgccctggtgagaagggggcgggatgagcttttctctgcagcccagcaccaggctgtgagcccagctggctgggctggaggggctgtgaggagggagggtggaggcaggaggggccgggaatgagcgccatgttctcccaggactttttcctggccattatcctgcaggacagcagcgcaggtgaggggcagcatgaggttgggcctcatgtggggtggggctgacagggagagaagagttagaggacgcatgagcgggttacagggttggagtggtgtggctctgccggcagacaagggtgtatgacacagatgcgaggtatgtgtgtatgtgcatgacatgtttgcttgcatctgtgtgcagcaagggtcaggaagtgagcgtctgtggtgtctgcacacatttggcagggtttgacgtgtgccgtgtgtctgagtgtgggtccgcctgtgtgtgtggtacccacacgtgtgttggggccattgtggtgtggtatctgcacacctgtgtggcaggggctcgtatgtttagctgcatgcacacac

SEQ ID NO: 20552 - DNA, 1231 bp, Artificial sequence
  DNA replication origin
gaggagtcacactgagcagatcaacagccccacgtgaggcagacacgtgcgcagaaacctttttcatcttacagatgtgtgggtagcatagcactagtgtctgaggaactagagacgtagaaaggtgagctatggggccgggcgcggtggctcacgcctgtaatcccagcactttgggaggctgaggcgggtggatcacctgaggtcaggagtttgagaccagcctggccaacatggtgaaaccctatctctacttaaaagaaaaaaaaaaaaagaattacaaaaattagctgggcgtggtggtgggcacctataatcccagctactcaggaggctgcaggaggttgcagtgagctgagatcgtgccattgcactccagcctgggcgcaccgcacctggagagatgggcaagccctgctcaggtagctgcaagacctgtgctcagcgctgagaacacagagggaaggggggtagtggtgagtcagggaaagaaagaactccttagtagaggaacagggagatagggaactctcagataagacatcaaggagaaaggtctgtacagtgggaatgagaaagagcacagtgcagtgtttgttgggatggtcagtgagggagaattgtctgttgggggaagggtcgggtagggcaagagaatcagtgaggccatcgagggaggagagagtaatgtggtaggggctgtctgaaggagggcttgcatggagggctcaggatgagagagaagtgggcagtggttggtcagggagaaataactgaaatcgggggctggtgagggtccagggagagagcactttctcttgggggtccgggaaggagagcagcagagcaactggaaggtcagggagagtggggaggatggaatggggccgagggtgggtccctgggtggcgggctggaaggatagttgggactcaaatggttgcggagaaactgacccacgaagggctgtgaggaggcagagggaggggtctggagggggagctgtccttgcggaacaggacgtcctcttacctgagaggcaggtggagtttgtttggggcaccataaggcatagtaacgtaaccaaagtgttttctgacactggcagaggagatgccaaagcgaagcctggaggaaatggggactgattcatacattcattcagcaaatattaatggagttcctgctctgtgccaggactacgctaggcactaggcatactgtatttaac

SEQ ID NO: 20553 - DNA, 997 bp, Artificial sequence
  DNA replication origin
ccccgcggcccgcgcgctcctgggcgggggatgttgtgatggagaagccgcggcggagcccgaaccccgcagcctgagccacctccgtcatctgggcccggggcctcaccgcgcaggtaggaggtgtccctgccccggcccagccccggtggctgcgtcccgatcaccagcggccggcggaccctgtagcccctaccctgcggcagcccgggtcccccggccggccccatcccccatccccgggtcgcccttccaccgcgcgcccgcagaccgtcctctcatacccaccatcgcagggtccactcgggccctcacaccgtcccttccgctgccctttacctcctgcccctcggggtgactaggggcgggtatggaggacgcgaagcgaggggcagtgggtgttgggggaggggaggcccaggtccgggaaggggacgtggggtggggtgggctggcaggccgcgccgattccagcaggggtcccaggccctggatctgtcaagccgcattctgttgccctcagcgaccgaggggtgtgccctggggcggctgtgtccccagctcagccaggaggcctagcactgccaagaacactgattagaagcagttttcccactgccaattcctaacctgttttgtatcggcctgtgtatctcttgcattctgagcccctctagctatagtcccagctctctccgcccttcagagtcaacgcttgctgtcttcatttccttacttcccattcattcttaaaagcactccactctgtgtccctgacacccactgaaactgtctaggccaaggtcaccggagacctccttgtggagaactccagtggacactgttatctcctttacctttgagtagtattcggtggggtatgtcaactcactctccttgaagcattttcctgctttctgccctacagcattgtctgctcttctcaatctcatttgcttcctctcctcctctctttagatgctggtgaggctcttgg

SEQ ID NO: 20554 - DNA, 899 bp, Artificial sequence
  DNA replication origin
ctgctgccccagctgccttttcttgacggagtctcatctcaatccctgagaccgactacaccgcccttcccggagccggaggcagctggcggagatccgggatccgagatccgggatccggctcgccggcccgccggctccctagcagcaccaaggaggcagcgtccgcaggaggtggaggcgttggcgggggggcgtgcgggtgcggtaggggtgggcaggcggggtgggcggggcctccgcggcggcgggcggggcgtgggtgggtcttccctactggagtcaccccctcccccggccggtccgcagccccgccccggcccctccctccggcctgtgcggctagtccggcggcggcgccggcgcggggacaggcggaggcgcgggcagggccgggcggacgggcgctggcagcagtagcagcgccgcgggcccttcagagtggccgcagtccgagctttgccctcgcatcctgttccaacgcggtgagtgcgacgggcgggccccaagggtgcgtttgtattcctgtcagcccgggtctgggtcggagcgtctgtgggtgggggcacagatgattttcaaaagctgtgcctctctctgcccacgtgaggcgtgtccatgtccgtgagagcagcagggggattcttcgggctgtggctgctcacgtgaggtccctgttttgaggcggggaggcgcgggtggatgggtgatggttccttaggggagcgcggggtttgggagcttgtgtgtgttggcggagggtgctgaacgctgcggccgagggtggtggtggtggtgcgtgctgagtgggactctggaatattgtggcccatcttgtctgaagggctcttttctccctggtgcagacacctccaccccttgctcccccacccccaccc

SEQ ID NO: 20555 - DNA, 966 bp, Artificial sequence
  DNA replication origin
accttgcccatagctcaggctccaactgccagttccaggatgccagatgcggggcctcacctgcatgggccagcccagcagaggggccagagaagggacctcaggctctgggcaggggatggtcagagtcaatggggttaggaggaagaaaggacctgggacagggaaatagatggagctacagagcagagccagaccagcagagagcctttcctgagaccctcaggccctccctactgcttccccaaagactctggtaaggagcaggcctaagacagacgtgagagccctccttgcagaagagttccttcttacctcccagtaccctgtccccctcacctggcctaggggggttaggaggcaaggcaagggaagagagcccgatctgctgatgaggtttcattgaagagtgcctgctggagcagtgaatgaacttagacttgagttccagtctgaggctcaccctaatcatagccacccatacacggagagactcgcacacagacgtgcaatcacctgaagaggcaaactgacacaccgacagagctcactctgaacctcggtcacagcaaggaatctgcactcgagctggcgatcgcctgaaaaacgggttaacaggtcgtcactcgaaggcagcagagccccagtcccatgacgtcttcgcccacagcctaaggaggtcgtgaagacagaaagccgaggagcaggcacagcaaatgatggtcaggatgcaggtaggggaagacgttaacaggcaaaggagggggctgggagagcggggaagaggaggcggactctgtgggagggggtcctagggaacaaagagaaatggatccggagccgaggactcacccgcagctccacccgcacccagctgttagaaccgttacaagattccagaaggaccgagtctttgccaggagcatccgggggagccagaaagaggaggggccagggtccgatatg

SEQ ID NO: 20556 - DNA, 1199 bp, Artificial sequence
  DNA replication origin
attagagacttcgaggggactggaaccgcgaacgaggggcggcgcgaagataccctgaagtgcagagggttgctgttcatctccagacgtttatactggagctgactggagaccgagcctcggctaccagggaaattcgagctgggcacattctggtccagggcagcttccccacgcaatgccagcagcaggcggcgcgggtggcgaaaggctgacaggtggaagacgcgctctggtacatcactgctcgcgtccgcgcccacgcccaagtaacgaaccaacagttgcccacggcgcgacaactgtcgcagccagtgccagggcggctgcggaccggccggcgcatgaggtcgccaaggcaagggtaggcggccagtccagagagcgtgggccaccgcagcacagcggcgggaggggcacgggggtgcgcccttcagctgctgcaacaggcaatcaaggtcgcgttgtagcgtgcccaccaactggctcagttctagagcctcggtctctaagacgccctccagaggccgccgtgcatttggccccagcactgaccacggggcgtcggactcgtcttggcgaatcacgtgggtcagcagatcctgcagtgactccagcctccggttgacttgcactaggcgttgccgcagtcgcctttccgcaagctgggcgcctcttcgagactcaggaacccacacgggtgaactccgctgcagcgcactcaagagagcgcgactctggcgtcgcaacagccaggcttgggggccctcactcagtccgcagagccggggttcaggtggtgagggcagtaggtgcatctgggccttgcactctgccattgcatccagctcccttagctcttggggatagaggtgaggggtgagggacaagatggactctccccaccctagactcgagagagtaggccttcctctgagcctttactgccatcacccccataacagtatgaatattaccccctcatatacctttattgagactgctgtccacatttctgtggggggtggcattgcattgcactattccctaccccaaaacagatacctgagtgaggcttacctgggaggggcatgagcgtggccagcaaagactgaggtgtgtgtggctggacccagctcccactactggggctcaggcaggcttgtgtgaggctaatcagggcctccctgtcctcagtg

SEQ ID NO: 20557 - DNA, 970 bp, Artificial sequence
  DNA replication origin
gcaaggatttaggattctgtgtgtcagccactgctgggtctgcctagcttcttggatacatgattaacaccaagtcccaccccaccccaactgtacccacactttccccttcccggctgccaggcacatgccctcttctaccttcggtgtgaatatacctcctcttttctcagttatgcacactgtacctttctcctagtgtgtcacattctgccttcttggtgtgcacacaccctactctacccccatatctcagaaatctttcatggaatcactacaactttattttggtagacgggctcaagacaggggtgggctgcacacatggaccctcctttggacacaggtgttgggggtgagcttggtgggtaaaggcagatgcatcacgatgttcctgctctgcagcttagcggtgccaaggggccctcccatgtacacaggacacgagtacacagtcaggtcggctggggctggcaggtcactggtgcccggggcctgtgtgctgatgctgacgggaggcagagggctgggttggctggaaggactgtcctgcaaggctccagctattgggtcccactccgcatgtaggacctgtagcccgatcagcagcagccctctctctggaaccgtgggatttggaccattctccacctgggggcgtcagaagctggtcaggcaaggctaggaagctgggaggtggcaggtgggaagtgggggttagcgggtaggaggtcgtggtgaagcgagatcggagaagctagcagggttaccgggggcaagatcaccaagaaggggtaactgcgaggtgtaattagagacttcgaggggactggaaccgcgaacgaggggcggcgcgaagataccctgaagtgcagagggttgctgttcatctccagacgtttatactggagctgactggagaccgagcctcggctaccagggaaattcgagctgggcacattctggtcca

SEQ ID NO: 20558 - DNA, 730 bp, Artificial sequence
  DNA replication origin
ggcggccccagtagccgcgggccttgggcccgtaatctcacgacctccgcctgcggcctcctcgcaaaacaaggtgagtgactcgcgggagcaatgggagctgtttcaggccgcgaagcggacattggtggatcccagcgctgtgtgtattgcggggagggacacctgtggcaccgttaagggcgagtcctgatctgaagatccgagaacttccaaaagaaactgacgttgggtcagagagagttgttgagtagaagttggtgaagcgaagagggttcttcagacaggaaaaagtacgtacaagggccctgggacaagagagcatgttctgtcagagtcacaaacacaagtggtccttgtggttgaaatacatagtaaatgaaaggggcatatatgctgttcaagttcaagaggtagaagttttgcgtatattgagaatagaagccaatgaaaggttttaagcaatggaattatttcttcagatttgtattttgaaagggtcgtcggttacagtgtggaggatggattggagacagtaagagttgtcagtatcattgttcaaaggagggtgtgggaaacttagaatcagggtaagtgcctggcctaggattacctggtaggactgcaacacagaatcagccttcccgacaatacatcttctcctttgagcctctgcagatgtgagggccctgcttcctcaggcttttcttacccttcagtctgcctccaa

SEQ ID NO: 20559 - DNA, 1159 bp, Artificial sequence
  DNA replication origin
tcgccgcggagcacggcagaggctagggcggaatggctacggcagcgcagttcgccaaggctcggtctccgccctgcagcctatttcctctaacccgcagatccactatgggaggaggcggggagcgggctggagagcactaacagagacaggcggggcgagtcgtgggcgcgtgacgtcaccccggggtgtgcgcggcgcgagcggaagcggaagcggctctgttcgccgcctctcccaccggcccgatgagctgcagcggctccggcgcggaccccgaggcggcgccggcctccgccgcctcggccccgggccccgcgcccccggtctcggctcccgccgcgctgccctccagcaccgccgcggagaacaaggccagccccgcggggacagcggggggacctggggctggagcagctgctgggggcacgggacccttggcggcgcgggccggggagccagctgagcggcgtggggcgggtgagggccgggacgggtgagggcgagggaagcgtcttgggctgggtccagcggcgggtgagggcagagggtatagacagacctagctggggccctgcgcctcccacctctgtgtctcattttgctggttctcctccagctccggtgtcggcgggtggcgcggcgcccccggagggggccatatctaacggggtttacgtactgccgagcgcggccaacggagacgtgaagcccgtggtgtccagcacgcctttggtggacttcttgatgcagctggaagattacacgcctacggtgggcttccgcccgaacaaggccacctagcctgctgtcaaaactttcagccacatcgtgcttttcagcgttctcttccatttgctcccctagtcgctcttctgtgtttgccctctgctcacccaaactgtgagcttcctgataatcaggcctatccatttccctcaccctcctcccgctctgctgacagttctcttaattgatttctcagatcccagatgcagtgactggttactacctgaaccgtgctggctttgaggcctcagacccacgcatgtgagtaaacccagggcaggttagttttgggtgcttgtgcagtatgttgtccatctccttctcatctaagttttttctctctagaattcggctcatctccttagctgcc

SEQ ID NO: 20560 - DNA, 1506 bp, Artificial sequence
  DNA replication origin
ggtacgcgctgaggggccgggaggcgcgggcgcgcggctgctgcgagtgcaggtgcaagtgcaggacgagaatgagcatgcgcccgcctttgcgcgcgacccgctggcgctggcgctgccagagaacccggagcccggcgcagcgctgtacactttccgcgcgtcggacgccgacggccccggccccaatagcgacgtgcgctaccgcctgctgcgccaggagccgcccgtgccggcgcttcgcctggacgcgcgcaccggggcgctcagcgctccgcgcggcctggaccgagagaccactcccgcgctgctgctgctggtggaagccaccgaccggcccgccaacgccagccgccgtcgtgcagcgcgcgtttcagcgcgcgtcttcgtcacggatgagaatgacaacgcgcctgtcttcgcctcgccgtcacgcgtgcgcctcccagaggaccagccgcctgggcccgcggccctgcacgtggtagcccgggacccggatctgggcgaggctgcacgcgtgtcctatcggctggcatctggcggggacggccacttccggctgcactcaagcactggtgagagttaggtctgggagtgagggcgaggaaggtgctgatgtggagtgttggggtccccaccaacctgccttaccgctcacctaggagcgctgtccgtggtgcggccgttggaccgcgaacaacgagctgagcacgtactgacagtggtggcctcagaccacggctccccgccgcgctcggccacgcaggtcctgaccgtcagtgtcgctgacgtcaacgacgaggcgcctactttccagcagcaggagtacagcgtcctcttgcgtgagaacaaccctcctggcacatctctgctcaccctgcgagcaaccgaccccgacgtgggtaagacctgggggggtgaattatgagtgggatggactggggcaagaaacagcatttttaccctctgatcgccctccatgctgcccctcctcaggggccaacgggcaagtgacttatggaggcgtctctagcgaaagcttttctctggatcctgacactggtgttctcacgactcttcgggccctggatcgagaggaacaggaggagatcaacctgacaggtacatgttgacaggaccccaagagcctgagtgaggtgttgtaaacaccagtgttacctggatagaatacccaaagtactaccttttagaagtttttgcctattaccacaaagctcctgttatgtttttggacccttttggggagtcgagagtttggcagggtgcaaggtcaactgacttctagactgtcacaactgtgaccgtacaaattctaaaatgcataatgtcacagctatgccctccaggcctccctcagatactgcagccatttaacagaggagcattttgatactgaatattggagaggtcaagtgacttgctcaagctcatgcagcttggaagtggcagggctgggacttgaacccagatcttttcatacct

SEQ ID NO: 20561 - DNA, 1271 bp, Artificial sequence
  DNA replication origin
cgcagcaggcggtagcgcacgtcgctattggggccggggccgtcggcgtccgacgcgcggaaagtgtacagcgctgcgccgggctccgggttctctggcagcgccagcgccagcgggtcgcgcgcaaaggcgggcgcatgctcattctcgtcctgcacttgcacctgcactcgcagcagccgcgcgcccgcgcctcccggcccctcagcgcgtaccgtaagcgcgcgccacggcgggccagcttcgaagtccaggggccgcgccaggtacaagcgccctgaggccgcatccagcgcgaaggtgccctcgggatcggcaccgcccaccagtgtgtaggtgagtgcacccacacccgcgggctctggcgctgccaccgagcccaacagagagccgggccgcagtccctcagctgctgtcaccgtcagcacgacaggcactggtgccgctgggtcccgctctgcgagatctgggggcggctcggccaagcgagctgagggaagcacctgttgtggaccggggagggagaacagaattgtgagggcccgtgtaaaaggggatctgggctggcttcccaggtggtaggaaagtggtcagagtagcctgactgctagtggagccaaaggattcccgtgaagctggagctactgaaggggacctacagcggtagccaaggggaggaagggcagccatacctgcaccagcagctggaggctggcacttcgaggagggctgccttggtcatgagcactcagtgtcagcacatagtggggccgctctgctcggatcaggggagctgcagtgagcagctcccctgagtgagggtgcagagagaaaagctctgagccaggacctggggacaggcagaggaagatgagggcttggggcccagagctgggcaggccatgagggcatgccatcacccaccaattctcctctctccactcccataccagttagcgtgtacaagatggtcccattctccccctcatctggatccttcgcctgcagagtcgtcaccagtgttcccggaggcacgcggtctggtacctgtgggaacacaactcacctagtgagtctctttcctgttcttcagacaactcaggataaagcttccctcacctgtgggcaggcagaacctcttttcggctctcacacccaatccaggaggcagtctcttacctacacctacagctctatggggagatccccactccctctcacacttctcaggacaaagtcctgccacttcacatacctgtatagggaggccc

SEQ ID NO: 20562 - DNA, 2252 bp, Artificial sequence
  DNA replication origin
cggcgcggagcgcgggtgggggcgggggcgggggctccgcgggcggaggggcgggggctcgggttaccgcgcggagggcggggggaggggaggggagggggcgcggggccgcggcagcggagctcgcatcctcggcggggcggctgtgcaggaggcggcgcccgggcgtcagcggacggaccgatcgacggccaagggcgcgcggaccgacggcggctgcccggaggggatcgcgggcctcggagacagcgactgcggacgatgcgcggcctcaggccccgcgcgagcgggcgctgcccggggggctgaccgcggccggacggcgccccagcaccgggcgagggagcccgcgtcgcgcggaggtcagtgcccgcgcccgcccggcccgtctggccgcgcccgccctgcccgccggcctcccctgggctgcggcagcggcggcggagccgggggctttgttctgagccggagacaatgggggagggggggcctgggcctgcgggacccgggcgggcgtgaacgtgagcgtgggggcagggcctgggggtctttgtgtgcgtgtgtcatcgagtcggggagggtggcggcgggagcgtgcgccgggggtgtggggtgcgacagcgttgtgttccagtgcatcgtcggagtgtgtcagtgcgtgtcactgggaggttgtgtgtccctgggcgtctctctggctgtgtgtgcatgtgcgtgtcactctgagggtgtgagggtcagaatgaccgtgtgtcatggtgagcgagtccctgtgagggtgtgttgcccgctctgtgggagcccatgtgtcagaatgtggaggatgggtgtgtgacagagaccaactgagacagagacaaagaaactgagtggggagaagtacagagaagcagaggagaggcaggcacagcctgaagtggatggaggggggggtcacccagacgtgttctgagtgggagattggagcaactgggagtttgtgtctgggatacccagctcagaatcccgtgcaggggacagagcaaggtcaccgcaggcgtgggtcccacgtggagggggtggggagagggaggtctagaagcacaatgaactcagtgtggcgggctgggcccacagccacaaggtcataggccagaaaaatattgtcgcttatgtcaacttctcaaatacccatagggacacagtcatagccctactcaacccacaagaggacacagtcccagggaacacacatcctcaagagataccctcacagccatcatacacttccaggaagcccacccccaggaagcacccccagtcagaaccaacacacacctacagcagactctatcaagccaacacacacctacggaaaatgctctcatgacaacacacacccacaggagaaatgctgcaaccaacatactcccaccggttcattgtcaaggccaacacataccatggaagacattgttactgctaacactctccagaaacactgtcaccagcaacaaacaagtagaccagcacctctcaggagacattgtcactgcaatccacatccatcagaagcactgtcacaactgtcacagcacatcttattaggtttacttccttggagctgcccatacatagtgggtgtcctagaagcctgtcactaacaggaggctgtgccacagttgcccttaccacacagccacttgtacaacccccaggagacagtcatggatggcatgcacaccacaggaagacctgtcccaacttctgaataaactctgcttaacttatcaagctcacaccttcaccccttctcatacgtagatctcccaggtataccctcttgttccctgaaaacttcgagatctggatagtgtatcctgccatggtttctcagtgtccttcaacaccacagcttcacagattcttgacctccttagctcctgttaccttcctccctcccaggaccactctgtagaactattccacctttaaaattctaaactcttgcattcctctctctacccacaacctcctatatccttccagctttcagatgttctcgctcccattacactctttgacctcataatgacctcttgcccttgacctctttgttttctcctactctgttcctttctgactttgtgctttctttccagctcatatgctaaggatcatcccttcaaccactccttggccactgtgtttccttgtcttctatactcatccctcaaattattgcccctaactagaatgatttctcaaccaca

SEQ ID NO: 20563 - DNA, 1770 bp, Artificial sequence
  DNA replication origin
ggtcatactaccaggaatagttaccaaagctgtgttaaatttctttgactacaatacatccaaaatagcattgttgaggacatttcaggtcaatgggtcttagccaaacagtaaaaatagttagcatttattggacacttaccatatagtgccaggtatatagtgctttatatatattacataatttaatccttaggcccactttatagatgagaaaactgaggcagagacaagttaagtaactttcccagtgccacacagcttgtaaataggagagtctggaccccgagccagggagtctggctccagagtccacaagcttagtcaccataccatactgccctatccagtggtttgttgttcaaaataaagtaaatgagagcaaaccctgtaatatgagagaccttgtaaggactcaaatataaggttactccctctttcctgagggatgattttggaaaaacaaaaaagcaaaaacttcaccctatattcaagcttatacggcatttgcagatgactcccaaatatttatgtccatcccagaccgctcctctaagttgcagacctacctacccaaccagcacttcaaagtcagcagccccaagtcacagtcatcatctcctcatacgaaccccctgcagcctcctgctgctccttttgtggagcacagccagcctcaccaccatccatccacccagctgcccaagcgccgtggatatgatcaaggaccccagtctctccctcactcctcttccaaaatcacactcccttcttcttcagctgaaactgtgttccttctccacagaagttcctgatttctttgtgccatttgtacacatctcaagtccagaaaacctgtttttctcacagtctactcgcagtcctaaggaagaaggacaggagtcagaactcttcccagttcctttaagattgcttgctctttgtctctgtctgatttcccctctccccatattctctcccaagttggttttttgagccccttcccacttccctgcccggtttcctcctcacttaatttttctagggagtatatcgtgagtgggaccaccatccccaaagctcttctttccaatatctcccgatctctaccctcaaatttgggataaagagaaagtgggggaaagggagcctgggggtgaaggagagaaaagagacagaaatcatgggataatgaaaagtgactaacaggggagaaggccgaggttacgatggaagaaggggaagagacagcgggtagtgaaaagggcaggggtgagaaaagggaatgaggagaaggcgtgaggaaaaggggatgatgaggtgaggcgaaagacacagggagaaggggatggggagaaaggtggggagaagagacggggagaaagggataggaagaaaaggataaaaggagaggtggggaaggagaatctgatgtaaagaggctggagagagatcaagcagaaggggtaaggagaagagaaaggggagaagagctggggagaaaatgatggagatggggcgagaagaagaggatgggagaaaggcagaggggaatggagatgacggttgggaaaaagaaggggcgagagggagaccagggcactgagggagaagaggggaataggggatggaaagaagatggaagaggaggaggtgagcagcagggagcggcgagaaggggaagagacgagagggcgtagagaaccgaatgggaggagaggacgggagaagtgacggggagaagggaagggaaccgggacgggggcgcgg

SEQ ID NO: 20564 - DNA, 1337 bp, Artificial sequence
  DNA replication origin
gggagggacggagggaccgggcgggagagagagaaagcctgaccgaccggctggcgaagagctgcatgcaaccggtgggaggccgggccggctgggtctggggctcgggctcaggctcgcaccgtttctcggcaggtccctggcggtgagcgcggacggcccggaggcggcggctctgagctggcaggcggagggctgtctcctgcgcccgcctgcccggcgcggtccgaggatgcgggggggcgatgcccggggccagggacgcgctctgtcaccaggcgctgcagctgctggccgagctctgtgcccgtggggccctggagcacgacagctgccaggatttcatttaccacctgcgggaccgtgccagaccccggctccgcgacccaggtgagtgccgccaccgccgcctggagggacctaagggccctgggctgggacttggggccgcaccggggcctgaggcagaacagcgacgcggactgggagagggcggggggcggccaccgagccaggagagtgatcaagaaccagcgcactgtggcctgatgctgtaaccaggcggggacccgggcggtggctactgcacggaggccgactccgggtcggctagggcagggttggagggaccacgcccgccacctgcgctcccatcgccaaggctcctgggggcggctccctagctccgagctacgctctccacttcccgggctatctgcactcagagcgaggggaggccgcggcggcctcggagccgtgggaagggggacgaggccgaaggaaactctgggaagttgggagttggggacggccccgggttggggccgaatcccaccgggtgctgctcatcctttctcccaagcgtctagttcctttccttggtatggggtgagaagggcgggacgcgatccggcgttgggccggggacagggtgcttctggccttgggcagacgggcctgaacccgttcccggcgggtcgcacggcatggaggtggcctgggcctgggcgctaggctcgaccagcgactaccgccggccacgatggggttcgtagactcgtcggtcctggcttgtgcacctgtagttactcctagtgaaagttgcaaagctcttaactttggaaagttcatttattttggcatttgaccaattaaggttggaggagggagttttagtggagccatttgcttttcctgaggtccctgggtctcccaggtcgtctcatccgttactggctactggaaaatgcattccttccaatgtttgcttgagatgtttctcacctggagaaatagttttctcgaatattctcccaacctaagtacttaccaaaaca

SEQ ID NO: 20565 - DNA, 831 bp, Artificial sequence
  DNA replication origin
agaggccctgtcttgataatctcagtgggagtcctggttggggactgcctctgcaccagtaggcttggcaggagcttgttgatgaattgtgtcagcatgcacctgagctagggtccagacacagtcctggtcttctggggtgagggtggaagaggggataacgtagaggtcatgccaagttagttcataagactgggtaaggtactgaaactccctgatataagaggtagggtcgtctggaaatgaaccgagtcttttgttaatttgagagagatcagtgagggagaagggaacatgaactcttaacaataccttcagctcttgctacttcccaaaggggacactctagcactggcgctgaagtgagggtggggcatgagccaaagatggcgctcgagcgagtatgggcgggagagaaggaagaagtcagaagtcgttcctgctgagggtttgaaggggaaagggggtttgagttgataagcagtggaggacagataggggcgtaaggtggcgggatgggtttacaggcttcaggagagggcagtgaggaaggagaatgagtacaggcagtgctagagttgtcctcaggagaggacagtgtaggaaaagaagtgggtactgctgactgggaagatggtggctgggaagatggcagctgagaagatggcgactgggaagatggcagctgagaagattgcggctgagaagataaagaggaggcttgcggggttaaagaagatggttgagagggagaggtagagtctgggaggaatggacagcagtctgctggatctaacggggaaaaagaggtatggtcgggaggagaaaggc

SEQ ID NO: 20566 - DNA, 1547 bp, Artificial sequence
  DNA replication origin
gagcgaggacgccacggctcagcgccccgccagcctcatgatggagcgctgccctgggggcagggctgacccagagccagcggctcgtgagtgagagccccccgaccacggcccttctcggggagcgggccagccgccggggtcccagcctgcggggtccgcccgcgcttttgtcctcccgggcgtgcgtgtccgggtctcggccggttccccgtcggccaggcggagctgcggggcgacgccacgagtctgcgggcccgcggcggggagcggcccccggccaaccccagttcgacgacgtgttgggcgtctcactccgggtgggttccgcggcggggtgtatttatggagtattgaagaaatatctccgtcgggacggccggaaggaaagaggccagaggcgcggaggccggctagagccgggaacgaacgtccgaccgggaggttgggggccggagcgggaggcgtggggagaggtcgtgggcgggaccgcgaagggcggggagtggggcgggccggctcggattccggaaggctgagactccagtgacccggcgggaggagaggcaactttccctgtcgggcttgagttgggagaggagcagggcggccttgtagggtagggacagatgcggggaggctcccgagtctctggcagttgagtgcccaggcccccttcgccctgtccaggagactgttggggagtccccaggccctaagtcacggggcacctcttagagctacgcaccctagttctgtctttagggactgggcccctcattccggattgtgtgttaggggtgatgtcctcccccttcacctcaaggaagggacttccagtgtatgaacctttggctgtagccaggaggggcctagtgacctgagcaccccaggccatgtgtgctgcctgctccaggggcctgaaacatccttcctgtgtgacctgcagctgacccctccctaccctctggtccacgacaggctctcccagccgccttctgtgtcactactgttctctttgcctatttcctgcaggcagagctcagctcctgtgcctttggtgtggggagggtgttctgcgcctgagagctgccctgtccagggcgggcaagacctgaggtgctctgttcacattgtgtctgccaggacccgtccctgctcctgaccatcaccgtcactggggtcactgtgctcgtgttggtcctgaagagcatgaactccaggaggagagagccaatcaccttacaggaccctgaagccaagtacccgctgcccttgattgagaaagaggtaatgggtcagccctgtgggtggaaggcagtaagtggatgatggctgggatggcagggcatccagacagtcatctcatggcctccagttcactccccgccgccctgtgtgtgtgtgtgtgtgtgctggaatagcgccaaacggacctcctttcccaggcatctcagctgcccagcaaggcttctagaaagctgacagaacctgcctatgttttgttttatcagaaaatcagccacaacacccggaggttccgcttt

SEQ ID NO: 20567 - DNA, 1383 bp, Artificial sequence
  DNA replication origin
cgcccacgacctctccccacgcctcccgctccggcccccaacctcccggtcggacgttcgttcccggctctagccggcctccgcgcctctggcctctttccttccggccgtcccgacggagatatttcttcaatactccataaatacaccccgccgcggaacccacccggagtgagacgcccaacacgtcgtcgaactggggttggccgggggccgctccccgccgcgggcccgcagactcgtggcgtcgccccgcagctccgcctggccgacggggaaccggccgagacccggacacgcacgcccgggaggacaaaagcgcgggcggaccccgcaggctgggaccccggcggctggcccgctccccgagaagggccgtggtcggggggctctcactcacgagccgctggctctgggtcagccctgcccccagggcagcgctccatcatgaggctggcggggcgctgagccgtggcgtcctcgctcctgcgctgcccctctgcatcctggccccttccctgcacacgcagagctgccacactgagcgcccctcagcttacttaagctcggcaaggctggagaaggccgtctgggtgaccgggcggagggggatgctggggaaggaagaattcaggcagctgcaaagagcgcgcgaatatattcattcgacatacctcatgggcgcctaccctgggcctggtccggggcgggtgtttgcggggtggggccgaagcaggggcgtcgccgagttgaagacgtgtactccgagcgctcctgcgttcattcattcgctgggtggagagaggaaggacaagagccccgcgccgatcggaggggagcagaatagtaggcacagttagagggtcttcacggtgcgtttcggaaccttggctgcccggctcgcccttgattacaggcaaaggcaaattcttgcctcaggacctgtgtgaaacagagaagcccagaagcagatccccacctgtttgactctgctagggctgctgtaacaaagtgccgcagactgagcggcttaaacaacaaaaatttattgtctcgcaggtctgggggctggaagtccaaaatcaaggtgtgggcagagtgggttccttctgagggctgtgagggaaggatctgttccatgcctctcctaggtttgtaggagaggggctaggagaaggggcatcttcttcctatgtctccacattttcatccctctgtgtgtgtccctgtgtccaaatttccccttttatgaagacaccagtcatattcaattagggtccatcctaatgaccttgttttaacttgattacctatgtaaaggctctaccttcaaataaggtcatatccttaggtactggggcttagggcttcaacataagaatc

SEQ ID NO: 20568 - DNA, 1313 bp, Artificial sequence
  DNA replication origin
agtagctgggattacaggcgtgcacctccatgcccagctaatggtttttgttttttgtatttgtagtacagacggggtttcaccatgttggccaggctggtctcaaactgatctcaagtgatctgcccacctcagcttcccaaagtactgggattacaggtgtgagccactgcgccaggcctattacctcatttaatactcacaacacttccccaagaaactgtggcccagggagaagtaatttgtccaaagttagctaggtggagtcaggatttgaatgcaggttatctaattccaaagtctttctgcttttataggtttgcttttgcagggaaaaattatttactatatggaattagctcaactttaagtttttctcccagaatatgtcactgcttatttctaatataatctagactgtgagctcatctcccggaggaaattctatctttttatcgccttatttccagggcccaggatatagttcgcactcaatacatgtttgttgaataaatgaatgaatgtgtgaatttgggatctgaaccaaagtttgtaggttttgttattttaagtttaatactccaataatagagttcttctccgtggagagcaccacttttcaaaaaggcaggtgcactggaatcatgaggtggacaggagatttgctggggctgtgcaaggaagggctgatgaagaaacagaattaaccaattcagacgatatatttccccaaagaaggcaatgaaaggaaaaaaacagacgtggatcagttgcgcccatctcgaggaggtaaacaagacacaggtgaataagtttacaggctgaagagagatcactagtaaagaggcgaaggtgcagatggaggagacagatgggattaatacggggcgagactcagggaaggtgaggaggggtcctaggcaaactagccttaggcaggagggacacctgttcctctgaatctaggcaaacaagggctgtcgaagatgcagggaggtttttggcagagttaagggaaggagagcacaggaagcaggacttcacggagatgagagcagcccagtaaatgaagtttgtcttccagccctcaccatctagggtcatgggtcaggaaatttaactccagaattctgcagatggacttggggttacgaaacttaaaaacaacaaacaaacaaactactatctactatcatcatggtttcattttaaatacaagggtggcatttaacacaccaacaaaaggtagaacaggcataacctaggaataaatgtactcggctttatgaccaactcactccgttcttattttt

SEQ ID NO: 20569 - DNA, 616 bp, Artificial sequence
  DNA replication origin
aagcaagctgtcaccacgaggaagtgcaccctagctttcccacctcgtgctaccaggatgcccctcactctccttaatccagggcatgggctcagagggctggctggggtctcctgtcctggaatgtgcggccatatgggaatgccttgagtgtgtgagggccatatgggaatgcctgtgcgtgggggtggcatgagtgtgtgctgtgaggtgtgagtttggagagaagtataaataaatgatgggcacatgtgtgtggtgcgcatgcttgtgctgacaggggaaggcagggggacgtctggagtgtcagtgggttgtggtgggcagggtgaggcatccatttctgtgaaatgcctggggggagggaaaaggtatttggcacagtacatgtgggtacaaagcacacgaaggaattttgggtacatatgcgcatgggagcctttgtggggtgtggtttgggtatgcaggtaggctgtgtgtgaggtagagctggaggaaaatctatctgtggagtgtctgaggtgatgtgtgggaggcagctgtctacaggtgagcttgtctctgagtggtatatggggtgacatgttgttgtgtgtgatgtggtttgggagggtga

SEQ ID NO: 20570 - DNA, 1420 bp, Artificial sequence
  DNA replication origin
ggtggctgcggctctggaggccggggcccggaggggccggcgcgggggccctgctcagctcccgggccgccccgggccgcatcctcccgggccggggcgctgggccccgccgaggcccgcgctgcacgccagggccccggctgctggctctgcgagcggctgcctgcgcggcgcggcgaggcgagatgggcgaagctccgggagtgcgcgggtcgtgcgcgcgcgtggaggcggggaggccgaccgcaccgtcccgcgcccctctggcgccaaggcgggagtactgcgtggcagcggcggcctgccccttctccctcgccccgccccgccccgccccgcagagaccccaccccccggccggctcagggcctgcggagcgcccttgccccctcccccgaaatcgtcgcgatccacgctccatgcgcgtgaccgcgccggctcccaccttcggctaacggcggcgctgcagccgggccagtccccaggcctcccagcctcagtttcgtcttctgtgaaacggggatcattcgaacacctccctgtgtacctgccctacctatctgcgctatgggatgggaaaccgatgcgcggatttggcggggcagggaccgggccggaggcgcggatggagaaggaatccagtcgtgcaggaagaggcgggggaacctccgggccgaagcgtggaggttggccttccctcacccccacctccgagttcccacacccccgcctggggaaccctctgtctttgggttaaggaggtgtttcctcagcagtggctccctcccatctaagctatagcgtcaagggaaggggaacatttacggtctattgcattcccagcccttgcaaatttctagtatgtaatctccacagtagccttgagagacaaacatcatatccctataacccagagaataggaatgctgagatgcccaaggccgtaaagctaggaagtggtggagctgaaactgttctgtgatctgtgtcctccaaagcccttcctaaggggcgcagttgaccggaggcaaaaacccctacaaagatcatctgaaagtctctgcgcgctgaggaggtcctggctgtgactaggaccagcttgaatgcaaggcatggcacactgagaaggtgcgggacccacagcagggcgggcggaagcaaggagcagcaggctgaggggtcaccaaggcctgcgtgtggagcaggtgatccgggagaggtctgcggaggggcacggtccccacacgccccgtgggcgtcctcgtgtgcatcctggattctgccgcgccaaccgcgccagaagagtgttgtgcggggatcttctgatgataaataggcggtcaggactgccccgcagagagtgtgagaacagccaagggggctgagggagggggctcatcctgctgccctggggctacag

SEQ ID NO: 20571 - DNA, 940 bp, Artificial sequence
  DNA replication origin
ttttaagaagccttgggcggtttcagctggtttccatttgggacgctgtctggacagactcagagaagagccctgtcagaactattttctatcagtgactggtatgaggctctaacagagagcaagctgtgttacaaggcgggacctgaggatctcatcctgccgtccgctagcacgtgcacctgggtcgacaataacacagtgggccttaggagtccagcacccattttccacagagacagccccgtagcccatggcaaccaaggagccaatgggtggccaagaatctggcgctgccatggcgatgagctcccttccctggtaatagaatggagtagagtggatagggaaagacctgcacctgtgaggggccccccagagaccacctccccgcccccttcccaggcaaatgggaaagcccagccatccttgagatagaccacagtgcctggcagcagagggtggggggcttccctgagtgtgcctggattcttgagtgcctttctgcatgtgagggcagttctatgtactgtgagctggtgtgtgtctaggtatagacctgctagcaagtagattattcagtgtctgaaagagactgagtagcacttgtgagtgagaagcaggtgtcagttattctccagatacaggaggtggacgtgcacagatatgcaggcatgtgtctttgtgagcccaagaattcttgtgtgtagaatatacgggtgcatgtccacatgaccactggtgtgctcttggttcagaataactgtcttcacggatccatgctttgagagtgtgaaccgaccagcaggagcgtctttggcccaaggcagggacgtcctgtgggtgcatgcgtgcagatgtatgagcgtgtgcgcgcaccctgcacaggcgtgtgactggggttctgggcctaggagggggctcagagcagtgtggactc

SEQ ID NO: 20572 - DNA, 866 bp, Artificial sequence
  DNA replication origin
ccccaaacaccagtttctccctctcttcagatgcccaagctgcacaacactcaagacttccagtgggtgctgcctagaccccagctgtctgagctcatgtgctctgagcccaggacaaacagccaggtcctcggactgtcccccggcactgggttttgcagagcttattgcctttgccaagaaagtctgggcccgtcagaggttccagagcccactggctgcctgtggcacctgggctggggtctgcgcttccatggtccccatgccctctccaggacaccacattccagagaggagctggttcaggagctcctgcctggggctttctttgcagactcttgcctcctggatctgctctggaagcacagtgaagcccgttggggtgggggtgggggagagctctggggtttcctgaagttctggcaagtccagttttgtcttccagagctggaaggtgctagggaactgaggcggttcctgggccacgtttgttgttctaacgggtctgcctgctgcactgggggaactgaagggctctcctgacaaggggccagagggctcctcatgattactcaggctccctttctctagctgccaccctgatccctgagcccccggcccatctgccaggtactgggtgggatcagggatcagagacagagcactgagacacagagggacagaggaagaaatgagagtgaataggaggtggtgcggtggagggagagaaagatggaaacagagaggtggagatggaaagaaatgaggcagagggcaggagaggagagagagggagggaatgggaaaagcatcccagaagaagtttctaacttagggaaggcgtgaggtgagggcagcgtggtgga

SEQ ID NO: 20573 - DNA, 2161 bp, Artificial sequence
  DNA replication origin
ccctcgccccctgccgcggcgcgcaggcacacacacgcggggacacgggcgcacacctgctgggctgtgcggggattgcggggcgggcggcgcgctgggggccggggctggggcggggggaagtaccgggggacagccgggcggaacttgcggggggaggaggtcgagccccgggctgcacgcgcccggggccgcacgccccccgggtcccggccgcgagccgaggagctgtgcactggccgtgtgctgcgccgcggggccgcgcggaggctggggctcccttgcgatctccgcgccgcggaggttcgctctgagcatttcgtgtctgaggctgctgctctcaccgcagccatcaccctcgcgccagccgccgcgtaacccgagaggcgctgagcgccgagcaaatcagcggcttcggggagaatcgggctccagagctcggggcaagcgggagcgcgggaggacggcgcgagcgccagggtgcccggcaggcgaggggaaggcgggttggaccctccgggggacatctgcatgagcgtgactcggtgagaaagagagccgcctcttgtgccggcccgctagctccctgtctctctgagcgcggaggcgggagtttggcccagaggaagaaagtgtcccgccgccggccggtagcacttgtgcgggagcggcctgcgagagtggcacggaccttccgtggtcgagcctcagtgcgccctagaaaactgcagggcacgggaaaggtcggaacagaggagcccatggctgctggaagccactagcaggtggtcccatagaccccaaagccttactggcagggagtgccctgcagttaagtgtcctagaaggctggggatcccagcccccttggggggaaagccaagtgggtgccctaagatgagtccccagggtaaggagagaggcagtaccttggctgtcccaggacctcctgccctgtaggtgaggcctgtgtgttggtgttgcaggggcatttgtatgtgactgttggtgcccacgctgccgccggcgttctgccattggtgaggtaccgaaagggtaggtttgctttgagtcagcgggaatcctcttaaagtgactgtagtggccatcctctgcccttccgttcaggagtctctgctgggcctgagccctctgtccctggggcagcgttgttattgatgtggccagttggtgaaaatgcaaagctaagtgacttgctcagggtcacacaggatgttcgcattgccgctgccaggtgccgatgcccccaggctgctaccgccttctgagacatccagcagggagggggaatttgaagtatctggcctgggggtggcatctaggaggacctgtggctctcagtatgtgtgtaggaagagagaggatggggggaacctcagtgcttctgggctagctggggtgggacatcatcttcaatatgtcttctctattcacggaccccttccctggagccccatgtaggccatcggagaacttcatatagaatgaaaaggagaagaaggggtctggggttgggccagacagggagggaagagaccttgatttggtgcctttcatcacgaactccccatgttcaccttccctcttggtaaaaatgaagggcttggagaagccaggggagagggtacttccttggtacctggagatactgtcactatggggagcatgcaaggttcatctttagcagaggttatttggcatacttggctccccaggcccaagccaggaatccagaagactcgggctctgtacgtgagaggcctcaggccagggagattggtctcatgccaacaagatgacaccccctacctgcacccaggatcttgctctgcccaggcaccacatgatgcctctggctctgagataatacaaagggtttcagatgagccttgagtgagaatggatttctggaggtcattttagccagctccctgcctccaaattgcagtgtacctcaagcaccctgggcagatgtttcttctggtttctgctagatctgtggaagagagctccagatgcccctccatccccagcctgtccagcctaaacaatatggtgcccactaccatggagctgctgggctctggggtccattacagcacaagcacatccactggtgtcctaagcagccacctattct

SEQ ID NO: 20574 - DNA, 1723 bp, Artificial sequence
  DNA replication origin
cttcacagcaagtcttggagggtttgggtggcttgagcttccagccaggaaggggcttgctgggttgacagaggcagatagaaacatcactcaccccatctgatggcctctctccactcactgggcaagcaagtaactcccacccccatactcgccccacccccatgctcaccccacccaagctgcttctaggtccagggacacgcccacagcaccagagtggaatcctcagatcccctggggctgggggaggtagttttcccccaacacattccacaggtgatgagcatgtactctcacttcgacaagccaagagtgctccaaaatgccctcgaaatgcctctgggaatggcagggagaggacaactatcaatccccaaggttagtttaaggagaaagtgggtgctactggctgtcttacaaatatctgggcaggtcccagcaatttgcccctccacctggcaggaaagtcccgaggaagagttcctgcattaggagtgggggtgggagatagtgggacccagggcctgagggcccaggccgactagatattacagaagtctttggtggagactgtcagatgtgcctcagccagagggcctgctcccaacacaatgcagctgcctccaagacggagttacaagctagccacacaggtgatgctcagagaggtattggggtgacgaggaccccttctctgtggccaccacagttgacaggacagagtaaacctacagacttcgcagtgcaatcaggatgcctgctggccatgttcagatgcccttcccttccccctgcttacacaaaagcagccaatgcacaggaatttgcaacccgctggagtgaagaagtgcacagtcggcaaacttttcctcttttggtttctggagagcctggacaggccttcttgcaagcagcagttatagattgttaggccttgtggaggcctaagccaaatctgcaccatagcaaagaaatctcccctacccctgcaccacagccctgagaaggttttgggtgtgcactgaccaactgtccaagtttgccttgtgactcaagggtttcctaggatacaggatgttcagtactaaaattgagatcgtcctgagcaaacaaggacaattgatcactatagtgagtggtggtaggatgggtcaagggactagctgggccagagaggaaggccaggcagccagaccctttccctgcagcccagaagttgcctctcaaccccaaaccttccagcctcctgccccagcacttcgtccttcaggcactaagggattgtcccagcctcggcggatggtctctgggtcagccagagctgtgagttcttccaagagactggcagtggaaagggtaggagttggacccagggatggatggaaattttgtgaggtccaaagcttactgtagtttgggcgtggggctctttaagaaaaggactacaagactactaataccaaattaccaccaaggacctggcagctgaaggaacctgaaggaccctaaacttcattagcttcaaggtaaaaccgcctctagttgaacctgatattttggactagatggcccacccacctaccccagccagcgtggcacctcccaacatgccaggctgggtgaactgatggcagttccctccctagccctgccaggggcggagacaattgtcagccatcccgcagctacggagtgccagaccgcagagacagtgctggtt

SEQ ID NO: 20575 - DNA, 1086 bp, Artificial sequence
  DNA replication origin
ttggggacagtataaaggtgactaactgcacctcccttaccaattaaattttttaaaaagctgctatggagggagcgaatattagtttcctgatttataaagccaaatggattaagctcattcattgcccgaggaaacaaaaaggaaatcttcaatacctctgtgcacattgagaatagggacaatgccggtctttagaaagcagaaacctaatttgggggaatcaattaccctctgtgtcctgcctctgtgggctctctcactggttctctcaatagatttcctgggaggtaaaatgtggagaagttgatcaaccacaggcacaccctcggtacagccttgagacaggaggtgaagaactaggtctagggtgggtggagttgggggttcccgggcacaagggtggggtggggagggttttgggataaaagttgagagtaggggcggtattgagaggggcagtgagagggcaaagtgggtggtggtggtgggaacctggggtttataactgggggagagcaaagcccagttgatgcctgaacaggtgaccggatggagagcactgtggcccagcctgggtccagagtcaccaccgcctcctgatcctctcggatttctcctctgtgatctgcactttcccccgtggggctgagcatgccgcggggaatggctgggcaataatgaaaaaagaaaggggatggggcgcctgccacggtagccacggagtcacattcacaaagtcacacacagaagcactctcgcgatctcatacacattcctgtgccgggtcccagtccaggcccactgtccccagacccagagtcacgcccagcctggcgcactcattcagaatcacaggcacggagcccacactcctacccgcacacacccacccgcaatcgcacgcgtcccacccccacccttgtcttgagctcacacagtggctcaccaccccacacagccctcactctggcatgcggacacacacacacacacacacacacacacacagcccctcacacgcacacactctggctgtgcttttgtgttttgtcagaattaatgagaaaagttcccgtgccctgc

SEQ ID NO: 20576 - DNA, 1852 bp, Artificial sequence
  DNA replication origin
ctggtcttgcctgttccactttctgaagatccttccattcccattgcctcctctcctgccaggcaccatgatttctctcctaggtcactgcagtagctctagactggcctccccaaatccactcctccctctccattgcatttgacacccacgtctaaagcagctctggattcctcacattctgagttaatgtcttcagtagcaccacccccctcccaactttattctgtccttgcctgtcctcctgtctgtctcccccagtggaatgtgagctccttgggcagagcccttggattttcaccactgcacccccagttcctagcacagtgcttggaacaaaacaggctcataaaatgataaatcctcaaaggcatgaaggagtggcctgttgggagtgtggtgagatgggaagtagggtggctggggcagagctacagaggtggtggaaggcacaggaagaagaaatagtgggcaggagccactttgtgaagagactggaatggcatggtaaagatccttcactttcttctgcaggcagtgggaatacattgaaggttccacgcggttcaaagacatgatgtgctttctgtcttagaaaggttgctctgggttggggaaatgtggaggagagatagaacagacaggaaatgcttccagctagtcttctggatgagccaagggtggctgggccagggtgacgaaggcagtggaaaaggggaaccagatccaacaggctctttaaggaagcgaaatgaacaggacctcatgactgttgagcttgagtgaagagaaaaagagagaggtggagggcctagcatgatgccaagcttgtggagaatttccagacaaacctgtgcgatgggattgccatttggcaggatgctgaatatgggaggaagggcagtttggaccaaggacagtgagttggggtgggaggaaagtgatgggttgcattttgaacatggatctcccaagtgaaaatgtctggaatctgtttgctacgagggtgtggagcccaggggatagctcagggctggggacagagatgcgggggcttcagtgcacagctgaaccgtgtgaggagccgtgggatgggctagattgggagggccatgtctgatgcaaggaaggggtctgcgttagagccccggggaacatcaacatttcagatgccaatggcggaagaggagagtggggagcagccagtgaggcagggaggagaggagaagttggtggggcagcagggggggcggggcgggagtcaggcaacacaagcaggaaagaactcacagaagccagggcagccatgtagcccgcagagacctgacaggaacggaaggggttcctatgtgtgggaggcagtcggggaaacaaagatgaaaaaagtgggttttggtaatgattggggagacttgagtatatatagttacctattgatttaatttatatcctactttctttccaaaattagtgaaggcagctgaagaaaatgtgatcatgtttagagctgaggagagaacagagacgcggggccaggctcacttctttcacggtcgccggaagggcagcccacctcaaaggcctgcgtggaaaatggccctgagcacgtgctgtgtacgaggcggggccataatcaaagtggggacaaaatcagagttggatgaggtcaaggtgggagtcaagatgtgtgaagtcagggtggggtcactgggagtggggaggcgaggatggggtcagacaaaggcagagtggggtgagattagagggtccaggtatcgagggagtgagatcagggtgcatgacgtccccaagggaacagggtgaggttagattcaagtgccaaacaggtaag

SEQ ID NO: 20577 - DNA, 939 bp, Artificial sequence
  DNA replication origin
cacagcatggatttctctgttccctctgtcagagatctacagcctgtgtactgcgatggcccagcactcctgcttgtgtctcccacttggctggaagcagaccaagagcagggtatgtgctggggtgcccaacccagggccaggcacagagcacacctacacattgaaggagtgtgtgactgcatagatggaacctggttctggatcagccttggaggtggggagaggggttggtggggtctgggtagatgagagggatggatagagcttggaggtgttgcagaaaagcagtgtgtattgggggtaaggggctacagggaagacagagggtacagggaacttccatggcccctgtcctggcagtcagtctctaaggtatgaggtcctccctgccgtgctgacaccagaaacggtttggggcagcctggccatgggatgcaggagggagctttgtgcctactgatgggcactgccgcctggcttcctggcagcccaagcgggagccaacagagcaagttggggagctggcccaggagccaagggggccctgggagccctgcaggtacctaagcagcttcagaaaggaaggtgccagagcaactgggagggaggagcgtgtctggagatgagtggctcctcccagccttggaagccgggggcatctggaacagtggggtccctcaagagaggaaaatgccaagatgacaccggtgagggagggctagagaggcctcctagggtgggaaggatgagttaaggggtggcgtggggctggggtgaaatcatccagcaaagggacaggtcaggcatgggggtgagtggtgactcatcaggagggaagtgtcagaagcccagccctctggcagttccctcatgctgctgtaacatggcaggggtgttggtcaggcagctggctccacactctgccactcacctgtc

SEQ ID NO: 20578 - DNA, 752 bp, Artificial sequence
  DNA replication origin
gtagaggtgggagccctcgggagtttccttcttcccctctctgaagttcatgtgctgtccgatcctgttaacagaacaggtagccaggaccgcctggactccataaagggcctggggaccccgctagcgatcaggaggggcccagagttgcctgagctgagggtctgggtccccctcagcccgaggcacttctggcctctctgcgatttgcaggctgcggtctccaccccaaaggcccttcattcctccgcgcacctgatggcttcctcctgaagctctgagaccccacttcctggcacctcctcaggatctgccacagcatggatttctctgttccctctgtcagagatctacagcctgtgtactgcgatggcccagcactcctgcttgtgtctcccacttggctggaagcagaccaagagcagggtatgtgctggggtgcccaacccagggccaggcacagagcacacctacacattgaaggagtgtgtgactgcatagatggaacctggttctggatcagccttggaggtggggagaggggttggtggggtctgggtagatgagagggatggatagagcttggaggtgttgcagaaaagcagtgtgtattgggggtaaggggctacagggaagacagagggtacagggaacttccatggcccctgtcctggcagtcagtctctaaggtatgaggtcctccctgccgtgctgacaccagaaacggtttggggcagcctggccatgggatg

SEQ ID NO: 20579 - DNA, 880 bp, Artificial sequence
  DNA replication origin
ttgtgggaggcagctgaaggcccagagcattgatgtggcaccgtcctggccggctgggtctggtggggtgaaacaccctcacaaggggcctgttcctgataactgataggatcagagacatcgtcctggacatagaagccatctgttctgaggccaaagctagggcagtcagtgcccaggccaaacctccggcccggggaatgtctggatcctttttctgggagcctgcagtgatctggagcagagatgatcctccctggaggatcggggctgggcatcctgtgtggcgccctctggaggctggtgcctggatcacagaagccggtatgctggccttggccaggccctgtgtatggcctgtggtcacacactggacaatttatttgttaatcacccctgtatactgagcactattctaagtactggtgccactatagtgaacaaaaggggcagaagcccctgctgacatggagattttagtgaagggagacagacaaccaacacaagcaaggaaaagaaacagtatgtcaattacgatgagtgaggtgcagaaagataaagtgtgtggcggtgggggcagcacggaatacgggggatgggttgcaattttaaatggggtggctcaagaaagtttccctgagaagctgcatttgggtggagactggaaggtgagggcatgagccttggggatgtctgggggaagagctttctatgtgtgggaagacaaatgcgaagtccctgaaatggaaatgtatgtggcatactcagccaagggtcagggctggagtggggtgaacaaagtgaggactgggggcgggggagcggtagacgagaaacggtgggaggcacaggaagtgagagagcaggctgagggcagggc

SEQ ID NO: 20580 - DNA, 1363 bp, Artificial sequence
  DNA replication origin
ctttccacacagacacagtaacaatccgatctctttctttttcccacatttcccccttttctattcgacaaaaccgccatcgtcatcatggcccattctcaatgagctgttgggtacacctcccagacagggtggcggccgggcagaggggctcctcacttcccagacgcggcggccgggcagaggcgccccccacctcccagacggggcggtggctgggcggaggcaccccccacctcccggaagtggcggctgcctggcgggggctgccccccacctcccggactgggcagctgccgggcggagatgctcctcacttcccagacggggaggctgccgggcagaggggctcttcgcttcccagatggggcggctgccgggtggaggggctcctcgcttcccagacggggcggctgcccagcggaggggctcctcgcttctcagacagggcggccgccgggtggaggggctcctcacttctcagacggggcggccgggcagagacgctcctcacctcccagacggggttgcggctgggcagaggcgcttcccacatcccagacgatgggcggccgggcagagacgctcctcacttcctagatgggatggcggctgggaagaggcactcctcacttcccagactgggcggctgggcagaggggctcctcacatcccagatgatgggcggccaggcagagacgctcctcacttcccagacggggtggcggctgggcagaggctgcaatctcggcactttgggaggccatcgcaggcagctgggaggtggaggttgtagccagccgagatcacgccactgccctccagcctgggcaacattgagcactgagtgagcgagactccgtctgcaatcccggcagctcaggaggccgaggctggcagatcactcgcggtcaggagctggagaccagcccggccaacacggcgaaaccccgtctccaccaaaaaaatacgaaaaccagtcaggcgtggtggcgcgcgcctgcaatcccaggcactcggcaggctgaggcaggagaatcaggcagggaggttgcagtgagccgagatggcggcagtacagtccagcctcggctgggcatcagagggagaccgtggaaaggggagacgagggagagggagaccgtagaaaggaaagaggaaagagggaaagggagagggagagggagggctttttcccgttttatagattgcctttttttgttttgctgactgctttcattgtggtgcagatttttagtttgatgtaatcttgcttttctatttttgcttttattgcatgtgcttttggtgtcatatccagtaaatcatggccaaagacaatatcaaaagattttcctccaga

SEQ ID NO: 20581 - DNA, 898 bp, Artificial sequence
  DNA replication origin
gcccggccgcccatcgtctgggatgtgggaagcgcctctgcccagccgcaaccccgtctgggaggtgaggagcgtctctgcccggccgccccgtctgagaagtgaggagcccctccacccggcggccgccctgtctgagaagcgaggagcccctccgctgggcagccgccccgtctgggaagcgaggagcccctccacccggcagccgccccatctgggaagcgaagagcccctctgcccggcagcctccccgtctgggaagtgaggagcatctccgcccggcagctgcccagtccgggaggtggggggcagcccccgccaggcagccgccacttccgggaggtggggggtgcctccgcccagccaccgccccgtctgggaggtggggggcgcctctgcccggccgccgcgtctgggaagtgaggagcccctctgcccggccgccaccctgtctgggaggtgtacccaacagctcattgagaatgggccatgatgacgatggcggttttgtcgaatagaaaagggggaaatgtgggaaaaagaaagagatcggattgttactgtgtctgtgtggaaagaagcagacatgggagactccatcttgttctgtactaagaaaaattcttctgccttgggatgctgttaatctataaccttacccccaacccagtgctctctgaaacatgtgctgtgtccactcagggttaaatggattaagggcggtgcaagatgtgctttgttaaacagatgcttgaaggcagcatgctccttaagagtcatcaccgctccctaatctcaagtacccagggacacaaacacggcagaaggccgcagggtcctctgcctaggaaaatcagagacccttattcacatgtttatctgctgaccttccctccac

SEQ ID NO: 20582 - DNA, 1808 bp, Artificial sequence
  DNA replication origin
cttttctgaggtgggaggttgagcccagcatagttttgaaatgtgagggctgagctcaaggcagccctaaggtgcagaaactgtattcctgtgctgccttgtttttggggaggctgtgttccctgagtgatcctacgatgggcagaatatgcacgccaagccaccctgacgcttacctgcagggtctcctcctggctctgggactggacaggtgctggctgcctcacgatgtagttgatctgccccacaatggtttgctgaagatgctgaggagatttggtctgactcagttgcaggctgggctgttgagcctggagaagaagctccaagtccttctgcatttcctccagctcaaacttgtgatgcattatgtccatgttctgagaacaggcagggccaggagggctctcgtgctgactagaagccagatgctgggatggaggaagaggtgggtgtggctgctgtgggggagggggaaggggaggtgggggatgggggaggggtggtggtggaggtggtagctgctgctgtggctgctgctgaaagtgactgagcttcagcttctggtggtggccaaactggacttggatagagggtgtctgtaaggtgggctgggcatgggctccttgctgaacatcctgtggggggacaatgcacacgggctgggaagtcagctgctgccccagccgctgggatgtgctctcctgctccacggggggctgggtttccagccagggctgcagcagctttggtggatgagggctgcaggccagctctttctccctgggcagcagggcagagcactgcagagaccccagctgctggggcaccatctcagggggctgcctgaagctgtgggctgggtgtatgctgggtggggggacctggcctttgagggaaggcgagactggggagcagtgggagcagcacacagatgaggagcacactgctggagactggaacttgtgtgaggggtggctaagagcctcttgctgagccactggagactggtggctttgataaaagggtgatgacccctgtaagcctccataagcaggagcatctgccctggacatttgtccaccttcagtagttatgcagcctgaaaatgcagaatagagagtttttcaaaagtttttcaagttgctcccaccttgctacttcctgctcctgggacaaaagaacctcattcaacaatcctgtaccaggaacagagattaagaaactcaacccttgatctcctagactcggtctagaatgctgccagtaatagcacctgtatgcacctgctttgggggcctaggatatttgagaaattagttcagcttttaccagatgctcagccctgactctgtttctgtcccactagggaaaccacaagctctctcaaatagcacccactcatttttttccaacagaacagcccaatcagactctcacaaaaagaatcaactttggggttgggagggagtatgctagaaagtagcaaagggtagagagccatgcctgggaccaatgaacaagttcccagatacaggtgtggggaactgtgtgttgagcaagtaggacggaagagagtggggaagctctaataccaggtgatacagtttggagctgtgtccccgcccaaatctcatgttgaattgtaatccccagtgttggaggtggggcctggtgggaggtgactggatcgtgggggcggatccctcatgagtggtttagcaccgtccctttggtgctgttcttgtgatagaggtctcgtgagacctgatttctttaaagtgtgtaacacctcccccttgctctgt

SEQ ID NO: 20583 - DNA, 806 bp, Artificial sequence
  DNA replication origin
aagaaagcagaagggaggggggaaggcacacccacaagcgaatcagcaagtgttcaggagcctaagcaggcgccggagaccagtgctggagtggggctgtgcgtagggagatggaagactaggtggaaaggtagcacccctgtgtgggtgagggagcagggtttgggagcacacagatggcaggattgagaaccctgtggagggcttggcctgaggggagagggagggatatttcttcctttgcaacagccaagactgtgcaggtgccgggatatgtaaaggggaaaggttaagaaattgagatttttggtggatggttgcatttcttctggagggggaggcaaagccatctcaatgggatgctgagtttgaggaaagagctgctgtgaggaaggggcaagagcactgaccggggacagtgtgaggaatgctgagccagccagcgagggtcctgtggagggtgtcccctggagaaggcaactgcagtggcccagggctgggcaatgggagggctggggagaaggatgtgatgggggcactgaggtgcagagaggagagtgggtgaggaaggctggccagcccacaccgggaaacagatgatgtgcagggcctggaggtgccagggaagtcggggagctggtttaggaggagtaagaaaagagctggatgggtcacaggtcttggtctgaaatgctggcatttatgattttagaggtagaggtgtcgagaaggtctggtggtggccatgggaggggtggcagaagtgatggtcactggacgtgaggcagtttaggaagtaagaagtc

SEQ ID NO: 20584 - DNA, 1174 bp, Artificial sequence
  DNA replication origin
gaggcaaggcggtgcgcagagccagctcccaggacgtcccgagatcgggtctccgctcggcaccaggcagctcttcaccgccggactctggccgcgaggttccccacccccaaccgcgcggcccccgccgggccggaaagcagagccggcggctactgaccgcccgggagggcggaccccaccagccccgctcctctgcgcctgcggcggcccccacgcgcgtactcacggagctggacaccgctgccggggccgggagtcgggagcagagggaaaagggctgggagggcaggggcgggaccgggcgcgcacgcgggaaccggggccacccggcccggaggcgcttacctctgcgttccccagccgggccgggcgcggcgcctggatggggtctcgccgggagccgcgcggcccggaggaggagccgctcctgcagagagggcgggcggcgggcaggcatccgcgccccgggctgcggccgggctgcagggagagagaggggagggagcgcagatttgagtggagggggcgtggaggatgtgcgcctccacccaagacagagagggtgggctgctggagcccggcggaggggagcgctcggaggcgccggaggcagcgagaaagccgcgccgagagtgtgcgagggagggtgggggacaggggtgagggaggcgggggccgggggcagcagggaggagaagttggcccccaaactggacggccctcacctcctcaccatccgaccaagagttgtctgggtctggagcaaagcacaacggggtctgaaactttatgtcattttctcatacacacgtgacccccctggagtccagatggtttcaatcactggaggaaaaaagcggctcttctggtatgcgtgaaaagccggagctgggagagtctgggaaaagctgcctgcaccgcccgccggccttcaaacaaaccgatgagctctttcccttctcccagttctcgggcctcgggggagccctacaaaacccaaatgaaattcaaagaagctacttttggtactgcagcagcagcagaactcccaaagcactagggttccaaggagcctggtctcaaccgaaagctccaaaagggattctgaaattttactttaaatactccactggtttgcaaaaacaaaaactagaaaagggtgccatttaat

SEQ ID NO: 20585 - DNA, 1630 bp, Artificial sequence
  DNA replication origin
cgccggcgggtcagctgggccgcggcgaccctgctccaaatccgggtgggagccccagcctcgacctccctggagaccaccgctcctggtccgcccccaacgcacactccagcgggagcccagccaggactaggcctagcgcgcccgccccttccattttcatctaccccttccgctacttagggagccccctcacccggctcactcgtcaaggcgcatgcgcgcaacgctattctaggaagagggaccaggcctagcgctcccggcggcgccggcgcagctgggccattggcggaaggcgggagaggcgggagaggcgggagaagtgggggaggcggggcggctgggcggccaaacacgccttctgcgtcccagccttggcgtctgcgcgcgagttgcctggttaactgctgagcgctggaggcggggcgccgggcgctgggggccgggggtcgggggtcgggggccgggggtcgggggtcgggggctgggggctgaggactgagtcgagccagcagcccagggcatctgtccacgctgtcagaggagcctctgggcgtggggctggcccttagagggctactgcgctgcttaacttggtgggtataaaggcaggtctcctgttgagctaaaaaattatggggtaccagctaggtaggcaacatagcgagaacccgtgtagacacacacacacacacacacacacacactagccaggagtggttatggggtaccagctaggtaggcaacatagcgacaacccgtgtccacacacacacacacacactagccaggagtggttatggggtaccagctaggtaggcaacatagcgacaacccgtgtccacacacacacacagtaggaggagtggtggcgcgcatctgtagtcccaggtactcgggagggtcgaggtgggaggatcgcttgaacccgggaagcggaggttgcagtgagacgagatcgcgccactgcactccagcctgggcgacagaggaagacttcgtctcaaaacaaaaacatcatggggaataaggcaagtgcctcccgcgcctctttctgcttggtctacattttggggtgtcgctactcttgtttgaggaggtgattaggccaaactgtgtggctgccaaggtggcctttggagaagggaacagctcgggattgaggcgagacggaggcggggctgtctgcagatgttcctggcccccggggcagggggcgcctgagaagttgtagggtctctcataatccctcagcgcagctctctctcccctccagtgggaagtacggattcacatatttttggagacctgttctcttggggtctgactccatcttttaggaagactgcaccatgtttaagtaaggaactgtgaatgcttacttaaaccatgtttaagtaaggacctgtcactccactccgctggttatttggtaggagatacagcccaggctctcactgctaattagtgactcagccgcaccacccagcgcaaagcaaagcgccgatgcttaggaaggtccactttgagggacacgctcagtgggggtcactttaaggaacacaaataaatcctcctttaagtctcctctgtggttcatgaaaaaggagagaaactccatcctcac

SEQ ID NO: 20586 - DNA, 990 bp, Artificial sequence
  DNA replication origin
ttgacaattcacaaacgtattcagcaaccacttagtgagcatttgctctgtgttagatcttgtgctcaataaggtggattcagataagcataagacatggtttctgcccataaccaggacacaccctagtaaaggagactgaaaaataaatacatgatcacaatacataaagttatgaggcaagatatgcagagggtgccagcaatgttttcaaagtcaggagacgtgctgctgtccctgtttctggtaggaggtagagatggtttcaaaaagaatctctgaatcaaaaacatttgcctgcctgtaacctttccccactcctacatttaaagatattataaattaaagctcttatttttaaaaacgcaatgtcattctgttttcccatcatactaatgtgaatcccttctgttctcccccaatgatgagctagctcatcaaagaggaagcacaggtatgcatggagctagggcaggtctggagagctggggcaccagagaacagtatgagggaactagaaggtcaagaaatcgaaccagggaggccacaacctcacctctcttgcagtttggttcttcccttacccactaaattatcaggaagagagaaagcaagaaaggcaccaagggactcgtggagggagttaggtgagaatatgaagcaggtgagagatgctccgtaggccctattgggagggaagtaggccaggaggggcaagttcccaccacaggaagggaagtgttcaggggtgagctgagctgagtcggcccttgacagggaaggctctgtcagatgggggcttcctatcattctggcttggggcatgcggggcctgtgaggctggcggagggcgcaggtgggctgtcaagagcttagggtggaaagttaaaggctctcggaggtgaaaaggttgtcaagtgtaagatgcgtgcagccggggctgggaagggaaatgttaaggcggtggggggctgctgtccggactgtggg

SEQ ID NO: 20587 - DNA, 1311 bp, Artificial sequence
  DNA replication origin
ctcccggatggggcggctggccgggcggagggctgacccccccacctccctcccggatggggcggctggccgggcggggggctgacccccccacctccctcccggatggggcggctggccgggcagaggggctcctcacttcccagtaggggcggccgggcagaggcgcccctcacctcccggacggggcggctggccaggcggggggctgatccccccacctccctcccggacggggcggctggccgggcagaggggctcctcacttcccagtaggggcggccgggcagaggagcccctcacctcccggacggggcggctggccgggcggggggctgacccccccacctccctcccggacggggcggctggccgggcagaggggctcctcacttcccagtaggggcggccgggcagaggagcccctcacctcccggacggggcggctggccgggcggggggctgaccccccccccacctccctcccggtcggggtggctgccgggcggagacgctcctcacttcccagacggggtggctgccggacggaggggctcctcacttctcagacggggcggttgccaggcagagggtttcctcacttctcagacggggaggccgggcagagacgctcctcacctcccagacagggttgcggcccagcagaggcgctcctcacatcccagacagggcggcggggcagaggtgctccccacatctcagacgatgggcggccgggcagagacgctcctcacttcctagatgggatggcggcggggaagaggcgctcctcgcttcctagatgggatggcggccgggcagagacgctcctcactttccagactgggcagccaggcagagaggctcctcatatcccagacgatggggggccaggcagagacgctcctcacttcccagacggggtggcggctgggcagaggctgcaatctcggcactttggggggccaaggcaggcggctgggaggtggaggttgtagcgagccaagatcacgccactgcactccagcctgggcaccattgagcactgagtgaacgagactccgtctgcaatcccggcacctcgggaggccgaggctggcggatcactcgcggttaggagctggagaccagcccggccaacacagcaaaaccccgtctccaccaaaaaaaaaaaaaacgaaaaccagtcaggcgtggcggcgcgcgcctgcaatcgcaggcactcggcaggctgaggcaggagaatcaggcagggaggttgcagtgagccgagatggcagcagtaccgtccagctttggctcggcatcaga

SEQ ID NO: 20588 - DNA, 980 bp, Artificial sequence
  DNA replication origin
gccccgtccgggagggaggtggggggatcagccccccgcctggccagccgccccgtccgggaggtgaggggcgcctctgcccggccgcccctactgggaagtgaggagcccctctgcccggccagccgccccatccgggagggaggtgggggggtcagccccccgcccggccagccgccccatccgggagggaggtgggggggtcagccctccgcccggccagccgccccatccgggagggaggtggggggggtcagccccccgcccggccagccgccccgtccgggagggaggtggggggatcagccccccgcctggccagccgccccgtccgggaggtgaggggcgcctctgcccggccgcccctactgggaagtgaggacccctctgcctggccagccgccccgtccgggagggttgggggggggtcagccccccgcccggccagccgccccatccgggaggtgaggggcgcttctgcccggccgcccctactgggaaatgaggagcccctctgcccggccacgaccccgtctgggaggtgtgcccagcggctcattggggatgggccatgatgacaatggcggttttgtggaatagaaaggcgggaagagtggggaaaaaattgagaaatcggatggttgccgggtctctgtggatagaagtagacatgggagacttttcattttgttctgtactaagaaaaattcttctgccttgggatcctgttgatctgtgaccttatccccaaccctgtgctctctgaaacatgtgctgtgtccactcagggttaaatggattaagggcggtgcaagatgtgctttgttaaacagatgcttgaaggcagcatgctcgttaagagtcatcaccactccctaatcttaagtacccagggacacaaacactgcggaaggccgcagggtcctctgcctaggaaaaccagagacctttgttcacttgtttatctactgaccttccct

SEQ ID NO: 20589 - DNA, 1003 bp, Artificial sequence
  DNA replication origin
cggggcgtggactctgtgccggccccgccccccgcgcgcgcactggctgctccccgcgacgtcacgctcggctataaaaggcgcggctcggggcccttgcggcgctggaggagctcgaggctgaggctgccggggggctgtgggctaccgggccgccggcgcctcagcgatgttttactcagggctcctcactgagggcggccgcaaggagaccgacatgcgggaggcggcgtcactgcgacagcagcgccggatgaagcaggcggtgcagttcatccacaaggactccgccgacctgctgcccctggacggcctcaagaagctgggctcgtccaaggacatggtgagcccccgccgccgttctcgccccggccccggcggcttcgcgcccgccgttttccgaggcccggccgttgcggctttcactgagtcacggcccggcccgccgctgcccttggctcgcggtcgctgcgtcgcggattcctccccttccagtacccctgctgcggtttcggtggggattccgtcgtagcttttctagcttgcgctcccctcggctgtgcctcctccctggatgtctcttctccagtagaaagaagaggtcctgccctgccctcttgccctcgggtcttctttctttttccttattcttaataccgaattttgttcacggggcttgtgcctcctatgctgtgtggctgttcctatgacccagacagaggtgattcctaatggctttccgtgagggggaaagaagtggaaagagggttttttgacagttgccagatccagaggacttctgttgaatccattgtccccctatgcaaaacccacttctctagttttggtcctaactttgaccttccatcctgagtggggagagagaaaaggggccaaatgtgaaggtttcctgaacccccaacatctcttcatcattctcctcttccagccccgcccccaaggagtgggtagagggaggaagccaggctgctgcatctcaccg

SEQ ID NO: 20590 - DNA, 954 bp, Artificial sequence
  DNA replication origin
atcagtggaggagacaaatattaatccaacaaccagtacccccctacccctacccccacagaaagtgtcaaatgcccaagagatagatagtatataattagagagacttcactctctctggaaggtcagagaaggctttcctaaagaaatgataatggagctgaggtctggaagaagcataggagtttcctgaagagggtaggagggggcactgcacacagagggaacaggacagtcaaaggcaggccatttggcaacaggtgactggaaggaactggaagaaggcccatgaggctgaagtacagagtgaatatgcagggtctaggcagaccatgcaagaatgtgggtttctcctaagagcaataggaagccttttgaggtgctcttagcagggaagtgagatgatcacacttatcgtttgagaagattactctggcagcacagtgaacaacgtattggaatggaaccaaggagcattcaggaggccagacagaaggtatcaggtatttgcctgtaaaatgggggtgatgagaatactatcttacaagctgttgccaggatccaatgagatactgcattttaagtgtctagtctagtacctggcacatagtaaaggctcagtaagcgtcgatattgttacttttatcattggttctttgcagagtgcacatatttcttatccaggtctgctcctgcgtgatggggtggagggagtagttgtggtttccagagtgaaaacgtgatttgtgtcaaatcacaatgtcgagaccagaatccaggatgcctgaaggcccgattagaatggcttaaaagtatggattattcaggaagaaaaacgggttccaatcgctcctactaaggacgctggagggatggtgaacgatcctttagatggtaagccctagcacttattgagaaaaacaggtgcttctttggtcggagagcaggtgtagg

SEQ ID NO: 20591 - DNA, 983 bp, Artificial sequence
  DNA replication origin
ggggcggcctgggcggtgctgctgctgctgctgctgctgccgccactgctgctgctggcgggggccgtcccgccgggtcggggccgtgccgcggggccgcaggagggtgagtgtccggccgcgggggcgcacctggcacagcaggcagggccaggaagagtgtttaggtccccggcggagtccagagccgggcgcgcggggctcggggctggcggctgcagctccgcgggggcctctgctccccccgggacctcacccgccggccgggccaaggcgccacgaccgctggggccctgagtccttcggcccggcctcggacccggagctgctgacggttcccgccccggtccggatgcctccagagcgcctgctagtcagaccgtcgccggcgagcaggcaggagggtgcggaccctggccttggggtcccgcgcctcagcgtaggcggggaaactgagggccgggccgggcacatccgcgaggcggtggcagctttgccgtttctttctttgggggccggcaagttctgctgatggcttcggggtgggctccagagacttttctgtcagcggaacagcgcctgttccgatctgggaattaccctgaagcagcaacaagcctaggttttcagcagagaactttggtttccagagaggactctggacgtgctgtgcttactggacttgcaatactttcaaaatgcttttgtttttaattaatatcctggagtagtgtcaacccaggaaatacttctgccaaggcgggtttccaggttgagaggatgggcaggggtgggagtgcagggggccggccatggggacaccatccccgcttcgcagcatctgagagccctggatgacatctgctccgatcccggggcagacttcccataaatactctaaaccagcggggtgcaatcttttggcttacctgggccacagtggaagaagaagaattgggccacacataaaatataccaacaca

SEQ ID NO: 20592 - DNA, 1334 bp, Artificial sequence
  DNA replication origin
ttggattttaaaagaaataactttgatcatttcaaaagcaatgaagcctgatgcagtggagagaaaagaaggcagtaatttatggctaccattaaggacacaaagacaaaggtggagagaacgtttcactaactgaagatttacaaatgtgtaaaaaccacccttatgaccagaaatagctgagtgtctctctcagcaccaaacaaaagggagtgggagggaggcgcagacagaaagagggacgcaacctgcctgccttcactgaaagggtcaaaagaaaaacaactacagaaaagttattttctcagatagctccatcaagcagctgcactagccacagcccaaagaggcaggcccccgtgggcatgttcgggggctggggtggcagacagtgggtactgagggtgcagaggctgggagctctgggctgtggataggccccaagaagacataagagtttttgtgcatgagctaggtggggattttttggtgacatctattttttttctgatctccaaaggaatggtgtgtgtgtgtgtgcgcgcgtgcgtgtgcctgcatatatacatatgtgtatgtatataatcgcaggagaaaattgaataaatacggagaagctcagtgaagaacattactatccctaagtgtgatgtttggttgcgtccggaaattgttactatatttgttcctggagtgatggtgggtgtattgggctccagccatccgtgtcaagtgtgatatgggaagaccctgtgtacctgttcccttgcaaggactgtctttcatggaaggctaggtgctaggccctgcctgtgtttgaagctagccagacctgatgtttatgagttcaggtgatcgtaaatgccacctgtactccggcaaagtcggggctgctgtctgttgtctctggtggctcacctttgacctctagcccccttccccttaggctgccctgagatatacataagtagcttgcagggattctaggcccagtgtgccccacagtgggacaagtggaccagtgccctcagggctgtgggatggaggatcccagagggcctggggtgggcagtgtggagaagggtgcagagggtgtgctggggtgggcagagaagccagggtcaccttctccattcaaacagctgttttcccgaattggaagtcacccccaattccttccactcccacctcccacctcccacgtggaaagccccaagatggctttggggtttggggactatacggaacactttctgggcgccctgaccccgaatatttcaatctagaagggctgtttgtcctcacatgagggcctgggtcgagttgtaacacac

SEQ ID NO: 20593 - DNA, 1431 bp, Artificial sequence
  DNA replication origin
tccgcccttctccaggctcgctcgggccgcggcgctctcggctagctgcagcggcggcggcgcggaggggaaggcatccaggatgcggtgcggggcggcccggtgcccccccgccccgtcacggcagccgcggcggccgaggggaccgggccagggccgggggcggcggcccgagccgcggtagcggcggcggcgggaggggcggcctgagggcggacgggcgggcgcccgggttgcgggggctcggtgccgctccgcactgcccggccggtctcggccccggcgccatgagtggcggcggcggcggagggggctcggcgcccagtcgcttcgccgactactttgtcatctgcggactggacacggagaccgggctggagccggacgagctgtcgggtgagtgcgcgccgagcccggggcgctttcccgcgcccgctgtcgtcggggaccccagaagaaaccttccttcagccccgctttgtcccgggagccgggcgagtgtcggccgggaggaccagggcgggcgcgggcgaagggggctttggactggaggggggaaacggatgaggggctctgagccatgaggggtccaaacctacggcccgctgcgcagtggccacgtcttcggcgaccagaaagagggagggttgtgtgttctcagtttggtgtaggttgagtgacttcgtttaaaataaaggaaagcttgtcctctggcacccattagggagggaaggcgtcccacgtcctagtgaaagtaagttccacccagacttaaaaaaaaggaaaacaaaaacttggtgagtttatctggccacttcccaagaagcttgtgatactagttcctcaaaaccgttataccccagccctgggctgggccccctgagtcagattgcagctctgcgcgtctggatgggatatgaagtaataaagtgaacttgggcggcaccaagaagagtaggaactcccttagccttggaaagggcttgtatcccggggccatgccttttttgaaaagtaatttatgtcctttatgaggacagaggcgtttgtgaataaaagggtagcagcattgtagttggagaggcttggtgtgttctgatgcgtttcaagtcatatttgaaagggaaagtgatgaggggagtcaaagatggggccctgaccagatttggcactcactgcagaaggccgtgaaaattatacagtccccgtgaattttccactgcactgtcattggagtctttgaattgtaacagttttgaaaataagtttttgtctggagtttccagttagtgggtttcaagtgggtggaggtttgtcgggttgtactttaaggttgtgtcatcctgatgagggggactccttttcacttttctgtcactgtaaagtttctctttcgaaagtgattatcctgttgactaatcttactcggct

SEQ ID NO: 20594 - DNA, 1472 bp, Artificial sequence
  DNA replication origin
gcgcgggaaagcgccccgggctcggcgcgcactcacccgacagctcgtccggctccagcccggtctccgtgtccagtccgcagatgacaaagtagtcggcgaagcgactgggcgccgagccccctccgccgccgccgccactcatggcgccggggccgagaccggccgggcagtgcggagcggcaccgagcccccgcaacccgggcgcccgcccgtccgccctcaggccgcccctcccgccgccgccgctaccgcggctcgggccgccgcccccggccctggcccggtcccctcggccgccgcggctgccgtgacggggcgggggggcaccgggccgccccgcaccgcatcctggatgccttcccctccgcgccgccgccgctgcagctagccgagagcgccgcggcccgagcgagcctggagaagggcggagagcgcgtggacagcccccaccgtgaccctcctcctaccgcgcctgcgcaggcgccgtctgggagggggcgggctcctgggggaaaggatgacgtgatgctcttcggaccccgccggccgcagcttcccgggaggtcgccgcagcgcagccggtgactgcttggtcgcccgcaactgccactcccccgggattgagactcctttagggagggctgaggaggtgcgagaagagtgggcgcagcctgcagagccgggcatttggcccatgctctgcccccaaccacccacccagcaagcagaggtccagagatcttagcgcggccttgccatgaggatggggtctcacgactgagctcggaagctcacctaatcctagctgcagcgtgtcagcctagaccccagacagggccttctccctgtcctctcttttggcaggggcggatgagccggttttatatttacccttattttacagacggggaaactgagtctcagaaagaagcaaggacttatccaaggttacgctgagtctaagagacataagcctggtctggaatcctgggcttgtggtcagctccccgttcctcgccgctcccacctcccagcctgcccttttcccacgctctctccttttttctctggaagcctccagaggcgcctgccatttgggagctcctcttcctcttcactctgtgaaaactctcagatccacccctaaacctgttttcctgtaagaggatagggaggaggcgaagggaaacttacctattggtccttgtcctaggaccctccgatttcctttcccatagaagctaggcagatgtgtctttgttggaaactggagatcagaggccagaaaggcaacacaggtatagtggtcactagcatgggctctagaaaaaaatgctcggatttcaatcctgacgatcatttacttttgaccttgagcaagttaatctctaagtgcctggcgtcatggtttttgagacaattacataaggtaaatgcaagtacaggtaaaacaatgagaatactgcctg

SEQ ID NO: 20595 - DNA, 1014 bp, Artificial sequence
  DNA replication origin
agccgggtgactcgagtgccgcgactgcgcatgctctcgccccagcgcccggcggccacctctttcccgcgggcgggccggggcggggcactgaagggggcggtccaggaccctgacttgtctcgcggttactgggccggcgcgagcacgcgaggctcgggggcggcacggggcggggtttagcctgtggtgggcgctgcgggtgtttgcaggaggttgcagtactcgctgggctgaggtcgtctcgggtgaggaggtcgcgccggaagtggctctagccgtggcgcttcggcgtagtaaggagcctgcaacagagttttgttgtttagggggcgcggcaccgcaccgctcccttcaccttgcagcagccatggcgaaaggcagagtcgccgaacgatcgcagttgggcgctcaccacacgacccccgtgggggacggggcagcggggacgcggggtctcgcggcgcctggcagcagagaccaccagaagggtgagtgggcccggggagcagagctgggggtggcccgaggcttctgtgtgtcgggtggggaaaaggacccccgctattctcggagagtcgcggggaaagaggggggcctgctggcgccgcggcgggagcagagaccgtgggggagttgggcttgggcgctcgcgcagcacaaggccggacgccgagtaggtgcgttgtaaatgctgtttgagtagaattcatttaaaagaagggatgacactggcttgttgacgctcaggtagattgtaaggttgatgataacgacgctaggcagagctggaaggagctgtactgtggcattcgctgcgttgtttttacagatgaagaaactgaggcccagtgtgggtatatgacttataaagtcataaagccagatcagtgaagtagtagttaggagcgaggacttaatacttccaggtggcagtacacctgggcttgagtccctgccctactgtttacttggaaccttggacttggtaactttcaaaaaaagctcagtgtc

SEQ ID NO: 20596 - DNA, 1343 bp, Artificial sequence
  DNA replication origin
attttatttcccacaatacttctggatccaagattaaaggatggggctagatgtttcaagccttctgtaacagcaacagagcagagcacaatgatgccttcgaaaacctgcagcaacaaggacactctgctatatacaatatctatcagagtgctggtaaatgcctcacaaccatcaagccatctccctcccccatatatttattcctctgtgaagcctttcttcttccccctctattacactgagttgctctctgtcctgttcacacttcgatcagagcacttattacacagtataatgacgacgtgattatgtatttatctcccctcaccagagctctggagggcaggaatccgagtaccacaatacaggatgcagagcaggcctaaaatatttatgggaaggatgggagccggactatgatggatcgctttaaataccagggaaaggactttccactcaaaccaaaattcaacagagtattaaattttcttgcacagaggaatgacttgcagaatacagtgtgccataaaaatgcacccggtcattgtgtgaagttggatgggaatgtggcaaaaccagttaggaagttgctgaggtgactctgtccatggagaggaagaactacatctaaaaggcatttcaaagaaaatacaggccaggcacggtggctgtcgcctgtaatcccagcactttgggaggccaaggcaggcggatcacgaggtcaagagatcgagaccatcctagccaatattgtgaaatcctgtctctactaaaaatacaaaaatcagctgggcgtggtgtcgtgcgtctgtagtcccagctactcaggaggctgaggcaggagaatcgcttgaacccaggaggaacccaggagggggaggttgcggtgagccgagatcgcgccagcctcgtgacagagggagactccgtctcaaaaaaaaaaaaaaaaaaaaaaaggaaagaaagagaaaatacaaacaaaagctgagatttgctgagttcctaccatgtgctacgcaatgccaacaacaaggtggcatggaataatcctcatgtctgttaagtgggtgggggtaggagtgggggtaggagtaggggagtgtcacacatctgcaaacggtaacgttgaacttccaaagtaggtccatcgggctctcaggacccgcggctgtccgaggcctcagttgcctcaattagtcttaggctaacttcctccttgcgctggggggtggggaatactttcccgtgcggaggcctcagctcctcaatgtacagagaagagccttgcagggcctaaacactggagttcagggatcctttatcaagctgccaaacctttt

SEQ ID NO: 20597 - DNA, 1445 bp, Artificial sequence
  DNA replication origin
caggttcgggctccgcggcttcccgcgaccgttaaccacgtgagtgcccagtccaccaatcccagtgcagctccgggtttgaaaaaaaaaggagggcgcgacgtagcccgcgggggaaggaccagctacgcgattttggcgggaacccgctggctccacccccggctcggcgccagccaagtctgggcgggctgtggtgttccgggcctatgagcgagcctggggcggcggggggcccggcccggcgccgcccgaacaccgcccggacggggctgggccttctgggaggggcaaaagagagctggattcgcctaagccgacccgaaagccggcctggacgcacccccctcgctgctcctccggtgctgggggatctgaagaggggcaggcggccgggcagcgcctccgggtctctgcgagctgggaagagccagggaccgaatggccttcggccgctgccctcggaggccgcttcttgcccctcgtcccctggggcgagccactggggcgtagtgggcgtggcagtgggcagccacgttcagggtcgaggtctgagccggaaatggtgactcgggcctcgggacctttctgaactgcgggagccgatgtgcttaggctggacactggctgggaggaggcctccgagccccattatttccccggggtgggtgactgttaggggcgggtgtcagcacagcgagaagagctctcccaagcaggggtccacctctgccgaccttgtccgcggccaaaagaaacagcagcacagttgcccaccacgaaaccaagtgcccggcacacgatctccgtgtttacatttgttcgccagcacgtgggcatgcgttggcaaaaccgattggcccggctcgcggcaaactcaaacgcaattttaaaaaatttccctagtgcttcgttaaactgatttaatctgtcccttaatgcacttacacgtttcttccagttttcttttttctttctttgtttatttatttttttttttttttctgagacggggtcttgctctgtcacccaggctggagtgcagtggcacgatctcggctcactacaacctgcaacctccgcctttagagttcaagcgattctcatgcctcagccacccgagtagctgggattacaggcggctgccaccacacctggctaatttttgtatttttagtagagacgaacttcccaatgttggccaggctggtctccaactcctgatctcaagtgatccgcccgcctcggcctctcaaagtgctggaattacagacgtgaaccaccgctcccggcctcttccagttttctgttgtaaacaaccccgtggtgtatatgcttccttctccatgttttttgtttggtttggtttttttcgacacggagtctcgctctgtcgccccaggctggagtgcagtggcgcgatctcggctcactgcagcccccac

SEQ ID NO: 20598 - DNA, 1590 bp, Artificial sequence
  DNA replication origin
gcctttcaagagcccgactcgccgctgccgcccgcgcggagccccacggagcccgggcccgagcgccgccgctcgcccgggccggcccccggcagccccggcgagctggaggaggacctgttgctgcccggcgcctgcccgggcgcggacgaggcgggcggtggggcggagggcgactcgtgggaggaggagggcttcggctcctcgtcgccggtcaagtcgccggcggccccctacttcctgggtagctctttctcgccggtgcgctgcggcggcccaggagatgcgtcgccgcggggttgcggggcgcgccgggcgggcgaaggccgccgctcgccgcggccggaccacccgggcaccccgccacacaagaccttccgcaagctgcgactcttcgacaccccgcacacgcccaaggtgagagcggcgggcgcgggcacccggcggccggggccgcggcgccggaggggccagcgccgctgcctgggttcggttacagaagcggccggccgctcccccctcgctttcctgcgccgccccccaaagttggcagcccttgtgtttggccctgccccgaggttgtccgttgagattatgtaactgaacaatgggcctcgtctggaacttcatcttacaaaggggccgatcggcccgtccgggtggccaaggatttgccgcccgttgagtccgggccgccccgagcgtgtcagccccgagtgcggcaccgataacgcggttcgcgaggatgctggagggtgccggcccggccacctgacactcccgagccataggatgccttttaaacgcggcgatcgggcctgtaatttgggcggcgcgggcagaaggagtttaaagaaaaataattgtcccgccctgatcgtgtcgtgtcgtgtggcgtggatgggggaaaggtctggggcatgcagggagactacgcttggacttgggagtaaaggctggccttccaagcatttacagtcctacagactcatcctaagtccaggcagtactgaggcctgtttctggacaaggtcttggcccagcatttgtttttatcgtgggtttgcggtgcccagagtttggccggcctccgtgtgattaggaacatcctaccgtagataaggtatcttaaagaaggaggtgttcagcacctgtgttttgaaaggccttcgagtactgcgcagatgaccacttttaaaactgcagattttaaagctgatacttccagagattaagacaagcctcgcatttgtaaggttaacagggaagatgcaccttttaaagtgagtttgttttgttttcaatgtactgtttgtcatcagcctaggcaatctgtgtgctttcgagctgtactgtttattggccgacttgctcaaggcaaaatccctctggaagtgaggggaggagtccagcggaggtggctatggaagccctatctagatgggggaggggagattttatggggctctcggactgctttctatttttggatgggttgaaagaatttgttaacttttagccactagaatgaacttagttttaggcagcatttatattctttttagggttagaggcagattttacttggct

SEQ ID NO: 20599 - DNA, 1137 bp, Artificial sequence
  DNA replication origin
cgaactggtctgggaaacattagggagatgtgtttaccgtcctggctgacactgaaggccaagcattcttgccaccaggcgtggcttgactcgcagaacccacactctggcggctgtgggcgcggcactggaccggcgccggcagcagggcggggcctggcgggggcggggcctggcgggtcaggtgactgcgcggcgggctgtggctgcggaggttgaggggcgtccgaggcgcggaggggctggctgggcaggaggggttggcggggcagcagggccgcggccatggggagcttgaaggaggagctgctcaaagccatctggcacgccttcaccgcactcgaccaggaccacagcggcaaggtctccaagtcccagctcaaggtgggcgcctcctgacccggccccccacccgaccctccccggcgcgctctgtacttcccttgggtggaagcgggacctggcgggccgtgaccgcagggcggggcgggtcggaatgcgcccggtaggcccgcttggggcggagtgggtctgagaccgggatttggtgtttactgcctcccccttgccttcgggccatgccctcggttggatgtgttagttcccgcgggtctcccagggactgggaagggtggcgggcataaggctggggtgaagtctggagggccaagtgtgattccttcttggcgttggagagcggggggcagaaagtggattctgaggcggcaatgggaagctcccttacacagccttcccagaattttcctcttactccaggagaggaagggacttgcccaaggtcgctgggcagaaccttctgcagcccacagccccacaccaggacagtcctcaaaacggctagctgccccggaggcgacagggcagtccggagacgcagaaatgccccgaagcccggcctccagggtccttctcctttgggaggctttttgacttgggaagaccttccgcccagcgtcttttaagtttggaactagtggacggggtgtactgtgtcccacagggaccttagttccgggtgaggagcgctgatctttctggcaccctgcaaaagcgactgctttttcagagtcgttattgtgactgccggagaccctagagtatagggtataaataaag

SEQ ID NO: 20600 - DNA, 1461 bp, Artificial sequence
  DNA replication origin
agccctgacgtgaactcattttatctgccacgacccagaaggtgggcgcaattttcctatgttccaggtgtgaaaagtgaggctcagggagctaggcagttgcccaaggggacacagcagtgacggctctgggacgaagcccaggtgtccagacgcgatggcctcttcccgcgttctcggcgggtacggcgcgccgcctgcctgcggcccgcggggaggtggtcgggtggccgccccggctcctcctcgggcccctgaggatttccggccgggaccccgaggagggccctgtggccttgcggcatccgtggtcacgattccagccccacacggcctcccgccagtccctgcgagtgcccaagacggggccgcccctcccgtctcctcccttctctcccctccccggcgtctcccgccgagggcgctgcaggcggcctggttgggatgagggcgggcaggcggcccacaagcaggggcctgtttcctgactcgtttgaccctggctgtccctgcggaggccccagcagacccagcaaggtcatctagggcgaaattccagtctgagccctgagcagtgacttaagttttcccgataaggctcaagaagggacacagattgtcctccccacaccccgcactctgtcagcacctccactctggtgaagcctctgctgcagacagcccggctcgagaagagacaaagatagacttgggacagataaggacagagacagccagggagagaggggcaaggagctcagaggtgaagatggggccgcgccgatggggaggcagcgggtctgcggccgccgagatgggaagtgggccctggagcgggcttgccgagcctacgaccggggctgggatgttggaggaagacgcggtcatgagggctgaaaaagaaggggtttttggtatggtagaaaaatggattgggctggcagctcgaaggccacagccctgtacctctgggcctggtctcgtgtgtgcacctgggaccggtgggtgaggggtgatgtagagtcaatgagggacgagctcgctgagtctccaggaggcaggagtggagagggcgagggagggagggtaggacctgtatacctacggtggagggggcaggcgggggacagatgctgctgggccaagactactgagtctctcctgcctgctggaggtccctagctcaggacttattccatgcacactctgatagaatatttacgcccaacactaactgtttggcttggcaaataagcaaagccataaagtcacagctggcctgtaggctcccagtcaccatgtgcagctgagtcacaaccacttcccccaccccctggggagcaagcgcctatgctcatgcctgcactcagacacatatccacacagatacccacagatgccgcgtgccactgagtcatagctacctcctcagagagcacgtgcctgcatgtacttgcacac

SEQ ID NO: 20601 - DNA, 1297 bp, Artificial sequence
  DNA replication origin
gcgggtgggggcgggggaggagcgggcactaggcgccgcgcaagcgcagagcgcgcctcggttgtcaaacatggctgaagcgctgccgctgccgctactgccgctgcagggaaaatgctgagccctcccgggccgggtgggcggcggcggcgagggcggcgacggggacccgcttcccgagcgcggcggcggcggccatggcccggctggctgactacttcatcgtggtaggctatgaccacgagaagccaggtaagggtgtggggcggcaccgcccccgggcctccccgccccccggccgctgtccagtgggctccgcggggccgggcgtcggggacgggcgtcggggagggccaggccgagtctcggaggagcgggcggtcggcgtccggccttctcggctgggctgagcctggcggtgggcgtgggggggccggcacgacggtagggggagggaagacgccgcgtctgcccagcccctgggcgcacccgctgggcgggccggaggcgagttggggtctcgcgaccctcccgctggaggctgcagggtacccggggcagagagagccctgagattgggcccaggaccgcaaggctgggagggcgggagccaactgtgctaagttcctcggggataaacttctgccctgcatcctgagtgagtaaccagtgacgcagggggttgtcctctccgaaaggaagtgctgagagtccagtgctaactcacccctgtgctgttgggggcctagtgacctccccaaggaacgcgtggtaccagggaaggggacaggattctttgcacttttacccctttctaggaaatgctccctattctttcaggacaaatgtgacggtcacttcacagtgacatgacttgtcttttaactaaggacagccagctgaccgctgaaggtgatcttgtttcactttaatgtgttttcattgttctttttatttgtcacagaattttcgtcgtaaggaacaattgggcaaatgcattgtattttacactttaattgacggacttccacaacttaagagaattcagggttcatgcacgtttatttctgtatttgtattctcttgtattactatgtagctaagcataatgtaataacaaattgagctgggaaaccacttctattttagggcaattctagtcccacatttgcaaggaatttgagatatcagctctacagccccttcatttttcagagatgctgagattgtgttttcctgatggttacagccattggtagctcagaataccattgttctacccactcttggtccactc

SEQ ID NO: 20602 - DNA, 978 bp, Artificial sequence
  DNA replication origin
gaaggaatacaacttggtgcttacatgagacaactctgtgaaagtggttgacacagtgaggacacacagtgggtgctcactaatgaagtttcctctccgagcttggtgacttactcgttgagagaggaaagggagaccgagtcaagaatggctcccaactgtggccccgtggtggtgccgaccccggtatcattcactgagactggaaacacagaagcaggttctggcgttttcctgggaagcaactaggtagtttgggtctggaccgcttccgccggcctaggaagatctagaggagatgttccctaggcagttagattcaccatcttcagcagctcgggggcattctgggctggagatgaaattcaagagccatcatccggcaggaggttgttaaaaccatgggagtggctgagatgcccagagtgggccttggagtgggagagcgggctggcacggtgggaccctggggtgggaccacagagaaaagccaggccgcggaggccgagaagctgtaggtacccaggtatgtgaaaaatctggaggtgggggccgcgggtgccaactctggaaactgcactccaagcgtttcaggaaggaagacgtggtcagcaggctcagatgccaggaagaggtgagcgagggaggctgcacggcacccagtggctttggcaactaggaggtcattcaggactttgaggggcaggtgaaggcagagcgaggagggttggagagggagcgtgtgcacgtggtgtgtgtgtgtgtgtgtgtgtgtgtgtgtgtgtgtgtgtgtgtgtgtaggtgatccaagtgaccagaaggacgcctggaagagtggacggttggcgagggagtgtgtgtgtgtgtgtgtgtgtgtgtgtgtgtgtgtatccaagtgaccagaaggacgcctggaagaaaccaatgcttgcgggttgctgcaactacagggagcaagtcacctgtgcggggccgaga

SEQ ID NO: 20603 - DNA, 1662 bp, Artificial sequence
  DNA replication origin
caagtttcccgttggcggcgcggcccgggcgcttcaggtagcctctcggctctctctgctccgctccgcgcccaggtagggcaccgacgggggctgcacgcggctggccggcttcctccctgctgaggcggccctccctcctcccgcggggccctcctggccggggatccgcagcgctgcgccctctgaacgcccggcccccgcgcctgctgcggggcgcggcctggccgggccctggccccggctggcctcagtgcccagcagccccgctccgctctgcccagcgcgtcccctttgctccagccctgcggccgtccctttcggccggcggcatggccctgtcgtccgaacccggtgagtgcgcgcgaggctgcgctgctgaccttgggccagccccgcggaccctgcggcccaggcgggaatcagcagcgccctggggtctgaaccgcggcttccgccttccctgctcgcagaggcggtggcgctgactccggtccgatcccttgccctgtcccctgttcctgtccctgtccctacccctgcctctgcggtggcccgagccccagcggcctcaggtgagcgggcagcatcccgattccctggcggcctagaatggaatcgcaaggtttagagaaattaagggacctgggacttgccaccctgggcaaagttcctaggtgcttgaggactggctggatgtggacagctgaggtggacttctacctggaggcgagggatgcactggatgatagggtgatgaggtcgtttgaggccttcatccttacctctttggctctctcccggcaagggaggtgtacagccttgggctctggcagtctgctttctgcccttgatcttctggtagctgctttgccagcagagctgctaatggctgttgtaggctggcagaggtccctggggagagttttgagaggccttggagtaggagaggcttgctaactagggtatcatttccccaaactgtatgtggctgaaagcttgatggcgacacatcagcaaaggagctgggtgaaagcaggcagcacaaggagggattttagcatggtcttgagcccctgttggctttccctcaggatgcagtgaccaacatttggccatcttcatggaaaagctgcctgcagctggaacctgcagaggagaaattctttccctggctgtgcagcactaaggccgagtgttagtggagccattgagccagacagacagagcctctgtcacttcacacctctaggagtgttgacagcaggtctggggtagttggcctggcctggctgcagcttcatggggcctggcttgctctgaggatgatggtatggggctgccctctctaggaataatgacacctgcataggtggtggctgggagactctttgacctctcagtcccatccttagctcagcctctgtcttctaaggttctcctagctctcagctaggtcaagaagctctttgagagatgaggttttttgtagttgtttttttttgcctctacactgactggatcactcttcaaatggcctcaaaatctgtctcaggtcttgaaaatgtcatgggcagataacatgtagccttcgggttaacagggagataccctttctcccctaaagctgcccattggcctccatgattcttccaccaagta

SEQ ID NO: 20604 - DNA, 716 bp, Artificial sequence
  DNA replication origin
acggcggccattttagagcgctccactcggcggcggcagcggctcaactcaccttcaccgagaactcagcagctgccaccgcagctgcctcctcaggatccggtcgtcggggatagggaagggaggggaaaggggaacggaaaacaaaaaaaagggggagggaagggggaggaaggagtcggggacggcctcaaactcagctcagaggagtcgctgctgcagccgccactcggtacccgctgccacctccatagagctccgactcactgctggcgctaaggcgtgtctgaagccgaacttatcactcttggggcagccgaacccaccagagtctccccgaatggctccttcgccgcccaatcagcggcccggttgccgtctgccaccaatccgcgcagggcagcgaggaggagccacagggctgagctcggttgcggcgcagccccgccgcagtgcgcaaagccatattcgcgaagtctctgaggctgagccagtggcgtaaggggcgccgagcgctgtcgagatgagggttgcgtgcgtaaagccggagagcccttttgagtctgcgttggcgtggctgctgcttcttgctccagtccctttgttcactgagtccatatgccatgctccagttgtatcatccccttttccctcgacctcgttttctcaccgggaatatgggaagaaaacgcacccttacctcccccgaaccctgt

SEQ ID NO: 20605 - DNA, 2615 bp, Artificial sequence
  DNA replication origin
ctctagcctgagaaacgttcatctgtctcctctccactcttgggacagcaccaagaagctggttcccgtagcttagggttcgctcggctcggactagccccggctgctgggcgaagcggagactgttggaagactgtagtctggaaggtttagactgagctggagggacaccatgtggccatacccagtatgacacctcaggcccggaggcttctgttgtttctgtggtggtgtttttgtaaagaccgtgaaacatgatgtttagggtatttttgagaattaaaaaagagcaaaagttcactcacaattatgctaacaagattattgttatttctgtttcttttattaaacattttctgacaattacaacaacacccccaccccaaggagcacacctttcttttcaatggaaatctgatcatcagcattttccatgttcattcaagttttttgcaatcattctcttcagcgatagataacagtagaccctcgatacatgctggtgcaatgaaatggaatgaaggagcattcaattgtagagggatgctcaaggtatagaggaacagggaagtgaaccattaattccgcctggacagtcagggaagatttctgagagatgtcattcggctgaggtgattgaaggagaatcaggttataggattgaaggaggatccattaaaaaggtgtttattctagcacagctgaacacaataaagcctgaaccaggacagagccctgggatcgggtggagggaaggggtgcaacagaaatctctggggagcaagttaaaacacagattcccatgctttgcccagagacccagatcttgtaggtctaaggaggggcccaagaatctgaatatttagcaagacctccccacagggtgctgctgttgcaggtaatcctcatgcccaccactgttattaagcccacaatcatcctcgcccccctccttcttactgcctctgtggcctctgcctggaaagttcttcccattctgctctcgcttggcaaatgccttctccttcaagacccggcagtgcaaatgttcataggtaaaccctttccgagtgcttgctttgtgctttgcaccacattattactttataaagaaacactatttaattcttaaaaaaaaagaaaaaagaaaaaaaactctacagagtaggtctcctaataaaccccattttacagacgaggaaactgaggcaaagcgcacttgactaactggcccattacccatactgctgagatgtatgttttctttctttctttttttttttttttttttttgagaaggggtctcactgtcgcccaggctgaagttcagtggttcgatcatagttcactgcagtcttgaacttctgggttcaagtgattctctcacctcagcctcccaagtagctgggactacagatgcataccaccacagcaaactaatttttttattttgtgtagaaacaggatttcactgtttcccaagccggcctcaaactcctggcttcaagcaatgcttatgccgtagcgtccaaaatgctaggattacaggtgtgagccaccacgcccagcctgggatgtatgttttctatgtcgcccgacaagagtactcacagcaggaggctgaagctatggttgtctctgtggccctggagcctagggcagtgccgacaatgtagttgccttgtaaatatatgtcaaataaatttaaaaaataaatactgcctccttccatcgtgaccctcagccagtgcctaggcaacaaatctgccctctccctctgctctcttcctcctctccttgacccccactgcttcctcctcctcctctctccttcctccacaaggctgcctcctcctcatctccttccccccaccacctcctcccccccaccacctcctcccccccaccacctcctcctcctctcctttccctccactctctcttcccacacttctcctcccactctccttcccccaccaccacctcctcctctttctcccaaccaccacctccttcccctcctccctgcccccgcgccccgctctccttccaaggggcctgggacccctttcctcctgttctgtcacctggaagtactcagcagcccctgaggccagccctagcctgctattgactaagggacaggagtaccaaggaatgcactgttcctgtttgttgagcctttttatttggcaaagcatggagagagctctctcagcttccagacttgcctcctcaaagcctcctctttgctgaggctcccgccaagcctctccctcacagctgctctccgccttcctctctccctccgggtccatttctggatccctccttcctttctgctccccgccctacgttcttcccacccctcccctgtccccttggcctccctcccactttctctccgggtttccctgcctcttttcttctctccttcccctttcctcccgctcctctgtcctccccgcagcacctttgctttggctctttagctttggctggtctctccccgcatctccaccagcccggcctatcctctccctagttacgcgctgctccgtcccggcctccgcacactccccagggaggcccttggccgcccggccgcctcctcc

SEQ ID NO: 20606 - DNA, 1163 bp, Artificial sequence
  DNA replication origin
attgtgtcttgcaggtagctggtaatgagagctaagaggagaaaggatgggggatggtgaagctgggtgtgatgagaagcacactggacttcaaatgagaccatttttattgaaatttcagctgtgccttttacatgctttgtgaccatgggcaagttacttacctgacctcactgaggattctttcctcaattataaaataaagcagaaatgccatctgtttgtgagaaaacataagttataaagcccagcacttcacctgacactaagtacctactttgcaggggcattctggctccagttaagacaagggtgggtgtgtgtatgtgtgtgcatgtgtgagagaaagagacagagaaagacacacgcacacaggagagagagagagacacacacacacggagagagagagagagacacacggagagagagagagagacacacggggagagagagagacacacggggagagagagagacacacggggagagagacacacggagagagagagacacacggagagagagagacacacggagagagagagagagacacacggagagagagagagagacacacggagagagagagagacacacggagagagagagagacacggagagagagagacagagagagacagacagagagagacagacagagagagacagagagacagacagagagacagacagagagacagacagagagacagacagagagacagagagacagagacagagagacacagagacacagagagacacagagagacagtcagagacagacagagacagagacagacagagacagagacagagacagagacagagacagacagagacagacagagacagacagacagagacagacagacagagacagacagagacagagagacagagacacagagagacagagacacagagagacagagacacagagagacagacagacagagacagacagagacagacagagacagacagagacagacagagacagacagagacagacacagagacacagagacacagagacacagagacacagagacacagagacacagagacacagagagagacacacagagagagagagaaagagaaagtgacatcctttacagaaaggtacagaggattgtaagacatggcagacaggc

SEQ ID NO: 20607 - DNA, 1423 bp, Artificial sequence
  DNA replication origin
tatgtgggagtgagcttgggggaaaggggagaagggtgcctagtctctccatctactgtttccatcacaccccaactgtctgcttctttctcttgttagacagggagctttctaatagcagggctgagtcttggtcatctctgtttccccagtgcttagaagaggacctgacaccatctacaatctcatgagtgtttaaggcatggagagggatgggataggatgggatagaatagaatgggatatgatgggatgggatgggataggacagaataaaatgggataggatgggataggatgggatgggatggaatagaatgagacatgatgggatgggatgcgatgggatgggatgagatagaatagaatgggatatgatgggatggaatggaatagaatgagatatgatgagataggatggaatggaatggggtatgatgggatgggatgggataggatggaacagaatgggatatgatgggataggatggaatagaatgagatatgatcaggtggaatagaatgagatatgatgggatggggtgaaatagaatgatatgatgggatggtgtggaacagaatgggatatgatgggatggatgggatggaatagaatgagatacaatgtgatgggatagaatagaatgggatatgatgggatgcgatggaacagaatgagatatgatgggatggtgtggaatagaatgggatatgatggaatgggataggataggatgggatgggatgggataggatgggatggaatagaatgggatatgatgggcgggatggaatggaatagaataagatacaatgggatgggatgggatagaatagaatgggatatgatgggatgtatgggatgggatagaatgagatatgatgggatgggtgagatagaatagaatggaatatgaagggatgggatggaatagaatgagatatgatgggatgggatggaataaaatgagatatgatgggataggttgggattcaatagaacaggatatgataggatggggtgggatgagatgggaggtgatggaatgaaacagagtagttgtgacaaaatctcttcaaatcacaatagagacacttgctcaaagcagattcagaaagacaaaaatatccttaatgtggaaggcaattcacccattggtgcccaatgtctgtaaggctgggaacgtgcagatctccttggtgacatcagaccagtgtaagctctctgagtcctgcctatggaagaagcctccttcagagctgtcaaggagttcagctggaagggcgctgtccccacacagctctagacacagcccctctggctacaggcatcatggcaggtgtggttgtgcaggataaggagggcagctgaccacacagggtactgaccccagcccagcagtcatgggtagctctgtatgcc

SEQ ID NO: 20608 - DNA, 794 bp, Artificial sequence
  DNA replication origin
tcctttcttttagcagaaacgttgagactggaagaaaactttttgagagttgtgaagccctgaggtgggttaccaagtgattattttggcagcctcctttcctggagaggcaggaagactatgccaggagctgacctgggctcagctctctggaagactgagagaaactctaggtatggcattttgcagccagctgcatcattttttcccccaggagcaggcttagcatcaacaagatcatctcctccactcactcaggccacagctttattttgggggtcctctaggctcagggcatggggtggggtaggggaccataaaagggggactggtctacacaaagtcaatagcagacatggccagcccttccaggaacttcccatttaattgagggaatggaatatttggagttaaacgtatgaaatggtgggcccctagctattgggcagttataggaggtggacaccaaggctggcattgtttattgtggtgtgggaatgggaggaaataaaaccaccataaggagttgggagaaattgcagatgtgcttccaagttcccactctcctcagtgttggctggaagtttgacagtgacctggggtgtaccgctgccttcttttggtatgtgctcagattcttcccctccttcactgaacaagcgtttattgagcacctgtgctggggatgtatcagtggaatcagagcaaaaatacgagggactgcaattacatgaggaggtggtcaggggctctgctataagcaaagacttgaggaaggtgaggtgtgcgccttg

SEQ ID NO: 20609 - DNA, 1071 bp, Artificial sequence
  DNA replication origin
ggtgctgaggtgcccagcggctccggacgtgctacggggtgcgagcgcgggggagttcggggcgcacgacaaggaagggcccccgggagctctatatggaggaaggagcccagaatggtgtgcaccaggaagaccaaaactttggtgtccacttgcgtgatcctgagcggcatgactaacatcatctgcctgctctacgtgggctgggtcaccaactacatcgccagcgtgtatgtgcgggggcaggagccggcgcccgacaagaagctggaggaagacaaaggggacactctgaagattattgagcggctggaccacctggagaatgtcatcaagcagcacattcaaggtacgggcgccccggaaacttgggtcgcccatgaggcccgggagtgccccgcgcggcgcggggtgcgctggggctggtgcgcatcaactcagccacggcggggctctggggccgcagatgcgtggtagtcgtggggcctgcgtgtgagctcctgcctgcgttcgggaccttctgtctgcggccgtgcgctcttccccggggcacacgtgtgtgcgcagggctgcacgagcggatgtgtgcagctagctggcggtatgggggcgcgctgcgcacgtgtccaaatgtgcgtgtgactctgggctggttgctcgcgggctctcgggatcgcacacaagtccggctcagagtgtgtgtgcatgtgaatgtctgtgtgtgtacaagagggaacgcgcgggcaaacgagcttttttggccactgtaggcgtcaggcgagatgcccgcgcggcggccctgactattggcagttaagacccgcaggctgccggacaagcgaggctaggaaaattgcgttgtatcagccccagccccagtcttgctgtgatcccgttggtaggcgatagggaatgcaaggagccctctgtggttgaaaagccgcttgaacctatagcagtccctacccccaccacagcccgcgggtccaggaccctctccaggagcaggtgtcaacgccgggaagtagcgctggagtctctgtccactgtggtgatgactccgcccaagac

SEQ ID NO: 20610 - DNA, 850 bp, Artificial sequence
  DNA replication origin
cggccagcaggtggggcctgggagctggactccgccccccgctccctccccgttggtccgctgccgctcagcaccggcccctctcccgagccggagcgcgattggtggcagcgcttgtcgctcggagggggccgggccgctctgcttcgcggctctccccgccgccgctgccgctgccgctgttctcctagcagcgcgggccggtcggaccgccaaggcagccggcgctggcgatgggaagcggcgtggccgccgacacaggcagtggcaaagtttcccagacgtacacatctggacgcgcggctgccggctacccgtgacccctctaggaagggttcagggatttttaatttggaaaaaaatccacctggtttcctttgtcaaggtctctccgggtggccagcggcaggagctgcaaacttgggcacggcggctacaccggcagcggaccgggctttggagaacctcgggactcaggtgctgaggtgcccagcggctccggacgtgctacggggtgcgagcgcgggggagttcggggcgcacgacaaggaagggcccccgggagctctatatggaggaaggagcccagaatggtgtgcaccaggaagaccaaaactttggtgtccacttgcgtgatcctgagcggcatgactaacatcatctgcctgctctacgtgggctgggtcaccaactacatcgccagcgtgtatgtgcgggggcaggagccggcgcccgacaagaagctggaggaagacaaaggggacactctgaagattattgagcggctggaccacctggagaatgtcatcaagcagcacattcaaggtacgggcgccccggaaacttgggt

SEQ ID NO: 20611 - DNA, 941 bp, Artificial sequence
  DNA replication origin
cccggtccgctgccggtgtagccgccgtgcccaagtttgcagctcctgccgctggccacccggagagaccttgacaaaggaaaccaggtggatttttttccaaattaaaaatccctgaacccttcctagaggggtcacgggtagccggcagccgcgcgtccagatgtgtacgtctgggaaactttgccactgcctgtgtcggcggccacgccgcttcccatcgccagcgccggctgccttggcggtccgaccggcccgcgctgctaggagaacagcggcagcggcagcggcggcggggagagccgcgaagcagagcggcccggccccctccgagcgacaagcgctgccaccaatcgcgctccggctcgggagaggggccggtgctgagcggcagcggaccaacggggagggagcggggggcggagtccagctcccaggccccacctgctggccgcccctggctcccgcccccagggacgcgcccgggcctccacccgcgcctgcacaggctgccccagacctgaagctcccggagagggcgcgctgccagtcccagcccttaggtcggcagcttcctccgttaggggaattccatctcttgctcttgggcaggaatctcctggttttgtggagggggtggggggttcgcacgggtcagcttctttcatccgcccggggcttctcgcattggtgccaccagtcgactcctggaatcttttcttggttgccaggacgctgagaagccaaggaagtgccagccccagcggcatccactccttccttggcctcacttgggcctccaccctgccctctgcccttcagccaccggcctcctgagtgtgtccagacctggccctaaacctggctgaaaggagccaaccctccggcaacctcccagaagcaacattggtgacctattagatgactctctcgaccacttc

SEQ ID NO: 20612 - DNA, 958 bp, Artificial sequence
  DNA replication origin
ggtaacgggattacaataaaaaaaagtttggagaacacaagtgcaggcagttaatgctgtgggtgttaggaacatgacaagattatattatctcagcatgctgtaagatcactgtatccataaaagtcttcatgaaggagccccgccgagtctccataatggaagcaggatttggagaaatgacttctgcaaactttgtttagtataacacaaagcaccatgcttactactagagaagattaaaattctctaaaaaccttgttaacggagatcacaggttgaagcatactgcagctctactcttggaaggctagctcagtctcagacttggccctgatggagaaggaagttccctggaagagggcaggggagcgcctctccaatgtagttgcggggggcgggcggtgaggacaccgcttcataagggaaggggtggctgcctccccaagcagggggtggcccctgaggtccctccagctgggggcccttgagagggagggtggggagaggggaaaagaacgtcaggagagtgaacgggagcaaataaaacgctgtccattctgactggaagggccagagccgtgtctaagggcgggggccgggaggtggcccgcggtggtgtctctaccaggacgaggcctggggtatctgaagaggggatgacgtccaggcgctttgctaaagggaagccagaagggtatgagttgctagggtcagagatggggctttcggctcgagtctttccctgcagggcagagagtccgaagagcccgagaaggcagggaggacagtgggcctggtccttccccggccggcagagggagtcccgagatggaacgtccagctctcctctaacgaaaagcgtttgcatggctgtctcgccaattctgtacctcccggggctgaggaagagccgaggtgactagaagctagcgacaagtgccggccacctccgacg

SEQ ID NO: 20613 - DNA, 1494 bp, Artificial sequence
  DNA replication origin
ggccacctccgacgccaggcgccgggcttggagcccgacgggccgaattctcgcgagagcggccgccgccatttttccattgattgcagcgggctgggggaggggccgacgacgaaggcggctgtggtagcggcggcggcggcggcggagccctgggtcggtgtctgcgcgctggtgtctgaggcccaggctgaggcctccgctattgctggagcgcaggcggcggagaggatgactgccgctgccattctctcttgagctagcgagccgccgccaccctccaccctcccccggcagggcggagaggagcggccggagtcagcgatggtgcccggcgaggagaaccaactggtcccgaaagaggtgaggggccccagaggaggttaggccttaggcctgcggccgctcgaggcaacacaggcccgggccggggttcggctgcgggcccggccggggtgcaggctcggctgtgggggaatgaggaggcgtgaggcagtcgggggtggacggtgggtgcggcgagcagttgggagacccgctggctctaggggccggggagcggacctcccgcctcgggttttatggggctggacgaataaaggagcggacgggaaagaatcaggttctgctctaggggagaaggtggccttttaagttcttgtttaacgtgtggagccgggagagatcatttcaaagaaaacattctggaacagttgcctatgggcacggcagggtgacggtgctgcttctgggtttgacagtggcagcgtatagctttcagcgcttgtgaaatctacacccaagtgagatctgtgggagggcagacttaactgttacgacttttttcaactcctgttacttggtagtactattggcctgcctaaatggggcctaccgaagatcgtggaaaagtagtacatgggacattaatgtaaaggaaggagataggagaacattaccacatggagagctgaactctttttttttttttttttttttgaggttgggttgtgtatgccaatttgagtgacttcttaaattcttaaaagcaagtgatacgagaagccttgactacttggcttctcttgaatagtagtagaagatttagggtagaatccagcactggccagcgaatttcaacgtattaatagtatctctgttggctttataaatatcttcggcgtattcaaatgtgtatttttaactggctgatcatcaggctaatgctttggatttttatttctcatataccttaaatagagacaagtgttggattgaaattaactgtgtgcgatcttgaaattaatgagtgatcattacagattcttaaatttttttgtgcctgttttacttgttttgtagcaattctttgttacttaagcaagctctgacagtatgcaagggtgatattattggagttatgtacctgtatgatacaagtattttcccagctttgtcagaagggcagtgatagttgttttgcaaggacgattt

SEQ ID NO: 20614 - DNA, 969 bp, Artificial sequence
  DNA replication origin
gcctcctgggcagcctgggctccagacccctagaaccgactgctgattggacccttccatctgcatgacccaacgacctctcaaaccaatcctaaagggaatctacacctcccccagggaaaacctgctcctgctcctacgcccctgctggatggcacctcctcagcccttggctccctgagagtgagggttagggggcctcacctgtggggctggcagaggaggccactggcacaagggcatcggtccaaggctccatcaggctctagctcccaggtgatgaggtccagaagccggctggcggggtcatggcaaagctcgccctccacgggcaggggtgtgcacacagggaacagcaggcctggaaccagcccagagtcacccctgtgtgccccgtgtagggtagaagggctccaaagggaggggcaaagaaatggagcataacctcccacctcccaccctcaaccccaaagtgcaggctagttttgaagatacggaatgacaggaaacaagaatagcagcctgggctcaggagggaatgattggtagggctgaagcagggaggactgcctggaagaggtgggcttctgctggattttgagggccagaaagtctggagaaattaagagggaggcaaaggcattcaggcacagggacagcaccagcaaaggcctggggttgagctcagtggaaaatgtcagggccggtgaaattcccaaataggccaagaagtagtggagagaaaaggagggcaagtaagttggagctgcatgaggcctcacaagacagcctaaggagtctgaacatcgtgggagacaacaggagctgctgcaggtcccaggggagcaacacccaaaaagcagccctttaggaagatcacggaggcggcaggtacagggaggactagtgggctggggatgcagagctggggaggcggcaaatgagaatttttcaaaaccctagtggggg

SEQ ID NO: 20615 - DNA, 902 bp, Artificial sequence
  DNA replication origin
gctgctggcggcggcggtccccacggcccccgcgcccgctccgacggcgacctcggctccagtcaagcccggcccggctctcagctacccgcaggaggaggccaccctcaatgagatgttccgcgaggttgaggaactgatggaggacacgcagcacaaattgcgcagcgcggtggaagaggtgggtgcgccctggcggcgcggggctctgagaagcgccagactgggggcagcgaagtctgggaaggcatggaagagcgctggccagggacctcgggtcccgcgcagggcctgggaagggccgacagcagatgcggagtgacctggaggcagcgcacggtgatccctactcccgcctcgttttgcctccttgccaaaaagtctggatctgagcctgtccaccgagaggctctgcactggaccctccctaggtagctggggccaccacctgcctgcagttggcgtcaggcatgccgttggccttccctattgtcagcagaggtttgcagggcccctggtattccagcactgtggtttcacagaaacccgggacaagctccaggcatcgccaagttctagcttgtccgttatgctttgagcttgttaggatgccatgcagggacaaagaggcaaagagccctgagctttgctggcagtctgtctgggctgtcttgcttctcacgcaatgtgggggcagagagggaagatggaaatcctaaatctcagcactgtatgagtggcggatgaggatgtgagaggcaataccccctccacccaacggtgcttcgcagttgtcctgggctcaggtcctcctctgccactcagtagcagggtgacattgggcaaatcacttaatatcctgcacctcagtttcctgtgaaaactaaatgtcatatgtgtgg

SEQ ID NO: 20616 - DNA, 966 bp, Artificial sequence
  DNA replication origin
gaaagaccaaggtgggactgaggaacattccccctacccccaacctcggtgggctgttgcaagcctggaggccagagaagacgggcctgggatgccgcgggcgcaggggcaggcagtgaaggagatggctgccttcggtagagctggtcgctgaggcagaagaggagggcgtggggcgtggggcgtgaggtggccggcgccccggctggccaatggccgggctgcggcccctccgcggggcggggtgggcctggtgggcgggcggggctcggggcgggggcggagagggagcctggtgggcgggcggggcgcgtcttgcgggctccctcgggtaccggcgctgccgcaccccgccgcgctcccgcacccgcggcccgcccaccgcgccgctcccgcatctgcacccgcagcccggcggcctcccggcgggagcgagcagatccagtccggcccgcagcgcaactcggtccagtcggggtgggtgaggggcggcggcgggggaggggacgactctgctgagctcagcctctcttggtggatgtggggcggggcgctcgagtaggacccgacgccaaggggagggggctgacctgtgcttggtccaccccaggtaggggctgagagaggcttgaggtggaagtgggggtcgggcactctgacctggtcgaggaggggctagggtttgaaccggggacagagtctaggtgagctggggcttgggagctattagcgtagaggatccgggttcggttgctctggcgagggctccagcatcacaggtgaggagcagagctcagcttgtgctcgaggatgggggtgcggggtcctggggcgatcggggctcgggctggagcgggtggggtcgcgtcttttcgggtgtaggggagctgcgttttcaggggcctcggtttcctcccgtctccgggcgggtgcgggaaagaggggcgccaggggcgggcggcgggg

SEQ ID NO: 20617 - DNA, 1187 bp, Artificial sequence
  DNA replication origin
ttctttcctttctttttttcgtttgtagtttaacctaataattgaactactgataaattattacatttgggaatacaaaatgtagactccacacaagaaaacaagcgtccctttgcctgacacttggggcagttcgatatagagagatttttaggttgactctgaaagtcaagacctccagaccgcatggtagaaggtgtaaggcagaagacaatctcagctggggaaattcctggtctttaagccagcaacatgaaggactggaagagcatgatgtgctctgtaaacccgcagcactgcatttcctagctcggccccacaatatgcccccacagcaccctccagttcggcattagtttcttcctaatgtccactctgcccgaagtgacaagcgggggcatgtggagactcagctccaggttcctggacgggctcagccacccccagaaagctaatgaatgctcaaccagggcttccagatgcccaggggacagagcaggagatgccggggaatggggctttccttgcagttcaggagggccctgccccaggcccagaagtagaagggaaagcggctgttttggcggtaaacagtaatgtggggagtgctgcagagaaaggcagtcttggggtttcaagctggagagcagtcagctacactcaggacctctggccatccctgccttcacctgctgtttggcctgatcgtctaacttctctgattctccactacccactccttattacgtttttgagacttgtcaaagttttatattagggctaactgggacgcatacaaatctggtaacttcgccagggcgggaagttaggaaggagcagagctggctgcaggtgtctggtcctgaccactcctctatgccacccttgaggagcttgctgactttctcatgacgttctcccattccaggagctgcaagtgcgttatcctggctggagcacggtgtcaatcacggcagactaaggccagcggtgatggcttgaatgccaggctgggggctgggatttttcctgaggatttcacaggacagaggttggcttggaaagaccaaggtgggactgaggaacattccccctacccccaacctcggtgggctgttgcaagcctggaggccagagaagacgggcctgggatgccgcgggcgcaggggcaggcagtgaaggagatg

SEQ ID NO: 20618 - DNA, 1291 bp, Artificial sequence
  DNA replication origin
gccgggtgggtttgaggcgggggatgctgcggccgcacctgaccctcccgggcgttggacacggcgcagagtccagccgaggctggcacggtccccacccgcgcccgcccgccctccccaccctgaggccagcgccgcccccgccttaccgaaagtcgcgcgggctgcccggccccgggtcaggcctgcctcggccctggccgcgggcgcagcgatcgggccccgcgggccactgacagagctgggagcgagcgaggcggcccggcgcaggcttagccagccgagcgcctgcggttctgcgccgcgcggtggaccgggctggggaacgcccccgacagcggcgcggccaatgacaggacagcacggagcccgccccgcccccgtggggccggctgtcaccgccgctgccgccggcgcacgtgggctgtagcccggcccagaacgcagggagtggccgggcgctcccaccctgacccgcacagggcggagaccaggggagggctgctgggagtggggcgtggtggcgctgcgagatgaaacccccggtgttggtaagcgggtatcaagggagcggcgagggcctgggcctcacgcttcttggtctaggcggctggaaagcaagacacggcatccccttttggacatgggggagcagcatggcacttctagtaccgactgtgtacgtcctgtggacctccctctttgctcggctccttgaccaccctgagcttccgcaaacctccttgctagctaataggatcttcccctcacctggccttgcttggctaaagctagtgggaagggggcggtggtgcagactacctgtgttaccttggtcagatcacctaaacaccctctacctttggctgtcatatccctatcttaatctctgctctgcccaccttcccgggttacccttaccccccacagctccagagagcaacattcacagacaacacagtgtgaatggagtggggcctagtgagcaatcagaagcactctgtagactataactactgtaaaacaccttgtgtttaaacggctcttgtagcagttatcatgaaatggggatctccatgggcaggaaccatgtctgactcacctctggaacccagggcccatcacagggcttggcccggtgtaagcatcaataagtgttcttggaactgagctacctaggcagaggaaaacaggcaggcttgagcagtgagaaacagtattgtggctccaggctgctggaatttccccagcacaagaccacctccaggagacaccatgttcccttgccaga

SEQ ID NO: 20619 - DNA, 840 bp, Artificial sequence
  DNA replication origin
cctggtctccgccctgtgcgggtcagggtgggagcgcccggccactccctgcgttctgggccgggctacagcccacgtgcgccggcggcagcggcggtgacagccggccccacgggggcggggcgggctccgtgctgtcctgtcattggccgcgccgctgtcgggggcgttccccagcccggtccaccgcgcggcgcagaaccgcaggcgctcggctggctaagcctgcgccgggccgcctcgctcgctcccagctctgtcagtggcccgcggggcccgatcgctgcgcccgcggccagggccgaggcaggcctgacccggggccgggcagcccgcgcgactttcggtaaggcgggggcggcgctggcctcagggtggggagggcgggcgggcgcgggtggggaccgtgccagcctcggctggactctgcgccgtgtccaacgcccgggagggtcaggtgcggccgcagcatcccccgcctcaaacccacccggcggggcgcacagtgagcaggtggcgctgcgacgaagcccggggcggccctggccggcctctgaaccaattagaacgcaataaaagcctcccaccggcacgccgaactacctcttactccgctccgcaacacccaaaccctgcagttccaagcctagaaaatcgcaagcgccaaaacggggtgggagtgacgcgcctgcagtgctgcctgtcacctggcagaagaccatccccaaacttcccaggattggggctccgagccttgcacgccccgttccagctcttcactgggcgcccttttccccctcccctgtcccctccctctttagtaacaggaagttaagttgg

SEQ ID NO: 20620 - DNA, 1820 bp, Artificial sequence
  DNA replication origin
tcccgccgcctccggccgccaagcggcgcccgcccacggcccggcgggggcgttggcctggtccccggcccaggagggcagcgcccgggcgaccgcgagcgggcggggtggcctcgatggcccgcgagccccgggctcagtgtggggtgcgcgtcgctcctgcccgacgtacccgggaagcgcgcgcacgcatcgccgcgcgccccaccgcgccgggcacccgcggcgcgctcccgcccggtcccagtgccccggcccctcggcccctacggcacccccggctcctaccgcccgcccggccggcctggccgcactcaccctccttggctttcttcctccgggccagggtccctccgagtttccccaagaaggaatcatctttcttgcgggacgggggcgacttgggagtgggagacttggggacagaaggcgacttctgcggggaggtggccatggcgcggcgcaggctgccgcgggccggtcgggacgcggagctggcgctgggcggacgcagcgggcggcggcgggactgaggctgcggctttccaaacggaagcggaattattccaagcatttgaggcagctcacgctcgcctttcccttccctcgctccctccctcgctccctccctcgcgccgccctctgccctggaaggagctgcgctcccggggccgcgccttgcgcccctgggttgccccaagcagggaggatgccccaaaactgccccttgcaggacaggaggacgtgtgtgcccaggttgggagcggtcgagccggaaagcttcatttacccaggctctgtccccaccacacagcctggcgcaaaacacatctgagaaccaacccaaccctgctactctcccggggtcttccagccggcggctggtgagctcgctctgccccagcactactgcctgtggggttatcaggcccacgtcttgcgcccacaagactgcagctcctggaagaaattattgcagtgaaccaaaatgtgtccaggccccaccaaagtgggcagaaccaatcactcctgaacctatccatgaccgtcaacctcctcgtctctactcccatccaagactgagaagcttggagtgcacaagggtaaagccgaggcttcttattcttgtaagacatccgtgtttccagcagcttatacaaaggaagatcccacgtggtggtggaaacatgaatgggaaaagcacaaccatgagctcctacaggacttcccgcaaaatttatcctgcctaaataaaagcaagagagtgacaaccagactcatttgagataacaggggagtcatacaaagcacagtgtttgaaggactcatactggaaatgattaaaaggcacgtgttattgagcttacccatctcaagttctcactctggctctttgtccttctgtctgtctctcacacacagactcacagcaccttggcaactgtgtttcctccttgtggccccttctaggccacagctgattgaacctgggtgaacacctaatccaaagggcgctactgctttactgaagagcagacgatcagctggccccagttaagactgcactaagctggagagactgttgtcagaagttgtgctcgtgactgatgatcattcgcaatcaaaactagggtggctgtttctagccacgtgcatgctgaggagtagggaaaccaaagaatggagcaaagaagtgtgctcaagaagccacgtggtctgagtaatggaaaccgtggggagtagctgcttggaccttgaatcttttcccagaccccacttgcacttcctgccagggccagctgtgcttcttcccaggagat

SEQ ID NO: 20621 - DNA, 1133 bp, Artificial sequence
  DNA replication origin
gcatgggtgtgggcacatgagtcaggggatgtgggctagggggcctcccttgatgtcccttctccttaccttctgttcaaagctgtccggggtcaggaagaagctgtgcaggggcacaaagtagccctccaggagccccatgagcagcaccaggtacaccccatctgcaaactggaggaagagccaggtgatggcactggcccctgagcctcccagccaatccccatccagggggcccatcaacttctgtgctatgccacctgaagcctaccaccccagccaggctgctagctcgggggtaggggcagtggcccgagacaaggaggtctgctctgccccacgtctggctggcacaggagccacaagcccaggccctgatctcagctgacccagcatttactgaacagaggctgtgtaccaactcctggtctaggcatggggaccagagcatggtggggggtggggggtggggggtggtcagtgtggctcctgccctggaggagtacacagtctaatagggaaactggtgtgggggcaaggcacagctgctctgatggaaggaagctcgctggcctgagtgaggttgagaaaggtcgcccacaagcactgaaggcatcagaggagtcttctggaggggacagagcctgagtggagagctgaggatgagcaggattggctagagtgggacagagggaggagggggaggtgatgtccaaggtgaatggcatgaggttcctggggagatctgtgctttctgaacagagaaaggactagtgtcacacagggctgggcattctttctcccatctctcttcagtattacagcagcagagtgcagctgttatgaatgtgggctctggggccaggcctcccaggtgcaaattccagctctctcacctactagctatatgccttgggcaagttatgtcacttctctgtactcatatgtcttatctgtaaaacagggatggtaatagaatagtatctatgtcacagagttatcgtgaggactaagccagttaaatatgcagagagggcctgtaaactgctaggcatgtagcattgaataaatattaaatgttgctattactgtctgggaaaacaacaaagcaatcaggacatgacttacttgct

SEQ ID NO: 20622 - DNA, 1398 bp, Artificial sequence
  DNA replication origin
cagggtggaagcgagtctgcaaagtgcttggtgggcgcccgcggcgggcggcggggccgcggcggcggcagcagaggctcggctcggctcaggcggcgcggcgcggcgcgagcgatgctaagaatgttcggaatgaggacaggaatgaaatgaacgccaggaccgaactcgctccggaggggtggggcctcggtgacgtcatgcggcctgccgcccggggctggaggcggggcctgccgccgccggtgacgtcatggggaatcggggcggaccggcgcggctgcttcgccgttggggcgcgggctttcggcagctgggcggagtctcgcgcccacgggggagcgtggctcgcgcgggagccgccctccgtctcccggcgcgggctccgggctttgtcccgagccggggcggggcggggcggggcggacgggagctgcgcggcttggaagtccctgcgctcgcgcgaagaactctggaagcctgggtttcttccagggggcaggcgccgaggcgggagttgcgcgcgacgcgcctaccgtgcctcagtttccctagtccgggacgcggaagcgcgggtgactgcgttgagtgctcccggactcgcggaagtctgcaagtgtagggtagagaagttgcctttctggtgatgcagattgttgctctcgagcgcggtggacgccgtctccgggccagattcccagcctgccatttcttctcttccctttcacttttataaaagttcacagctctcactcaagtcgaaatctgtcttacggttgggaaaggaaaacctttagcttagcaaagaaggataattacagagttcgtaataaacctgccctgctagcaaggtcttctccaagtcagttaaaaaactaagttcactcatctctgccggttgtacttttcaaaagtaacttcctaaactttgaaatgctgcatccggcgactttaagttagccctttcattattgagaaacttcatttcattattaaaggaatcattttaaccctgccattggaggtagtgacgcaaaagtgacatagacgcagtcggtaaatcagaaaacgggtaaaatcgacccactggggacagaaccgtctaaagtttcgggtgattgttataattatttaacaaactgcaaagcagttcccgcacagtggacctcattcgttctaggcacttggctctcttttccagctgaggcctcaggattaaataacaacatattttgtgcccgaggaatccctatatccctatatatgggtaactgaggagactagactgtgactgagtgcaacacatttctacaaaacataacttttactaatacattgttttccttttttttaattttttttttattttatttttggagacaggatcttgctctgtca

SEQ ID NO: 20623 - DNA, 1040 bp, Artificial sequence
  DNA replication origin
cggcgcggcccagcctggccatgacccaggagaaacagcggcgagtggtgcgcaaggcctttcgcaaactggccaagctcaaccggcggcgccagcagcagacaccgtcgtcctgttcgtccacttcgtcgtccactgcctcgtcctgctcttcgtcgccgcggacccacgagagcgcgtcggtggagcgcatggagacgctggtgcatctggtgctttcccaggaccacacaattcgccagcaggtgcagcggctccacgagctggaccgcgagatcgatcactacgaggccaaggtgcacctggaccgcatgcggcgtcacggggtcaactacgtgcaggacacttacttggttggggcaggcatcgagctcgacgggtccagaccgggagaggagccagaagaggtggcggcggaggcggaggaggcggcggcggcgccccctctagccggcgaggcgcaggcggcggcgctggaggagctggcccggcgctgcgacgacttgctgcggcttcaggagcaacgggttcagcaggaggagttgctggagcgcctttcagccgagattcaggaggaactcaaccagaggtggatgcgacggcgccaggaggagctggcggcgcgggaggagcccctggagcccgacggtggccccgacggcgagctgctgctggagcaggaacgggtcaggacgcagctcagtaccagcctttacattgggctgcggctcaacacggacctagaggccgtcaagtcggacttggattacagccagcagcaatgggacagcaagaagcgcgagctacagggccttctgcaaactttgcacactttggagctgacggtggcaccggatggggctcctggctctggcagtccctcgcgggaacctgggcctcaagcctgcgccgacatgtgggtggaccaggcccgtggactggccaagagcggtcctggcaacgacgaagactcggatacgggactgagctctatgcatagccaagactcggactccttgcccatgtgcgaatcccttgtg

SEQ ID NO: 20624 - DNA, 1076 bp, Artificial sequence
  DNA replication origin
cagctcagtaccagcctttacattgggctgcggctcaacacggacctagaggccgtcaagtcggacttggattacagccagcagcaatgggacagcaagaagcgcgagctacagggccttctgcaaactttgcacactttggagctgacggtggcaccggatggggctcctggctctggcagtccctcgcgggaacctgggcctcaagcctgcgccgacatgtgggtggaccaggcccgtggactggccaagagcggtcctggcaacgacgaagactcggatacgggactgagctctatgcatagccaagactcggactccttgcccatgtgcgaatcccttgtgtaggggtggggggcggggggcggggggcgggaacagggggattcttttttcttgcagaatgcagtgggccagccggctcgcggacttgaaaccaggctgttgcgagcccagagctccggctgggcagcagcgctctgcgcagcctcgcgctcatctggctccggggtgagtgcagagcagggtgagggtagaagaagtaggatcctcaatacaagctcattaaagagagggaaggagggaggaggcaagaaccccctatactggaaaacaaacaacccaaggaaattgacgtggtccgagcccattttcaaagtaaggaagtataatggagatttcgctactcttctgtatgggaaggactgatggcagctagaactttagtttgtggtatgaagtgctttaaaagaaacacttggatgaaaaggaaattccttgaatgttaattgtgactgtaaacgtgttaaaactagccaaagaggacgcactggtgtcggtctctgcctttcttacctctttgataaaacccataggcaccaaaatcctggctgtttacatttctgcagatttgggaattacccatctgctaaatcatttgtcttttattttctttcaaaggctaaactgtatcgaagtctaaccctgtatttcctcctagtaaacacaatagatgttaaaagggaattcttttcccaaaataaccttttattattacaaaagccaaacataatcat

SEQ ID NO: 20625 - DNA, 1059 bp, Artificial sequence
  DNA replication origin
tccccgggagcttcggggatccccgaggggaccatgcctggtggctgcccctcaagggcgttgggcgaacggtgccgcgtctgcccttcctccccgcttcacttccctttcgggagcccgcgaggctgggtgggggcggggagggcgtctccgtcgggcttggggagtccaagtccgcccgccccttcggccctgtagccagggctggcgctgcacccgggaatccccggccggcacggggccgaccccagcctgcgaactttcgtggggcctgtgccgtccaggtcctgggcggccctcaaggatgccccgtgggtctgcgggcaggtgcgcgtcggcctggggatgtcgcccggagcccgggtgcgggccggccttggagtcccagagctccgcggagggcgcagcgagcctggctccagctccgggtttgacagatgtcagggaagaaaaggttcccgctcggctattgccgggcgttgacatcccagagagcttcccgtttgcttggaagaagacgaggaaggtagaggtgaacgtcgaccttgtggggcgcatgttagcctccccgaggggtcgcgagagccggcagcggggtgagctcaggtgcccgccggcaggagctggggagggaaggggagtgctggacaccggcgcctgctgtcaagttctcgccggccggtgagagacccgctgccgccgcgcaccccgcacctcctgacccctctcccctctccgcctcggccccttcccggtcacctagcgttgttttggcgctttggcgcttgcggtctcttccttcttccaccgctactcctcagcgaggaattattagccaagttttctcacccagcttccaaaaatcagattccgtatttgtgaacaagcttttcttgacactacccgtatacccgtatttccagcatcgtcgttttattaaacatccataaaagctgccccttagatgcattcatttcccacgacacctgcttgcttgtcatttgtccttctgacatctgctgttgttcacccctttaatctattattaaatgacaacta

SEQ ID NO: 20626 - DNA, 1175 bp, Artificial sequence
  DNA replication origin
caccattaagtgtaaggtcagctgtggatttgttgtagatgccacttgcactttgctggcatggttgtgagtaggactgtgggttttgtgtgtttgtgtgtgtgtgtgatgtttggctgaaatacagtggttattatctacaagttttctgtcttgaaacagggagatttgttggggcattttctctttgtgctccttggcatttctgagttgctggtctcctcagttccaagtctgagctatatgcagaaaaggaaatgcaggaagctcaccactgtgttgttccttggatcctgaggtcccagctggtctgccttcttcagactgccatttggagtcttcttatagtcatctagcatagaatgcccaggggttttcattgttcttagcaggtggaatcagggaaagtgcacctgctccatcctgctgggagtggaaatggttgggggaaattggagcgtataggtcggggctagtttagatgcaagggctccgttctgtaggtgcaggagggccgtggaggctcagccctgacagcagtgggagggggatgggaagagggggagtggagagagcctaggtggctgctgcctgtgtccaggcaggaggtcctgaagtcctgaggtcctggccgtgacagtagaactgcagcagaaagaaggacaggaagttccatgaggacagtgaggaagtgcaaggagaccaggttggtctgaggtttctagctagagcagctagctggttctgagataacagagacagagggaggggtctaagcgtggcagaggggtgtattctaggcattgtagagcagatctggaagactggacttactgtgcttcccctcaggggaggcttcacagaggaagtctggctgctggggaaaaatccagggagtgtgcattctgggcagaggaattctggctgctgggtaaaaatccagggagtgtgcattctgggcagaggaaacaacgtgggaaaaggcacagatacagaaaacggcgtgatgggcctgttgggactccagctagctgaggcataagtgggtagttactggttccatgactgggaaggatgctgtaggagtgcacaaaaggaagaagttctggaatgcgagttgatgctgccagcggtccagttggctccttgccttctgttctttgtgtgttggcatc

SEQ ID NO: 20627 - DNA, 1333 bp, Artificial sequence
  DNA replication origin
ggagcggcgcctcttttcgacatccgcttttgattggctctcgcgcacacccttatccgcaggaccagtcatcctcctccctgctttagcctctcacccccaacccggtttccctccgggcgggagtggggcgggagcggacgcccgcggaacgcgaacggccaatgggggcgcggagagagggccgggaggtgggccctgcggccgggaggctcgcgggggaatgctcagccaatgggcccgcgccccacatctcgagtcctggagcgcccccgccggctgctggcgtcctgtcgggtcgcgcccagggccacgcccggctgtccgtcgcgcgggaggggcgccaactcccaaggttgggagcacgcagcgaggcccgcgcgggagacagcggggctgccattgtggcgtgcttagcgctattatggtggggcccgggggccctccggccattgctgggcgtgagggatccgttcggagaactaccagcttggcgggtgtggcccgggtcggtgagagcgaagagctctacggacccctggagcctccacgggtctcgcccagtcccaggggactgtgggcccattcattccaccttccacttcctccaaaataattccctacaaaacttaccggtagtgataggagttagaataacgtttacttctgaggggtggggcacgagggaacctatggaaagctggaaacattgcgtcttgatcctggtggtcgttccgggctgtgtacacatggaggaattcatcgagccggacacttaatagtattaccacattcatacggctcatttttaaaaaataataaaaggatcatgagaattctgtaataatattaccacaatctttgggctccgtgggactccattgtataaacagtccgcattaggatttagctgtcattcaaaacatgcaagccataggaagaaaaaaaaagatttgtgagaagcaaaaatgagtgaacgctcttggcacggtgaatagcatgcacaggttggtatttagggatggatggctcagagtgatttttctgtggggatttagagcttgtttcagtgcctggccctgttagtagctaaaagcagtcatagtgctgcatccagttggaaactacaaaagctcactgaactgcctactttgtggcagatgttaagttctggctcaggaaactaatttgaatgccatggcttctgcctcgatgagctcacagtcttgcagcaagtactgtcatttctggaggagggcacagaacacaaagctaacacacttgcttaccctcagggatgtcgcattccgctactttaggcaagacagtgtat

SEQ ID NO: 20628 - DNA, 1187 bp, Artificial sequence
  DNA replication origin
ggggccggctgacgcgactgcgggcctcagccaatgggcgtgccactgcccgtccgctcttcagcagccggtcgcgggcggtggaaaagcgagtgaagagagcgcgacggcggcggcggcggcggcgcagctattgctggacggccagtgggagagcgaggcctgagcctctgcgtctaggtgagaagggggtgcgccagcgggagcggccgggctgcgggctcctcctcgcctggctcgggaagtggttgcgggagctcgggctgcaggcctggccgaggcgggggcgccgaccagccgtcccgcccccgcccccgcccgggtacgcccagaagtgagggcgcccgcctcaccccgggtggtctctgcccctctttgccccgccgccgcccttcacagggccgggaccgcgtgggggacgtacggtggggcctggtttgcagccgcggagcccggggagccgcctggggtgggaggccgctagaggtggcgaaggtggggcggggtggttagccgagcagcgggctccgcgtgctcgcgggagggtagcggcaaagggaggcctagtgattgcaggattccgggtctggggaggaagaaagtggtgggaaataggtgatgctcagaaaagggtgctgagggagaaggcgcggggccggggagtgtggttggcctattagaagtaaggattgatagggcctgggtggagatcagctgggagtgaaggggggacgggcttgggttttgaaggtgaaggtctctggagaactggggacacgtggatctggagtaagaggcacctactgaaaccggaaggtggctgagaaggttttatgtgaggtgtggacgggaggctattggactagaaggcattagttggtctgttaggacaaagtatacaagcagcaaacgcggtagatttatgtgtggtaggtgaaggctgtgaatcttttatgagtagttgagcaagaacagttgtctgattctgcggtgtcggagagtggagggtctcaggtagtgtcttggtcaggtttgaaggttaatttactgctagtggagggccaaatactcaaaagagtttttaattctcactactggggctgatcctcctcctacactccacccctcctgccatccctgtgacagttcatctcgttttgcctcagcagcacaagaactcactccct

SEQ ID NO: 20629 - DNA, 1074 bp, Artificial sequence
  DNA replication origin
cctccggcaccgcgaggtcggcgccctccggggaccgggtcccgctctcctaatgccacgccgggcggccacttaccgcggtagctggttcccggcttgtagaagtcggggtcgccctccacgcggaggctgaactcggtgtagccctcgcgccgcgtgccctgggcgcgcaggatacggctgcagtagccctctgacttgggcactttgtccagggtctcgtcggagaaggccagcgccgcggccaggggcagcgccagggccagcagtgccggagtccggctcagcttcaggggcgccggggacagcctcatcttcgcggcccccaactttgtgccgcggccgcaggccttcgccacgcgactcctgcccgaagtggtcccgacgaaggcgcgacctggcggaggcgcggcggagagagggagctcggagctggcgtccgcgactcggagaccgtgcccgcctcggcttggcggccgcggagctgcgctgagctgagctgagctgagccaagcgaacgagagcagcgcgaggaggggagggccgcggcgaaggagcgggaggagggagggctgattttgcccagatcccccagcgcagcgctgttttgtttcctccgaactggcgattagcggcgcggccgtgtttattttgcgacgttggattcccagggtctgacgaagaaaccgtggcataccggaccctgtgggctctgtcccatcgcctaggaggctgctgctccaacccccagctacactccggaccctctggaggacggcgctcagaggagggaaagcctgagaaataacttttgttgcacacctgctctgtgcctagcaatatgcttggcggcttacttactgtatcgactcgccttcatgttccctactcccaataaagattacattactttcgctcactttatagatgagcaaactgtgacttgcgaccagttacagcagggttagatgcggcgactccgggcccattgctcttcccaaggccatagtggaacatgtcagactggaggctgagaaaggagaaacgacttagctacagcgcttagggcccacg

SEQ ID NO: 20630 - DNA, 1647 bp, Artificial sequence
  DNA replication origin
ctcaggcacactcacctttgtaaactcatttactccctaccaccaagagagggtggataaacagcttttttttttttccagctaggaaataggtgcagagaaattaaatgacttgcacaaggtcacacagcgagtaaacccaagtctgttggactccagagccacttctttctctgctacgtggagcggggacagtttcccctgtgaactcaggtcctcagttttggggagggccgaataggccactgaagtcatacccgcttccctgcggtccacagggaggatcggccgcctcccggctgcaccgagtggcagtcgccgcccgtcggcgcggctcgctctagccgcggtgccaagccgcgcgctccctcccgggctgggcggggtgttctccgcccagaatctttcttcgtggagtacccaggatcccgcggagctgcgcgccggggtcagactgttcctcgcaaagtgctcagcacgccaaggtgccaagggcaccaaggagccggctttgggtagctccgggtggagaaagtcggggacacaaacccgggaaagggggaaaagcgctccaagaagggtggcccctggctttggtctccggcgtgaccctggcgcccgctgacgctgccccagactttctcctgtgttgctcccaccgcttccgtccaaggctctctggggaactgggaaggcgaggaggaaagtacagcagctgggagcccatttgccccaccaggtgccccagtgacccgctcatccctgcttagcaccagagctgacttatgaaggggcgagggtgagaggacacgctccctggcgggagctaaggtgaggccagacaggctcgcttcccttcctggttacctgtcccccacccggagagcggctgctgctgcacggggaaacgatgtctggggagatgaccctgctgaggagcgaggtggcgggcgtggggacagagtcaggcgtcttcagatcggtgctggtcgaactgcctgtcccgcctaggaggctctcacctgcttggacacctcctccctgagctcccgaaaccccactctcagccgagcggcgtaggcgcgacatccctgggacgtggagactccgagctgccggagccaaggttccccggcctccagggagcaggcctcgggcatcggggcttctctttccatcttcatccaattccccttgcagctcggagcttaccccaagctctttgaggaccctgtccccactgggaacctgttctggaaacccaagatactctatctcgtctgggaccacgagagaataatttggggttctttccaaggaccctttcgaggagctttaggctgtccctgcccctccttcccgcaccccgggaccggttagggagaagccaaagtcccttctcctgaagggacctatccagggaagccggagtggctgtcccgcccagggccagtctttgagaatcgggtaccctctccttcagggactgagcggggaaagctggagtggctgccttgcccgggacccgaccaagagaagcctgggtcccctccagaccgatttggagaaaggcagttttacttccctcctgcagacggccgggggagaagcgagcctcccttgcagtcaggccggcgtgacgtgtgg

SEQ ID NO: 20631 - DNA, 1273 bp, Artificial sequence
  DNA replication origin
gggcacctggtggggcaaatgggctcccagctgctgtactttcctcctcgccttcccagttccccagagagccttggacggaagcggtgggagcaacacaggagaaagtctggggcagcgtcagcgggcgccagggtcacgccggagaccaaagccaggggccacccttcttggagcgcttttccccctttcccgggtttgtgtccccgactttctccacccggagctacccaaagccggctccttggtgcccttggcaccttggcgtgctgagcactttgcgaggaacagtctgaccccggcgcgcagctccgcgggatcctgggtactccacgaagaaagattctgggcggagaacaccccgcccagcccgggagggagcgcgcggcttggcaccgcggctagagcgagccgcgccgacgggcggcgactgccactcggtgcagccgggaggcggccgatcctccctgtggaccgcagggaagcgggtatgacttcagtggcctattcggccctccccaaaactgaggacctgagttcacaggggaaactgtccccgctccacgtagcagagaaagaagtggctctggagtccaacagacttgggtttactcgctgtgtgaccttgtgcaagtcatttaatttctctgcacctatttcctagctggaaaaaaaaaaaagctgtttatccaccctctcttggtggtagggagtaaatgagtttacaaaggtgagtgtgcctgagctaaaagagattcctaataagcctaacagttgaatgtgaggcctttattggtttactaatggaggtaggttcttgatcagatttttgtttttgaagagtgttgtgcgtttgaaagcaggtttcctcagctctcctccagtcccattcatctaccagtggttatttgggtcctcatgaattaattgaatgaatgaatgaggtattttttcatatcaggagccttgcctaagactgttgctaatgcaagcccaggaagattttttcagtgacttagactagtctgaggttcaggccaagtgtacccagcgtctcttttcacactaatcctccgtgttttagttgagcattggcagctggtggccctagcactgggaaggagatacagctggtattcacggggccaaagaggtttcagaactacctaaacgtccagggccagcaggtggggaactgggactggatagggagtgtcctggactttcaccctacaggctactcctgcctaaacagccatctggactttgacac

SEQ ID NO: 20632 - DNA, 1614 bp, Artificial sequence
  DNA replication origin
gggcaggcccgctccaggtacctggatgaactggatggtgagcgccgacttgcccacgccgcccccgccgaccaccacgagccggtacttctcctggccggagccgtcccgccagccggccgcggccatggggacgctacagagcccagcctgactgcgccgagccgccgctgccgcccgccctaggcccggctccggggacgtgtgcggccggcgggctgcgggcgagcggccgggctggggtcccgggtaccgggaggcgtctggagggccggtcagcgcggtagcgcggcgctggggactggctgggtaccgcccgaggcgcggagaagcggggtgacggcacgggccaggggcggcagcggccggggggcgcgctcctctacgcgtctccgcagcgcctgccgaacgcagcctccagcgccgccacaaatggccgtctgggggccgggctgccaggctgaggtgctgcatatgcatgagggggcggggaggggcggggccgcgccgcttggggctgaggttcgggaggtaacccgggcttcagacccccacggacacaccgctctaatccctagccagtgagcgagtgcgtgagagtgtgggagtgggtgtcagttgggagtgggacgaaggcagaaagagtgtgtcaccctaattgtctatgtaagggattgtgtggatgaaaaatacaatatgtgacggcgtgtgcgaaaaatagggctgttggcatattaactcaattttataggagagtacataccctgctttaagagtacagatggtgaccatatttgtgtgaaaaacagtatgtgacagtgattgaggattagagctgtgtcacagtaattgagtgtgtgatgggctggtggttgtgacagtgtgaagaatgggacagtggctgagcatggagaataagtcagtgattgagcttgcatgggcaagacggaatgtgacagattttgtatgtgtcagtacagtgtcatagtggctatgtttatgtgtgacaaatgtgcagtaattggatatgaggagtgtgagtgcgaggggttgaactcctggcctcaagcaatcctcccgcctcggcctcccaaagtgctggaattacaggtgtgagtcactgcacccggcctcatggggtttttaataagaattaaatgagcacataaaacagtgctgctacacaggaagcatttacagcaatcttggaacatgactgcaagttcttggacttcacttggtaactcatttggaaccagtagaatgcagcagaagagatgctgcctaatttcccaggctagatcagaagaggccatgcagctgttctcttggtattctcactccgggaggaacaaagtcagaagtttgactatcataagactgccatgctaaagaggctacatgtaggcatgccagtcgaagtctgattgatggccaggagcaacatgccatttaaaaaaaaaaaaaaaaagtcccactgagctcccaccagatcaccagcatcacctgccagccatctaagtgagacatcttggacactcagcctaatcgagccttccaatgacggcatcccctgttagcatctgaatgcaactgcgtgagagaccccaagca

SEQ ID NO: 20633 - DNA, 859 bp, Artificial sequence
  DNA replication origin
ctctctgagtcgccgtaggtgctaggtggctgtggcttcggtcgttaccccacccccttccacgtcagccaaggactctggagccgccgccgccgctgctgcggttcatagccggagtagacggagccgcagtagacggatccgcggctgcaccaaaccactgcccctcggagcctggtagtgggccacaagcccccagtcccagaggcgtggtgggtcgggcagagtcggaagaactggctttctagctggaagatgcggaaggggagcgactaggccgcttgcgtctgggcctggcagaagggaccgggtgggggtacgggtgggggtgcgggtcggggtgggggcggagggctaggaagctccgggtcggacgctccatcccgtcctttgtattggccgggggtcttttccctcccaagacccctaggcgtaccctttcaggcctagggctgctttgctggaggaaggggaggaggaagcgggtggggcgaggtgggggtgcagcgcgttgattaagggacccgcggacatagagtcggaacccaccaaggaccgcgataaagcgctttagggttttggcagagtattcaggcacaaggtctcttaacttgagcatgcagattgtgtgttgtgtaaaaaccatacggtccataacattgtggggtgtggctggggggactgtcactgttctgtgggccttcattcggctatacagcattctcaaacactggaccgggatgcgatgagggagtgatagataatataccttatgccagagctgataatgtggtttttactagaatttatttttatgggaacacgatatagattgacctgccctttctaatactttaaa

SEQ ID NO: 20634 - DNA, 1297 bp, Artificial sequence
  DNA replication origin
catttattcagtcattcattcaaaaaatgtttattgagtacttactgtataccacaaattgttttaggcaccagggataaagcaagaaacaaaattctacaagaatatctgccctggccgggcacagtgactcatgcctgtaatcccagcactttgggaggcccaggcgggcggatcacaaggtcaggaggttgagaccatcctggctaacacggtgaaaccccgtctctactaaaaatacaaaaaattagcagggtgtggtggcgggcgcctgtagtcccagctacttgggacgctgaggcaggagaatggcgtgaaaccaggaggtggagcttgcagtgagcagagattgcaccactgcactccagcctggggagcaaagcgagactccatctaaaaaaaaaatatatatatatatatatagagagagagagagagagagagactgtgtcagagttgagacggggtcgatgaggctgaccccagcgggtagaagggacgaggaggagcgagcagcggaaggtcctggtgtgtccggaattggtgggttcttggtctcactgacttcaagaatgaagccgcggaccctcgcggtgagtgttacagctgttaaggtggcgcgtctggagtttgttccttctgatgttcagatgatgtgttcagagtttcttccttgtggcgggttcgtggtctcactggctcaggagtgaagctgcagaccttcgcagtgagtgttacagctcttaaggcagcatgtctggagttgttccttcctcccggtgggctcatggtctcgctgggctcaggagtgaagctgcagatcttcgcagtgagtgttacagctcataaaagcagcgtggacctaaagagtgagcagtagcaagatttattgcaaagaccaaaagaacaaaccttccacagtgtggaaggggacccgagcgggttgccactgctggctggggcagcctgcttttattctcttatctggccccacccacatcctgctgattggtagagccaagtggcctgttttaacagggcgctgattggtgcctttacaatccctgagctagatacaaaggttctccacctccccatcagattagttagatacagagtatggacacacaggttctccgaggccccagagcagctagatacagagtgtcgattggtgcactcacaaaccctgagctagacacagggtgctgattggtatgtttacaatccctgagctagatataaagactctccaaggccccgccagactcaggaacccagctggcttcacccagtg

SEQ ID NO: 20635 - DNA, 1594 bp, Artificial sequence
  DNA replication origin
tcgtccctcctcatggctggggccgggggtggccacgggactcagcacaccccgctcgtaccgtagcggccgctcgcgctcccagaccccaacccccgcgttcggggcgccccctggttcgcaacccgtcagggctgcgccggccgccacggcccggggtccccaccgcgcggactgaggagcggcggagtccgggacatgctggctgaggagaggggcggaaggggcttctctccaggaccagtttagctgccgcctccttttccctcgggcacctctcgggactggagactcagtgtcgcctcccacctccgctggctgcaacagttacctcacggccccagcctggtccgttgggcgcgcgagcggcgggcgggcgctcctcccccgcgactgccccggccgggcgcgcgcccagcgcgcgctcacgacttgtcccgccgccacccgcgccgcggccgcccaacagggacgcgagccgggaccacgccgacccagcgtgcccaggccgaggaaagcgcggcggcggcagtccgaagacccaccgggactgaaagagaaggacgaggtcatcttcggacgggaggggcaagccagccatcctgggaccccaggcgtgcaggttctctttgagggtaagtcacggacacccagccagaatcccacaggtcactactggggtcttcgggaaagagggcgtttgtggtccccaaggggtgtgcttagtggggatgctgagctaagggtgggaggggaggggcgctgtctctaaccttagtccctttcagggtgggtcttcagactgtgaccagtttagggccagccaccaccaaggccatggcgaagaaaccctaatcgctgtggctagatctagcctcagaagcaacgtggattcttgggccacgcagcaggcccaggatccttgcagtggctcttagggaggaacgtgcacgtggagtgcactctagtagcactccacgtgcacgttcttgagtgttgctcaagaaccatcttcacaggcgaagaactaacgtctcgccttccattttgtacccttgtcatacatatccgccggttcacaacttgtatccccttccacacagcacagatttgctgtcgcaattggtctttgcaaattgaaggctttttcactgtaacagcactttctagatgggggagcggagagaactaggaatcctctccaagaccactccccagtttggatcagcaggccttgaaggaagccgaataagatgctatctgtgaagtactggtgaaactagcaacattaggaaacacagacctgaaagcgagaagaaaagaactttactacaccaaagggactgctctggaatctaaccaatcataactgccttagagagtgaactgtgtttccctccctaagctctcgcttcaacctcatgaccggactgcatttctcaaagagctaattccacatttttccaggcagatgagaaaccttactgtgtggtaaatcccacaaacaggcccatttttcaccaattaatctctgcccacagtcatgacctaaaacagaccattttcgtatatggtcatagttcacatgcatagc

SEQ ID NO: 20636 - DNA, 1345 bp, Artificial sequence
  DNA replication origin
gatcgcggcacattcccttcccctctccagatgttggcatgcggggcaccttgtgggcgaccccgcctggacggcttcgcggctcccgggcgatcaccctggtgcctgccgcctggcccgggggagcccggtctctaattaggcctgaccgcgtccccattccagcgctcctgcagatgggagggagggccatgtttccccccccaggggcaccgaaatagcctcgtagtcccgcggagacagcaggcagccgtggctgacgcgggaccaaggcttggcagggagcgcgctgctgtggaaggtccttgggaggctgcgaccgcctcggagagggcgggcgggggagaacggggcggggggtggggcgggggccaggggcggcctctcgggctgggccggcagagcggccactttgcgcgcggcctctggagctccagctgcgccccgccaccactggccgctcgcactaccagcctgtctcgcacgctaagtaagtagacagctcccctagctggattcagggggctggtgatgcctctgctagcctagttgggaacagtgcaggtttgtcactaattggatagtaggtgtaagtgtgtcagtgggagtgcttgtgaaggggagcttgcgccagtgtgagggagtgtgtctggatgggatgtccacatgtggaattttctagcatgtgccccagggtgcgagtgtgggtgaacgagtgtgtcagagtgtgtggtggcctggagtgggccacaggtatttgcctgtgtggcacctgctgccctgggtgcactgtgtctgtacctgtggaaatgcctgtgtgtgtggcaggaaggcccccaggtgggctgagccagtccacatgtggatgagtggatgtgccagtgtgaacccaggaaggcagaaattggggctagggagtgttatctgaactcaggctttctaaggtgacctgacttgtcccagctggggtgtcttctctgtgggtcattcagctttggtttctcagggcttggagaaggacagaagctcagagccctcacacaacactggagtgaatgtggctctgactaaccccatctggctagaccagggtcagggagacagcttgggagaccccactcttaaaccaggagaagagacaggaggccaggggatgagtggaccatatggccatggccacccacaaacactcgcagtgcacccacgcttacatgctcagcatacacacattcctgtccatgtgcaccagtcttgcacacactcttctcaggatagccatgcaaccattcacactttcaacatgtatacctgtggacaacgacatgtatgcaacatgcacccactt

SEQ ID NO: 20637 - DNA, 1238 bp, Artificial sequence
  DNA replication origin
gggcggtcaatgggaccaggcaccggggagcagggggcggcggtcgtcggggaggctcaggccgcgcaggagcccggcggggggcggggagggggtggtggagggtggctcaggcatcgcggcttgcaggtccccagccctgcccggaggcagccaaggcctggcgagaaatcgagcgcagcgccggtgggccggcactgctggcagacctggcgcaccctccgcagctgctggcccgggtgctaagcccctcactgcccgaggccgctccgctccgagtgcggggcccgccaagcccaggcccatctggaactctagctggtccgcaagtgccgcacgcagcccgggttcctgccggcgcctctccctccgcacctcccggcaagctgagggagccggctccagcctcaaccagcccagagaggggcctccacagcgcagtggcgggctgaagggctcctcaagcgcggccagaatgggcgcccaggccggggaggcaccgagagggagcgagggctgctagggctgccagcaagctgccacctctcaacatctaaagtccagtgggctgagcagcatcctcaggcagaggctgtgggaaagcaaggcagaaagaccctgagggatccatgggtcagatctgcattcatatgcctaaccttgccccatgttagcagtgtggcctcagggagtccctgcatgtctccaacccccggtggcccttctgttaagatggggatagaaatacccatcacagagcattgctctgaggactggaaagtcctgagacagttgggacagagtgcctgtgcctgcccatggtcaatcccaagccattctgccacgttgtcattctgccacattctgaggccaaagccatttccatgctgcattgcaccctgtcaacagcccccagggaaaaagaggtggcagagagtcagggggcgttgagaccctcagctgctcccggagaggcagggctgacaaggcaaggattgtttttctcccctggtgtgaagcttgttgacttgctgttgatagatggtgggataatattcattaaaatacaggcaggtgtgagggtgccacttagagttgtgctttctctcggggaagggggaagccatccgactctgttttgtagccatagaaggaagagcgtcctgtcctctgccctcccctcccgcttctgacagcaggtgctacttggaggaaaaggtctggatttccctgtcact

SEQ ID NO: 20638 - DNA, 1779 bp, Artificial sequence
  DNA replication origin
tgaaaactgtgatggcaggaacctgacttccctgtctgcgcagtgggatccgaacaaatatttattgaatggttgaataatgatgctcaccatatattattgagtgaaaaacagcaagatacagagtatgtataactcttaagtaagaaaaacaccctctacatgtgcatagccacatacctttgtgcaaatagaaggttcagaaaggaccaaattcatggcagtgttgacctctgggcagagtagattggggaggacaggaaggtgactttctcttttttacttcatatacttttgcttgtttaaaaaattgtttttgttataagcacgaataacactttttaaaggggaaaaatcaaaccaaagatttttcttccacttgaatatgatcaaatgccgtataaaccagacaacaatatactttaaaaagttatgcctcttgaatgcctcccagacctgtcttttgtatctgggctggtctcagcagtgctcacgtggctccgcatgacttccagaatgggctccacaggggttattgagggagggatgggtctccagtcagatctgagctttctacttcccatcatggatccccaccatggcttctcctcacccagagaacaagggctaagcccctagggctggctggtgtgtgtgtgtgtgtgtgtgtagggggcctagtgtgtgtggggtgtgtgtgtgtagggccaaatgtgatgtgtgtgtttgtatgagtgtgtgtggtgggccaggtgtgtggtgtgtgtgtgtgtaaggctgagtgtgatgtgtgatgtgtgtgtgtgtgtgtagggccagtgtgtggtgtgtttgtgtgtgtagggccaagtgtgatgggtgttgtgtatatatgtctgtgtgtgtgtgatgtgtgtgtgtgtgtggaaggccaagtgtgtatgtggtgtggtgtgtgtgtggtgtgtgtgtgtgcatgtgtatatagggccgtgtgtgtgtgtgtgtgtgtgtgtgtgtagggccgactgatgtatctgtataagtgtgatgtgtgtgtgtgtggagggccaggtgtggggtgtgtgtggggtgtgtatgtgtgtgtgtgtagggccaagtgtggtgtgtgtgtgtgtggagggccaggtgtgtagtatgtgtgtgtgtgtagggccaagtgtgacgtgtatgtgagtggtgtgtgtgtagggccaggtgtggtgtgtgtctgtatggcgtgtgtgtgtgtgcatgcttgtgtatagggccaagtatagtgtgtgtatgtgtgtgcgtggtgtgtgtggggaaggcctggtgtcgtgtgtgtgtggagggccagatgtgtggggtgtgtgtatgtgtggagggctaggtgtggggcgcgcatgtgtgtgtgtgtgtgtggagggccaggtgtgggatgtgtgtgtgtctggtaggctaggtgtgtagggcagtgtgtgaggtgtgtgtgtctgtgtgtgtgtagggcctggtgtgtgggtgtgtgtgtggtgtgtgtgtgtgcatacacgtgtgtgtagggccgagtgtgatgtgtgtatgtgtgtgagtgtgatatgtgtgtgtagagggccaggtgtgtgtgaaatgtgtgtgtgtgggggcaggtgtgtgtgggtgtgtgtgtgtacacgcttgtgtgtagggccggtgtgacgtgtgtatgtgtgtgagtgtggttttgtgtgtggtgtgtgtgtgtctgtttgtgtgagtggaggggctgtgggtcggcggtgctgccagagtccggcctgcctctccagcctt

SEQ ID NO: 20639 - DNA, 1304 bp, Artificial sequence
  DNA replication origin
ggtgagaggaggcaggtagctaaggaggggtcttcattttctcagggattccttttcctttctcagggaagttctgtcaactttttttggttagagccaccatcttgtttttccttcttccttttgcttcttcctctttagtcatggaattgctttctagggatacttcattcttctgagggttcttcagccccttcagtttcttgccctgattcctccacatcccagccagtaccatagtcagtgctggaactaagtgacatgcatcgctcgagagcctccaaacctcatttgattctcacagagggagggtctgttaggagtccctcaccaggggtgaggaaactgagtgtggaataggtgaaccgcccttacaagctcatacagtagagataacagttttgattttgactgcctggcaccccagtccccctctccgtgcggccctccaccttccttggggacttgctctgtcactgtctagcccctggtctcagcgttctcctctgtgaaatggggagtgatgacaattgcatccagggccagacaggggccagacctggtaaaatgcattattccgtgtttcaaagatgtgtgccttaagtatttgtttggtgttcatttgggggagggtaggctaagagaaaggctaaggtttccactaggccaggagactaggggccttggctgctgctccaagggagtatagcgtccaggcccctcccgtacgagtcaaggaggtttgggaggttgggggaggcctcttacttctgcttcagggctttgggtagcagggtaatctgtttatacttctccctttctttggggacctggattgtatttctgatttattctgatgatattttagtgccctttaaagacaggcgccctgggctgtggcctggctcactccccctgagacttgctggttgtaaggataagataagaaaatgcatggaaaatgtagggcaatgctggcacatagtaggtgcttcataaaaagtggtaatggagactgagtttcattccctagcccagggcagatgagttcagcccttgcccaggctccctgtgctgaggccccacacagccaggctggcctgccccccaccgcgaggagacttcggattttccaaacgggagacaaggagcccccgggcctacagcgatcctgcttcccgcccaaaggtggatggtttggctgctgagttccccgaaaattgattccgcatgttgccgacatcagcccgaacgtttgctcagccgtgagggccctccggggaggctgaaacccacaccgcccc

SEQ ID NO: 20640 - DNA, 1261 bp, Artificial sequence
  DNA replication origin
cacaccaattctttttatcttaaagctctgcggagcgccggggaagcagcccggcaccgagctaatctgccctcagcagccccgggccgctcctcccggcatcggagcacaaccccagcagcctttgcacaagccctttcccttctctgcccggccctttaagggagaaggaagaaagcagctcccgcgggagcggccgggctcgggctgggtcccggggcgggtggcagcaccgccccctgccctgggccgagcccgggagcagcggaccgcggccccggctgcagaggaacggcgggtggcggggccccggcagggcgccgagaaggacggagggcgccggctgggctcagggacgcggggcggggaagaaacgtgccggcgaccgtgcgctcggccgggtgactccctggcgaagtccgcgcccggcggggctgaactacccctcgcccccgctcccgccaggtcaggcaccactgccctcgcggccagggtaaagaggaccacagatcagtcagccttggatttcggatgggcttggaattcggtttgtttattcctgaaaagatcattaaaaagtactgtccaaaaacggggggagggggaaggaagggcgacaagcggagggagctggaggcaactcgagcggtgtcccgaaaaagttgcggcggagcggcggtggggtgagggtgggaggagggagcgcaagcgttttctagcgacccgggttttcttcatgaactcctccgagtaaactttatcccggcgagagagcggcggagatcctcgactcccgcccgccctcaaccagtgtcaaccccacaaacagcctaagtttccaaaccgaaatgggggtggggtgggggtagcattaagaagcccagaagctcagcgggtcctcccgacctcccgcacccagagcctgggtgacactgaagcgctccgaacactgtggcgtctcagtcacacagcgaatcaacccaacacttttcaagaaaacaaaatatttgctaggaaacttactttgcatttagtctctattctttgggggatgcggtttaggtcggctcgcaagggaagcccgttttgtccaggttggatattgtctacgtatggatcagcccttggatgagggtttattttaatttatggcttatgcattcttttaaggtcgatttacatgacctccggctacaactaagacagccgaggagggcactccagtcgtcagtcggccaaacccacaattaaaacagccctc

SEQ ID NO: 20641 - DNA, 1020 bp, Artificial sequence
  DNA replication origin
atgccatttactcctgcggcgcagcgcacaaggagccctcccgcgcggtaccatcctggagcccgcccaggtaaccgggacggagcgagcgatctcgagagcgagggaggcagagccagggcgcgcggcccgctgtgagctacctgttggggcgccggagggggcagggggcaggagcccagggccgggccgccgtcccccggcgtcttccgctcctgcccttccgggcactccagggttagtttctgtgagctgggaccgaggggctggggcaggacaggcagagggacgagagccgagcgagcggagccccgagagggcgcgggtggccgggagccgcggctgccgggccggggcgggtttgcgtacttggctggggaggggaaaggaggaggaggagcgggaggagggcgctccgaggggccgacgcggagggggagtggagggagagaaaggggcccgggcgcccgccgctcgctggtggacgcgctgatcccgaggatgcgtccccctcttggagagttgcgccttgttccggagtgacagatctgcgtggcgggggtctgtttttctccccttcacctcccctccaaaaaatccaccctgagaaaacacatgttgtagccgtagataactgtgcgtaggacattaaggcaaaagggcagggacagggacacaacgcaacctttgacaacagaaagctgttatcgccatcctaagtattcgtccggaaatctgtctgccctctcggcccacctcactcctccacctccgcctccccgcattggtattctaatctatataattgggaatgatgtgaaaaagaagtcaggtggcttagagaatgaatttgtaagtctccgtgaagttcgaggtaggtatttcattgaagttcgctcaagtgtgtgatagaggaagcttttgtggctgcgtgtgtagtcatccctcctcgttctgtgaaagcaaatgcgtgtcggctttgaaggttcagatgggaccgctaggcggtaatgccctccg

SEQ ID NO: 20642 - DNA, 1628 bp, Artificial sequence
  DNA replication origin
gcctgtcctgccccagcccctcggtcccagctcacagaaactaaccctggagtgcccggaagggcaggagcggaagacgccgggggacggcggcccggccctgggctcctgccccctgccccctccggcgccccaacaggtagctcacagcgggccgcgcgccctggctctgcctccctcgctctcgagatcgctcgctccgtcccggttacctgggcgggctccaggatggtaccgcgcgggagggctccttgtgcgctgcgccgcaggagtaaatggcattaaagaaaaagggaaagatacaaataaaaaaaattaaaaggaaggggagtcggtgctaggtcaattgtcacagtccggggagcaagggaacagaaccccccagcgccgcggccggcgtagcccgttaactcaagtctgcgggggtgtcccgccccgggtgggggcagcgcagagcggcagaagtttgccgccggggttccaggaggtgcgcgcggagcggggtgactaggggcttcaccctggaacaagtgaaggcgatggttagtgctgtcaatcttggcaatcagtgtgagcggccatgtcgtaagtattcaaagcatttcccgtcgtgcaacatcagaaagtgagtggccagggcattgatctgagcgagggagaggaggctgggctcccctcccagacaacacaggcaagatgagacaagaggcgagggaggcagcgagccaggcagagaagctgggagggaggagggcgggccgggggaagaaggaggggagagcgggaggcaaaggcaagagagagccgcaaagagagaggagggcagagacatcggcgagaccagaggttggaactggggaaagcgcctggaaagagacggtgaagcaactactaggggagaactggaaggagacaaagaagagagaaagtcggggtcagaggagaatggggacaagtactaggtgggggagaggcaggctgaggggaaaacgaccaaaagagctctattggggctagggctgctgggaggaggagtcaggagaaaggcaaactgtagcgtggaaaaggtaggcaactcggggagaaaaaaaaggagcaaactggagaaagtgaggaagtcaaatggtaaaggaaaatgtatgaatggtagcttgtgctttggaaaagttaggtgacagaaggaggcatgggctgaatgttgagaagtactaagagatagaactggaccacaaaagcgagtcacgagacaaacggagaaggggaaggacaggcaggccagggagaagacaagaagggtggatattaggatgaacaataagaaggatgaaggaaaacgaaaaaaagaagtagtcaaaagagagaaaagaaagagatgaaggaagcagagatgatgaaaacacaccacttagtaggatctcagcaaatgggggaagagaaacattttaaacgatggaggaggaggcgttgaaaaaaaaaaaagaaaaagcaattcacacaggagattcctaacatatgtaggtggcagtgttctggaggccatatggattatatagtttatggattcaaattattataaataacaggacatgtacaaatcaccaaaaaattattacactttcacggcaata

SEQ ID NO: 20643 - DNA, 946 bp, Artificial sequence
  DNA replication origin
caacaatccgacctctccatcccctccccacatttcccccccgtctactcaacaaaaccgccatcgtcatcattggcccgctctcaatgagctgttgggtacacctcccagacggggtgccggccgggcagagggtctcctcacttcccagaaggggcagccgggcagggactgccccccacctccctcctggacggggcggctgctgggtggaggcgctcctgtcttcccagatggggcggctgctgggcagaggggctcctcacttcccagagggggacggctgccgggtggaggggctcctcacttctcagatggggcggctgccaggcggaggggctcctcacttctcagatggggcggccgggcagagacgctcctcacctcccagaacggggtggcggccaggcagaggcgctcctcacatcccagacggggcggcggggcagaggtgctccccacatctcagacgatgggcggccgggcagagagctcctcacttcctagacgggatggcagccgggaagaggcactcctcacttcccagactaggcagccaggcagaggggctcctcacatcccagatgatgggcggccaggcagagacgctcctcacttcccagacggggtggcggctgggcagaggctggaatctcggcactttgggaggccaaggcaggcggctgggaggtggaggttgtagccagccaagatcatgccactgcactccagcctgggcaacattgagcattgagtgaacgagactccgtctgcaattccagcacttcgggaggctgaggctggcagatcactcgcggttaggagctggagaccagcccggccaacacagcgaaaccccgtctccaccaaaaaaatacgaaagccagtcaggcgtggtggtgcgcgcctgcaatcccaggcactgggcaggctgaggcaggagaat

SEQ ID NO: 20644 - DNA, 806 bp, Artificial sequence
  DNA replication origin
catcccgtctaggaagtgaggagctctctgcccggccgcccatcgtctgagatgtggggagcacctctgccccgccgccccgtctgggatgtgaggagcgcctctgcctggccgccaccccgttctgggaggtgaggagcgtctctgcccggccgccccatctgagaagtgaggagcccctccgcctggcagccgccccatctgagaagtgaggagcccctccacccggcagccgtccccctctgggaagtgaggagcccctctgcccagcagccgccccatctgggaagacaggagcgcctccacccagcagccgccccgtccaggagggaggtggggggcagtccctgcccggctgccccttctgggaagtgaggagaccctctgcccggccggcaccccgtctgggaggtgtacccaacagctcattgagagcgggccaatgatgacgatggcggttttgttgagtagacgggggggaaatgtggggaggggatggagaggtcggattgttgctgtgtctgtgtagagggaagtagacataggagactccattttgttctgtactaagaaaaattcttctgccttgggatgctgttaatctataaccttacccccaaccccgtgctctctgaaacatgtgctgtgtccactcagggttaaatggattaagggcggtgcaagatgtgctttgttaaacagatgcttgaaggcagcagcatgctccttaagagtcatcaccactccctaatctcaagtacccagggacacaaacactgcgcaaggccgcagggtcctctgcctag

SEQ ID NO: 20645 - DNA, 1237 bp, Artificial sequence
  DNA replication origin
tggccgggcggggggctgacccccccgcctccctcccggacggggcggctggctgggcggggggctgacctccccgcctccctcccggacggggcggctggccgggcagaggggctccttacttcccagtaggggcggccaggcagaggcgcccctcacctcccggacggggcggctggccgggcggggggctgaccccaccacctccctcccggatggggcggctggccgggcagaggggctcctctcttcccagtaggggcggccgggcagaggcgcccctcacctcccggatggggcggctggccgggcggggggctgacccccccacatccttcccggacggggcggctggccaggtggggggatgacccccccacctccctcccggatggggcggctggccgggcggggggctaacccccccacctcccttccggacggggcggctggccgggcggggggctgacccccacctccctcccagacagggtggctgccgggcggagacgctcctcgcttcccagacggagtggctgccgggcagaggggctcctcacttctcagacggggcggttgccaggcagagggtctcctcacttctcagacagggcggccgggcagagacgctcctcacatcccagacggggcggcagggcagaggcgctccccacatctcagacgatgggcggcgtggcagagacgctcctcacttcctagatgggatggcggccgggcagagatgctcctcactttccagactgggcagccaggcagagaggctcctcacatcccagacgatgggcggccaggcagagacgctcctcacttcccagacggggtggcggccgggcagaggctgcaatctcggcactttggggggccaaggcaggcagctgggaggtggaggttgtagcgagccgagatcacgccactgcactccagcctgggcaccactgaacactgagtgagtgaacgcgactccgtctgccatcccggcacctcgggaggccgaggctggcagatcactcgcggttaggagctggagaccagcctggccaacacagcgaaaccccgtctccaccaaaaaaatacgaaaaccagtcaggcatggcggcgcgtgcctgcaatcgcaggcactcggcaggctgaggcaggagaatcaggcagggaggttgcagtgagccgagatggcagcagtacagtccagctttggctcggcatcagggggagaccg

SEQ ID NO: 20646 - DNA, 1131 bp, Artificial sequence
  DNA replication origin
gcctctgcccggccgcccctactgggaagagaggagcccctctgcccggccagccgccccatccgggagggaggtggtggggtcagccccccgcccggccagccgccccgtccgggaggtgaggggcgcctctgcctggccgcccctactgggaagtaaggagcccctctgcccggccagccgccccgtccgggagggaggcggggaggtcagccccccgcccagccagccgccccgtccgggagggaggcgggggggtcagccccccgcccggccagccgccccgtccgggaggtgaggggcgcctctgcctggccgcccctactgggaagtaaggagcccctctgcccggccagccgccccgtccgggaggtgaggggcgcctctgcccggccgcccctactgggaagtgaggagcccctctgcccggccaccaccccgtctgggaggtgtactcaacagctcattgagaacgggccatgatgacaatggcggttttgtggaatagaaaggggggaaaggtggggaaaagattgagaaatcggatggttgccatgtctgtgtagaaagaggtagacatgggagacttttcattttgttctgtactaagaaaaattcttctgccttgggatcctgttgatctgtgaccttacccccaaccctgtgctctctgaaacatgtgctgtgtccactcagggttaaatggattaagggtggtgcaagatgtgctttgttaaacagatgcttgaaggcagcatgctcgttaagagtcatcaccactccctaatctcaagtacccagggacacaaacactgcagagggccgcagggtcctctgcctaggaaaaccagagacctttgttcacttatctgctgaccttccctccactactgtcctgtgaccctgccaaatccccctctgcgagaaacacccaagaatgatcaataaaaaaaaaaaaaagaaaattggaaaaaaaaaaaagttaaaatgaggtatttagagtggatcctcatccaatatgactggtgttctcataagagggggaaattggacacagagatgactatgtgaggatacagtgagaaggtggcagccttcaagccaaagagagaagtctcagaaggaaccaaa

SEQ ID NO: 20647 - DNA, 951 bp, Artificial sequence
  DNA replication origin
cgtctgtacccctcctcctttgccttcctaaatgcatctcactcccatccccttcctcaaggcagcttccagaccaggtgtaggagacctgagtcctctcagcaggtagagtctgaaacattctgaaaaatagaaaaatgttgccctgtcccagccatggtgcctgaaaacctccttgcgtgctccgccagtgccctcgggtgtattttcaggcctgggggctgtgggcagaggaagaggtgtctgtcaggtgtcacctgacttgtctctcccaggcccctcagtaggaggggagcagaaaggtccaggtgggaaatagagaaggtggagtgaggctcctccctcaggcagtttcagtttccctcctgtccttatcagagagagggtgggtctaagactgatagttgtacaaggtgtcctgtttgtgtgctggggtatttctgggtggggccctaatgagtgggagtggaagggcccagccttaaatggagggctgtggaccaggctgggctctggggaggtgggagggacgggggttggttagagacagacctgaggagattttttaccccagccagggccttagaatagttgtgaaactcagccttcctggtagcattgtgccttagagacctgggaagctatgtgctggcttaggatagagttttcagtcctgttaacggaagggtggaaggactggactgtagagtaagtgcgatgaggaagatgagcatgtcttggaagttgacattctggggagtgcaagaggcggctgagtttatgtaaggcggggaggggcaaaggcaagaagtgtggggaatagggtgggcttactgcaggcaaggagcgcaggaaggcagattttagcactgggtgtgggctgtgtatcagagaggtgcttccagacaggctgctgtgctccctccccctcctcccaattttctatcccct

SEQ ID NO: 20648 - DNA, 1634 bp, Artificial sequence
  DNA replication origin
ccgatgggcacttgcggcaacggatgacaggtctgctggtgtctggctagacgccagaacagcgcagttctgaggccgcaggtcctgcccctccgcccttttccctccccctcctcagcctctctacccctcccacttgcagcatcctctacgaggaaaggaatgtgctgggctcggacgcgccgtcctggccgaacggcagcacctggggcgcgctctggaccgctggggtccgctgtctggcgctgcgccacgtgctttgatcggtgctgatgtcaagtgggtgtgggctcctcggaaaggccccggcgaggaggaggagggcgcgcgatgcgccgcgggcgagctgaggccccggcgcgctccgtagcccagcgccgctgaccggtggcccgcccgggctcgcgaagcagtcgcatggagccgcggagctgtcctccctgggacgcgtgccccgccacgctgggggtctggcaggagcgaccaaggggggcctgcaggtgtgtgtgcgcgctgtaactttcggggggtctgcgggttgtcgagccgacagggcgcagggtgcacgggctccttttgggggtgctttgtgtctgggcgcgggcgtgactggagccggctagtccccggccagccatgagcgagggagccgtagctggccgctggagtttctgcaagagaattcattgagccggcgcccggctttgggttactcctcgggaaggacgccaagggagccgttgttgtttttaaaaatcgggtctccaagtacagactgcgttcttgttaacaggattacctcagcagcagagagcgccgcttcccaaaatcggctgtggttggggaccccacggccccgcaggcgtgcgggctgcggggacagcaactggccagcagtggagagggtggggaccgggaggtgggcaaaggcgaccccgccaagcgttccgccaagtgtgcaggggcgcctgcccttcctctacacccacacttgccaggagccggctacggaggaggtaaggggtcagcttctcgcctgtgacagctctggtttcagacacaccttcccggaggaatgcagaggctttgttccaggcgcccgtcccagccccgagccctgaagcccgcgggcatagggctgggactccggtgccattactcatcttttatggcaacgccggcaagctcctaggtaggcaagttaattattaatgtgtctaagctggagagaggaaatctgaaaatgagattggtgggttgcaggcctccccctttcttttttggctttggcaaggcaaggtttaagcccaaggtgttgcagtctatttccctagaaggataagggcattcccccaaggcaccagcactgcccccgaagggttcccctttcgttgtcggtgggacagccccatctcctcccagagggcagaaagggtgcatccctcagtttttaatctactttagaacccgtctgtacccctcctcctttgccttcctaaatgcatctcactcccatccccttcctcaaggcagcttccagaccaggtgtaggagacctgagtcctctcagcaggtagagtctgaaacattctgaaaaatagaaaaatgttgccctgtcccagccatggtgcctg

SEQ ID NO: 20649 - DNA, 1146 bp, Artificial sequence
  DNA replication origin
gctggccggggactagccggctccagtcacgcccgcgcccagacacaaagcacccccaaaaggagcccgtgcaccctgcgccctgtcggctcgacaacccgcagaccccccgaaagttacagcgcgcacacacacctgcaggccccccttggtcgctcctgccagacccccagcgtggcggggcacgcgtcccagggaggacagctccgcggctccatgcgactgcttcgcgagcccgggcgggccaccggtcagcggcgctgggctacggagcgcgccggggcctcagctcgcccgcggcgcatcgcgcgccctcctcctcctcgccggggcctttccgaggagcccacacccacttgacatcagcaccgatcaaagcacgtggcgcagcgccagacagcggaccccagcggtccagagcgcgccccaggtgctgccgttcggccaggacggcgcgtccgagcccagcacattcctttcctcgtagaggatgctgcaagtgggaggggtagagaggctgaggagggggagggaaaagggcggaggggcaggacctgcggcctcagaactgcgctgttctggcgtctagccagacaccagcagacctgtcatccgttgccgcaagtgcccatcggctgggaagaccaggctgcaggagacccgggttgctgtcgtctcccctccaagagtcctgaccttgaatgctcttccccacaatgattcaaggagtcttctaacaatccctggtaaattgcgggaacggattctgacaagccaggaatgaagacttggttggatgtgactgcgacctcatcgcccaggaggccgctatcaggcacccagcgaaggagaccataccctctggcttgtctctgccctcgcaacctcaactatgtctcttttctttctctcttttctcaatgcccttggcaataagggatcactctcctggtcctgcaggcaatcagaactacagcacctctcagcagcccacacacacttctaattcattcattagcacccgtccaaatattcacacatgcaaacatttaagggttagtatatgccaggagcaacagataatcttcctacactcacagtgcttctactctagtcagggagacctatattaaatacagaacaagg

SEQ ID NO: 20650 - DNA, 2496 bp, Artificial sequence
  DNA replication origin
ggggcgcgggggcgggggccgggcgggcacccggcgggctgtggcggcgctaacaggtgcacctctctgcccgcagtgaccagctccgctgcacgacctggctgcatccgcgcaccggggagcccgtcaactcgggccacatgatccgctcaggtgggcgccgggccggcgggtggggggcgcgcgcagcggcggcccaagtttgacccgacttttctggcgtttccgcagacctgccccgcggctgggaggagggcttcacggaggagggcgccagctacttcatcgagtgagtgagtggggccgccgcgctcgcacctgtgccgcggggggggggtccctccccgttcccgccgggcgccccgcccttcctctgctcccgccggcccgggctcgttggcgcgcgctgcgccgcggccacactcaacgttttgtgtgcccaagttgtttggcggcctccgagaggaaggcggtgggggccgcacctacgctggggacctgggccgggggggaagaggccgcagactctgcgccctggaccttgcaatccggctggattcgggtgctggtgtgcgggctgggcacgcctcccctctagggtctggggctgcgccccgccgggagaggcgagtgccgggacctggatgggctcgggtgggaggagtagaacgagaagttctgtcctggtgtgggcctgcggggttggagtggggagagggagagactaggggaatctcgcttaggaggacgccccctctcccgccgcaggctctgggatggtcttggagagtcggaacctcgcccccggcctccatccactgcgcgggcctgcggggagggagggggtggggaagggaactggtcaaccaatgactttcctcgagcgctccgcgtctcttcggccggagctgaaccgggggattgctggtgcttccgttagtccacgggcgacttttccgcaaaagccccggagtgttggcgcaccagccaggttaccctgggtctgtaggatcagtccatgtcagattggggcgcagtaagtgaaggcgcgggtcaggctcctatgccagtacaggctttgctttcccactccggcgggagtctgtgttgcagcgtgtttccctctgcctgctgagctccgggaggccagacactgcctttgaccccttgccccagtgccggacagcaagtaggcactcggtaaatgtttgttcactgaatgaatcagctcgccaaaggtctggacggtggtctgactagtactgactgggtgtacctcggcgactgtgagtcagaactactactgttaggaataaagcagcctatttcaagaaaaccccggaacctccttttctggtttgggttcttgcataatagttgaaaatactgatgggtgagatttacagacctaaggactagggccttgctgcggttctattgccctgcctcatatgtgtgtatgtgaagttggggagttggctggggccatcagagtcttgctgtcagtgggcctctctggctcataactgcatcagttgatgttattacaattttcctgtgtgccacacgttcacacgttgttctaggcattgggaacaaaaaacagaaaagttctaggtgctcatggagcttgcaatctaataggagagggaagggagtagaaaataagtaaaaaacacaaataataatatcagatcgtggttactactgtgcagaaagttaaaataaggtgatgtgacatggagtgactgggtggcttggttgtactgggagatcgggatggtgtttctgaataggcaacatttaaagtaaaatttgaatgacaagaaggagacatcatgtgatgatgagttggcaaagcatttcgggaagagcgaacagccagggcaagggcttaaggcagaaaagagcttggagtttaaggagcaggaaggctggaatgtggtgcacaagggagaaagtggcatgaggagaggtcacaggtaggagaaaggtaaatgccgcaaagctttgtgagccggggtgaggaattttcatactttattctaagcccagtgaaacgtcattggagggttttaagcagggaaatggcatgatttggtgtgtgtttttagaacgatcactgtgaggagattggattgtaggtggccactgcagggggaggcaggagagcagctgaggctgttgccctcttccaggcaggagttagaagtggcttgcctgagggtggtagcacagtagacagggagtagtggtcacattcaggctgtgtttaggaaataggctcttcacaccttcatgatggactgaatagtctgtgggagaaagagaagaggcaaagatgactcctcagggcttgggcacctgagtggatagcattcatatcgttgagatgggaagagccggtttggggtggaggagaatcatgagatcttgttttgccatcttacatttgagatatgagtatgtcagatagtgtgatctgaagcttggtgg

SEQ ID NO: 20651 - DNA, 1386 bp, Artificial sequence
  DNA replication origin
ccctttatggtctcatcaacatctcacagccctcccaaaattatgtgcatgctctcccatccctcccctctggagtgctcttttcccagtcaaacctaaccagtccttcagggtccagcctaattccacctgtttgggcacctttctgaataactagtgctcacattgcatacagtctcactttcaggcgcgcctcctcccatcaatcagagcctatgtcccgagaaggctgggcctgacaacagctggagcccagctgctgctctgtctttgctcagtgtgtgtgtgtgtgtgtgtgtgtgtgtgtggccgggagtctgagtgtggagtatgtttcattcactcatcctgcagtttttttttttagactgagtctcgctgttgcacaggttgcagggcagcggcgcgatctcggctcactgcaacctctgcctccctggttcaagcgattttcccgcctcagcctcctgagtagctgggattacaggcgcccgccaccacgcccggctagcttttgtatttttttggtagagacggggtttcaccatgttggccaggctggaatagaactcctgacctcaagtgattcacccgcctcggcctccaagagtgctgggattacaggcctgagccaccgtgccccaccccatcctacagttattgaatgcgtaatgcatacatgagtcaggtgctgttccaggcattggagaccaggcagtgtatgaggtagatcaaagccccttctctcatccagctgacatgttggaactaatatacaacaaacaagacaaacacaaatatcaattaaatgtaaacaagtaatgaaatagcgagggaaggaggggaaggattttctttgcagagggctcagggagggctccccgaggagataagataggagtaaagacccgaatatgagagggtgccgccactgcaaagagctttgcagggccccctagaggccccgcctggccaccgctcttccagagatggacgtgctgccgagccctcaaaaccccttttttctgttacttgacagaaactgaaggcaagagcttgcgatccctgcaacctcagtggtgtgtggcggtaaccctgctccctcctgtttcacatcccagctgaaaacttgggaaaatgaaatcgcgctcggcctgccgttgatagagcacctactacatgccatggtccggttaagcactttatgcgattgttacttcatttaatctacacaacaatcccgtgtggactcgattaaccttacaggggaagagaaggaggctgggaatatggcaggaacctgagtgttaacttggttcacacacaagcggagttcccgggtcgggaagttctgtggtgcgggtcggctggggtttactgagcgtt

SEQ ID NO: 20652 - DNA, 951 bp, Artificial sequence
  DNA replication origin
gggaggtgggggggtcagccccccgcctggccagccgtgccgtccgggagggaggtgggggggtcagcccccctgcccggccagccgccccgtccgggaggtgaggggcgcctctgcccgcccgcccctactgggaagtgaggagcccctctgcccggccagccgccccgtccgggagggaggtggggggggtcagcccccctgcccggccagccgccccgtccgggaggtgaggggcgcctctgcccggccgcccctactgggaagtgaggcgcccctctgcccggccagccgccccgtccgggagggaggtgggggggtcagccccccgcccggccagccgcctcgtccgggaaggaggtggggggggtcagcccccccgcccggccagccgccccgtccgggaggtgaggggcgcctctgcccggccacccctactgggaagtgaggagcccctctgcccggccaccaccccgtctgggaggtgtactcaacagctcattgagaacgggccaggatgacaatggcggctttgtggaatagaaaggcgggaaaggtggggaaaagattgagaaatcggatggttgccgtgtctgtgtagaaagaagtagacatgggagacttttcattttgttctgtactaagaaagattcttctgccttgggatcctgttgatctgtgaccttacccccaaccctgtgctctctgaaacatgtgctgtgtccactcagggttaaatggattaagggcggtgcaagatgtgctttgttaaacagatgcttgaaggcagcatgctcgttaagagtcatcaccaatccctgatctcaagtaatcagggacacaaacactgcggaaggccgcagggtcctctgcctaggaaaaccagagacctttgttcacttgtttatctgctgaccttccctccactattgtcccatgaccctgccaaat

SEQ ID NO: 20653 - DNA, 1231 bp, Artificial sequence
  DNA replication origin
gaggcggctggccgggcggggggctgacccccccacctccctcccggacggggcggctggccgggcagaggggcgcctcacttcccagtaggggcggccgggcagaggcgcccctcacctcccggacggggcggctggccgggcaggggggctgaccccccccacctccctcccggacggggcggctggccgggcagaggggctcctcacttcccagtaggggcgggcgggcagaggcgcccctcacctcccggacggggcggctggccgggcaggggggctgacccccccacctccctcccggacggcacggctggccaggcggggggctgacccccccacctccctcccggatggcatggctggccgggcgggggggctgaccccccacctccctcccggatggggcagctggccgggtggggggctgaccccccccacctccctcctggacggggtggctgccgggcggagaggctcctcacctcccagacggggcggctgccgggcggaggggctcctcacttttcagacggggtggttgccaggcagagggtctcctcacttctcagacggggcggccgggcagagacgctcctcacctcccagacggggtctcggccgggcagaggcgctcctcatataccagatggggcggcggggcagaggcgctccccacatctcagacgatgggcggccgggcagagacgctcctcacttcctagatgtgatggcggctgggaagaggcgctcctcacttcctagatgggatggcggccgggcggagacgctcctcactttccagactgggcagccaggcagaggggctcctcacatcccagacgatgggcggccaggcagagacactcctcacttcccagacggggtggcggccgggcagaggctgcaatctcggcactctgggaggccaaggcaggcggctgggaggtgtaggccgtagcgagccgagaccacgccactgcactccagcctgggcaccattgagcactgagtgaacgagactccctctgcaatcccggcacctcaggaggccaaggctggcggatcactcgcggccaggggctggagaccggcccggccaacacagcgaaaccccgtctccaccaaaaccagtcaggcgtggcggcgcgtgcctgcaatcgcaggcactcggcaggccaaggcaggagaaccaggcagggaggccgcagtgagccgagatggcagcagc

SEQ ID NO: 20654 - DNA, 1098 bp, Artificial sequence
  DNA replication origin
cctcccaccaggctccacagcttcggccctcctcaccgcccgcctccaggctccccggcgcggccttgtccctgctcccgccaatcggcgtcgtcagcaatcgcgaaccggaccaatcagcggccgcagagtgtgggaactgtcgccatggcagccaggaggcgggcgcgcgcggcgggaggaggggcagagcggagcggtgggccgggggctggaggacaggtttgtgcgctggacgcaagcaccaggcgcagcctcgctcgccgagacccggccaggtaaggccggtggccgcgcggtaggtgcggagcagcgcggcgggagattaggggtgggggagtccggagataaggctccggtcttcgcctgccttgccagagcagagaggatggtgggggccgtgctgtgggcggggcaccggcggggagggggctcccagcgcgagccggaggcgctgggttccctctgctccactcgcagctgggcacccgagctttcttcggggtcgaggagggtggctggctcttggcggggagcaggagagggtaggtgccaaaccgagaccctggcggggtcccttcgggtttgggcaggtcgatgggcaagggggtgcccactagtgaggagggacacccaccaattccaggcgatgctcccctgtgccgctcagcaaagctaggcccggggatcctgctcttctccggtctggttaagccagcaacctctgacacttaggagaaagttagtgtaagtcgtgatatgcttttcacttaagtgacaaattaggtacgagatgaacccttttggttttaggagatgagaaacagtatttccttgttgcacctgctaagtggcaactcagtgagcaaatatggttattgtggttggtgtttgcaacggtcttagatgacagttattttacagtatcaaatggctgggagagggagggaaagaaggagagagagagagagaatatgagggaatgagaatgaacgggaaccattatgatttttgagagacagaacctcttgaaattctatgtctgctaaacttctaaattgaataatgtacattttatgcaattgaataagctagtgc

SEQ ID NO: 20655 - DNA, 1343 bp, Artificial sequence
  DNA replication origin
cttggagtagtccacagagtaacgtccgtcctcctcagctacaatgggcacaaagcgctggccccacaggatctcatcggccaggtaggaggtgcgggcctgggtggtgatgcccgtggtttccaccacgccttccaggatgacgatgatctcgaggtcctggtggtggtgcaggtcgctgggtgccaggtcgtagagtgggctgttggcatcaatgacatggtagatgatcagcggggccaccaggaagatgctgttgccacccacgccgttctccatggggatgtccacctggtggaggggcaccacctcgccctcggggctggtggtcttgcgtaccacctgcatgtggatggtggcgctgatgatcatgctcttgcggaggtcacccacacgtagcatgaagcagaggcggccgtggcgcagggcgatcaccgcatgcttgctgaagatgagggtctcagccctgcggtgggcttgggcagtcttcatgaagatgcagccaagcatgatggcgttgatcatgagccccacgatgttctgcacgatgaggatcaggatggccagtgggcactcctcagtcaccatgcgccccccaaagccaatagtcacttggacctcaatggagaaaaggaaggcagacgagaaggagtggatgctggtgacacagggctcagcagtgccctcgctgggggccaggtcaccgtgggcgaaggcgatgagccaccaggccatggcgaagagcagccagctgcacaggaaggacatggtgaagatgagcaatgtgtgtggccacttgaggtccaccagcgtggtgaacacgtcctgcaggaagcggccctgctcccggatgttcttgtgggccacgttgcagttgcctttcttggacacaaagcgggccctccgctggcgggcacggtacctgggcttggcagggtcctctgccaggcgtgtcagcacgtattcctcggggatgatgcccttgcgggacagcatggctccggtgacccccagggaggggcttcccccatcggaggcacccctcggacgtggcctagggcctcactgcagagtcctctcggtgggcaccttctcaccctggggctgcactcagcctgtgctggcctcacttctgagataactccccaccagactcttccttacctccacctgggtcccacttcacttcttaataccagcctcaggccgggcgcggtggctcacgcctgtaatcccagtacgttgggaggctgaggagggcagatcactaggtcaggagttcgagaccagcctgaccaacatggtgaaaccccatctctactaaaaatacaaaagttagccgg

SEQ ID NO: 20656 - DNA, 1021 bp, Artificial sequence
  DNA replication origin
tttcgtagagcgtgggcaggaggaacctctgggttccgcggatcagaaaaactccaaaggccgggttgtgagtcccgggaggggaggtggagggcgggggcggggaggggcgcgggaggggcgggggcttgctccggccccgccccctgcgctccggtgcaggtcgggctccccctggcggtccccggccccgttcctctcctcgtgcgcccccctcccgccgtcctagacccctgcctagcccaggtcggtctccgcggacccacggacggacagacagacgggaggacggccagccgcgagcgcccgggcggcgggagggggcggggaggcgacggccgtggcgtgaggagcaggagcaggtgcagcggcggcggcgggcggggccgggacccggcgcggagcgggagccgcggcgcgggcgggcggcagggaccgggaggccgcgactcggagtcagccccgccgggtcgcgcgcaggtccggggagccgcggttgagccgggtggggtggtgactccagagaacgcaggatcccaaggagacagagaggacgagagctggagggggatccggaaagcggcgggggcgctccgggaggggtggagtaggacatagggggcgcacctggaggagagacggggcgggggtggccaggacctgagctggagcctgggagcccgaaggccagacaggtgaggcgggagacccggaggtgggggtgaggtccggttagtgggagagatccggaggtgttaagttctgagctgggctgggaaggcaggctgggcggggagaagggctcttagcgggaggcccaggggtggtcagctggtgggggaagctgggggaggacgcagggccaggtggagagccggcagggttgggggctccctaggcgccaggcaggtgggctcaagggtgaggctgttttttttgttttgttttttgtttttgagacggagtctcgctctgtcgcccaggctggagtgcagtggcgtgatcttggctcactgcaacc

SEQ ID NO: 20657 - DNA, 1069 bp, Artificial sequence
  DNA replication origin
gatccgcggaacccagaggttcctcctgcccacgctctacgaaagtggggggctgggagggatctgtgacccgccctcccagtctggggccgccgccctgtcgccctggctcccctcccccaatatccccatccgtatttgggtcagtaatccgcctctcggccgcgccaggtttgcaggttccccgggaaaggaggcgctgagaggcggcgccaccaatcccagggctggcggaaattaggcggtccgaggacttctcaacctgcagctgcttctctttgggggatgctcttaatcttagtcttgaatcctttgacaatctgatggaagctcagactccctctcattaaaaaaaaaaaaaaaaaaaaaaaaaaaaaaggcctcggcaggaaaggagcacagtttaacacctgctactgctgtggggcagcctgggcggctccatcttctcagccattccggccctactttaaagaaggtttgagccgaggccacttgctttacactttctcacacctgtcacctgacttcttccacgttaggtcatgggtggtatttaggcctgaacagtgtgttagggctgcctcgggcactgggggacccaggctcttggtcccggcatggtggtgtttctgttcaggcatcagcctgaggctgccctgtggcatggacccgggttctcagctgggagggaaagcctgctagatctctgttgttggaacagtaacggctttaccgctgtctgtggctcagatccttatggaagaacccctgaccatctgcggccattttgttggagtgggggcttgagacagggtctggaaaaggcagtgtggctgtgggccacagtgggggcaagatatgcattttatattggattttcctttctctccctacccacctgcaggcagagcgaacaccgctacaaaggatgggtgtgatcatgggctatattaacaaagatgcagtgtctaggaaggggagggtaaaatgagatgagcagagtgggaagctcaaggagacagggttacatggggaaatctctgaggcaactacaactgtccagcca

SEQ ID NO: 20658 - DNA, 1049 bp, Artificial sequence
  DNA replication origin
aagacactgattccagcccctggatcacttccagagcaggggagtgggagactggccttctcatgctgacccttgcctaaggctgggggtccccccacttggtggtccctggtttctggactcctatggaccgtacaggcaggcagggtgacctctgcagaggactaagcatgcagctttctggctttccaggtgctgagctccctctgggagttggtgctgggtggccaggcatggggcagcaggactcacctggacacagcagttgtcagcatcgccatctgcactggggaccaggctctgcagtgggccggtgaggccccgacaatcctcccgggctggacgcttgcggttcacaaccctgaggggctgggggtggtttggaggtgaggacccactgggctgggagctgtgtagggaagggagcccctcttcctgggaaaaaaggcagaagtccgacacagcaggcccaagttttgggccttagaggaccatgctgggagtagcaaggggaggccgggcactcaccaccgcctggtacttgctggctgggccctgaggtgtgggctcatggggggcacactgctcctcacggatctctgcactggacaggaactcgcttagcttttgcacgctgctcgggaagcacagagacacccctcacccctgccaggggcagaggggaggggagagggcgcagcctgatagagagctctgagcaggatctcaggcctgaagtatagtcccacaaagcccacactgaagggggcagaccagtgggcatgggggcaggtaattggtgttaccagggtttgctagggttgaccagtcagctggaataggctggggtctggattggaggtgagattggttagttttagggttaatgttgaagttagttagtctgggttattagactgaaggatggttggtgttggattggtcagggttaaggttagttaggactaggattggtaaagaatcaatagctagtattttgtgagcatacactaaatgccagacactgtgttaactgttttgtagcatta

SEQ ID NO: 20659 - DNA, 1491 bp, Artificial sequence
  DNA replication origin
cgcgggccggaaggggacgccgagcggtgcggcgcgcagcgcctcctcctccctccctgctctcccgtcccctcctccgcggctcgctgcgcgcactcaccaatgaagaggatggggaaggtgatgaagagtaggaagacgtgcggcaccacgttgagcgcgtccacaaagcagccgttgttgaggaccccctggtccacccggtaggcggccgagtggttctcgctgccgcagaaggccaggggcatggcggcgcgggcgcgggctgggctcgggctcagctggctccgctggctccgcgcgcctgccgcgcctctgtcccttgcagctccgccgcccggcccggccgtcaggcccccgccccccgggccccgcccagccccgctggcctccccctccctcaccccgccctgctccaccacctgcggggccggggggcggcgaggaacccgaccggccctgctacgcttgcgcccaccttccagatgtggaggcgcgtgctcccagatgttgccggggtggcttcgtgagtgccctgatgcacgcgtgcgctgggggagaggggaaaggcaggctaagatggggagtggggtgtgggcacactggagtctgggtgggaaaggagggtggggcgtgcagaagaggagagaagggcccgcaaggcctggagtgggcgggttcagggtcccgagtgtgagttcacctgggcgtggtgcggatggatgtagagagccgagggatggcgcaagtctccacccaacatggatgagaaaagtggggcagaacgttaccttgtggtggtggtggtggtggggtggggcttggacattttcaaaagtggtcccaggtggggcactcctaggtactgctttacagcgtatctggcactttcacacaagggatgtcccagaactcttgctaagtacaggttctaatcgcttccaattttctgatggggaaacccaagctgcgagggagctgaagggaggccagtaacatgacttcccccaaggtctcagtgccagcaagcagggaagcatagcttgaacccagctcctcaggtcccccgtccccacccccatcatttgtactcatgcctctggtacatgacaaccttacagcgactggcagaccaatgggtagaatgggtgacagccccaggctgataaagaggagtttaagaaacgcatctggccagatggatgtgaggcagtggagagggactgaaattcttaacctcacctgggacaggcttaacagttggaggacaccgtgcaattgtaaagacaacattatgtcttcctatacgttttggagagattctcacaagactgtggcccaaagaagtttatattgtatgtagaaagaacagaagatgggatttgggggttagatttaaggagaactttcctagttagggtatgaagcataaatgcacatgttcttaggaacagtcaggggaacacaaaagaaagaccccttcagcccctt

SEQ ID NO: 20660 - DNA, 1091 bp, Artificial sequence
  DNA replication origin
tgagtctgaggaattccactgtggccaacagcaggccccaggcagcacttcagggatggcgccttgtgtaccctccagacgccagtccaaagaacctgctgacagcgtgggcagcagatggccactgcaagcagcagggacacacagggccctgtggcccgcctgcctattcaccgtgggctccagctgcaggaggaacccgtgtctgtgcacggcagcacggtcttcaaggagctttcggaccggttgggggctttcagctacggaggagggaagagaagctctatatatacagagcagagcaagaaacacaaaacaggcttggttactcccaggcagagctccatggggcttctcctttcactgggctcctgcctcgggttctgcctagcccctgggttccagaattaggagctgcgagaccctggtttctccaagacatgtgtagagctcagattctgctgggcacggggagcaagcaggcccagccacgacagggaggcagggcatggtcagtgagtgggtgagtggtgggtgggtgagggctggggaggtgatgggatgaggtgaggatggaggtgagacaccacacagaggcagagaaacagagaaaggcagacaaagaggtaagaatggatgcagaatgacaaggacagaggaacagggactcagagacagggatgaagagaaacaggaagaaagaataggagacagtgagagagaaaggggaccgggatgaaggggaaggaggggggcagataagatgttgacaggaaggaaggaaagggtgaaagaaagacagagagggaggaggagagaagacagagagacccacaggacacaagagacagacacacagggaatcacagagagagacagtctaggccaaagctccctggagatcccacagcgtggggacaaaagcctgtggtcccggctgcctagaggcacagtatgagtgaatgcagttagacatcaggaagaccttccagagagtgaaggatggacacagacaccttctaaccatctaataatggggcaggggataaagttctgagtggggaattaacaatcctgagtctttttcccaa

SEQ ID NO: 20661 - DNA, 1374 bp, Artificial sequence
  DNA replication origin
tggacacaccgttgcttaccccaaaggtcccaggccattcaccatacaatacagcacttcaaaatcagtgagaaccaccatatacatgcaggatgtccacacatgcacacggagggggcattcctggaaaatggggtgagatgatgtttctttctgtctccactctcaggagcagtggaggacatgggaaacagcagttctccccactcttcctacttccaaacatagcatgcagaacagggacattacctttggggtgggtgggaagctctgttcagggacaggggagttagtgggcttcccactgtggttctttgcctcccagtcctccactggattgcctgtgtccccagtgcggaagggatggttgctcagtgcttcttccagcgccgagggcagtgggcgggtgggagtgaggtcttgggtgggaacggatggcgggggagggatgggaatggggggtggagtgcgctgcacccatggagaggatgaggcgctcacatggccagataagggaaggacagggggcgccgggaccttgtggggtgggttggagggtggagggtggggcatcacaggcaaggcagagggagtcttggggggatagtagaacatgtccaaagggatgtcgtccaggtcagtggtgtgcaggtgcagtccgcctgcgaagcgtctcaagggtggggccaggggagacacagaaggcgggggaggcgggggccctgtggtcatctgggggtgttgcaaggaagttctgtaattgtcactctgcttagagctccacttcacaatacagcgagcactatgctcttctaatctgtttctcttgctactggagacccaccacccttacatcagaaccatggggcgccattcctctgccacctggatgcccagctgaggccatactaggctgctgttagggagtgcccaaatgcagaagagccccaagttatgccatctgtgggtggtaaggtgttcacagagttcattctctaaactggaatgcccttgagagtgtaagggggactcttagtcatgatgccaggacaacaggcctaactgagactatcgcagatgagctgggacttagagatcactctgggagtatacccagaaatacagacatatccctcctcctcaagaggggagtggggtggtaggggtgggcctggacagtggatgggcactgtgaggctagtgacgtttgctagttgtcatctcacctcccgctgtccccacagtgggtcattctgaagacagcaggagggtctatgtggaaagaagggctctgttacctctgaaatctcattatcagcagaggaaatctgctcgaggcgcgtttgacagagcctctccacccaatattgaatc

SEQ ID NO: 20662 - DNA, 1000 bp, Artificial sequence
  DNA replication origin
actaaggatttagatcacaaaccatttcttccaaaacactaaggaagggacccctacaaagcaaacaacagcaagctgtaaatttctcccagcatgtctgtgtgcctcctttctatcctctgtgcttcatcctctctccccagttcctggatgatccccaacctgggaggggaaggctgtggctgtctccaaggcagcagggcacaaagtccagcctgggccttgcctagcgcatggcgcctgccctgcctgcacacagggatattaataagtaatgactgttgcgatgaggaagagtagggcagaggaaacgtggaggtctgaggccctttggagcctgtgggacctggggaagaggaacagggcaaacccaggatctgcatcagacaccagggaccctggagatgattctcacaaaaaagagagagcaggtaccccacagagtgaaggcagaagacctgatgttatttcaggccaggggcaggaaactgaaattcaaccctgagtcttgggttgggggatggaaggctgagctccttcaaactgggttgcctgaaatctacactcacaaaatgtccttagtggctgaaatttcttccgacatgtctctttgcaacaggatgtaacagtgaatgctctctcaagctccccttggtattcgccagcccctaaattcctgctgaacttccagctatcacccacccctgggagcaggaccagaaatgcccaagaccttgttttcaggagccttctgccagtttgagctgtccctttgtgcccctacaaaagcttggcctcaacacgcagcactcagacatgggtaattaccagggtagggtctgcctcccacctacaccaccagcaaagggcacagactgggtatggctgagaggatgctcaaaacatgcttattaaatgaataactgaccccgggcccttggccccaagcccctgtggcccctacactggctagctccttgggctcctatgggcctcttta

SEQ ID NO: 20663 - DNA, 1400 bp, Artificial sequence
  DNA replication origin
taaatagtttccgtatctctctattccggtccccacaaaaaagtcccaaacctcctccctacgtctccacgatcttcttcctcaaacgcatgtgttcaggtaccacttccagagaaataccagcttgaagcccagctactgccacctcaggcccataggcacactggggcccatttgctcccaggcttcagtgggaggcgacgactcagcaccttcgactccagcctcgcagcggccccgccccacagaggcctggccccgcccctccgcgctcaggccccgcccccagctccgagggcggctggcccggtcgcggtcgcggctctttccagctcctggcagccgggcacccgaaggaacgggtcgtgcaacgacgcagctggacctggcccagccatggaccgaaaagtggcccgagaattccggcataaggtcagagctgcagggcgccccaggcttctgggactccggagtcctgggcgcggtgggtagggggtggacaccccggcactgcccctcccttttccggccccacctgatggctctggttgggctgggacacccgagggtcgtctggctggcagcagggatccccagtaaagtgagggagggaatgcggggactcccggctcaaggactgctaaacgagtcgatcttctgccagcctttctccctctgccttccaggggcagggacgtctctggggtttgaattccttccagtcttggccgcttttctgaggtgccccctttgtgggcaagcccctctccttcctagtgcccccagctcagggctgttgaggcatgtggagacagtctggggcagtatctgagaggtgagggttgggagaagggaaactagacgtctctctctctgccttttgacctcagaacatgagttagaagcatttcagccctgcctgcctaagggcgtttcttagggtctgagaagtagctgaggagctggtgctgacccgggtgcggtggggaggaagggaggaggtactgagggcgtcggagctgggctctggccggccagatccttcaggcagagccgggtccaccctggtgtgtcccagtgaggggcctcactggtggtctgggattctcaaggaccatctctggaagtggccaggtttcacacagggcatttcgagaatgattcacaaagctgtgcagaatctgctgaggccctgagaccagagagggccatcaaagagatccagcctacttccccaccaagtcttaggatgcctctgagtctggggatgaagccgcttggggggggtgggtggtatctggagctccccacaggccctgcctgaggggcaggtaactattgataacttaactattgataactgtgtgacccaaggctctcccaaagaccccaggggcagt

SEQ ID NO: 20664 - DNA, 860 bp, Artificial sequence
  DNA replication origin
gactggaaggaattcaaaccccagagacgtccctgcccctggaaggcagagggagaaaggctggcagaagatcgactcgtttagcagtccttgagccgggagtccccgcattccctccctcactttactggggatccctgctgccagccagacgaccctcgggtgtcccagcccaaccagagccatcaggtggggccggaaaagggaggggcagtgccggggtgtccaccccctacccaccgcgcccaggactccggagtcccagaagcctggggcgccctgcagctctgaccttatgccggaattctcgggccacttttcggtccatggctgggccaggtccagctgcgtcgttgcacgacccgttccttcgggtgcccggctgccaggagctggaaagagccgcgaccgcgaccgggccagccgccctcggagctgggggcggggcctgagcgcggaggggcggggccaggcctctgtggggcggggccgctgcgaggctggagtcgaaggtgctgagtcgtcgcctcccactgaagcctgggagcaaatgggccccagtgtgcctatgggcctgaggtggcagtagctgggcttcaagctggtatttctctggaagtggtacctgaacacatgcgtttgaggaagaagatcgtggagacgtagggaggaggtttgggacttttttgtggggaccggaatagagagatacggaaactatttacacgggcggggggcggggcaatctagtccgttttctctggatattctttttttttcccccccgagacggagtctcgctctgtcgcccaggctacagtgcagtggcatgatcttggctcactgcaagctccgcctcc

SEQ ID NO: 20665 - DNA, 984 bp, Artificial sequence
  DNA replication origin
aggggaatgcattttgtgtggccttttctggaccattcaaaaatcccacaagtctttccattttatcgctgacttaatagttaatgctaaggtgagaaaacagatcatattttaaggttcttctccaagagggatttacatcttaaactaggcaacaaaaatagtgtgcttgtaaaacttcagctattggggagagggacgcagaggggtgtttaggtgccccagagttacaattgtaagtggttacctgatgtaagctgctgtccatctccttgcccctgcccttgacagggcacaaagggctcaggtgcctccctgggttaagttcaggcacaagccccatacttagcctctgatttacacatttttatcacccctctcctagcccctctttcctttcatctctttccaggcctggttcatcattgtctttgatgaatctttcctttcattcctttccaggcctggttcatcattgtctttgcaccaagcactagacctaggagttaagcaaatgctgaccaaattgaattaaatgaaccagagggtctgggccctgggtgaaggtcagccatagatcaaaatgtcactgccaggctctgccaggcttcgatggatatgtgagtgtgttgggtttgggttttgttttgtcttgttttgttgggggtggaggtgttagggaaggtgggaggggaaatcagttgaggggggcactctcacacacactgattcagacccctgcggcccacagtaaaacccagccctgtccccaaggaattcacagaacaaggattgatttctccctggtggaaaagtgcaggaggaagccaggactgaaggtacgctggaggtgagggcgtagcaagggctgacagtccaggagggccatgaacctcgacaagagtatccagagaaggccgggcgcggtggcccgcgcctgtaatcccagcactttgggaggccgaggtgggcagatcacgaggt

SEQ ID NO: 20666 - DNA, 851 bp, Artificial sequence
  DNA replication origin
gctggaggttgcataggctgcctctatgcttccctagacaatttagggctgagtaatctgaatccagcctcccctggggaggtgtggccacaggccaagaaaagcagaggctaggctatggacaggcgcctaaattatggtaataagctgggtactcctgtcactctagttcggggaggagctgagagcctgggaggaggggctgagggagccctggggcatgagaacaagagggacctcggctgcggagtggaggtgtgaccctgccttagcccggggaggcacctcgggaggctggccctgcgctcaagtcctccggtcccctcgtgtccctatgggagtcctggcgtctgcgctctgctggctgctttgtgtctggctgccctggggtgagcaggcagccgagtccctgcgggtgcagcgcctcggtgagagggttgtggactcagggaggtcgggggctcgaggaatgagaaacgttaaaggaatgaggaatgggcccgcgcaggttggagagagggaggaaagagaggtttgagggagagcagagggacacccaggaggagcagtcaggggaggagggaccccgaagccaacagaggcaggcctatgaccgcgggggaaagagtccaaagttaggctgggtggaagagacccgaggtggggaactagagagagctgggggccaaagactgagagtaaacagggagatcctggctggagaagggtcatcaggaagggagagaaaggatttgagaaggctgcagggagggagaatgggggaatgctcagtggcgtgggagaggctttctagcagtgggggccaggtggtgggaggccccagtaaagac

SEQ ID NO: 20667 - DNA, 1062 bp, Artificial sequence
  DNA replication origin
ggtgcacacactcgcctccattgaagcaggagaacaagtctgcatgggagacacagagtcattgccccatcaagctgagattggcagaacccagggaggcagccctctcaggcttcacaggatccagacccccataacaggcagccccagccccaacattcctcagcagctagcacaagctggtgcctcagaccacagccctgccccctccctggcaagccggtggggtggggtcgcagggcatctgcctttgatgtgcatcaagtggcccccaggccagccccacctgggccttcagttgctagagctgttcctggctagcaagcaaggcaggcagaactgagaatggggagcatgtggggtgagcagggggactgcccagagatctgcagctgctgctcctcctcactgctccacacactcagggaagaagccacgggggtaaccaggcgatggaggagaggcctgtagcaagaacaaccatagacgaagggaagacaaagcagagcagagggcagcgaggaaaggagccatgatgtgagaggacaggtgggggacacaggacaggtgggagacacaggacaggtgggggacacaggacaggtgggggacacaggacaggtgggggaggtaggaacagacacaggacaggtgggaggagaggccacagacctaggacaggtgagggggaccatggacacaggacagggagtgggggctacagacaacacaagatgaagggcaataccacagaaagtagaaagaagccacagaaccaggtgggatggagggggaaacaaccactaaataatgaagcacagtctcactggagtcagcctgtgagggggcagtcccgggccatggtcataggaacaggactctagagaggaagctctcctcaggcagggaggagaatgccaaatggcatggtggccggggccagagtgggtggaaggagatgccaagcaggaaaaaggggtcatggaggcctgagggaagccccacctgccctctgccctttcaggcctctgccagggctctcccatgcacaacccatggacc

SEQ ID NO: 20668 - DNA, 1546 bp, Artificial sequence
  DNA replication origin
ggaggccgtgccctcagccacaggcaggactccagaggttggcaatgtggctcccagcagcaggcctggagctgtgcctgctgctgggggtgctatgtgagtgggtgggtgcgcctgggtcattgctgctggagtgaaaggcagtactgggctaagtgtctgagcaggcagagtcgtggcctgtggctggagtggagtggtgatgacagaggctttggggccgggtgtggccactggggcagatgtgcccaccttggccaggggcaggctggtgtcgggaggcaggccagagaggagctgggagggacgagttgactcaagggacatgaagggtgtggctgccagcccatcagtggctgttgacaggctggcggcagctggggtctctgggggcagagctggagacctggtggccatggtggtatgctgggctgggcggggtggtgcagaggggagtgggtgtggctgtggggaggcaggcgagcccatgggctggctgtgcccggcttcgcccttctctgtggatagcactatctccaagctcctggttgcaaggggactgacaggaacctgttctgctgctgttccagccacagttagaggggtgctgggacttgaagcactctgggcctgggtgggctgggggacccctgtcctgcttatgaccttagttactgcaggtgtcagcacagccttgtgggatcccgaggaggtgggggacctggagatggctccaggggaagccacaggtctggaggagggacttgctgtcaaggagggctgtgggggtgtcgtcctaacaggcaaggagccatggcctcggactgtcacagccttggtcatgagcgggaagcgaggggcagggggcgaccgggaggagactgtgatgttagggcttcctgcaaagatcacagtcacccttgttgtctccatggcacctgacaccatgccaggtgtgggtgtctgcagtgcaacagggagggatgaggactctggtgtatgggggatggccaggaggctggcagtcactcccttgctggctggggactccgtggggccggcggggagttgagatgcagtgagctccagtggctgctgcagggtggtctgggtggggcctggagacaccactggctcctcagtggctgtcactggtgggttcagggctgtggtgagtggggcagctggggtgagggctggcctgtgggtgggggtcctggggctttcctgtgacagctgtggctcctcatcactgggagtgggcaacccttgactgggagggagggtctcattgccaagggcctctgtgggaacccaaactgctggctccacacctgcggagacaaaagaagaggttcagaaggcggggtgactgctgccccgggggtcattgctgggcagggctgtggtgtgaggcttgaggactggcactctcggtgatggggtgagggcagcttctaacggccagatgtcagcaggtctggactccgccccagacgtcagaccctgaccccagaaccaagagacctcaggtctaagtctggct

SEQ ID NO: 20669 - DNA, 1016 bp, Artificial sequence
  DNA replication origin
cagttgtccagtgttctccactggagagcagtggggacatccggccccgaggtgacaggccctgtggtccccggggccagtgtgtaaccagactctgtgtgagggtctcgcccccacatgccgcccaggccaccgcctcctcacccacttccaggaggactcctgctgccccagctacagctgtggtgagaggcccggggtggggagggtgggggacggactgagggcagtggggggaggacagctctgggggcaggggcccaggggtggccaggcaggttcctctcccagcacctaaattcagccttttccccagagtgtgacccagatctctgtgaggcagagctggtccccagctgccgacaggaccagatcctgatcacgggccgcctgggggactcctgctgcacctcctacttctgcggtgggtcgccgccaccagacgccagcgcacacagcctgatcacagtccgccggcctcacccctgtgtccttgggcagctgggaggaaaggctgggggtcttcagatggggtgggcaaagggagaaggacaagctcactgtccaggaaacagtgtgggaggaagaggacaccgaccccgtgttccccctagattactaagcacgaggaaactggtgcttgttctgtgtaagcctttgggtggacatgagggagaacttccagattctgattccagaacggatcacgtgagaccatgcgatgctgccattagttagctcctgccacacctgggttgttgaggaggccccacccccagcaacgtgctgtgtgccaggcccctatgagaggactgctgtgacagcattgaccctcttccccctcagcctgtggtgactgtccagactccatccccgaatgtcaagaaggggaggcgctcactgtgcacaggaataccacggaactctgctgccctctgtaccagtgtggtgagtcctggctgggcacatggcgggctgcggcaggaaggggcccttcacagagttcccaccccgga

SEQ ID NO: 20670 - DNA, 997 bp, Artificial sequence
  DNA replication origin
tcacccgagcaaagagggtaacaggtgggcagggctgttggggaggactagccggctcccacctgctggggctgtccatcagcactaatactggcagtgcctgaggccaggacccccagcaggccagcctcagagacacacccttctaggagacatccttcccaaggtggcagagacaccaagtcctggcccagacctaagcaaccaggttccaccctgttccctcttacccaccctacgccagcggctaaaagctgccttggctagctcagaccctgagagctaagggatgggaagggttccggtggggacacatggccagtggctgttcttccatattcatctgtctttaatattcagatgaatggaagtacatgaccttgctagtgttttggggtaggaaaggcaagagagtcctcagaagtcatctaaatcatgcctttttatttttcagataagtaaaactgtggttcaaagaggccctgggaccacctgcgaagatcctgggattcatcaggggtctggtaagagccagaagattcgaactgaagtttggctgcctggaggggaagggagtcttgcctgggtatgtcagcaggcggaggctgtgaataagtgtggtgggggagatgaaatttggggcttcacaaatccaggtagggagggggccaaagtctggccagctgagcagggcacaacccgcaagtgagaggcatggagagtgagggagctggagccgaagtcatgatctagtggaggggcaggcacagagctggcaggtggtagcaccagggcagggctgggcgctgcaggtccagcgttggagagtctgggatggggcttgtgactccagcgggcctgaggacagagatggaggccggtgggcaaagcggggaggatctgggccgcggccgtgggggtgctggggagagacgggggtgcgagcacagggtcagtgggcggggagggactggagagcgctgggcagggcgaggag

SEQ ID NO: 20671 - DNA, 1502 bp, Artificial sequence
  DNA replication origin
agcacagggtcagtgggcggggagggactggagagcgctgggcagggcgaggaggtgggagccgcgctagagcgtggggaggggacccgcagtgggcgcgcggccttagagaggggccagggccggggccggggccgggccggggctgcggtgaggggaggcgcgtggccggccgcccccagctgtggcgtcgttcaggcccggcttagcggtgccggggcgagggattaggggcagtggccgcacctggcggggcggccgcagggctaatgctgtgtgaccgccgcggccccgcccgacaactggcttcatcccgccctggaggcctgtgggctcgttagccccgccggcgtgtgcgcggggtgcggctgcgggcggcgagtgcacgtgtgccgcggggggccctgccgctggcgctgacggccaccggctgcgcccagctccagggggtcccaggagtgaggctgccccaggggcagtgggggcgggggaacacttgattgtgtgccctgtgagctcttgtcactgtgtgatggtgtggtccggggggtctgggggtgtctctctgatatgacaatccctgttatcaccctatgtggaccatgtgtcactgtccaggaccttagcccatattcggagtatctctgtaaccagactgtctatgggacacctccatattcttagtgtgtttaggggttttgggaagagcttccaccttccttgggacctgctgctcaagttccttctgcagacacacctctggggcgcaagaccccccacaagctccttcccagcagcaatgtctcagccatccatcctgcagggcctcagacctctggtgctgagatggagacagtgcctaagttctggcacctggattcctgccctccttaaactcaggcctgctccctaagcccatcctcatcccaggcctagctcagggcccccagacatgctttaacatgccccctttcctaccaaaataattggatctgaataaagtttgtgttagaactgagaagttttatctaaccttatagacgagcccccaggcctttgcacctgctgttccctctgcctggaaggacactcacttcccttttcctagagctcaggagccacctccactgggaagccttccctgcagcaacacactccacaccatccttccttttccttgcagaaccttggatcacacctgctccggctattctgatgtcatctccatctcctggagacagttgctgcatgagaacaaaggcagggcccagacgaggtctggagggataagcggcagggatctgggcactgagctgaggcactgggcaggcagagccattgccctcgcccctaccatgaacccctacagagatgctgctagaaccttgctttctaaggggtaggagggtctggctgcctctgcctctactcaccccatagacacacaggccttctctccatccagggagaacatagctgccaagagcagtcctgcccccaca

SEQ ID NO: 20672 - DNA, 1173 bp, Artificial sequence
  DNA replication origin
gtgttaggtgtacatggcatgtaatgtgtaaacaatgtgagacttgtacatagtatgtgaggtaacatggagtgtgaggtgtgtgtgtgtgtgaggtgtacatggagtgggatatgtacacaatataagagatgtacccagtgtgtaacatattcatggagtgtgaggtagacatggcacaagagagatacacacagtgcttgagatatatgtggtatgtgaggtgtacagagagggtgaactgtacattatgtgagaggtgtgcagtatgtgagaggtgtacagtatgtgaaaggtgtgcagtatgtgaaagatgcacattatgagagaggtagatggagcataaggtgtacattatgtgacaggcatagagggaacgtgagctgtacattctgtgagaggcacataggaattgtgaggtgtacactatgtgagaggtatacattatgtgaaagatgtacattatgagagaggctgcaggcagcatgtggtgtacatcctgtgagaagcgtgcagggagtttgtggcgtgcgttctgtgagaggtgtgcagggagtgtgaggcgtgtattctgtgagaggcatgcagggagtgtgaggtgtgtattctgtgagaggcgtgcagggggtgtgcggcgtgcattctgtgagaggcatgcagggagtgtgcagcatgcattctgtgagaagcgtgcagggagtgtgaggcgtgcattctgtgagaggcgtgcagggaatgtgaggcgtgcattctgtgagaggcgtgcagggagtgtgaggcgtgtattctgtgagaggtttgcagggaatgtgaggcgtgtattctgtgagaggcgtgcagggagtgtgaggcgtgcattctgtgagaggcgtgcagggaatgtgaggcgtgtattctgtgagaggtgtgcagggagtgtgaggcgtgcattctgtgagaggcgtgcagggaatgtgaggcgtgtattctgtgagaggtgtgcagggagtgtgaggcgtgcattctgtgagaggcgtgcagggaatgtgaggcgtgtattctgtgagaggtgtgcagggagtgtgaggcatgcattctgtgagaggcatgcagggagtatgtggcatgcattctgtgagaggcgtgcagggggtgtgtggtgtgcattctgtgagaggtgtgcagggagtgtga

SEQ ID NO: 20673 - DNA, 1704 bp, Artificial sequence
  DNA replication origin
gtcgtccgttgtggcaaaggagcagagagagccgtcgggggccgtcaggtctacgtcgcggagcggtggcgacagtagctccatatcctggcggtggcgcggcacggtcctggcttcgcccaacccaagcggcagagagtggccggaactttctgccgctcgggagccccggctgtagatagcaaagtgctggcagtctgaatgcccacccactgtcccccacccctccctctcctgtccggcctgatttgtggttaaggaaagcggcggcagcgccccagggcttcctcacccctagcttctcgccaggcgccctgggctatttatccgtagtagcctaaacgccccggagcccaggcgggcagctgggggagggggagtccgaggccaataggaacactgcggggcggggcttgggggggtccccggggtggccgcaggggcccgcagactggccagccagcccgcccctccacactggcgtgcgcgctaggtcccctaccgggcagggagggagggagcgaccggcagccctaggcggctgcacttggctctccggcacgccctttccaaacctctccaacacccgactgctgtatccgcgggaaacgctggctgcgcgcgctcacctctgagctgactttcaatactcctctgtcccctgatttgtgggggacccatgggtagagcggctgtagaaatcaggtcgtgagagatttggagagaggcaaggcattgggggcacagagctgaggagtgagaccgtgaaagagggaccgaaagaggctgagagacacgcagaaagcagaaagcttagagcgtcaggggcagagaaacgcacgagtgcaacaacaggcggagagaccccgagagttgaagtgggcgagcccgagacaaacgggtcgtagaggctctgatattccgccagtccccgacctgggagttgctcagcaggtcgtgggcccagtccttcttccctagacgcttagaaacccagctatggttgtacaggaatcggagattgctgctaaagcttcgcgccaatctctccaaactcggatcctgcccaggttaggaatcccctccatctaaatctgcacgtttccacagcaggggtgtccagtgccatgcctggggtctaggctgagctgcctcttcagctgggaagaaaacccttctgctcggggcttggctccgcctcactcgcggtgctgagtcaaggaaagtgcatttcgccaaggtgtcaaacttcaggacctggcctgagaacctgacctcatctcacctgaagtctccgagagtgcggtttgcagaccagttgagtgcagactccagagtttcccaactgtgtgattttgtggaagtcatgtctccttcctgagcctcagtttccagttatagatttggggatgacagtaatttcttggagtaattgtggtggggatgacagtctgaagagaccaaggatatggaagccctcaggcggtgatgtagggttattcgagcaaggggctttcagagttggatgctgtgtcccgcaggcttacaactcatctgtggtaccatgccctgacggagtgccacgagtctccaggccttagctgtgtctctttcctgcagcctcactggaaaggctggaaacaggaggaggcaaccaccccatgggatgtgggatatctggctcccatacaagcctcagcatac

SEQ ID NO: 20674 - DNA, 1325 bp, Artificial sequence
  DNA replication origin
tggacccgcgcctgatgcacgtgggcgcgctcctgaaacccgaagagcactcgcacttccccgcggcggtgcacccggccccgggcgcacgtgaggacgagcatgtgcgcgcgcccagcgggcaccaccaggcgggccgctgcctactgtgggcctgcaaggcgtgcaagcgcaagaccaccaacgccgaccgccgcaaggccgccaccatgcgcgagcggcgccgcctgagcaaagtaaatgaggcctttgagacactcaagcgctgcacgtcgagcaatccaaaccagcggttgcccaaggtggagatcctgcgcaacgccatccgctatatcgagggcctgcaggctctgctgcgcgaccaggacgccgcgccccctggcgccgcagccgccttctatgcgccgggcccgctgcccccgggccgcggcggcgagcactacagcggcgactccgacgcgtccagcccgcgctccaactgctccgacggcatggtaaggccgggaccccaggaagtgaggaagttagggcggcgctcgggatatcagggacgcgtttccgagggcggggagctggccttgcgggaggtttgggccaggatccttcccgagagagaggacccccttgtcctgggcagctgtcactggggtagcctgttttggaagtgtgcgggcaagcgttcgagctgccccattgggggcgctattagaacactgcagcgcgaacgtgaagatctttttctctacttatccctacttccaaaatgtaaatttgcgccccttggtgactgtccgcccttggtttggccctgcatgttgcagacctcatctcctacccacccgtaattacccccccaaccaggacaggtctgggcccggaactagagccttaggctagagttagggagggggcggctacaggaattggtgttcgggcctcgagccgtcccgcgggcctgactcagtcgcccttgctgtttgcagatggactacagcggccccccgagcggcgcccggcggcggaactgctacgaaggcgcctactacaacgaggcgcccagcggtgggtattccgggcctctccctgctcgctcctcctccttcatggagctgtcctggcctctatctaggacgctcccacccccactcacacacgcctatgtcctgggaagtggtgcaggagatgaaatactaagcaagtagctccctgtcttttggattgtcccggactctaactaaagtcctcagtttccaatctgtctcaaagtactgggcccgggggtgggaggcttgtcgcggccccacccctgcttactaaccgagccc

SEQ ID NO: 20675 - DNA, 1234 bp, Artificial sequence
  DNA replication origin
tctctttgtctctgcccaactctgcccatttctgacttaatttagcctctctgtctctccccttgtcctattcccatctgtcaatccttgccctgcccctctccaccccttcaagccttttacccaccacacacagattttcctgtggctagattgggattcccctggccaagtaaggagagcgatgtctgtggcacagctttgtccccaggctcacaacggcatctgtgggtcagggtagagggacagctgtctgcacagttagaaagtgccagcagtaataaaagcctcatatcttcttaattaaatcgccctttgcccaggcatcctgtgttcgattgggttgagctgggatcaataagcctctttcccaccccagccacccctggagacgggcctgacctccccagtcctgcctaggcccacctggccacctccccagaaggctgggagcttctcaaggccagaggctgggtcagattcatctcttgtgtccttgtgcctgggacggatcctgaaacaagtaaggagtaaaggagtgattgctttactgagtaaaccaaggcactagcagcaggcatgggccaggaaggctttgaggttcaaactggaactcccacccccaggaccaactgtgaagatggaggaatcacagcaagcagcagctcccacccagctcccagacataacaccagcttatcacccagggcagttgaagccctaggaagtgcggggtgggggtgtcagtgctcagggaaactacgagcagttgctgcttctgacctctgagggcagaaggtccttttcataaggggtctccacctagggatccagggttagtgtgggagagtccgtgagcttggatggatgtggcactcatgggagactccctctgtctgaagctataaagggcccagggtcagtaaggagtccaaaggggttaataggggtccaggattgattgttagtggagggcgtagaggataacgtggtgtgtgtgtgtgtgtgtgtgtgttggggttcatgcaagacattacccatggaaggaacatggggcctccaggttccgcgagaagggtcggtattaaaggattccttggagcggtcagcactggtccgggccagggtgtctctgatgacaaaactccgggagagctttgtctcaccagggatcagatggtccctggtttggaaggcaaggggagggtgccaacgcccttctcacctcagtctg

SEQ ID NO: 20676 - DNA, 597 bp, Artificial sequence
  DNA replication origin
cgcacgggcaagctgcactgcccagccgacgtgtgcgggccgctctacgaggaggagctggccttctggggcatcgacgagaccgacgtggagccctgctgctggatgacgtaccgccagcaccgcgacgccgaggaggctctggacagcttcggcggcgctcctctggacaacagcgccgacgacgcggacgccgacggccctggcgactcgggcgacggcgaggacgagctggagatgaccaagcgcctggcgctcagtgactccccggatggccggcctggcggcttttggcgccgctggcagccgcgcatctgggcgctcttcgaggacccgtactcgtcccgctacgcgcgggtaagtgacaatttacccatcagaagagcggggcgggaaggcagcgtcctgtgcctccccgcgggcaggggtggaccggagaactggcgcctagggagttcagaatcgaaagggggtgtgtgcgcatgtgtgcacgtaccagggtaagagaggaagggtgtccgccggggttctggttttctatgtatgtcagtctgtgtgttgccaagtttaatatgtatgagtatgaatgggtgtgtt

SEQ ID NO: 20677 - DNA, 936 bp, Artificial sequence
  DNA replication origin
ggaggagggacctgcccaagggcactcgggagctgaggagggcagagcgggattagaaccccagcttcctgccgcccgcccggctggcctagctgcactgcgctgcctctctgcggctcatctgcgcacagaccagccgcctgcccgccctcctccccctctgtctttgctctgccgcctctgctgtcacctttgtttacccctcccccacacggggccccgagactcctcacaccagcgggtcgggacttaagtcgttattctagatctaggccagcatgttgtgtgtgatcttgcatatgtgtgtgaaggaaaggctgtatgtgtgagacagaggctctttgtaagagagattgtgtgtgagtgtgagagacttgtgtgtgtgagaataaatgtgagactccaggcgtgtgtgtgtgtgtgtgtgtgtgtgtgtgtgtgtgtggtgagactgcgactctgtgcgagcttcctgagtccttgtgtcaggggttgtgtgtgtgagagaggcggattctgtgttttggatggactgtgcgtgtgtgagaatgagactgtgtgggagagagtgtgtataaggaagagagactgcatgtgtaagagagatgctgtgtgtgaggtttggagagtgcgtgagagtcgaggtgagtgtgtctgcgtgagtgtgtggctgtgtgtggcaagtgtgaaactgtatatgtggagctcatgtgtgagtctgtgtgtgtgtgtgtgtgtgtgtgtgtgtacatgcgtgtacacataaggcaggaggctgtgtggggtgggggtccctgtgtgtgacagactgtatgtgaaggtgtgtgtaagacagagattgtgtgtgaaatcctgtgtgtgacagtgtacgtgatgtgtgtgagaacccacgtgtgtgtcagtgtgctgtgtgtatgtgagagagaggtcctgtgc

SEQ ID NO: 20678 - DNA, 1681 bp, Artificial sequence
  DNA replication origin
cgggcagtgggggcatgtgatagctaatcaggggagccctggctgacatccaggccccaggcccccagaggcttcaggtcagtttttccgcctaattaaatctgcccagcgggggtgtgcagcctttgagttaatccatgcggagtcagtgatgcagagcaggcgggatggccaattgtcctaaataaattgtcagttgagttgggtttagaaactgaattagcctcatctggacttccgcgggccgggaatgctcacagtgtgctgggccggctgggggatgggagggagggcagggaggaaatgggatggttaggggtccagtcccttttttgttctgtcaataaatgcctgcaccatcaggcaaaggaggcctggcccccgagcgcagcgtctgggtgccagatgctgcaccggcgcaaggggcagtgggcgggaggagctccccaaggtgctccgtggagggtgtgagcagagtgtgtgtgagcatgttccaggaacacggctgtgtggcagcctgcttggggaagtctgcactggggggagtgttagcggggtaggtagtgtcagtgtggggtaggtgtgtcatgtctacataacctgactctaggcctgtgcacaagttttgtgtaaatggtcgctacgtgtgctgtatgtgattcatgtgtgtgcatggacagatatgggatgtgtttgtgtgtgtgtggacatgtatggggtgtgtggggaacacatatggagtgtttgcatgtgtgtatggagacaggtatgaagtggtgtgtgtgagtgtgtgtatggaactttgtgtgcggtggtgtgtgtgtgtgtatgggactatgtgtggtgtgtgatgtgtggtgtgtatgtgtgtgtctatggggctatgtgtggtttgtgttgtgtgtgtgtatatagggctatatgtggtttgtgggggggtgtgtgtgtgtctatggagacgtgtggtggtgtgtggggggctatgcaagtgtaggtgtgtgcatgtgtggggtgatgtgtgggggtatgtgtgtgtgtgggcgtgtatatgtgcacgtgtggggtgctgtgtgggggtctgtgtgtgggtgtgtatatgtgcatgtgtgggctgctgtgtgtgggtgtgtgtgtgtgtgggcgtgtatatgtgcatgtgtggtgtgtggggtttgtgtgtgggtgtgggtgtgtacatgtgcatgtgtggtggggtgtgtgtggaggtggatgtgtatataagcatgtgtgaggtggtgtgtgggggtctgtgtgtgtgtgtattgtgtgtgtggggtggtgtgggggtttgtgtgtgggtgtgggtgtgtatatgaacatgtgtggggaggtgtgtgggggtgtgtgtgggtgagggtgtgtatttgtgcatgtgtgggggtctgtgtgttattgcgtgtggtgtggtgtgggggtgtgtgtgtgtgggtgtgtatatgtgcatgtggggtggtgtgtgggggtctgtgtgtgtgtgtgtgtattgcatgtgtggggtggtgtgggggtctgtgtgtgggtgtgggtgtgtgcattgcgtgcgtggggagtgtgtgtggggggcagtgcatgggtgtgagtgtgcatgtgcgtgtccgggccatctcccagggaaccagggtctggctgggcactctgggcacgtgttctctgagccgag

SEQ ID NO: 20679 - DNA, 782 bp, Artificial sequence
  DNA replication origin
aaagggaaaaaaatgagtgttttcagtctggagaacagaagacttggaaggggaagggaaggggaagggaagggaaggggaagggaagggaaggggaagggaagggaaggggaagggaaggggaagggaaggggaaggggaagggaaggggaagggaaggggaagggaagggtaacgggaagggaaggggaagggaaaggggaagggtaagggaagggtaagggaagggtaacggaagggtaacggaagggtaacggaagggtaagggaagggaagggtaagggaagggtaagggaagggtaagggaagggtaagggaagggtaagggaagggtaacggaagggtaagggaagggaagggtaagggaagggaagggaagggaagggaagggaagggaagggaagggaagggaagggaagggaagggaagggaagggaagggaagggaagtcttaaaaagtcaaagtacaccttaatattagaaaggccattctaaaaataaagctctaccaaaaatcaaaggactgtctccaggtgggcctaatcaatcacacgtgccctttaaaagctgagagttttctctggctgatggcagaaggagaaatcagaaagactaggagcacaagaaggatgtaagggaccattgctgggtttgaagatgtggtgctacataaaagaactggagagcagcatctattgctgacgacaactcaaggctgacaaccagcaaagatacagggacctcagtcctataatctcaaagaactgacatctcccaacaat

SEQ ID NO: 20680 - DNA, 1522 bp, Artificial sequence
  DNA replication origin
gcctgcggtgtttggccgcgcacaaggcacagaccctgcctatttgctgacactctgctgtgaccggttcttgcatgtgttgggggagttgggctgctgttggtttgacgggagcattgggagagacagggtcatcttgatgtgtgtctgggagagaggagggttcatgcacaggagcgtggcaggtggccgaccagcatgcacgggaacaagcagtcgctgcgtcttgtgcttcttcatagcacgtatcacaattgtaatgatgtgtataatttattattaacgtcagtctctctggctggaaagtaagtgtggtaagagtgggtgctgtgcctgtcttgttcacggtgcctctcttggtgtctggcacattgtaggtccccagtaaatactcgttgacgaatgaatgaacgagcatctgtgtgcctacccatgtgctggtgttggggaaatacacatgagtgaaatacacgagtgaaggacttccagctcttgtgttgggggagagcaaaattataacctgtattgctgttaaaatcagtattagttgtccaatttttaaagaagtaatgatcagtacaaggcggcaattgttgaatgtggggctgcaatttggcaggagggagagcatggcgtgacctgcggtagtctggctggctgggcgtctttgaggtggcccgggagctgggggtggagttggggattgaatgtgtgctgtctctggctttttccaggcaggagactggcgtctgtgtggacagaggaaacagaaatattgtttcagtacagacaaagccgaatattaaaggttgtaaaatatgtttaataggttgttgacacccttctgctgtgtttggaggactggtagtgtgtttttcctgctgtataatctgaaactgtgggggtgtgttggtcggctagggctaccataacaaaataccacacaacagaggcttaaacaacagaaatttattttctcacagttccagaggctagaaggccaagatcaaggtgtgagtaggtttggtttctcccgaggcctctctctggcttgcagatggccgccttctcactgtgtcctcacatggcttttttcactgtgtcctcacatggccttttctgtgtgcgtgagcatccgtggtgtctcttcttttaaggacaccagtcatattggattagggccccacccttatgacctcatttaaccttaattgcccctttaaaggccttctttccaaatacagtaaggtactaaaggttagggcttcaacacgtgaattttgggggaataaagttcggttcacaggaaggggatttaccttgttaggggtgtgtgtgtgtgtgtgtgtgtgtgtgtgtatgtgtgcatgtgcacgtgtgatatgtctggagtgtttgtgaggaagaaaggcaaacaacagttgtaataggttgtgttaaatttcccttcgtcttgctttatcctggatttagggcctctcacagtgttacaaaaattggtaccgtaatttgaacctcagag

SEQ ID NO: 20681 - DNA, 1191 bp, Artificial sequence
  DNA replication origin
gggaggcggctccggggctgtcgtccggccccgcccaccactgatccccagtggcccgagggcccggccgcaccctctctcccggcctgcgggccgcttcccaccacagaccccgccccgcgccctacccatcacgcgtccccggtccggctccggcgctcacctacccccggcaggcgccgcccccgtgccgtccctcccggaagcgccggcggagcgtcctcgcatggagcgcgagcccagcgcctcggaggccgcccccgcggcggccgcgctcttcgcctgggtacgtgactccgcccccgggccggtgcaggccctgaggggcgccgagatgtgggagctgctggccgcggcgtgggcagttcaggggctgggcggctgaggtccgagccgggctctgggttgaaggatcctgggctgggagcggagggggagcggaggaggagcgggcgggcggggaaggaagggtcttcgcggtcgacttaggggcctgccggctggcggggtcagggccggaggggctgtggcgccgcgggaagaacctgcctcggggcagagcgtctggttccgcgagagccctccagcccgaatagcgcctggaagacagcgcggagggctcggtggagaggatcgcccggtcccagagctccgtggggccacctgtgccccccacactcctgatgcctggaggagggagaccctgtcccagcctggcgaaagcatcctttagatgtgaggcctgcggtgtttggccgcgcacaaggcacagaccctgcctatttgctgacactctgctgtgaccggttcttgcatgtgttgggggagttgggctgctgttggtttgacgggagcattgggagagacagggtcatcttgatgtgtgtctgggagagaggagggttcatgcacaggagcgtggcaggtggccgaccagcatgcacgggaacaagcagtcgctgcgtcttgtgcttcttcatagcacgtatcacaattgtaatgatgtgtataatttattattaacgtcagtctctctggctggaaagtaagtgtggtaagagtgggtgctgtgcctgtcttgttcacggtgcctctcttggtgtctggcacattgtaggtccccagtaaatactcgttgacgaatgaatgaacgagcatctgtgtgcctacccatgtgctggtgttggggaa

SEQ ID NO: 20682 - DNA, 1210 bp, Artificial sequence
  DNA replication origin
agcacagggttgggggtaaggtcacagatcaacaggatcccaaggcagaagaatctttctttgtacagaacaaaatgaaaagtctcccatgtctacttctttccacacagacacggcaaccatccgatttctcaatcttttccccacctttcccgcctttctattccacaaaggcgccattgtcatcctggcccgttctcaatgagctgttgggcacacctcccagacggggcggctggccgggcggggggctaacccccccacctccctcccggtcggagcgtgtggcctggcagaggggctcctcacttcccagtaggggcagctgggcagtggcgcccctcacctcccggacggggcggctggccaggcggggggctgacccccacctccctcccggacagggcggctgccgggcggagacgctcctcacttcccagacggggtggctgccgggcggaggggctcctcacttctcaaacggggcggttgccaggtggagggtctcctcccttctcagatggggcggctgggcagagacgctcctcacctcccagacggggtcgcgaccgggcagaggcgctcctcacatcccagacggggcggcggggcaaaggcactccccacatctcagacgatgggcggccgggcagagacgctcctcacttcctagatgggatggcggccgggaagaggcgctcctcacttcctagatgggatggcggccgggcaaagacgctcctcactttccagactgggcagccaggcagaggggctcctaacatcccagacgatgggcggccaggcagagacgctcctcacttcctagaaggggtggcggccgggcagaggctgcaatctcggcactttgggaggccaaggcagcggctggggaggtggaaggttgtaccgagccgagatcacgccactgcactccagcctgggcaccattgagcactgagtgaaccagacaccgtctgcaatcccggcacctccggaggccgaggctggcggatcactcgcggttaggagctggaggccagcccggccaacacagcgaaaccccgtctccaccaaaaaaatacgaaaaccagtcaggcgtggcggcgtgcgcctgcaatcgcaggcactcggcaggctgaggcaggagaatcaggcagggaggttgcagtgagccgagatggcggcagtacagtccagcttcggctcg

SEQ ID NO: 20683 - DNA, 888 bp, Artificial sequence
  DNA replication origin
cttcccggccgccatcccatctaggaagtgaggagcgtctctgcccggccgcccatcgtctgagatgtggggagtgcctttgccccgccgccccgtctgggatgtgaggagcgcctctgcccggtcgcgaccccgtctgggaggtgaggagcgtctctgcccagccgccccatctgagaagggaggagaccctccacctggcaaccgccccgtttgagaagtgaggagcccctccgcccggcagccaccccgtctgggaagtgaggagcgtctccgcccggcagccgccctgtccgggagggaggtgggggtcagccccccgcctggccagccgccccgtccgggaggtgaggggcgccactgcccagctgcccctactgggaagtgaggagcccctctgccaggccacacgctccgaccgggagggaggtgggggggttagccccccgcccggccagccgccccgtctgggaggtgtgcccaacagctcattgagaacgggccaggatgacaatggcgcctttgtggaatagaaaggcgggaaaggtggggaaaagattgagaaatcggatggttgccgtgtctgtgtggaaagaagtagacatgggagacttttcattttgttctgtacaaagaaagattcttctgccttgggatcctgttgatctgtgaccttacccccaaccctgtgctctctgaaacatgtgctgtgtccactcagggttaaatggattaagggcggtgaaagatgtgctttgttaaacagacgcttgaaggcagcatgctcgttaagagtcatcaccactccctaatctcaagtacccagggacacaaacactgcggaaggcctcagggtcctctgcctaggaaaaccagagacctttgttc

SEQ ID NO: 20684 - DNA, 2127 bp, Artificial sequence
  DNA replication origin
ttctcagttgacaactttgcttcctatttcactgaaaaatagaagcaatcagatatgaacttctggctgggcatggtagctcatgcctataatctcagcactttgggaggccaaggcaggaggactgcaggttaggaatttgagaccagcctgggcaacatggtgaaactcccactgtactaaaaattttaaaaattactcaaacatattggcaaacaactgcagtcccagctacttgggaggttgagatgcaaggatcacttaaacctgggaggctgaggctgcagtgagccatgattgcaccactgcactccagctcaggcaacagagcaagaccctgtcttgagaggagaggagaagagaggaggggaggggagggcaggggaggggaggggaggggaagggagaggggaggggagaggggaggagagaggggaggggaggggaggggaggggaggggaggagaggaggatcaggtgaggagtatgccaaggagtgtttttaagacttactgttttctctttcccaacaagattgtcatttcctttaaaaagtagttatcctgaggcctatattcatagcattctgaaagaaagaaaagaaaagaggaaagaaagagagaggaaggaaggaaggagaaagagagaggaaggaaggagaaagagagaggaaggaagggaggaagagaagaagggaggaagaaaagaaggaaggaaggagggagggagggaagggagggagggaaagaggaagaaaggagggaaagaaggaaggaagagagagaggaaggaaggaggaagagagaagaaggaaggaggaagacagagagggagtaaggaaggaaggaaggagaaagagagaggaaggaagaaatgaaggaaggaaggaaagaaagaaaaaataaaagagtgaaaacggactggagaagaagaaaccacagttgctgctatatccaccagcctctctgcatgtcctggcctcagccctgctgggctctggtactgaccacttccttccttcctaatttcctaattgactaggccagctgagcagggcttttctgtgctgaggaggtaaatctctggatatctagactgaggggtggaaggagccttccagggcacacatgagacatggcaggggtaggctgctagttttattttgttttcttttagacacagggtcttgctctgttaaccaggctggagtgcagtggcgtgattatagctcactgcagccttgacctcctgggtctcccacaatccttccgcttcagcctcttgagtagctgggactgcaggtgcacactaccacacccggtccatttatttttatatttcgtagagacaagatcttacagttttgcacagagtgatcttaaactcttgaccccaagtgatcctcctgccttggcctccaaaagcattgggattataggagtgagccactgtgctggacctagtctgtcagctttgaagctttagatatgaactcagagggacttcatttcagaggcatctgccatgtggcccagcagagcccatcctgaggaaatgactggtagagtcaggagctggcttcaaagctgccctcacttcacaccttccagcagcccaggtgccgccatcacggggctcccactctcaactccgcagcctcagccccctcaatgctgaggagcagagctggtctcctgccctgacagctgccaggcacatcttgttccctcaggttgcacaactgggataaatgacccgggatgaagaaaccactggcatccaggaacttgtcttagaccgttttgtaggggaaatgacctgcagggactttccccagggaccacatccagcttttcttcgctcccaagaaaccagcagggaaggctcagtataaatagcagccaccgctccctggcaggcagggacccgcagctcagctacagcacagatcaggtgaggagcacaccaaggagtgatttttaaaacttactctgttttctctttcccaacaagattatcatttcctttaaaaaaaatagttatcctggggcatacagccataccattctgaaggtgtcttatctcctctgatctagagaggtaagcagggtcgggcctggtagtact

SEQ ID NO: 20685 - DNA, 1745 bp, Artificial sequence
  DNA replication origin
ttttctactttagctcacatttgaggtggtaaaagttaatcttgaggtccctttctcctacagggctgggggaaaattttcacgtgagagtcaaacagtccttttcagatacatccagacaaggtttggttagaaataaaattacttgggctctctggtggatgggttctaggcaaacaactccgcccaacagcagaggccctgcactgcgttgtgcctgcagcacctcgtgcgccttctgcagccggccaaccacctacaccgcagcccgcccacccgcacgcgggggcggggcgggcaggcagaggcgcaggcgcggtgcttcgcagcccgcttccggcctcacacctgccaagcatcacacctgccaagcatcacacctgccaagcatcacacctgccaagcatcacacctgcgatgcctgcacgagctgggtgcggtccgcgcagctgcagtaagggggcgacccggcgtctgttagtcggcggttcatctccttcgtgcctcgatgagctttaacgccattttcctccattctctttcttcacctcttgagtgagtggccatgagctgggctgcaagagtcctggggagcagccagagagcgggcgccgcgggagcgaattgtttttgcccaaggatggttctgtgtctccgccaggcggcatgtgacctgctcgggcgcgggtggcccttcacccctgtgagtgtggccagaagtacctctcacctggacctgcggaccccgggcgcagtcctggagctgagaactggaggttgggggaacagcagggtaaaggggagagaaaagggggtcagctgcgggacggagtgccgtcccagctgtagtttcatgtttggtggagcaacccctgttcctttcctctctctctctcttaattcctcttaactgtactcacgcttccttctccttcccctggtccgcttcatggatgctgagctgcctggccagaacctacccagcttctttgctggtcagatttgtcggtcttttgtgtgtctgcagcacctccttccacacgggcccaggagttctctatacgcgctctcaccgcaggtcttggaattccaagccatttccaattccaggtcttggaaatggctgtgcaatttgtcttcactgttaggtttccaagatggcaactatcaagagtgaacttattaagaatttcgcggaagaggaggccattcatcacaataagatctccattgtaggaactggatcggttggtgtggcttgtgctatcagcatcttattaaaagtaagttgtgtgctctgcaccacagggttcacctcagttggaggcgaggccacagcgtatggttgtggaggttgtgtccagttcaaggtggtgagtggggagccagtgtgaggggcatcagaggaaaaggtgccctttttttagttgttcacccagagggcgctcctttttaaaaattgtatgatgatatcatgtgggttagaagcatctctgtgaaagtatgttgacatttcactttcacgtaatgacaatatgaggtacccctttgcttgatttggaaactcagctcacaaaacaaactggagagaaataggtggcagaaaagagtatacaagcgtgtcagtgatggtaggcagcctacgagtaccaaatacaataatcttttttcatttaaatatctctctcccatttcctagtctgtatatctttatttcccttcgttccttattcatgttaggttag

SEQ ID NO: 20686 - DNA, 1026 bp, Artificial sequence
  DNA replication origin
cgcgggactccggccgccacgggacccccgccccgcctcggccccttcggcagctcggcctgccgaagtccggtggccaggccggtgggctccagccgcgccgggcactggctcgctcgctcgctcactcaccacagtgaccggggacaccatggcggcggcggcggcggctggcaccctgctccgggctgcagcggccaggacgcgcccacggccaggtaagccggcgacgattctacaaagcccggagggacggacaatacctcccgagcgcccggcgccggggttctgtcagctagccccgtgacgtcaccgctgccagggccaatgagcgggcgggagccgggggggcggggcccggctggcggcgccggccaggcccccggctgctgctcggagaaaggaggcatctcccaggggtcagaaggcggataccccccaggccccgcccccttgggaggccgtgccaaggcgtccacggaacgtgaacgtgaccgtgaccccggtgcctgggtgaggactgagcttggctgagagacaaacacattgctgtcctggacgcacagccacatacattttctcataacccgggagcaaaaggcaaagacagattcccttaagcctttaaacatgcagtccacgccgatacgattgcaattggactcacaaccttcactgtgtacaaacacacatccaaatcatcagcaaacacacaaccttcgacttgaaaagcggcacgtatataggtatgcagcagccatggacccataatcgtagcatatacatcacacatacagaatcataattacccttaagcactcaacaagtacacagatccaaaaccaacaaccacaaattgacatatatgctccatgtaagaaaagagacatatacagggactctacagcagctcgtagacccatgaccctaatatagaaacaaacacagataattggccgtaggcacacacctcttacaactcagagaccactgccacacatacaagagcaccccaagaatgacaga

SEQ ID NO: 20687 - DNA, 1726 bp, Artificial sequence
  DNA replication origin
gggtgctgacccacgatgggctagatgagggcagccagagcacaaaatacacgcaggtggccttgaagaacggcaccagtttgggtccttcactcttcacctggaggacacaggacaagggcagcactcagaacttgggggttgaaagccagcaccctcagcctaggcatccaccccagagacactcccatccatacccccacctcacttccacccccaacctgagaagactgacacagagaaacccagcctggcctgcctctaccagccagcaggttgtggccaaacccattactgccctgaggctcagtatattaggaggggcacccttctgcagcctagtgtgcttctcccttcctgccccctccttctccctcctcagggcccctttagcccctcctctctgccagcaacagcccccagctgttcactctggaatggagtgaagtcagtgggaaaccacagagacaccctgactggccaactcgtgatcctcagcatggggccagggtgcagccttagggccctggcaacaccaggtgtgtgccaggaatgtgggaaagcaggcaatggcaatcacctcagccaccacagcctctctcctcctcaaccagtctgttcctcagcctccactccacctgccccagcctgaaggtggcatcaagggcaaggagggctatgctagggatgctggctagataaatggacccatgagttgggagcaagaaaattgtccttcaaacaccaaagatttcaaggattgggggaagggagggtgtgtgtcagtcagcctcatttcccagagaacaagagcaactcaagccacaccagaaagaggcaggaaaggggggagaggttctattcccagcttctgatctggagccagcagacaggctgggagatggggaactgagagggggaagttagagcagctgacttggtctcagccggattagcagagggcagctaaagaaaggttgtacccaaggccactgcaggcagagtccaagctgggggagggggctgcagcgatgttctgaatctgtgatccttgaaactcctttccttgggctgctaacagatccattgagggtgatatggagcagctggagttccctgtacacccacactctgcccaaagcgattgtgtctctggctaggtgagctgcccagcacaggacttgggaaacactcagagtccagacgaccaggtacctaaggactgatcagactgtgatgaggaggattgggaagaggcggatgggtggttccagggtccaagcctttccttgttctgccagaggtaagagcagtgagaagagatgacttccacttcccatggaaattaaggctggtcagggtaggggcatggtcagaggaggcggctggaggggatgcccaggcccacaatgcccagcaaccacctgccagcccctgggagcattaacctccgctccatggcctctcccagccccatattttctagaaggagatactggcagtagctggagagaccctgacagttatagggaacccagtagtagaataaggaggatggggagacgaaacaaaaggttcaagttgagaaagtctgaaaagcaggggatgtcatagagaatgcccccttttcccccagcgcgttatcagcgcttcttagactcaggggcgtccgccaacttgtttacaaaatgaggaaggttaggaaacaaacttgggacggcattcc

SEQ ID NO: 20688 - DNA, 1157 bp, Artificial sequence
  DNA replication origin
cgaggctagtaaatggcagagcagacttcagaaatagttttccgactccaagacaccagctgcctgagacttgccccatcttatcttccatcggacttggcagatggctggggtggggacataatacttcaggtgccccaaggtcgctgacagatcttccaactcttccagatttccctcggccccccacaaacctacggttgtttgaggaagtccccaacacagtgactctgacctggaaccacagcccagatgtgcaggaggacggtgaggctcactacatcatcatgaagcgggatgcaagcacagccacctggtacacggcagccgagcgtgtcttcagcaacaagtacacagtgacggggctgctcccaggcaggaagtactacttcagagtggtggctcggaatgaaatcggtgacagtgagccacttgactccagggacacctggctcatcaataaggaccagagtgagtctgggacttgcagttagggttaagtctgggtgccctgatggtggggatgacataagggtcccaaagggtacccaagaggcaagataaaatctgaaaaccattgagatagaacggttaatatctgggacgctgcggagagaaggaaatattggctttcttcggggtacttaggggtgagactaaagtggaggtggggaggtacctttgggggcagagaggacggtggaggggctgcggagggacatagagcgcaaacgcgttctgctctgaggggagggtctaacggggctgagaacaggggagggctctagggagccgggaggatgtctgggatccctggaggctaggggttaagggtgggggccgcgtcgggaaactcgaactgaggagctaaagggataagaggggagactgtggtcgctgatatgacgtaggggaagcttggaggcggagttaaaggctgggaataaccgggtccaggaagctggcgctggaatgacatctcggccccaggggtgtgggaaagcgtggtttgggtggcagaaccctggagtggctggggacggggctggggggtcgggggaggcctgggggcgggtggggagcccttaagaaccagtgtaacattgggcccccagagttggtggcgctgggaatgtggcctaggtcctcggggttcc

SEQ ID NO: 20689 - DNA, 1382 bp, Artificial sequence
  DNA replication origin
ggcgggggagaagccatgagcttgtaggtgggccaggcatggttgagctttgcctaccttggacagatccatacctgcgatgaatacagaggcttcactttccgtgcccttggcccggaatgtgtacttgccctcgtgctcagggcccatactgggaaagatgagcttgtgcactgcaccctgcttcacaatctgcatgcctggcaagtccgtgatctgggggtcaggggtgggcctgagtgtgagcataggccaggtctacctccttcacccccttccctggcctctgcttcagacctccttgccatccttcagccacacaccctccaccttctcgtcattcagcactacacacaactcagctgggctcccagtggccgcgtgcacgtcggacatcccgctcttcactgtggccagacgctctggggagaaaggtgggcaagggactggctcaggatgttggggtgggagggacttctgggaaaagggctggtagcgatggtcatgggactggtcaggggtgctgcgtcaatcaaaataatttatgatgagcaggcggcttgccaatgtggtcaataggtgattagggggtggtcagtggggggaactggagcaacacatgggagggggatggggaaaggtcagtggcttgggaaatggtgaccaggaaaactgggagatggctagtggggaattgattagtggagcgtggtcagcagggacttaggatgctgggttggagagggaaatagatggtgaagatgcaggtggttactggagttgggatgtttagttgtggttacgctagactgtgggatacatagactgtgggatacatacatacatgtcattgggggttgagggtagccagggtctgcggaaagtggtttatggttaggtagtaggagatggtcgggatcaagacgtctgggatatcagggttgctggggatggttagagtctgaaagtgaaggatgaagtcaggaaatttgggatagagtctggaagatggggggtgatcagtgtctaggaggtataaatgtttagggcatgagaggtcagagatggtcagaatttaggaggtgagggtgatcagagtggggagacacaagttggtcatggtctacaggagggttggagttagtgggaggggggcaattgatgtccactgtaagggaatgccagggtcagggggattggtcagtggggattgatagggcgggtgttaccctccacagtgacgatggcagtactgtagtattcagtagggtctccatcctgcatggccaccacagtgtactcgccaccatcactgagctgtgcatcctcaatgatcagctctgctcgcttgccctcatggttcatgctgtacttagtgccat

SEQ ID NO: 20690 - DNA, 718 bp, Artificial sequence
  DNA replication origin
acccgtgtgcggggagacgagcagggtgccctgggagtgccagccagacccctaaggaggcagaggactcaggagacgtttggtacccaggaagggccatctctggtgagatgtgaaagaggagtgggggtgagaggccgtgggatgagacaggagggggtggggtgctccaggtagaaggagggcatgtggacgggcctggaattgacacaaagcaggacacattcaaggactagaaagaaatgtagtctaaaaggggagtgtggaaagggggtgaaccgctcacttggaattttttccttttccctccccttctttccagagaggtaagacagacctatattcccttgggagaggcggcttggctgcaggaccaaaggccaagttcctggaggagctatccttccagtctttgttttgtaaaagctggagcacctgggggcgggtgtctctttgtcagggaggtgggggtgtgaggaaggggagggggtctccgggcctgggaaggtgacagagcccatcagtttcatgactggtgcctggtgtgtgggtgggtggcactgagtgcatagagagggctggatctcagcctgcagggcttccgctgcaccccacacggcgtcctcccgacagaaggcacagagtctgcagacccagaggggctcttcagtggggctggggtatctcagctataatcagtgtggtttccttgaaacat

SEQ ID NO: 20691 - DNA, 1485 bp, Artificial sequence
  DNA replication origin
aggcataagaatgacacaatggactttggggacttgggggaaaggtgggaggtggatgagggatgaaagactacacattgggttcagtgtatactctgggtgatgggtgcaccaaattctcacaaatcaccgttaaagaacttactcacgaaaccaaataccacctgttccccaaaaatctatggaaataaaataaaaaaaggaagttcttgagaccagaacctcaggtccctggagactgaacactgccctccttgccaactattccatccagtctcctccaaggtgactgactccatcccttcaccatccgtctatgcttgtactccttcaacacatctctcggggcaccctctctgcaccaggcatcaggctcagctctggggacacctggctgcccttgagggagccgcgtgctgagaaaccacccgaacctggtgtgattgtaactcaagcttccccagcagctttgtcagcagcaccaagaggctgcccttaacgagccccaaggagaaagaggtggggacctccgcaaagggatgactacaggggcctggttggagtagaagatctggccctcaagcgggagggaagggtgactgggagggcatgcagtcaggacacagtggagaagaggacgaatcctgggatgccacatcacctggtccaactgaggacactcaggctcagtgtgtcctgggtggatcaggactaacgcctgggaatctgatctcaggtcctgggcttcttcattctcccaaacgaatcccaaacccggagtgtttgagtgttatgagagctctcctttgaggttgaaggaagcaaattaaagccccctctcccctttttttggtaccataggtagggaaggtagaaaatgaatggcacctgcccctccaagtggggcagggctggaattacacactttcgtggtacactcaggtgaattttggggttctggggcttcaatgtgggtgggatctagttgtgtaggaggggagcatgagtatgaaaaccaggaaccctagattctaatgaaagctttaccactaactctctggtgaccttggtccgccaccttactgggcctcagtttccccatctgtaaaatgagaaggttgaataagttcccaggattcgtctggccctgatcttctaagccctgtgatccttgataaggtaagcctcccaaggctctgacccgggcaatctccggttttgcaggagcctgggcctcaaccagaaacaagcagcatgctgggggaggggagcgcgctaagcttgtattctaggggagggtgggacgcgggaggctaaagctaaagggtcggtggaggcgaagcaatgggaaggctgggagccgcgctttagaggccagaaggctagcggcgatttccaatctccctcaggggcttcaggctccggagaggcgatgcagcccagagccgcgcaccagcctccgccggccgcagaggctcagacccc

SEQ ID NO: 20692 - DNA, 1466 bp, Artificial sequence
  DNA replication origin
cagattagtgaggtgaggctgaaggattgggatgggaggggattgagatgggagctggcaatgaagccagtgagcctcaggggcagggaacagaaataaaagtcatagctgcatggagaaaatgaggagggagggccagcaactttaaacaggatagttacagcaattatcttagaagcgacacattgagcctgggcagggtggctcacgcctgtaatcccagcactttgggaggccaagacgggcggatcatgaggtcaggagttcgagaccagcccggccaacatggcgaaaccccgtctcaactaaaaatacaaaaattagctgggcatggtggcgggcgcctgtagtcccagctactcggaaggctgagacaggagaatcgcttgaacccaggaggcaggggttgcagtgagctgagatggagccactgcactccagcctggacgacagagcaagactccgtctcgggggcgggggggtggggggagtgacactttgaagaggtaaaggagtagccgtgtgactatcagagggaagagtttccaggcagacagaccagcagtgcaaaggtcctgaggccacagggctgccacgccgatgatgcattaaaaaggccaatgtgactggagcgtgggagaagggggagggtggtagaaagagaggttaaagagctaaaaaggagccagttcctgaagggctttgcaggtcatgaggggcctttaactttcccttggatgaaatggagtgctagtgtaggatttccagtaaaggaacgacgtgctctgacttaaattttaaaggatcgccttgactgctgtgtagagaatcagctgcagggggccaagggtggaagctgggagaccagtaaagagactataatggaaatcccggggggcgggggtggatggtggctggaaccagggtggtagctacgtggtggctcgcctctgattccccgtgtaaaaaatggagtttaggatccctgccctgtgtgcagcccacagcctcaagcccccatggggatggaatgccggaaacctctggccagcgcactagcagcctggagaatacggaagattgtggcaggattgtggggcacatgggcagctccctgctcgtccgggcccctggtgcccacgagaaaaccaaaacaggtgcgtgccccgcgccgcacgtcaggagggcaagactcagtggagggaggggctgtccactcgctctagctccccagaggctgaacagggagaactgggaaaaaggacgcctcctcagcgtcctagaacgagtcctcggcacctggtattgcatgcgccctagtatggggccgctccacttgcgcaggtgttggcaacatgcggggagcgccacggcatgcccccaatgagccgactccctcccccaactctgccccctttgtctcgctggcccctactccttctgtctgcctgtctgtcccgtcccag

SEQ ID NO: 20693 - DNA, 993 bp, Artificial sequence
  DNA replication origin
tggttctccgggaccgattgacggctcagggcacgagcggggaccgcagcggcggaggtgagggcgccagcaggaagtgggagaagaggcgacccaaggcgggctggcgggctggcggcagtcgctacttgcctagtagcctcagccgctgtgggctcctggggagatggaggggccggggctgggctcgcaggtgagtgcggccgggcggtggctgtcctgggggccgggagagcggctgcagctgtggaggaaaggatggtgtgggtgagaggccgctcgatgagggggtttcgggagcggcggggcctaggtctgggaagcgggagcctggaaacaccacgaacgatgctggaaattgtctctgaggcgactgggaagaaaaggcgaggactgaggggtgagggcccgagccggcccctccagcctccatccctggccagggcgccccctggggccggtacccggagcccggcggggacctctgtgggcctggggaggggacgatggcccttcccgggagaggtgtcaggtgacacacctgattcggacccgcccgtcttgacgttggcccggagtcggagcggttctgttgatttctttttcagccctggcgtcttagcacccgccttcaccccacccagtccagttttcgctcctgtttccgcatccttgcttactccttgaaataattaaggctgcttgtttaggatggaggaaaggggcgtggagaggggaggtacaccacagcgatctgcagaatctcaaaggacaatattccgtggaggaggtgttatataaaagccagacggaggtccaaagaagccaggcgggccagtcggagaagttacaggaggtagatgttgtctccaagaaaacaagatttttgtgctttttgcttatggccctttcctagtgcctagagtactgactagtatattgtagacgttcacttaatatttattgaataaatgcagaatttccaggttcagc

SEQ ID NO: 20694 - DNA, 1271 bp, Artificial sequence
  DNA replication origin
tcccggtcccggcgtctctctccggcacccacctcggcgctgcggaaagactgactgccaggtacgcgggctcccgggcctgagaggggcagcggtgctgacgagtcccggctcagcccccgccggctcccgccgtgaggtggactgacaggtcagcgggacgcagaggggcgcggcgcccgggcgacacggcaccgggagagggctcgggagggtggcggcggcggcggcggcggccgtttcccgcctcccgcttcgccgggggccgtgagggaggagctgagctcccgcgcagaggggcgggggcgaacgagggggaggggcggggttgccgtggttccgggcgcgggtttgcccgcgctcaggccccgcgcagctaaggggaggcgccggccacggtccgactttccgcgccaaatttttaaatcgaaggcggaaggtccggccccgcccctggcgccgtcggccaatcgcaggcccgcttccggccctctgattggtcgggaattgttgtcctggaaaccacgatgatgctgtccgggaactgtcgggactgcggcgggcggacagggcctgggggaggggcctttggccgaaagttgggggaagtgcactgagcgagtggcggccgggggacagtacctgcttgccttattgggcaaatacagccttccaaggtggagtctaacgccgtggtgtgaactggccacccgaacagggagtaaatagtgctttgtatctttaaggaagcccttttttaaatttaaaaaaaaagtcttaattataagactctttaaatgcccaactgcatacttggagctttgggactgaatttggaactttcctgtcaagcgacctcccacgactttactgctgagcctgtgcacgtgtgtgtaaggggagaaatccaggcatctagatgcagacttgtacccagttacttggggtcgcgtgcgctcagctgggacctgggctcgtgcgcttagtccggagccctgatctgcgaacaggtgggtgcttcctaaagtattcgctggggtccggagaatggctcgccttttctacagatgggagagggctgtcactagaaattccgtgggttgcttgaagtcttaggaccgccgatccgtttgctgaaggaatttactggcatttgttggcgttctccgctcagtggggcgatctctggtcgagaataaaatgtaaatctagtttgtcatttttcgttaggctttgtttccgtagcctcttgtccgtgaaggaattttcaa

SEQ ID NO: 20695 - DNA, 1014 bp, Artificial sequence
  DNA replication origin
ccctatgctgcctcccccaggtcgggtctggctggactgcccggcggcgggaccggcctgggaaagtttgcggtgcaactgggtgggcaaggaggagaggacttggggatgctctgtgctgagctccggggtccagagcagggtggggactgccgttggggagagggccggcccctcattgagaggctcgggggccacacctctgctgcgggactctgaccgagggccagggcctctcaagccacccggccgcagcatagataccgggcgagcggacgcatagccacccgtgcgcgatgacggccggcgggcccttgttcacagatgcgctgggaaactcttccccagcagatgcggggctgggcgcccggcgcagtgctccgaggctgctctgcgagctcgggggcgcactttcccggcctccagcgacactgcgcacgcccctatccggagtgggtgtgtgtccctctgggcgtacgtgcctgaggctgtgccacctcctgtgcttgttcttgtgtttctgactgtcttgtttgcgtgtctctgtgggttcccctctgcgtgattgtgtctctgggtgtatccccgcgtctgggtccctctgtgtttgctgttggcatgggtgtctgtgaacgccctctccaggttcttgtgtctgaataccgctatttgtggatccttctgtaggcgtctctgtgttttcggtctgtgtgtcctcctctctgtgtgctagtctttaggtgtatctatgagcgcgtgtgttttctgtctgcgcctctgttttctagctacgtctgtctccgaatgtaggtccagtacctgtctgcgcgggtccctctgtggaggcgtgcttcctcgtctgtgatctgagcttctgtgatctgtgtatatggatgtgcgtctgtaagtctgtatgtgtgtctgtctgcatgtctgcgagtatctgctgtgcttgtgtcggtctgtgcctctttgctgtgcctgtctgtccatacgtgtgtatgtgttggtggg

SEQ ID NO: 20696 - DNA, 1019 bp, Artificial sequence
  DNA replication origin
gagcgccgtggccagtcccccattcccatcccggcaccccaaaggcgcgctcgcccgattgcttcgagttccccgacctggggattttttttttagccgctggtggtgggcgcctcgtgggctaaggcccggcgcctgctctgctacccgcgctgcctttagcggtcgcccccgccgccgctgccagggacgtgctgggaaagcccaagccccgggagaagatgccggccatcctggtcgcctccaaaatgaagtcgggactgcccaaacccgtgcacagcgccgcgcccatcctgcacgtgcccccggcccgggcgggcccccagccctgctacctgaagttgggaagcaaggtggaggtgagcaagaccacctatcctagccagatccccctgaaatcgcaggtgctgcaggggctgcaggagccagcgggggaggggctcccgctgcggaagagcggctcggtggaaaacgggttcgatacccaggtgagagatgccgtttgccggggtactgttctggaaggatggatgaatagttctttcgggatggtgtgggagaaagggctggatgggagaagggtctaccatgtggccagggaagggaaccattccccttaggccggcaggttgggggatgcgcgaggagagtgggccggccggtgggtgtggcccgggtgccggaggtttgccttaagagctcttcgagacctgggatggcgggcacgtctgcagcatcttcctggggaggaggaaaggtcgggatgttctcaaaaaacgtgtgcatcgctggaaatgtgaggtcctgcatgttgaggtcttggccccaagaagccagtatccgcagcagcagctgtgtgtctgtctggcggttccgcagagattctgttccggacaaggaatgatctaaggccccattgggttcgacgccccctagcctggctgtaagatccaggaagaaaaggggatcgcgggtggcagtgaacctgctcttcccttggcttgaagatgacctgtccc

SEQ ID NO: 20697 - DNA, 762 bp, Artificial sequence
  DNA replication origin
taggccggcaggttgggggatgcgcgaggagagtgggccggccggtgggtgtggcccgggtgccggaggtttgccttaagagctcttcgagacctgggatggcgggcacgtctgcagcatcttcctggggaggaggaaaggtcgggatgttctcaaaaaacgtgtgcatcgctggaaatgtgaggtcctgcatgttgaggtcttggccccaagaagccagtatccgcagcagcagctgtgtgtctgtctggcggttccgcagagattctgttccggacaaggaatgatctaaggccccattgggttcgacgccccctagcctggctgtaagatccaggaagaaaaggggatcgcgggtggcagtgaacctgctcttcccttggcttgaagatgacctgtccctgccccatcctgcggggtgacgggattccgggcaaggtgctgggactgcggtactagtgcaccagctgaggccggcagctggagactcctagcgccttggctggctgttgcggtgggggtgggggtggaggtggctgcctcagaatggcggccgaagctaagcccctccttcctgggtggtagatcctggtgttggtagcccgagtgacggggcgtggggatgggagatggcttgaagagaattggtgactcctacctttccagacagagcctgcatccagacaagccctggccgtgcaatctcttttacagaaattagcaagggccaatcaggttctcttggtcctccccgctccattt

SEQ ID NO: 20698 - DNA, 876 bp, Artificial sequence
  DNA replication origin
tgcaccagctgaggccggcagctggagactcctagcgccttggctggctgttgcggtgggggtgggggtggaggtggctgcctcagaatggcggccgaagctaagcccctccttcctgggtggtagatcctggtgttggtagcccgagtgacggggcgtggggatgggagatggcttgaagagaattggtgactcctacctttccagacagagcctgcatccagacaagccctggccgtgcaatctcttttacagaaattagcaagggccaatcaggttctcttggtcctccccgctccatttcccccttcttctggtaggagggggctatattttcttggcagtcagtcagcagggacttttggggacaggccgacctgacggatgtgactgtccggttaggagaggcgggaagccagaggggaggtggtttggggctggtgtcaggaaaatggcaacagaccagctgacctttttggcacatacttccctgctgacaccatctccaccttctcctggagctttctctgatcagaggctagagctcaacacgttcctaggctttctgatgcgggaactggagctgaagctaattgtaagcagacttttggaactctgggctggagaaggccctcaaagcagattaagctcccacaccaggctgataagcatgccccttgctgctgcacttgctaaacatttttggaagctgacaggtttgagtgatggtgtgtgggaggaaggcaagatttcctccagtgctccgggggcctgcctctgtgagggttttgtgctctgctcttcttctgttgttacgtacaggatttgtccagtgggctctgccatgggggtgagcaccagggtacacttctgcat

SEQ ID NO: 20699 - DNA, 1208 bp, Artificial sequence
  DNA replication origin
acagcatcacgctcatcttacttcagggcgaggaaggaaggggcagaggaaaaaggaggaggggaaaaaaaaaaaaagccgaagcacctgcccgcgcgcccggcaggtctggccgtccagtcccgggtctcctctcggccgcggcccctccaggcatccccggcgcccgcggtcgcctcgcccccgccccggggccgctgctgcgcgcggggaccctaccctggagaccggcgcccgcgctgcccagctctcgtgcctccctcgctcgctccccgccggcctccccgcctccgccaaatcaaacaactcgccctgtgtccaagcgcccgctcctcgcagcgcggaggccgctggggccgcggcggccgagggcggggtgggggggggggtcggcggctggtgagttccccgccccctagctggcccgcgggccgccccgcgtggcacccggcgcttcagtgggcccttcgccactgccgccggtgggcgcgaagggggaaagatggtcggagttggtgggaggatacttaactatttcggggagggcgtgggtagtagggagagccttgggcagaagatgggtaggggtgaggccgggggaaggggctgtggagcgcagttcatggctcccgggtccccatgggttcttagctcagacaccagccggcgcctcactatgcgcactcatctccatccgcattttctttctgcacagaactcacgcaagttgacagagccgcctccccctggagcagttggaactatggctgcaggatggatgcatttctgacccccacaactctaaccacacacacacacacacacacacacacacacacacacacacacattttctgacccccacaactctaaccacacacacacacacacacacacacacacacccctgccccagcccacacgctgcgttcccagcaatatttatttcctgccacgtgaaggacagagtttgggtatttccaaacacaccttgcctggccgctgctggagaaaggccattcaaggccctctggagaggaggagaggtcaggcagcgacagaggaggcagcctgtggcctttatttcctcgtctgcctgctccacctgccacaggccccgggtgccttcctttgaggactggggacctccccaccttcctgcccaacccttgtcctaggtccagcatcctctcatctggcagtgaccc

SEQ ID NO: 20700 - DNA, 890 bp, Artificial sequence
  DNA replication origin
gccgccccgtccgggaggtgaggggcgcctctgcccggccgcccctactgggaagtgaggagcccctctgcccggccagccgccccgtccaggagggagttggggggggtcagccccccgcctggccagccgccccatccgggagggagggggggtcagccccccgcctggccagccgccccatccgggaggtgaggggcacctctgcccggccgcccctactgggaagtgaggagcccctctgcccggccagccgccccgtccgggagggaggtgggggggtcagccccccgcccggccagccgccccgtccgggagggagttgggggtggtcagccccccgcccggccagccgccccgtccgggagggaggtgggggggtcagccccccacccggccagccgcccggtccgggaggtgaggggcgcctctgcccggccacccctactgggaagtgaggagcccctctgcccggccaccaccccgtctgggaggtgtactcaacagctcattgagaacgggccatgatgacgatggcggttttgtggaatagaaaggggggaaaggtggggaaaagattgagaaatcggatggttgccgtgtctgtgtagaaagaggtagacatgggagacttttcattttgttctgtactaagaaaaattcttctgccttgggatcctgttgatctgtgaccttacccccaaccctgtgctctgtgaaacatgtgctgtgtccactcagggttaaatggattaagggcggtgcaagatgtgctttgttaaacagaagcttgaaggcagcatactcgttaagagtcatcaccactccctaatctcaagtacccagggacacaaacactgcggaaggccgcagggtcctctgcctaggaa

SEQ ID NO: 20701 - DNA, 2226 bp, Artificial sequence
  DNA replication origin
acctccctcccggacggggcggctggccgggcggggggctgaccacccccaactccctcccggacggggcggctggccgggcggggggctgacccccccacctccctcccggacggggcggctggccgggcagaggggctcctcacttcccagtaggggcggccgggcagaggtgcccctcacctcccggatggggcggctggccaggcggggggctgaccccccctccctcccggatggggcggctggccaggcggggggctgaccccccccaactccctcctggacggggcggctggccgggcagaggggctcctcacttcccagtaggggcggccgggcagaggcgcccctcacctcccggacggggcggctggccaggcggggggctgaccccccacctccctcccagacggggtggctgccgggcggagacgctcctcacttcccagacggggtggctgccgggcagaggggctcctcacttctcagacggggcggctgccgggcggaggggctcctcacttctcagacagggcggttgccaggcagagggtctcctcacttctcagacggggcggccgggcagagacgctcctcacatcccggacggggcgacagggcagaggcgctccccacatctcagacgatgggtggccgggcagagacgctcctcacttcctagatgggatggcagcctggaagaggcgctcctcacttcctagatgggatggcggctgggcagagacgctcctcactttccagactgggcagccaggcagaggggctcctcacatcccagacgatgggcggccaggcagagacgctcctcacttcccagacggggtggcggccgggcagaggctgcaatctcggcactttgggaggccaaggcaggctgctgggaggtggatgttgtagcgagccgagatcatgccactgcactccagcctgggcaccattgagcactgagtgaaggagactccgtctgcaatcccggcacctcgggaggccgaggctggcggatcactcgcggttaggagctggagaccagcccggccaacacagcgaaaccccgtctccacccaaaaaatacgaaaaccagtcaggcgtggcggcgcgcgcctgcaatcgcaggcactcggcaggctgaggcaggagaatcaggcagggaggttgcagtgagccgagatggcagcagtacagtccagcttcggctcggcatcagagggagacggtggaaagagggcagagggagagggagggggagggggagggggaaagggagagggccaaagtcatattctcttaaacagatattggagagggagagggagagggagagggccagagtcatattctcttaaacagatattgtcacctaataattgtgggcaagaggtaatgtgggaagccaatgtcagtcccttctgtcttggtgtgaatttgtttatcagcatcttttcaagaaagaggttgtggagaagtaagcatgacatcaggttacggagaaggcccagattcctggagagctgtgcttgagaggaaagcctggaggaggaaacggaaagcagataagcctgttcgattctctgtttcaccaggggccaacccaagacacagctttggaatgtcctgtccttagaactgttgcccagggccactcatgcctaaaattacaacacagtaataaaaactaccggttgttgggcacatattaaacatcacgaatatatcctcttgtctaatgacaaccaccaccctagggggtaggtgttataatgaccattttatagatcaggccactggggtaattgctgagcatcatcatttagtaaatgccagaaacaagatttgaatccagacttgtctgaacctaaagcctgtgttacatcctctaaatatcactccttagccctaatcattccccttttgtgtttgtgtccagcttctagcttgatgattccttttggaagtgctaggaagttttaaggagagtcactctgaaattgtagcaagagaaagcatacacagaatgggatactgattgaatgcacacaaaggtatccttgggcctttctgacactagtcaccagtggaatttttcctctcatagggtctaccatctctaaaagagaacagagttcagccatatgagtatcttttgggagcctccagagtaaggatagacttctagaactttagctacaactcccctcccaggtt

SEQ ID NO: 20702 - DNA, 985 bp, Artificial sequence
  DNA replication origin
gaagtactgtattcacaacagtctctgaaaacaggcaggaatttaagacaagatcagaccatcagatggctggtggatcatatgatgccataatcctatacccttgccccaaccaacccacatatatctcaggccttcactgcatcttttcattactcctccaaaactgaaaacctatgcgtgagcctctggcttgctgagcctaggcaaagcctacatataataactcccatggagatggaagaggcaatgtgtttcattggcttctagatgggaggtggggcccccaaatgaccaatgttcccaacaaaacctgaacaatctgaaattattcagatttctgcttgtcattctaacctctgttcaggacttccaagatccaggacaggcccagtgtagatacctgtgtcccaaaccactgatctgggctaggaagactgaatcacaggtgtggaaggtcacccgggttcaaccatctaggtgatgaattaggccaggacctgggcaggtagaccatttattctggggagatatgatgcgagcttgaattacatgggagaaatatttgtaaggcagatgggataacaggacttgataagtctgtagtgtggaaaggctagaaaagaaaggaatcaaaggaatcctgatttctgacttgacagggtagaaggaggtgtgtgtgtgtgtgcgtgtgtgtgtgtatgtttatgtagggacagtgacacccaagagaggctaggaataggtttgttttattcctgtttggggtggttgggtaggcagggttaagtttttgacttggtgaatttgagatgatggccaatatacaattgacattccagctggggggaccattgaagatcaagtctggcaagtctactagctggcgcctgggtgagctgagcccagcaggtgagggaaaacgcgggaagagggtcttgcagattccaaacttaggaagggtcgcggctccgcgcacgtgctc

SEQ ID NO: 20703 - DNA, 1076 bp, Artificial sequence
  DNA replication origin
aggagcaggtgacgatgggctctcctccgccccgttcgcccgcggccctcactcagcacctccttcatgatccctgcgagccccccaccctgcccgggcccgtgtcccggagggtcttccaccggccccacagcggcgcggcctggggctggacgagccgggtgctgaggggccagggtacccaccggtagcgcctgacgctaacgagcacatggctgtggtgccccgagagcccggcgtgtctgggggcggggaccgggttgggcaacgagcgcgcgcagcggccgccgactccaggaacgagcgcgagcacaagcgcgaacccgcggcgggacccgggctccggaaacttcgcagaccgccgggaacgccgaagcgcgcgcgctggctcgcaatcgcttccggcctcgaggcgccgtgcgggtcacgtgaggtgggggcggggcgagagcgggggctccgcctcctcctgccgcagggttggcgcagtgcgcgctgaagaggcgcgctgatgacggttaatgttgcagcccggaagatgacttttgtctcctccttgggttgcggcaggcgttagtgggaggtcgcggcccgctgctgtgagccccaaggcagagagacgtcgctgcggttttggggttggcatcctgtcctctgtgcgcccctttttcctgggatgagcggttagcggaggggcgatcggcccatgacgccctctggtggcggaggaggccaaacgctggaggctcggctggtttctgggctcccaggtcctggagggggtgcagctggcgagagggaacgaactgcatgggccagggtgggtctactgcagggacagataggtgtcaaaccccccaagacggattttaatctttggttaagtgagaacgtgaactctagaggcagcctgctgggtttgaatcctacccacgtcactttgtaactgtgatcttgggcaagttactcgacctctctctgcctcagtttcatcaaatacaaaacaaggataataactgcacttgggcagggcacggtggctcacgtctatagtaccagcactttgggaggctgag

SEQ ID NO: 20704 - DNA, 1027 bp, Artificial sequence
  DNA replication origin
gccagagtgctataatgacctcgcctgggggtgacatcaaccccaaacactgattcccacctcattccagcctccctccggttggggggccctatgggggatgctgagctcaacctctgggttccctgtcctcaaatgatttacaggtggtctacggagggccacagggccacgcgcggtcaccacaccacagcttcctgcatggcctgatctctcagggtgagattgactgctctgataatgctcctcttttctttaactgcctgggaagcccagagagtgggaagaacctgaccagagagggtataacacctgatcaaagggcaaatcaactggctccaatccctccaagaagggacaagaaagtgccagtgaaatgtaatgggacagagataatttctttttccaagactccgctaggggaaaggacacaggcctacttgggtaaaccacttgaagtgggtggaggtggtgagaccttccaaacatgttttgcttgagtaacagcaggtaagcactgccccctgacctgggaatgtcgatcaggttaattggaggggaggtaggaaagtctgggccagagctgacagcttgggcaaggaaggtgagaagctggaccctgcagaattttccatctcagcctttccctcacagggctcagtcttatctttaaatggcacagaatgtttgactgaagaggcatctaattatcaggcccccaggatccttgagacctggtctggctatgtggctgcctcagttccccagtccccaccacccccttttccaggcctccctttctgcatttgaagaatgtggggctggactccatgggtctctcaaggtccggcctgctgggtcaatctgtgagtctgtgccgtgattcactctgaaatcaaggctgagtgatagaattggaagctcttcctgtacattttctcgatggttctcttaggtttgtttattcctcacagtctctctgatcctggcctaaaagaactgggccacaatctgatgatcaaaacaa

SEQ ID NO: 20705 - DNA, 1288 bp, Artificial sequence
  DNA replication origin
ggtcgtggccgggcagaggggctcctcacttcccagtaggggcggccgggcagaagcgcccctcacctcccggatggggcggctggccgggcagaggggtcctcacttcccagtaggggcggccgggcagaggcgcccctcacctcccggatggggcggccggccgggcggggggctgacccccccacctccctcccggacagggcggctggccgaccccccccccgcctccctcccggacggggcggctggccgggcagaggggctcctcacttcccagtaggggcggccgggcagaggcgcccctcacctcccggacggggcggctggccgggcggggggctgaccccccccacctccctcctggacggggcggctggccgggcagaggggctcctcacttcccagtaggggcggccgggcagaggagcccctcacctcccggacggggcggctggccgggcgggggttgaccccccccacctccctcccggacggggtggctgccgggcggagacgctcctcactttccagacggggtggctgccaggcggaggggctcctcacttcccagacggggcggttgctaggcagagggtttcctcacttctcagacggggcggccgggcagagacgctcctcacctcccagacagggttgcggcccagcagaggcgctcctcacatcccagacagggcggcggggcagaggtgctccccacatctcagacgatgggctgccgggcagagacgctcctcacttcctagatgggatggcggcggggaagaggcgctcctcgcttcctagatgggatggcggccgggcagagacgctcctcactttccagactgggcagccaggcagaggggctcctcacatcccagacgatggggggccaggcagagacgctcctcacttcccagacggggtggcggctgggcagaggctgcaatctcggcactttgggggggccaaggcaggcgggtgggaggtggttttagcgagccgagatcacgccactgcactccagcctgggcaccattgagcactgagtgaacgagactccgtctgcaatcccggcacctcgggaggctgaggctggcggatcactcgcggttaggagctggagaccagcccggccaacacagcaaaaccccgtctccaccaaaaaaaaaacgaaaaccagtcaggcctggcgacgcgcgcctgcaatcgcaggcactcggcaggctgaggcaggagaatcaggcagggaggttgcagtgagccgagatggcagcagtaccgt

SEQ ID NO: 20706 - DNA, 964 bp, Artificial sequence
  DNA replication origin
tccgcccggcagccaccccgtccgggagggaggtggggggggtcaacccccgcccggccagccgccccgtccgggaggtgaggggctcctctgcccggccgcccctactgggaagtgaggagcccctctgcccggccagccgccccgtccaggagggaggtggggggggtcagccccccgcccggccagccgccccgtccgggaggtgaggggcgcctctgcccggccgcccctactgggaagtgaggagcccctctgcccggccagccgccccgtccgggagggaggcggggggggggtcggccagccgccctgtccgggagggaggtgggggggtcagccccccgcccggccggccgccccatccgggaggtgaggggcgcctctgcccggccgcccctactgggaagtgaggacccctctgcccggccagccgccccatccgggaggtgaggggcgcttctgcccggccgcccctactgggaagtgaggagcccctctgcccggccacgaccccgtctgggaggtgtgcccagcggctcattggggatgggccatgatgacaatggcggttttgtggaatagaaaggcgggaagggtggggaaaaaattgagaaatcggatggttgcggggtctgtgtggatagaagtagacatgggagacttttcattttgttctgtactaagaaaaattcttctgccttgggatcctgttgatctgtgaccttatccccaaccctgtgctctctgaaacatgtgctgtgtccactcagggttaaatggattaagggcggtgcaagatgtgctttgttaaacagatgcttgaaggcagcatgctcgttaagagtcatcaccactccctaatcttaagtacccagggacacaaacactgcggaaggccgcagggtcctctgcctaggaaaaccagagacctttgttcacttgtttatctgctgaccttccc

SEQ ID NO: 20707 - DNA, 1542 bp, Artificial sequence
  DNA replication origin
gagcgatcggccggagcggtaccacgaggcgggcccaaagatcggtgtaggcctccctctgcggttccccggccgacttccccgagggacagtcacgactttggaaggttctggccagtttcccaatttgcatttgagcagcccccgcaaagggccaggtgcgaatggagagtctacgcggcgcccggacgttccagggcgcacagacttggctgccccgggaggaagggagaactgcgcagagtgggcagaatcctgccggccttctcacttcccccagctgcggccctgggcctgagtgacgcccagcgcccccgctcagcccccaggcctgatatttcgcccgctggccctccccggcccagtgagcacttgggttccggcgtggagactgccgcgcgtcaggctctgcagaggcgggtgacgcgcaggaacggctgcggggtttggctgaggcgctattcgggctccccgcctgcccccactttcagccgcaagattctagaagggaggggctacgtggagaatggagggagggtctggaacggagaggcctaagagggttcgctatgaggccaacgctgggacggaggggcgggcatcagcagggcttgaaggttgggcttcaggggcgggagagagcatgcggaggcaggaagccaggccctggggcagcaggtcgtgcgtatgggtgtgtgtcagcgcctacgaagcgcagaggatggaaccgcagtattaaaaaacaaaaacaaaaaaaaagaagaagaagaagaagaagaccagccgcacgtcctctagacgcgggcctccgcccccgccctccgcggacgcctgtttatagtgataatcaggcccagcgcgccgcagccaaggaggccgtaaatccgcatccatcaccgcgcagccattcggtctgaattagccagtcactacggccttaattactttgtcaaagatgaaaaatagtaattgattttgtcctcgatcactttgttccctcctctcctgccttgcagataagcaaataaatatttttgaaaactcgtgtccactcggttgtatgggggtagccttctgaaaaacaggccatccggtgacagtcctgacgccagtgttactgccaagacacgaaacgccagctgcaacccagacaggagagggcccagagggcggcctaccgcattcaagtcgctgccctcctttgcactaaggaaggagagaggagggaaagataccggtgttttacaagctattgctctggcgttagcggggcactgtggcaccagcctcctctggtcctcagggcagcatgcaagaaagagctgccagtgcgactgacaggcgaaggaacgtgtccagggtcagagggcagagcctagctttgagtccctgtctgtgttggctcctctccatccaccacatgagggatagagtatgagcgcctatgtctatgtttatgtgattttaacatgggagtcgttaacacctacaacttccatagatgatggatgtgagggctcagtgtgggtttcaggtgacatg

SEQ ID NO: 20708 - DNA, 1390 bp, Artificial sequence
  DNA replication origin
agttgtgtggttctgtgtgtgcactgccaggacaggtaagcatgactgtggcggttagagggatccgggaaatgggggtgcccacagaccacggcggcgtggggagacctggagccgagctttgcgctggtctggggaacggcggtagcgtggaccggttcctgggatctctttgccctgctcggagtgacagggtgaaaatagggactcacgggcttgaagatgtccccgttgagtgccccttctcaggggacccggcctcaggggcgcaggagtgaggggcgcggccgagtaggcgcaccctcttgctgctagtaaccggctttccgtcccagggagtcgaaacccgcagcagggcgggcccgcgtgccccgagttcccgaacttgtaaggtgctgtggaaaccactctcgccgacccccgccaggctgggaaggggtagctgcgggagtcgcacccgcagagggagcgcttccggctggcgggcgcggccggggcccgggagggcgcggtgcggcgagggcagagagctgcgggagaaccctgggatcccgcgatctcctcctgtgccttcctgactacccaggagaactccaggagtattctcctccgcctgtctttgctcccaagggctgggcgaacaattatctgagggaaatagagcagtggagacaatctggggaaattttctcaagctcaaaccagttttctcttgccataatcgcagggttccgtgtggggaggggggagcaaggatgacgcttgattgtctgaagtccccacttcgttctgcctccggagacgcagttgtgaggactctcagcgcatcttcttccttctgcttccaccggctcccttgcccaaaagtcccctggggttcggagactggcttgcagccgccttcttcaaagagctagtagtagatgcggggagactggggtgaggtgaggtggggtgagatgtaggaaattggcaaaaatagggcctgtcaactggggggagtgtcggaggtttgcaatcctacccagccatcctccgtacgcgctgcaccccagaatctgtgtggtcattccctttccctttattctcccccctttaccatccttatttccttctttagaggcgtggccttctctctaggccaaagagcaagttcatctggagagggctaagaaggggcgtctgcacttggttggctcaaaagttccctccgcttgcgcccaggcgcccctctttggcagttagcccgctggaagatctagcgtctaggagctttcagagggcccttcccacttccccaggactgagcaggcagcggctttcgtctggttaagaatgttgaatatggatttctcaagggacaaaagaaacctcccattccgttccttac

SEQ ID NO: 20709 - DNA, 971 bp, Artificial sequence
  DNA replication origin
accgcctcttcccggccgccatcccgtctgagaagtgaggagcgtctctgcccggctgcccatcgtctgggatgtgaggagcacctctgcccggccgcgaccccgtctgggaggtgaggagcgtctctgcccggccgccccgtctgagaagtgaggagcccctccgcccagcagccaccccttctgggaagtgaggagcgtctccgcctggcagccaccccgtccaggagggaggtggggggcagcccccgcccggccagccgccccgtccgggagggaggtggagaacagcccctgcctggccagctgccccgtccgggagggaggtggggggtcagcccccgcccagccagccgccccatccgggagggaggtggggggcgcctctgcccggctgcggccccgtccgggaggtgaggggcgcctctgcccggccaccccttctgggaagtgaggagcccctctgcccggccaccaccccatctaggaggtgtacccaacagctcactgagaacgggccatgatgacgatggcggtttttgtgaaatagaaaagggggaaaggtgggcaaaagagaaatcagattgttgctgtgtctgtgtagaaagaagtagacatgggagacttcattttgttctgtactaagaaaaattcttctgccttgggatgctgttgatctatgaccttacccccaaccctgtgctctctgaaacatgtgctgtgtccacccagggttaaatggattaagggcggtgcaagatgtgctttgttgaacagatgcttgaaggcagcatgctcgttgagagtcatcgccactccctaatctcaagtacgcagggacacaaacactgcggaaggccagggtcctctgcctaggaaagccagagacctttgttcacttgtttatctgctgaccttccctccactattgtcctatgaccctgccaaatcctctgcgagaaacacccaag

SEQ ID NO: 20710 - DNA, 992 bp, Artificial sequence
  DNA replication origin
cttttgcccacctttcccccttttctatttcacaaaaaccgccatcgtcatcatggcccgttctcagtgagctgttgggtacacctcctagatggggtggtggccgggcagaggggctcctcacttcccagaaggggtggccgggcagaggcgcccctcacctcccggacggggccgcagccgggcagaggcgccccccacctccctcccggatggggcggctggctgggcgggggctgaccccccacctccctcccggacggggcagctggccaggcaggggctgttctccacctccctcccggacggggcggctggccgggcgggggctgccccccacctccctcctggacggggtggctgccaggcggagacgctcctcacttcccagaaggggtggctgctgggcggaggggctcctcacttctcagacggggcggccgggcagagacgctcctcacctcccagacggggtcgcggccgggcagaggtgctcctcacatcccagacgatgggcagccgggcagagacgctcctcacttctcagacgggatggcggccgggaagaggcggtcctcacctcccagactgggcagccgggcagaggtgctcctcacttcccagacgatgggcagccaggcagagacgctcctcacttcccagacggggtggtgaccgggcagaggctgtaatctccgcactctgggaggccaaggcaggcggctgggaggtggaggccatagctagccgagatcacgccactgcactccagcctgggcaacattgagcactgagtgaacgagactccgtctgcaatcccggcacctcaggaggcggaagctggcggatcactcgcggttaggagctggagaccagcccggccaacacagtgaaaccccgtctccaccaaaaaaatacgaaaaccagtcaggcgtggcggcgcgcgcctgcaatcgcaggcactcggcaggctgaggcaggagaatcaggca

SEQ ID NO: 20711 - DNA, 1191 bp, Artificial sequence
  DNA replication origin
atgggggagagagagatggggagagagacagaggtgggggagagacagaggcaggggagagagagagaggcaggggagagagagaggcacaggggagagacaggcggggggagagagaggcaggagagagacagaggcagggggagagagagaggcacaggggagagagaggcgggggagggagagagagaggtgggggaagggagagagagaggtgggggaagggagagagagaggcgggggaagggagagagagaggcgggggaagggagagagagaggcgggggaagagagagagagaggcgggggaagagagagaggaggggggagagagagaggcggaggggggagagagagaggcggaggggagagagagagacgggggagaaagagagagacgggggagaaagagagagatgggggagaaagagatgcgggggagagagagaagcacaggggagagagagagaggcggggggagagacgggcaggggagagagagtggcacggggagagagagaggtggggggagagacaggcaggggagagagagaggcacaggggagagagagagagagagaggcacggggagagagagaggcagggggagagaggcagggggagacagagagagagagaggcaggggagacagaggcaggagggagagagagaggtggggggagagagagagagagagtttggtgatctctggtatctcagtcaggtcaatgataggatgacaaagaggaaagaacgattccccacaggccagcagtgtagaccctcactgggacacagaatcagaacatggagattggtgccacagacatttgctaacttgcatgctagaaggactaaggaaaactaggaagaagcctatgaattattcaatgatgtccactataacacagggaaaggaagaaaatcctaccgcctttctggagagactaagggaggcattgaagaagcatacctccctgtcacctgactctattgaaggccaactaatcttaaaggataagtttatcactcagtcagctgcagacactaggaaaaaacttcaaaagtccaccttaggccccgagcaaaaattagaaaccctattgaacttggcaacctcggttttttataatagaaatcaggaggagcaggtggaatgggacaaacgggattaaaaaaaaaaaaaaagc

SEQ ID NO: 20712 - DNA, 790 bp, Artificial sequence
  DNA replication origin
attttggtgaccacgaagggacctccaaagtggtgagtaatattggaccactttcacttgctattctgtccttccttagaattggaggaaaataccgggcacctgtcagccagttaaaaatgattagcatggccaccagacttaagactcaggtgtgaggctatctggggaaggcctttctaacaacccccaacccttctgagttggggatgttggtctgcctggagccagcttccactttcaattttcttggggaagccgagggccgatagaggtagaaagctgtcatcctgaactcctggctggttgagatcatggtgcagccagaagtctctactcaacagtcgcccatgtgtgcgccttaccttttcttctgacccatacctcctaggtcccgacacttcttgaaagtgtagccccagaattctccttacctctgaatctacttcctctgatccctgcctcctaggtactaatggttcagactttcatttcctctaacaagttgtatctccaaagggatctaaggaagctctatgctgcgtccttaggcatctagatgataaacccagggagtcttatccctggtgtccctcccaatttaggtatacagctctcgacatgggcagttatgtgggactgttccccaccacccttgccagggccccaagtttgtaaatggctgagagaggagagagggagagagacgggagagagagatgggggagagagagagagacagggaagagaaagagagatgggggagagagagatggggagagagacagag

SEQ ID NO: 20713 - DNA, 1866 bp, Artificial sequence
  DNA replication origin
gtgaaggggcagccgccctggatgtagttgtggtaggtgcccaccttctggggctggtgcttgatctactcgctcagtgtctcgatgggcgaaccactgacgcaccactcggtcacgtcgaactgcctcaggtgttcccgtgcgtggctggccagagccttgcggttttcaaagtaaagcccacacaactcgcagcaggtctcggtggaggaatgggaggtcttctcgtgaagggtctttgccttgaagggcggttcagtctggatgtaggtcttggccttgacctctgctgggaggaggcagtcctcctgcagaggccacttggctgccactgagcccaggtagccagtgggtgagggcttggccccagtgatgggcttcaggctgagctcgcgaggaaacctgggccggccctgagcctggtttgcctggccggccagaagataccggcaacgggcccagggaccacagtgggaggcccatcctcagccaaggccggggccaggtctgcagccagtggctcctccttgatgaggcacagcttggacttcttgaggatctctcgcagtgtcaatgggcgaaccatggacggaccacccggtcacacccatctgcagcaagtgggagcgtgcgtgactacacaggcccttgcggttctcaaagaacccgctgcagaactcacaggggatattgcgcaccggctctgcccgggaagacaggttcaggggtatcatgtcttcccgtggtgcctcccagggactctcagatgggtgcagctccccacgaagggcccccggcagcatctcccgcttgatctccacccgtatttgttcaggcttcagcttcttgggcagggagtgtgcagccagacctgggaacatcttccgggcacgggaggaggaaaggcagttggtgagtggcccaggggtctgcctggtggcggcggcaacttcttggccaagggtgagatgtgaaggtcagaggggctgcgggtttccagtgagctgccaggacctgtgccgtccatcatcttggccagggcttttggacttggccctggcgggttgggaggtctgccagagcgaaactgggtccgtctcttcaggatctcccacagtctgtcgatgggcgagccattgacgtaccccccggtcacgcctatttgctgcaggtgggagcccgtgtggctcgagtggcccttgcggttctagaagaactcaccagagaactcacagcaacagatttcttgtgctggctctaggcctgaggtgaggttcaagggcctgactgaggccactgtgccttttgggaggccggccatgggctcggggatagctcggggctcttgtcctcaggattcttaggagtaggggagccctccagggccagtggtgtcttttcaaggagcggagagctgggagttggcccaggcccttggtcgagaagccgagaggcaacttgatggttttgttgacagcaggggcatccaaggatttggccagggtaagcaagccgggccggggtcccgggcgaccacctccttcagccagctggacttcttagccaggcccgggggcagcccaaggtgggcgtcgggcatgctcttctgcttcacaagctcctagaggaggttgatgggtacgccgctcgtctctgactctgccactcccagctgccgcaggtgggagcgtgtgtggatggacaggccctttccggtcccaaagcaggcgccacagaccttgcaggtggcaggctctgggatctgaggtcctgcagctcctgtttgctgccatgaggaacctctggagccactttgctgctcagccaactggccacctgctccagggccccagggacaggcaggct

SEQ ID NO: 20714 - DNA, 1714 bp, Artificial sequence
  DNA replication origin
tccggagcgccgcgtccctgcgccgctgcggcggactgctgaaggggccgagcccgcgcggaccgccgaggaagagacccccgctccagcccgcaggccggctgcccgggggcggcgggggacatcggagggcagcggagcgagcagcgccgcgggagaggccggcgcgggaggcggccgcagcaatgccgggcccgctagggctgctctgcttcctcgccctggggctgctcggctcggccgggcccagcggcgcggcgccgcctctctgcgcggcgccctgcagctgcgacggcgaccgtcgggtggactgctccgggaaggggctgacggccgtgcccgaggggctcagcgccttcacccaagcgctgtgagtgcgggcggcggggacgcgagggggggggaggaaacggggcccagcggggggcgccgcggggcggagccaggggtcagtcccaccccaccccgccccgccgccgcccgggcctggggagggggtccgccggtcacctgcgtgcgggctgcctggcacccactcctgtgccacgggctttccgcactttgctagtccgggttcgagccagcagtagctttcgttcccagactttttgggcacaagcaccctcccaccccaccgcgcacacccccaactcacaagtgcatctggggccaagaaggaggaagtaatctaaaaacgcttgcccctggcagcctgtccacgcgaccttcccttctcatgagggccctcgctcagcgggcaggagttccgctactggcggggctgagggcgccgagaacttggcctcagtctgcataccgaggcatgtctcgtggggaagcacctggagcctcctgggttccagcatgtggggagaagaaacacctgtacctcagtcagggcgaatctccttccaatttggccccatccaggtagtgcgtcccggcacctacctcggcccagttccactcgggactaccccactaacgcccaggcttctgcagcacgcaggggagtccgagaaaacaagggagaattacagggttctgttggtggacatgctcttacccaacaaggccttttaaagaaggaatgctgacctgaggtgcaggatgttggaagagaagcaagttccggagcatatgctcagcccaggctgcaaggtagcagcaggtttctaatgcaccttcacgcagccagcagatcttttcttttgagctgcctgagatcgagagacacactgaaatgtttcagacttacaaaatcgccctgccaaaacggacttgagagctttagacgttcccttgagaaaagaagaggaatctgaactaggttgtggaggtggtggcaaaggccacggatagaggaggaacagggtagggtttttgtgttcttattgcttcttgcgttgcgtggccagctgaatgcttaaatcaggagcagtcgaagaaacgtgtgagagaggaagggatcctgaggggccctagggtagagggaatttccttttacctgtagtggaagggacctcttagaaatagacagttttaaaggaccctgtgaagaaatctttatgcaggcaggagcattgctgtatttccaggtgggtggtggcaaaggtgttccgcttgccctctcaggatggacttttagtgagcatcgaggcctgttgtcttggaacctgtttcattcttctaccttcagccttcccctccccat

SEQ ID NO: 20715 - DNA, 1240 bp, Artificial sequence
  DNA replication origin
cttcccggagcagtccacccgacggtcgccgtcgcagctgcagggcgccgcgcagagaggcggcgccgcgccgctgggcccggccgagccgagcagccccagggcgaggaagcagagcagccctagcgggcccggcattgctgcggccgcctcccgcgccggcctctcccgcggcgctgctcgctccgctgccctccgatgtcccccgccgcccccgggcagccggcctgcgggctggagcgggggtctcttcctcggcggtccgcgcgggctcggccccttcagcagtccgccgcagcggcgcagggacgcggcgctccggagtttcgcccttcccgctgctccatggacgcgcagaggcagccccgctcctccggcggctcacgccagccgggccggcccggcgcagcggcgggggccgcgctctgccatcgcaccggtctccctgtccctggcctctcaatgcagcggctcttcaaggttgcagagcgcagccttcagccatgccggccactcgccccagcccccgccgtggctctcgcacaaacacccagactctggctcgctgtctcccagccgcggctcaatctcttcccgtccttttcccttctagggttgcacgctctggttcccaaacccccggccgctggcttatgcaaatcacttaggtacatgcaaaagtatcccttctcccggagcgccattggcccggggaggtctcgagctcattactatgcagagaggagagccgccattggccaagaggaggaccagaggggcgtgtttctcgggcgtgagtgacaaggtggtggtggttgtggtggtggcggcggtggtggtggtggtggtggcggcggtggtggtggtggtggtggtggtggttcaaggcaaaatcttgacttggctggatttgtctggcaggttgtggattgaaggtagaaggatagtaggacaaggggtctagtttttccctcccccacccgtctttttgttccctccgcagaaattggatctcctaaattggatgacctggtaagtagaacttccctccagcgttcagttaagttttaaatgactctccgctgttccaaagggcgaggacgtctggagctctgcaaacggaaaaaagattttgaagaggaggaaaaaagtttccctcgatctgacacacatctttgggttttagctatacactaagttaaaagtgtaccctctccagtgcctcacttcacctgggatc

SEQ ID NO: 20716 - DNA, 2048 bp, Artificial sequence
  DNA replication origin
ccctaggggaggaggtgaggacaggccccgggggagcggggagttccgggcgcccctcggttccccgcgcgaggaaaagacgcggcgttccctttaagcggccgcctcgaacgggtatcggtagcgcgggcgagcggggagcggggggcggggggcgggggggggggggcggcgccgtttgaccaatcgaagctcaaccgaagagctaaataatgtctgacccgggcgcaaggcgcagcctggagctccgggtccccgacgctgccgccgccgcgcccgggcgcacccgcccgctcgctgtcccgcgcaccccgtagcgcctcgggctcccgggccggacagaggagccagcccggtgcgcccctccacctcctgctcggggggctttaatgagacacccaccgctgctgtggggccggcggggagcagcaccgcgacggggaccggggctgggcgctggagccagaatcggaaccacgatgtgactccgccgccggggacccgtgaggtttgtgtggaccccgaggtaggcaagcgctgggaatggggcttggtgcaggagctgcccgtccgcgggagagagttgactgggggatcccccaccccaaagttgtgggacgaggccagtctccttctttcctcccctccggtagaagggacgatttggagttactcttggggagttttctcccccatcccacaacccagaaggtcagccggcaccaccagggaaaaagggacccggggaagtcacgaagtagaggagggaaggcctggaggagacccagagctgcgtgatgggagcaaagacggcgacccggggatccctcgcagccctcccccagcccaggagtagtcgagagagacttagggggccagagctgtcgagggtcctgactgaggggagggtgctggggctaggctaggaatccttccagggggtgggtggtccccgcgccgacttgcggggggagtgggagggaagcttgcgccttcagcccgcatcccttccccggagctgcacacggctacctgctccccaggaattgagactgaagtggacttacaagtccgaagccaatgtagcttggaaaacttgggaggcggaattcctaccgctgggaactgaaagggtctgcgacactctcgggcaggccgaacccacatctctacccatcctgcgcccctcttctgaagcgccctccagggaagttaagagttttgactttcggggagtggttgggatgtacgtgggggattcttgactcgggttagtctctggggatgcagagccgggaagaggaatgggtgagtgagttactcctggaaagaaatagctgaggattgggggctctgtgcctgacgggcaagaagaaggggagattacagactaggggcatccctaaggaagaagcctcggggctgcgagggtgaactggaggatgcagtgtttgtgtgttgggggtagagcggggatgagggaccggggtggaggggaggcgaggaggaggaggggacccagagaacgaagctagggaaggtagagggtgccctctgccggccatgctgccaagagcagctactgggggcgggaggctgggggtggggaagtggtaaaggaaggttttgcgggatcccttagagagctggtaggagggacttgttgaatggtgctgctgactccagctcggtggggcgtgcgactcgtcgtcggtggattttgactcctcgttcttgtttggcttctatgcaagttttcctcgcgctgggggagctttgataagcctcgattggcggtgtgttagggcttcttggatcttattttagggtcctctagttatcctgcacttactccttaatgtcagtagcaaccaaagaacattttccgacaagcacgcaggaatgttcttggccagaagcaaagaaaggcatatttctgagtgtttattaatcctcctagtaatcttttaaagcaaagtaatatgtaattgggaacgttgattttctaactgcatataaaaggcgacatgatattaaatgagacccct

SEQ ID NO: 20717 - DNA, 1643 bp, Artificial sequence
  DNA replication origin
gtgagtagcaataaaacctgcattataattgaaaaatcttgacatgttgcttaacaacgggcatatcacggctcttcctagcacttcacacgccaaagaacagcagctactcaggccaggggaatcgggtttttacacagtgcaactttaattggaatcatttgagatttgacacagctatgtggaactgcgtggaacaaacttggagctgggtgggggggtgtgtgttatattggttgttcaaggctgatgcttgtctctcagcagtcttgcattctattcttttccttaatgtgtatggtgtatgatcatattctatgatttatatgtgggcatgtaattgacatttgcaagggggttaatttccatctaaaaacaataatgctgttagaggttggggttagggggtggagtgggggtaagggtggggtaaagactgggagtttaggtgtagatggggggtggggttggggggagagaaataagtcagaagtgcatatcaccggtaatgggtaatcctctcgtagaagaaaaggttctcatcaacatgtgatcaactattaacaggatggctttggcaaagccatccgcacgtgacaaaccgtaaggaagtggaagaaaccgtctagagcaatatcaagtatcacttaattagagatttttaagccttttcctcctgctgtgccgggtgtgtaatccgggcgataggagtccattcagcaccttggacagagccaacggatttgtccgaggtggcggtacccccaggtagtcttcttggccccgctgtaaagccaaccctgtgtcgcccttaaaaagcgtcttttctgaggttcggctcacactgagatcggggctggagagagagtcagattttggagcggagcgtttggaaagcgagccccagtttggtcccctcattgagctcgctgaagttggcttcctagcggtgtaggctggaatagactcttggcaagctccgggttggtatactgggttaactttgggaaatgcaagtgtttatctccaggatctagccaccggggtggtgtaagccgcaaagaaggtaagcaccagggcggggaccccttgcatccccaattcttgagctattttgatactgtcttccggagaggacgcgtggtggaggggaggaggtagagggagagcatgagagggggttgtttcttggtatttgcccagtttgaattgccctaggtgagaaccctggggcaaagggagaaagaaaaaaaagaaactcagtcttcctgcggatataatgagtttagttaacttggacctgcaaatgtctgattcaaatgtaagatttatctctctttttctcctcttcacctccctcttttccgttctctttgctggtgtgtgtgtgtgtgtgtacagtagattcattactaattatgaagcttttgcaaaacattcgaattcctaaaatttgactttgtagcatttagaatcaggcggtggaggtggtgtgcggtggggagaggaggtggaggttgggaagagggaaggaggtaaagctaaacctccaacacaaaaaaatgaatcaaggtaatttcagctcttctagtgagaaggattcattctctctgtatccctccctccctctctttccccctccc

SEQ ID NO: 20718 - DNA, 1098 bp, Artificial sequence
  DNA replication origin
cactccagcctgggcaccattgagcactgagtgaacgagactccgtctgcaatcccggcacctcgggaggccaaggctggcggatcacttgcggttaggggctggagaccggcccggccaacacagcgaaaccccgtctccaccaaaaccagtcaggcgtggcggcgcgtgcctgcaatcgcaggcactcagcaggctgaggcaggagaatcaggcagggaggttgcagtgagccgagatggcagcagtacagtccagcttcggctccgcatgagagggagaccgtggggagagggagagggagagggagagggagagggagagggagagggctactgtttactctttaaggttttataagaaggcactttttaccaatatttcaagttactcttgactttcgatcttctttaattgtcatctaaggacatacattatctcccccaagacattgcagtttcttgtaagcagggatgccttaaacaggagtttgggtgatggcaaaataaaattgagaagagatactcagactgagaaacctattacacaaaatagggtaggataagtaataagaggctgacccagctgtactccagatgggccagcagagcttggttaccatgtaggagagaggtagcagcagtccagtcaggcaggcagtataatagggggttaaaaagtcaggcagggagaacatggtgatgagccttccagataaaggtaatatgaataggtggtcagcaccagagaattagcatggctccagcagggcctgggctttaggaataggatgccaggtatcaggttataggaaggggatctgccagtgacagatgcaggctccagaagtaccagagtcctgggaaagaaataaagataggagagaacaagacagaaactctagaagttacttaagctcaggaatttggagatgttggactaggtcgaggattatgtgccatatgagcagtcagaatgatggtcttgagcccctatgtcagatatagagcaaagtgcctcccagagtccatgttagtgttagtagccagcttgtctcagggagccatttatgaggtttacagaaattaagccagtccc

SEQ ID NO: 20719 - DNA, 1263 bp, Artificial sequence
  DNA replication origin
gcggctggccgggcagaggggctcttcacttcccagtaggggtggccgggcagaggcgcccctcacctcccagacggggtggctggccgggcggagggctgacccccccacctccctcccggacggggcggctggccaggcggggggctgacccccccacctccctcccggacggggcggctggccgggtggggggctgacccccccatctccctcccggacggggtggctggccaggctgaggggctcctcacttcccagtaggggcggccgggcagaggcgcccctcacctcccggacggggcggctggccgggcggggggctgacccccccacctcctcccggatggcacggctggccgggcggggggctgaccccctcacctccctcccggatggcacggctggccgggcgggggggctgaccccccacctccctcccggatggggcggctggcctggcggggggctgaccccccccacctccctcccggacggggtggctgccgggtggagacgctcctcacttcccagacggggcagctgccgggcggaggggctcctcacttctcagacggggtggttgccaggcagagggtctcctcacttctcagacagggcggccgggcagagacgctcctcacctcccagatggggtctcggccgggcagaggcgctcctcacatcccagatggggcggcggggcagaggcgctccccacatctcagacgatgggcggccgggcagagacgctcctcacttcctagatgtgatggcggctgggaagaggcgctcctcacttcctagatgggatggcggccgggcgcagacgctcctcactttccagactgggcagccaggcagaggggctcctcacatcccagacgatgggcggccaggcagagacgctcctcacttcccagacggggtggcggccgggcagaggctgcaatctcggcactttgggaggccaaggcaggcggctgggaggtgtaggttgtagtgagccgagatcacgccactgcactccagcctgggcaccattgagcactgagtgaacgagactccgtctgcaatcccggcacctcgggaggccaaggctggcggatcacttgcggttaggggctggagaccggcccggccaacacagcgaaaccccgtctccaccaaaaccagtcaggcgtggcggcgcgtgcctgcaatcgcaggcactcagcaggctgaggcaggagaatcaggcagggaggttgcagtgagccgaga

SEQ ID NO: 20720 - DNA, 942 bp, Artificial sequence
  DNA replication origin
ctactgggaagtgaggagcccctctgcccggccagccgcctggtccgggagggaggtggggggggtcagccccccgcccggccagccgccccgtccgggagggaggtgggggggtcagccccccgcccggccagccgccccgtccgggaggtgaggggcgcctctgcccggccgcccctactgggaagtgaggagcccctctgcccggccagccgccctgtccgggagggaggtgggggggtcagccccctgcccggccagcggccccgtccgggaggtgaggggcgcctctgcccggccgcccctactgggaagtgaggagcccctctgcccggccagccgccccatccgggagggaggtgggggggtcagccccctgcccggccatccgccccgtccgggaggtgaggggcgcctctgcccggccgcccctactgggaagtgaggagcccctctgcccagccaccaccccgtctgggaggtgtgcccaacagctcattgagaacaggccaggatgacaatggcggctttgtggaatagaaaggcgggaaaggtggggaaaagattgagaaatcggatggttgccatgtctgtgtagaaagaagtagacacgggagacttttcattttgttctgcactaagaaaaattcttctgccttgggatcctgttgatctgtgaccttacccccaaccctgtgctctctgaaacatgtgctgtgtccactcagggttaaatggattaagggcggtgcaagatgtgctttgttaaacagatgcttgaaggcagcatgctcgttaagagtcatcaccaatccctaatctcaagtaatcagggacacaaacactgcggaaggccgcagggtcctctgcctaggaaaaccagagacctttgttcacttgtttatctgctgaccttccctccactattgtcccatgaccctg

SEQ ID NO: 20721 - DNA, 1077 bp, Artificial sequence
  DNA replication origin
cactcagatgggacgcagcttaggaagaatcccaggctgcgggcattccttggcccattggccagatttccggcacttgtagcaaactcgtgggggaggaggttctggaggaacccctggcagctgcagttcaggtgtttggagttcttgtgtgctggagatgtggctggggtttgtctcacagtggaggaaagggattgcaactcagaaatacattgctacttggttgcctctactctattattgtacaccttgaagacaaggttgattaattcctgttgtggggtttgagggccagattttaatttttgaagacttttttaatgttgggagcagattgggtaataaaatgtatattgagaataagatggccttttgaccttttagggtctagggctgtaaagcgtctgagggttgctgccaaacaagacatgaactgggctgggtttttatatttgatgaaaaagagtctaaatgctatctgatttgggataaagaaaagggagcattaaccttgactatgcctttagcttcagccacctctttaagtggaaattgctgggcaggtgggggagggctagtagcggaatgaagctgtaagctggactgggtgtgaggaggggaagtgataaaaagattataaggttggggagtggaggctgaggaagaattgggacctagttctgcctggggaggaggggagaggtcagatgggtctgtagaaaaggaagattagaaaggctcagcgatgcttgggattgggactgaggggacaggcagaagggaaaagaaggaggatttggacgagtcgcattgggaacagagactagggagggaacaatgtgtaaaagaatgcctggacgtcaggcacctcagactgtttgcccattttacgacaagaattatctagatcttgtaggatggaaaaattgaaagtgccgttttctggctatttggaaccactgtcgagtttgtactggggtcaagcagtgttgcagaagaaaataagatgctggccgggcgcggtggctcacgcctgtaatcccagcactttgggaggccgaggcgggtggatca

SEQ ID NO: 20722 - DNA, 971 bp, Artificial sequence
  DNA replication origin
atctcctttgatgtccttgggggtttcattgtgatataaggtttgtacagtctactggcttcattttaaaaagattttagggggtcaaggctcagcttagcactcttgggctatgtgttctaattctgggtagctggtatagggccactggctttgttctctggtcccttgaggttaggaacttgttgtgctgaagggactgaggtattcccagaccactgacacaacactctgatggatgataccagccaaagtgctttgtcagggcagttacagcaggatctgtgctgtgccatcagtggcagtgcagtggggtaaatgcttatcagctgggatacggtgctggtgggcaccagtctgcttctccctaggtgtgcattcacagtgcatcagtgacaacctggagcaggggagcaaggccactggcatcagtgtggatgtttgcactggtggtggttggtgtggggttggggtgctggtggatgcagaactgctggcctctatgtagggcaattttgccagtggtagtggtgatgcagttcagggaagggggtggggtgtgggaccaccggcctttgtttgcaagttgatgctggcagtggtgatgtgggggtggggtatgctcatgccagcagcagtggtgcattggggtgcactgcatgccagctgggaaagggaggcaaggtctacccacatgtaaacaaagaagggggtgcagctgtgggtaagtgcgtactggcagagcagctcaggagaggctgtgatggtgggagagtgagggtgggttggtacatgtctatctgcagggtccactcttctggagctctcccccatggtcagttgcagtcggccgttgatggacctaggaggcaggaccctaggaggcaccatggttgggcatccgaggctgcactgcaaatgggtgtggtcaggctggggcccaggaagaggccagcagacaggccagtgct

SEQ ID NO: 20723 - DNA, 914 bp, Artificial sequence
  DNA replication origin
ttaagtgcaaatgcgggtcatgaaaaatgtataattgatttgagatgctgcaaacaaacacaaacaggtcgggggggtgggacaaacaaaagtttaagtgaaaaaagatgtcagaagagggggagatcccgtggcctccacacccccttccaacgctcgctggctccctcccttcctttctccgccgttccagggaaggaacctggcagcgcccaggcgtagagcagggaggaggcggcggccccgggctcgggctcagcgctgtgggttcggggatgccaacgcgcccgggaggctgaggtcggggacgtggggctgtgatgcccgaccgaggatggcgtggtgtcagagccattggccgccggtggtcatcaatcaatccagagctagggaagagggagagaaaaaagataggcgtccagcggagcccggggccgccagcgctagcgccagcagtgccagcaggagcggcggccgaggaggtgacggaggtggcaacgggggactgagcgagtaaggcgctggtgtttcaggaaggaaggggaagttgtagccgggaagagccagccgtgagcctagaagggcagggcgagtgtatgtggtgtgtgtgtgtgtgtgtgtgtgtgtgtgtgtgtgtagttcataaagcaccccccaccccgcctcgcgcaactgcccaccaccctagatttaaaacaaacaaaccaatccaaagtagagaattccgcgccccccaccgccccaccttatatagactccacgagttgccagaggctccggagaaaagtcttgccctccctctccgaaagaatgtgtcacccgggtgtccgcagtgctggagacaagttcaggtgtaagtgcggtgggagggagggcgctcggtggacagaagcacgtggaactttatgtcagcc

SEQ ID NO: 20724 - DNA, 913 bp, Artificial sequence
  DNA replication origin
cctcttctcttctccaccccctccagccatcagtcccccgacctctgggggtccccacctcttcgctccctcctccgccaggatttcttaggaggagaggagggggtatcggcgagaagctggggaagccgggcggcggggatgggggtggggacgagggctcagcgagctgtttactagaaagtcccggggtgatgtgttcgagccgccccggcctaggcctgggtgcattgtgttggcccgatccccgggctcccgcggcggcccgaggccaggtgcagtgacgaggggaaggcaccgcgcagctttgtgctccggctgcgccccgcggccgcccccggggccgcccgcgcgcgccgctctcgctcggggctctttctcaccccgtccccgcgccccaacctcactctccgccgctgcctgggtctccgcgctcgcagcctgcggagcgacccggcgacccaagctggggtcgaggctaggcgacgggggacgagtaccgaggaaaagtaaccgttgccgccggatttcttctctacagaggcaggagtttctttgctatttacgtataacaaggttatctttgtaaagcctttgaattccggggttttgcggcctaggaggtgaagggggcatttttctagaggctcaggagccggttggaatccgtcagcaagaaaataaattaaggatgccccagtgaagttgatttataatagtacatcaccacccccctctcacacacacaccccaaattaagtgcaaatgcgggtcatgaaaaatgtataattgatttgagatgctgcaaacaaacacaaacaggtcgggggggtgggacaaacaaaagtttaagtgaaaaaagatgtcagaagagggggagatcccgtggcctccacacccccttccaacgctc

SEQ ID NO: 20725 - DNA, 1047 bp, Artificial sequence
  DNA replication origin
tcccggggcggattacctttcccgggctgcgctccggatcccggggatgccttcagcgcccggcgagcaggcgatccatagccgagcggcccgagccggctggaggagcgctgggggcgcgcgggggcggcgaggggcgcgagcgggccagaaccttcgaccccggaggtcccgccgcaggctggggctgggggccagggggcgcggcgctagagggaggcggggggagaaaggacccgagcagcctcgatctggggagagagcgagcgagggggcgaggagagggagcgagggcgcggcgagccggagggagagcgagcggtgcagtgacagggactgccactggggtcaaaggagcacagctccaggaagcagggcggccgaggcgccgctccgtgcgcgctccccggcgggaccccgcgcccctgcacgcccctcccgcagtccctgcccactcggacccccaccggtgccccgaagccccagggtttcgagaggaggagggagccgagggcgaggcccggtagcctgctggtgctcccgggtcaagcaggcggcaggaagctgagctgcaagttcatcatcatgagtgcgatctgcgtaaaaaatgataggggaaggaaggcgggctacggtgccccaggaaaagaagggagctttctcccaaatggtgttcttctgcaaagagaacacccagctccccgccacccaccgacctgccaggctctgtcaggagtcctggcaccgttccaggacgcagggctcaccgcaggggtaaggggagcggctgggacacttcgctcagacctaggaaggcgaccctaggttccctcccatctgctgatctgaggctttcctgggggagagctgtgctcctttttccccaagcctttcaacacgacagacacacacacacacacacacgctcactcactcactcacacactcacctctttctctctgcaatgttgctgagaaagaaaaggccaacccagctgatcattttttttacctccatgaattaaggcagattcaggacaggaaggt

SEQ ID NO: 20726 - DNA, 950 bp, Artificial sequence
  DNA replication origin
tagtgggatcttttcaggaactttgaaatgttttaaaaccccaactttctcccccatttaaacaggcggattcatcggcactggccaccatatgggcccttggagatctattgagatgaccaccaacacttgaatagcgaggggctgcttttcagcgctgcacaatgccccgcgagtaagggaaactattaaactcctggggcaggagcgttggcaaactttcgtgggcagaattttgaggctacaatgagcgcggacaacaaaaggattctcttgaggcgtgcagcgggccacattgtgttacaagaagcccagtcaacagacttttcagtgaagtgtgttaacccctctgctctgctatcattaatcactgtccgaagagcgggcgcctccgtgctatttagggcgcttggctggggggatggagggtggatgggggggccagggcccagcatggggggaggcagggagagtggacggggaccagggctgggttcctacatagaggagatggaggggaggcaggatggaaaccagcggtgggggtggaagcaagggggaaggattggggggcctgggttaggggaaagacagagggcgatggagggaaaaagagggcgatggaggggaaaagaaggctcaaaaaacatagaggctagaaaggtatttttaaaaaaggacagaaaagaatgctgagaggaaaaagagacacgagggccgaacaagagtgggagagagaggaaaaggaggatgagggccagagaatattagtaactgagccccatctggactctgggtctttgcactccatcagaaaggtgggggtcgaggagggctacttagctgagggagacgcgctccgctcacgtgtgcgggcacaagcgtctgtgctaatttactgccccaagtttccggggacttttcaaagcgtttttcaagggaagaaatga

SEQ ID NO: 20727 - DNA, 1361 bp, Artificial sequence
  DNA replication origin
ggtttgaggttacggttgaggcacacggcgtcggggctcaactgaactcaaagtgtggaaaggcccgggtcttccagcagcctgccctggccgaaccacacaggcttaaggagggtccccagcaccttatccatctgttttggaaacgccggtcgccccctggtgcttccggggctggtaagcgcgtagctgaggaaagggcacaaaggtggcgagctttgcgggagtagttgtgcagaacctgccggaccccagggcttggccggtaggctcgccttcggcggctgggctctccccttggagctcagactccccagccgcaggctgtctctcgggcgggccccagccagggcgcgcagccctgagcgtttgtcgctgcggcccggctggcaggccccgaggggcgcggggtcgcgggccggccggcagggctttgtgccgctcgttcccgggtgtgcgcgaggcgcggagcatccaaattgacaccatatgttttcctattagttgcttcgcggtcgagttctaggcgcataatcatcgccagtgggcgagagcgccagcagtccctagggaagggacacaatgattgaggcttaacctctgaaggggaatttggagctgcgctttctctctgccatttcgatgctgggagtggcgctctggccctggcgtctcctgggcaagcaccagccggcggtatctgcggaggtggctggcacgttgttattttttgaaatgagtgaggagggaggtctagatttaggcggccttacgcgcccgccttggcattagcagactgggaattgccgtggctatgcccgaagtttggaaagtctctctcggtctctttctgggacagcctttctttttccgggaagcttcctgtgcctagaggtggggctctgtagctggaggggtagatggaacttgcgaagcaaaggaaggcaataaaaggaagttaggagaaaccggaaacgtgggccaggccttgctctgttggagaagcggtgtccccgcaaagtccctgcttgcgctggtcccggccggagcccagatcccccaaacgcctgtcacttctcatcgagttgaggctccggcccccacccgcgccttggtgagggccccccctcagccccaagccttcggctaccctgaaaacgcggctcccctcgaaggggaaacaagtgcagttcaatctcgtctgagtgatctacaaataaggacggaaagggtcgttttatcacggtcccgtttgtcgtgacgatgcaatttcccggagcggagcactgtcacaaagtgacaaggctgccacaagcgccccgactgatcttttcaattagccttccatgcatgatccggag

SEQ ID NO: 20728 - DNA, 1479 bp, Artificial sequence
  DNA replication origin
tgcttcttgaaattctttgcttgcaggcaggcagatcaataatcaccataggtaaaacagaaaaaataatgcatttaaaaaaaaacagagagaaatgatgctgtgactgttttgttattttacctctttttggggggcagacctcttgaatgggctctttattgtaactctctcttcccaattgagctccccacggtgccgttgtatctttttacagcccctaacaactcacaccagtaacacaattacctccagatatttacaacaagaaattacttttctattttctccactcacccaaaagactttttttttttttcctttgggaaaggtagggaggtgttcgtacgggagcagcctcggggacccctgcactgggtcagggcttatgaagctagaagcgtccctctgttccctttgtgagttggtgggttgttggtacatttggttggaagctgtgttgctggttagggagactcggttttgctccttgggttcgaggaaagctggagaatagaagccattgtttgccgtctgtcggctttgtcgaccacgctcaccccctcctgttcgtactttttaaagcagtgaggcgaggtagacagggtgtgtcacagtacagttaaaggggtgaagatctaaacgccaaaagagaagttaatcacaataagtgaggtttgggataaaaagttgggcttgcccctttcaaagtcccagaaagctgggaggtagatggagagggggccattgggaagtttttttggtgtagggagaggagtagaagataaagggtaagcagagtgttgggttctgggggtcttgtgaagttccttaaggaaggagggagtgtggccctgcagccctcccaaactgctccagcctatgctctccggcaccaggaagttccaaggttcccttcccctggtctccaaacttcaggtattcctctcccctcacaccccttcaacctcagctcttggcctctactccttactccactgttcctcctgtttcccccttccccttttcctggttctttatatttttgcaaagtgggatccgaacttgctagattttccaattctcccaagccagaccagagcagcctcttttaaaggatggagacttctgtggcagatgccgctgaaaatgtgggtgtaatgctgggacttagagtttgatgacagtttgactgagccctagatgcatgtgtttttcctgagagtgaggctcagagagcccatggacgtatgctgttgaaccacagcttgatatacctttttctccttctgttttgtcttagggggaagactttaactaggggcgcgcagatgtgtgaggccttttattgtgagagtggacagacatccgagatttcaggcaagttctgtggtggctgctttgggctcaaaacccacaaacagtcaaaacaaactatttcagtatgcttcttcactatagttcagatagaagaaaata

SEQ ID NO: 20729 - DNA, 1492 bp, Artificial sequence
  DNA replication origin
ggagcccaaactttctacttccagcgaaagcccgcgtcggagggcgactgccggcgagcgggagcggcgcagggctcggggcgggcggccagctcagccccagcgccagcgccagcgccagcgcgggctgagctcgcgggaagaagggagactccaggcgcgacagcagccgcggctcctagccccagcgtcgcccaatgctcccgacccgcgggaaaagacgaagaggctctgtggtgcccaaggccctggaacggccgcagagagcaaccgctgccggctgctttgtccagcccgaggcccagcgaacgcgcagagagcgggcgctccgaggactcgccgagggagcgccgagggaacctgctcgccgcgtctccgcccgcccgccggccctcgggctttgtgccgcactgggctccggcgcagaagagtcagccggcactcgagcgccgaggggggcaccgcgcccgccaccagcccgagtggagtcagtcggcaaggcagccgcacgctggaggtagagggaagagcgagctagcgcgagccgggaaggaagccaccaggccaaggcggtggaacgcgcgctccgagggagctcagagccgagcgggaggactgtcagcttccacccagcccccgggctcttgcccccaactccactggagcgctgagctcggaacttgaaaactctctgctccccaggcttcccccgactctcatctcccttgccttgcggaggctggggctcttccctgttctccggccccctgcgcttggtgggtatttttccttgttttcctctgatccagtctcaccaggtgttgggatttcagcaagttttgaggtgcagagttggtttgcttttttgtttgttttactccgaatccccttatgtttttcttggtaaggccttgaaaataaatctgtatgaaagcattggccttccccctcgtctgatcacttcttctcccggctaattagtcggagtaatttgagagctttcgattctaagatcccaggaggaaaagtgtcttttcaaagttcataaagttgttgcctctttccttgtgcagattttctcagtctccctgcgccataatagccctgaattttagcaagtgtaattgggggaaatggagttgaatttcaagtggaaatgctttctttttcgagtgctaaaacctggctcttcattcatgagcgatttctagaaagtttaaaaacaaagtgaacgtggtttctttctttcttcctttttatttttcttatactctcccaagctccctaagccattctggacgtttaactcgaacttgggaaggttttagaaggggctgggagcagaaaatgaaatgaaaggcaaagagcttgagcctggcgagtttactgaagagaaataatagttgttgcggttgacattacattttttatagccagtgacctttgcaaaagcgtgaaggcagtttgattagttgttatcttatttggccct

SEQ ID NO: 20730 - DNA, 1185 bp, Artificial sequence
  DNA replication origin
gagtgccggctgactcttctgcgccggagcccagtgcggcacaaagcccgagggccggcgggcgggcggagacgcggcgagcaggttccctcggcgctccctcggcgagtcctcggagcgcccgctctctgcgcgttcgctgggcctcgggctggacaaagcagccggcagcggttgctctctgcggccgttccagggccttgggcaccacagagcctcttcgtcttttcccgcgggtcgggagcattgggcgacgctggggctaggagccgcggctgctgtcgcgcctggagtctcccttcttcccgcgagctcagcccgcgctggcgctggcgctggcgctggggctgagctggccgcccgccccgagccctgcgccgctcccgctcgccggcagtcgccctccgacgcgggctttcgctggaagtagaaagtttgggctcctgcgtggaaacttctccggcccaactctcccggcgtagcagtgggggaggggaccggcgagaggggaggaaggaaggggggaggaagggggagacctgtctgaatattgcaataaaaataaagcgagaagaaagaagcggactcacctttatgaggcatcctttctggttgtcacagcttctgtcaagagttttgtttggttggggttttttgtgctgctgttgttgcttgaagaccacaatggtttgaaatgacggtgttttaaaggagttgctggtgagagttttctccacggatgttgctgggttggtgtgtgagagcaattctcagattcctgggaaggagacagagattgacaataaaatgggctgtcagcggctggagagtgagagataaagagtgtgggtgagggaagtggctgcagccagcacacctatgctgattggtgatggctcaagtgtgttaatgtgtgtgtgccggcgcccggcctcgcctccaccgctcctcactggcccattagcgaagcctgacctctgtcatcatcctccagcaaaacacttcctcctgcgcctgaaccagagcgggaaatgaggccgagccacggttcccttttcaaacccactaatcactccgcaacatgcaaatgcaccgctcgctctcacacaaaatattgctttatgcaaagcagcgccggggcctcgcgccagccgattggatgctccctctccccgcctggtgcaa

SEQ ID NO: 20731 - DNA, 1219 bp, Artificial sequence
  DNA replication origin
cggggcctcgcgccagccgattggatgctccctctccccgcctggtgcaattggtccgtttgtttgaatatgaatacacttgttttcggctccgccggtgggtcccggctcctctccccggcgcagggcccccgagcccgggctctggcgctcgcctgcatctccccgctccgcgcacgccgagattcggcgcggcccgccctgctgccgcgaacttgagcggtcaagtgaaggtttctgggttgggggtcgcgcccccactccccctaagctggactcgggactcccagtcctcggagggtgcaagtttctgtgctgtcctttcttgccaactccaggacagcgtggcctgccgccccgcccccgcccgcccccaccccatcccagccggggccccaagacacagagcacagcggcggccgcaccccagcccacctggccccttggaagaagaggaaaggggcgggagcgtcactgggtcctggcagctccattccagctgcggaggccgcggcgaagcctaggccgagaggaggttgccgggccgagaactaaacgaggccagaggcctccccagcccaagcctccagggcctgtccaaatcctccaccccgctctccccgccctttcttctctcctttctcctttcggaagccgcggtgcgcagcggagcagaggcacagctctggctggagaggcccgagtaaacacgccacttactttgtgtacagagggttcttgtgaaaagccctgaagagtcctcaccaaacactcaccaacttctcccacgtgccatttgttgactaagtgcggctgcttttcgcagcgcccgagaggaggggaagccaggggagataagaggggagggggagtggaagcctgggtgggggggcggatgaccaatgctgggagggattctctctctctctctgtgtgtgtgtgtgtgtgtgtgtgtgtgtgtgtgtgtgtcccactggcgatgtcggtatgtcagcgtgtgtcgtgtgtgccaccggtcatctgtgtgtggtgcgtgtgtctccgcaccacgactccctctcctgggtctgctcagtccacggaggcagctccccttcagctgttgccagaaaaccggggaggaaagtaagtaaatggcttttctcttctgaccacacaccagaagtccatttgttgaatgccgcacgattaggacacacctcagtacactccaaaggcg

SEQ ID NO: 20732 - DNA, 1518 bp, Artificial sequence
  DNA replication origin
cttggagtcctccttgcccaggaaggcctcgtggtcgtactggaagctctggttgtcctcagggggccgctcgcccagctccgagtcgggccgcaccacgcgctctttgcgcaccgtgggcttggcccgcagaacccgcggcgccagcaccagcgccagcagcagccccagggctaaccccaggcggcggccgcggccaccgcgcgccatcgtcccgaggagagggcggccgagagggagacgctgagcgagcgacaacagcggcagctcgggaatggggactcggagcgcggcggcagcgacagggttggggccggcgcggaggaggggactggccagtccctccgccagtgcccgccccgagccggagcagaggggcgcgcctgggcctcgggctgggaagctgcgggcggccccgctcgcgcgcccattggtcgctgagctgccgggggaagccggggccgcggagccacgtcgccagctggggtggtgggcgcggggctcgtgtttcgcctcggcccctccccgcgatcttgttgctaggggcgggcccgggcgaactgggctagggactggagggctcggaggaggattgggaagttctttgtcaagcaacagatgtgcaggataaaattccctctgacttcctacagttccgggaaaactgtaaggaaggagacgttgcccttcctcaacttccaactgagaccccgaatctcagccctagaccctgctctaagatgtgctctcaaacccaattcaaccccatttagtaaaatttggagtctggttacaaacgcgagcctggaaggagaccaagacgggcgaagtcccctagaaacgagggtcgtactgtcagtcgtcaaggagggtcaagcggggaacttctatatgaccaagagtccctctaaagggagcggtactgtgcgttccagctgccaggggaacgcaggccccacgctgatagatagtcctgtttcccaaatgaaatcaatcaggattttagatttttatgttttatttctaaatgttggtaactcattttacaaaagcactagttggatccaatcttacctgtattcagttggtaatgctaccaatacagatatctgtcccatcaaactttctgcaatgatggaaatgccctctatctggtctggcctgtaggtagtggctgttgagcacttgatgtgtagcttagtgtaagtgaggcactgaaattttaatttaaatctaaacttaaagagccacacgggactaatggctaccgtattggacggtgaggtctcgagcagtctcagccttttgacactcattgaaagccatgatcctcttccagaaaaatgcacatacagctactgacacgggtgcttgattaaagagtcggaggattcatggatcttttgaagccccacctatgagccccaggttaagaatccctagaaggccgggcacggtggctcatgcctgtaatcccggcactttgggaggcggagccaggtagatcacttgaggtca

SEQ ID NO: 20733 - DNA, 1518 bp, Artificial sequence
  DNA replication origin
tgctgctggcgctggtgctggcgccgcgggttctgcgggccaagcccacggtgcgcaaagagcgcgtggtgcggcccgactcggagctgggcgagcggccccctgaggacaaccagagcttccagtacgaccacgaggccttcctgggcaaggaggactccaagaccttcgaccagctcaccccggacgagagcaaggagaggctagggtgaggccgcggccagggccccgtggggggcggcgcaggtgtccgagggccgcctgggcgagagccacgcgggataccaccgccaaagcgaaagcgaaatcgcgcgcgcggcctcgaggatggggccctgcccaactcggcgctggggctcaggctaacttgctggagggccccgggaccccagcttggagatcgccgccgccgcgccccggccggggtggtttctcgcggggaggcgagaacgtggcagcggccgcgggagccaggacggcgagggcccgccccctcccccaggttgcatcagaagggaggggagagtgcacaaaagaagagtttgtccacagtggcctgttagtgccatgagttcctccccactctctcgcagtttctctctgatcccccactcccggggagaagggcttgagacactcgctaagaaaatctcagggatgaacataaatggataaaagatgaaggggcaggcgagcgacaggcttgcttcctggtctcggccgcagtggtcttgccttttgcctaatcgccctgtaaatctatcgtaaggagtctgggcgcggtgactcacgcctgtaatcccagcactttgggaggccgaggcggggggaggggtggggagatcacctgaggtcaggagttcgagaccagcctgaccaaacggcgaaatcccgtctctactaaaaatacaaaaattagccgggcgtcgtggcacacgcctgtaatcccagctacttgggaggctgaggcaggggaatcgcttgaacccgggaggcggaggtagcagtgggccgagattgcgccactgcactccagccggggctagagtgagactccatctcaaaaataataaaaataaaaataaaataaaatctagtgtagggatacaaaaatccggttgaaaagggacacgcagtttccgattggaaacacgagggagcaggaatggaaacggttcgcctgaaacgtttctgttggcagcagatgtctgcagaagcactcagttctttggcaactgatttgtttggggggcaaaaagctggagggttctcttggtggtggaggattttgacttgggctgttaaaggcagttgagtcaggaaccaaacccgggaaacaaaacttcggcgcattttagtacaccctccccgggtcccctgaggaaacacttgggcactgtgcggaggtatctggtggtccttgcacagaggacccagcaggcagcctggtcccagatggaggcagggctggggaagaaaccagcagtcctgcctattgggcaccaggtctcagatctc

SEQ ID NO: 20734 - DNA, 1725 bp, Artificial sequence
  DNA replication origin
ccggtgtggccattggatgggtttgaggtctcagaaccgagtgggagtggactccgtgtttaatatttagtcccgatgaaggtaaattcctcccagtaaagaccttctaaaaataataacttctcgagcgccgctccttcttcagctcgaaagagtaattgtcctcatttttatacaacataagaacaactcagagaccagggagatcagctttaatttcctctaagtagtagagtggagtcgaggcgtctcgtgcctccaagaccctgcatgcccgcagtcagggctgcccggctggggcgttcccaagtccgccggctcatgcgtcccctccggggtcccaaggacccagacgcagagcccagcgccttcctacctgctgtagggcgtcctcagcagcaaagcctggctgccggtgcagctgtcggtgggggtgtggcagccatagaccgggggcggcaccgagtactgctgctcacctgcagagagaaccgaagacagctgagcgagtgcgccccaagggctcggggtgcgaggctgcgggcaggggttgggggagacacgagatcctgagcctggggcactggggcctggatgagcggcgtgcagagcgaggccgtccagaatgcaagaagctaagcctctcactttgcattcccctagcagtcgctgcgctgtgcaccaaaaaggccctccggacattcatagacttagttggatggcgatgtccctaacgtacttgggatggagggagacccagtcttgtcctttaaatacagtgccattggggtaatgatttctaaggtccttttagatgtcctcctttgcctaatttgctgtgggttaggaattcctgggggagaggaggatagcacggaagaaggggagaaggactccacttggttccgctcgcttacccagcgagccctgctggcccatgggatcctcatgcttgaatgagtggttggggaactgcgccgcatggtgcgagggcgtgtgaccgtagctgggcgtcccgtcgaaggtgaccgtgctgtaacctgcgggagcggcggagagaagcacagtgtcagcggtgctctcgcaagacggggcagtgggtctgaaccagccacgggcggggggggtgtgcgctgaaccccgcattcggacccccagcggaggagaatccagccccacaagcctccaggactttcggcaggaagacggcccaagtccctggatgtgaccttgggacaggcttctccatccttttctgactaaaacccccacctcgctttttcccaatttatttatgccgcagtcttctacggtctctgccgcttctgcagcgaacccctggcaaattaagtataaaactcgttgcctgatcgacagagaaggttgttcaccccccaaaaataaactgcagctcttccgcaggagcagcgcgggcaagcgaaatgaatctgctgggctaaccccgcgttgactccgagctgtaaatcaggggcccgcgcaccaactttcattaattactcggagccagttaaatggcctggtcttaaaaatgggaagagtaattaccgagtaatgttatctgtctggggctacccgacctgacaccatgacacccaagggaaagctggtgagggggaaaacaagggccccttccagttgggccttcagatggcgaccctgcgctctcctcctcctcccccctatgggacccaccttgcgcccagg

SEQ ID NO: 20735 - DNA, 1476 bp, Artificial sequence
  DNA replication origin
cagcgctgaacgtctccagggccggaggagccgcggggcgtccgggtctgagccgcagcaaatgggctccgacgtgcgggacctgaacgcgctgctgcccgccgtcccctccctgggtggcggcggcggctgtgccctgcctgtgagcggcgcggcgcagtgggcgccggtgctggactttgcgcccccgggcgcttcggcttacgggtcgttgggcggccccgcgccgccaccggctccgccgccacccccgccgccgccgcctcactccttcatcaaacaggagccgagctggggcggcgcggagccgcacgaggagcagtgcctgagcgccttcactgtccacttttccggccagttcactggcacagccggagcctgtcgctacgggcccttcggtcctcctccgcccagccaggcgtcatccggccaggccaggatgtttcctaacgcgccctacctgcccagctgcctcgagagccagcccgctattcgcaatcagggtaagtaggccggggagcgccccctacgcgcggggcagtggcgccagggactctccgctctaggacacccccctctcctaccccttttgaccgcagctcttacccagctgcttcccaagggccgtgaggatagcggaagcggcggctggggaggaggccggagagtgggagtgcacgcaggcactggcccccgacatcctccaaagccaggcagagctaggagcctgactgttcgcaagagccgggagggcgtctggggccccttagagtccgagagattccgggactgctagtccccacgggagtggaaccaggagaccggcgcagtgtctggctctgccttggggagagttttgttaattaaggaaacgccaaattgtcaccaagcgtagcgcttttcagacgtctggactctggattcggagtgggaccagcgcgggggtgagcgcctgtgctgtgctgcctccgcagcgctaaaatgtccaggagcacctccagcccttataatacggtgttggcacacacttaggtgcacattaagtatcgtagagaactagaatgagcacatgcacctccagtaactaaatggctttctggaacagcgtcgtgtccgtggatagctcccgcgtatggtaatacagaagtggatcttcactgggcttcgctcaggcggcggccacgcaggttctggggatggaagagaacttgacttatccgagtccaagctatgcgggaccaggttctaccgcaggcagtggaaggaggcacgagctttggcctttctttcagcgcatctggggcgcctcttcatcttgtaaacgcggggctcagctgggacagtatttcttcaagacctggggttagaacaaggacagggttattcgctgtgcttagtcaggatacaaggagggaactcggcacacgataagtatcaggttggtttctcatcccgcgccgatgcccgcccacctct

SEQ ID NO: 20736 - DNA, 1315 bp, Artificial sequence
  DNA replication origin
ggctgctgtaggcacccaggcccggagcggagcgtgtgctgagacgccggctccgggacacacgtggaagccgggtcctgcagcaagaggaagtccaggatcgcggcgaggagacggcggggcccgggcgcctgggctgccgtcccggctctgggtgggtgggtgggtgaatgagtaggtgggagggagggcgggaagtgggggagcggacaggcggtcgggttgcggagagcccccgggtgtgggcgctgccttgaactccttaccccagctgcctggctgccctcagcttcccaaagctcaaataagaggggccggcggcgcggggaagaggaggagccaggaggctcggccgctccattcactcagcagcccaagcccggccaggcagcgcgcgctgctccttgggggcgccctcgcagctggggtgagggcgggtccgagggagcgtccctctcggagacaccctcctcttcaacccaacacgcgctctcagctggccggtgtggcacaaccctccccccacctccccttcttggccttcgccagtgtgggagcctcgtctcactggagagtccgttcaggtaagcagtgagtccgggcagggtcgaatgcggtgggagtagagatggggttgttaatctaaaagagtggtttggagggaggggcaggtaggctccaagagggcgggaacttcaggaaagcgcagaaagaactcagtcaagcttcaaagaagcgtatacccttgctttgcacccttgagtctggctcttgcttctagaactgtcgggtaggggagtggccatgatcttggggtcactggggaaagaggtggccctttgtgggttccagaggtcgggactgaaagcgaacgtccctcagttgggtggccgggagttgcaccagttataagccgggcgtatttcgatcggctagtagttgtttacttggtgaggtttgcgccaggcggaaggcggttgccgcctacctaaaattggagtcagcagcacttagtttccctttccagtgaggaatatctaattcttctacggttaagccgggaaaacagcggctagtttaggagggaagaaaacccttgggcaaacgcccaaagcctgcgtatattccggccggagcatcctggcgcccagtttggggaggaggggtgaaggggagggtttggatacgaagcccggcagggagcgggtaactcctggagccactccgccgagcactgcctgtggccctggtcgaggataccattctggttgctcagtgattgaccaggaggcggaagccagttaaggggaccaag

SEQ ID NO: 20737 - DNA, 1050 bp, Artificial sequence
  DNA replication origin
ggcggtggagggagctgccccctcacatggccccggcgagcaggcgggagaagggcgcgctggcgagtctgggccgcaaagacccgggccgcggcgggcggcgaggccccagctgggcgtcagggaagcggaggcacccgcggccgggactcgcggcgacggcggcggcggcggcggccgctgcgccccatgttggtggatttcccaggatgcacctcccgcccccctccgccccgcggccttgccccgcctcccctctgagccccgcgcttgccgctcgcggggctggcgggcggccgcgaggcctccgccaccgcaggacgcttcgcgagggacagttggggccgagaaggcgcgggtcctgcggggcccggccgacttcagggactccgaggggcgcccgccagccggagcccgcgaaccgcagacttcccgccttccgcagcccggaagggagctgtccgcactcgccgcggcccgcgtgggaagggaccgcgcctggctatcgccccgcgcgggggaggggaagtggagtggaacccagcgtagggcgctgctcaggggtagccgggtcaacgctttgcttggagctcactatttgacccttcgggttattttgagggactccagtactcagttccctgatcgcgatttctttctctgcgccccaatccagaaacagctgagcgagctcttttgcagttccgcttactccctccccaaagcttgctgggctagaggacccttttcctgctgttaggggagatttatattcaaagagattcaaattcaaacgtattattttccaatcctcgctgaaagggcctttcccaagggctcttattaactgtccccacccccaccttggggatttttctcgctctgggtttcagaatcttctatcccaagatagataaccacctcttcattgattaatccaactaccatctggatgactttaattacaataaatttaaactcaccatgcactctgatgttgaggggttttgtttgagacttggaacttcagcaggactctctccccaaaca

SEQ ID NO: 20738 - DNA, 1501 bp, Artificial sequence
  DNA replication origin
cgcctgctcgccggggccatgtgagggggcagctccctccaccgccgccgccccctcttcctcccccgccccctctccctgcccgcccccgtcacacggagccctggaggatcccccgctgctgcccgccctccctacgccacccccacgatggacaggaactacgcgacctcgggcttcaccgagccgccgccgccgccgccgcccgcgccccccgccgcccccgtccccgccagcgccgctgcgcagccccccgccccagcctgggcgtacgaaccccgagccgccgccgccgccgccagcagcagctgcagcagtggcagctgcagtagcggcagcagccccagcctcaaggccaggtagggagggtgggcggcggggtcgcggtggaccaggaaaggccggggatgcgtttggggccttcgctcggttgcagcgccgcccagaggtctgggccgggcggggagccctccgctcgccctcggccagctcgggggaggcggctgatgactcctacggggtggtcgcgggtaggtgggggcgcccggtgcaggattcgcgcctggggacggcgggtgaaggaatagctgggcgggagtcgtggggctccgtcacctcttgggtcctgggctctcacatggtgaagtttgggctcgtggctgaactcgggatctgtgagacccaggattggcgccgggggtccgaagggggcgccggagagtttggggcagtggcgatccattgtattggaacctgggtggccgacaatgcggtcttggggactccggcgtgtgagggttgcggaggcgggagaggaagagtcgcggaaccgcgtcccggagacactggggggcccgggagggctgggctacgggagaatccccggggcgcagggcagaagagggggcccggcagggcgcgaacgcggctccagggccgggtgacatatgtttgcgctggtggccaagatttaggcgatttttcttccacgcgttcaaagttgctcttaggtttcctccccttttaacaacagcaggaagtaaggaatctttctttgccttctatgcctcggggtgactgagagttgggaagaaatggggcgggggttggggtgggggtagtgaaggccgtaaaggttgaagaaccaaagcatgcttctccatctcggcctttaaggtccgggtgcattatgtagcgtggggttcaagagttcatcttgcatgaccaagggaatctaaaattttgactcctacttgatatttaagctcgcgggaaatgtgtagtagtgccacactgtgaaacggtcccatttgaatgataactggaaggcgtggtctggtttggagaattggtgagcggggtgttttaaagccacctctcccgaacaatacagaatctggtaggtgcagcttctgattacatggaccagggaatcctgggttgctaatgacttcatcctcagctaccaacaggaagcttcgtggctttatgatctcatcag

SEQ ID NO: 20739 - DNA, 1247 bp, Artificial sequence
  DNA replication origin
cgctgctaattttattatcttcacatgctgagaaggagcccaggagggatgaagtaattcattctgtgcagtgaggaggaaagggaggatttctaggtctctaatgctcagcttagtaaactaaccccatccttaagattgagttcaagtcctgtctcttcccaggacacttcccggacctcaccagtgattgcacctttctcaactcctgcagggctggctagttgacatttggcatttgtcactgccttaaattcaattcaaagcgtgcttatttaaatagaaagatgcaaatacatagtctagagggggaggcagacaggcttacaaggagccataatgaaacttaagtggcattatgaaattgcccagggaatatagcagaggaagaaactaactctgcctgggaggagattgagaaaaccttcccagaaaagatgacatttgaactgatctttaaaaggagtaggatttcacctagttaaaacatgtctggagggggagaggagggggagaggaggtgaaaaggagggcatttcactcagagggcagaagccaaggcacaagaaaatgagaaaaggaagtggctagagatgatggaaagatgcgttggggccagatggtaaaagtgctagtttttattttaaaattccccacctagatttcgaacttcttaagagccaggaccagtcatattccccacttatgctccatctgtatatcccccaaatagacacccacaagtatctgttgatagagatgaatccctacgtcatctctgtgatgtcactgtatctgggaggctgggcgttggtttcagacatacctgggccccaattctggctctttactagctgtgtaacttcagtgtcctcctctgtaaaacacagctacctacctgctcggtttggggggagatgaaacgagggattgtgcacggcaggccttctacaaatggtaactctaattaaagggctctaggatgcggccacgaaccatttaatttgcttatatcgcgcgcatccattcaacccccactgtgtctaaaaagagagccgaggggaggaggatcctcgcacttgccaagaagacggtcatccgtcggcgctgcacgcgggcctaggctggacacaagaggctccccagcagaaagggtctttcggcaaaagaaaaaaggggctctgtcccccggcgccgggaatcccctcctctggcactgagctccactcgcgcccggcgtccggatt

SEQ ID NO: 20740 - DNA, 1106 bp, Artificial sequence
  DNA replication origin
gggtaaggttatagattaacagcatcccaaggcagaagaatttttcttagtacagaacaaaatggagtctcctatgtctacttctttctgcacagacacagtaacaatctgatctctctttcttttccccacatttcccccttttctgttcgacaaaaccgccatcgtcatcatggcccgttctcaatgagctgttgggtactcctcccagacggggtggcagccgggcagaggggctcctcacttcccagatggggcagccgggcagaggcgccccccacctcccagacagggcggctggccgggtggggactgcccccgacctccctcccagacggggcggctggccaggtgggggctgccccccacctcctggaaggggcggctgctgggcggagacgctcctcacttcccagacggggcggctgccgggcggaggggctcctcacttcccagacggggcggccgggcagagacgctcctgacctcccagacggggtggcggtcgggcagagacgctcctcagttcccagacggggtcgcggccggacagaggcgcccctcacatcccagacggggcggcggggcagaggcgctccccacatctcagacgatgggcggccgggcagagacgctcctcacttcctagatgggatggcggccaggaagaggcactcctcacttcccagactgggcggccgggcagaggggctcctcacatcccagacgatggacggccaggcagagacgctcctcacttcctagacggggtggcagccgggcagaggctgcaatctcagcactttgggaggccaaggcaggcggctgggaggtggaggttgtagccagccgagatcacgccactgcactccagcctgggcaagattgagcactgagtgagcgagactccgtctgcaatcccggcacctcgggaggccgaggcgggcagatcactcgtgctcaggagctggagaccagcccggccaacacagtaaaaccccgtctccaccaaaaaatacaaaaagcagtcaggcgtggcggcgcgcgcctgcaatcccaggcactcggcaggctgaggcaggagaatcaggcagggaggttgcagt

SEQ ID NO: 20741 - DNA, 777 bp, Artificial sequence
  DNA replication origin
catctaggaagtgaggagcgtctctgcccggccgcccatcgtctgagatgtggggagcgcctctgccccgccgccccgtctgggatgtgaggggcgcctctgtccggccgcgaccccgtctgggaactgaggagcgtctctgcccgaccgccaccccgtctgggaggtcaggagcgtctctgcccggccgccccgtctgggaagtgaggagcccctccgcccggcagccgccccgtctgggaagtgaggagcgtctccgcccagcagccgccccttccaggaggtggggggcagcccccacctggccagccgccccgtctgggagggaggtcgggggcagtccccacccggccagccgccctgtctgggaggtggggggcgcctctgcccggctgccccatctgggaagtgaggagcccctctgcccggctgccaccccgtctgggaggagtacccaacagctcattgagaacgggccatgatgacgatggcggttttgtcgaacagaaaagggggaaatgtggggaaaagaaagagagatcagattgttactgtgtctgtgcagaaagaagtagacataggagactccattttgttctgtactaagaaaaattcttctgccttgggatgctgttaatctataaccttacccccaaccccctgctctctgaaacatgtgctgtgtccactcagggttaaatggattaagggtggtgcaagatgtgctttcttaaacagatgcttgaaggcagcatgctcgttaagagtcatcaccac

SEQ ID NO: 20742 - DNA, 958 bp, Artificial sequence
  DNA replication origin
cggcttggctagggcgaggggtagtgggaggccggtcggcctccggctactggggcctacgggcgacgcagggtgcggggcccacggcgattggggcccattcctgacgccccggccgggagcggagaaggaagactggcgggagtggtggcgacggcggggcctgcggcttgatctcctcaggtcgccgcgatgccggcagtcgtcactgaggcagctgccaccagccgccccagcctcgggcccctcctccgcgctcgtcggcctcggccaccgcctccgcagcgccaccgcccgcccggcagcgctgcgcgcccagcccgggcggctccgctccgctccggccgcggcgcctccgtgaagcccctccccggggtccgcccgccagtccgcagccgcgcccttgttgcccggagcccgcctgccagcccgtgcggccccaacccggagtcccgcaagccaagcctcccgcgaaagaagcatccgtcagcccggctctgctgttctgaacctcactccatgccccctccgccagaaatacacatttttaaaaaagatcccaatacccgaagaaaggatgaagatgcggaagcaggattttacaggcctttcgagatcccggaaccgtaattaaggatctgtttctcggcatttggtcgttaaaggtcccaaaataagtaaaggggaaatgctcaaatgaacgacctcaatctaaactaggttctacccgctcccctatcccaaagagtgaagagaattgtaaagccaggttcaaggacgggggaagggtcctcttggaaattttaagagcatctctactgtccaaaaccccataattgtgaagttcgcccacctccacattggtaattctccgttaaattagtcggtttaactcccaaagactagtttctttcctcctggagattaggaaatcaacagaatggcctgtttcagctta

SEQ ID NO: 20743 - DNA, 1402 bp, Artificial sequence
  DNA replication origin
gccggcgcgattggggcggcgagggtgggacgggcgccgcccggggccccctcccccgggccggctcctgcagaactagggggcgaggctgccgggaacgggggtggcggccgcggggcgcgctcgggtccctccctcccgccgccgctgcagcctcggcgccccgctgtcctggctcctcgctcctcgctcctcgctgggcttcgggttccagccccggctccggctcgggttcccgggccgcgagtgctaccgcagctcagagcggcgcctcattgacaaagaaagcacgtagcctccggaacgggcgaggaggcgaggaggcgaggccggcgcgcgcgcgcagccccgcgcggagccaccgcgcgctccccgctcccgcgcgcccggccgggctcgagacccaggagggggacccctcccggcggctcccgcgcagcggaggtccttaaggggagggcttccctcccctcctgtcccccatctagagaagggaaggttggcgggagagaggtcgtctggccggggaggggggtcatggtcaacgtgcccaagcggcaggaaagctcttccgcctggattttggaaaagctctttgtagaagggcgggcgcgctttgtgctgtttgttcactacttctccgagggttcaacggacagctgcatgccagtttacccctgaggagctcaagcggctgtgggctagttgcaataacacgctggattaaaacacattataaatatttgttgcagccacactacgtgcaaagcattacactgcgcactgggaagactgggggaagtttttccaaaaaagtctacacccccaaacaggagagtcaggcagctcctgctcagagggacaaaaggcccaggcgtcacctgagttggtcccctgctcttcgcccttgctagccttgatggccttagcaagtgacctggctcataggcgcctcatccatccccagtcactgagtatctattacgggcccgctgtttgccagcatctgtgttaggcactgaggatacaagcagcggggaaacacacacatccttgacccggtaaagctcagacgctattcactcaacaatccttactgactgcctgcgatgtgccaatgacaacagccataaacaaaatccctgccctcctggagctgacattctagtgggggttcacccgcaataaacaaataagtaatagaatattagactggtaaatgccgtaaagaaaaatcagtgtaaaagaatgaaacgtggggagggggtgttgcaaatgttaaacattgtgaagaaaggcctcgctgagaaggtgacgtttgagccaagatctgaaggaggtgagaacaagccatgcgcgaagagcattccagatacagggaaccaaaaaggctaacatcccg

SEQ ID NO: 20744 - DNA, 1250 bp, Artificial sequence
  DNA replication origin
aatgtaaaatcgcttttcaaattgaagaagaaataattggccagatcttacctaatgagttatcaaaggatagcctcagggcaagttcaggccttttggatgtacagtttccctacatgttgaaatgttttattagtcaaaggaaaaagactcagattatataacattcaccccacctacatcaccccaaatatgacttattacagaaaagagtctgttcaagcatttcccaaaaatatgttgggaaaaataggtcctataggtggagggagagagggagggagggagagagggagggagggagggaaggatgaaaggaagggagggagggagagagggagggaaagaagggaggtaggtggggaaatactgcaaaaatattctcttcttagagattcataatgaacattatcataacaaacttaaaatcctggtggagggagggaggagagagggagggagggaagggaggaacggaggagagagggaagggaggaaggaaggaaggaaggaaggaaggaaggaaggaagggagggcagagcagagctgccacatgatctgatgggtttgaacaggatctctctggttgctgtttcatacagaagagatggtgaggggtaggagaagaagcaggaagagggagaccaattagtaggctacttcaggattccactcacaaatcagtgatttgggtccagatgactgcagtggaggctgtgagcagggatccaagtccagatatatgaaggcagagccgggtggagtaggggaaagagagagatcaaagacaacaccaagattcctggcctgaacaatggaaggagggggacgttcagggtagaagagatacaaaggaaagaggtctaggctgaaccctgaggaaggttaatgtttagaggtcatgaagatgaagagggatccacaaaggagactgagaagaaccatgaaatcatggcagctggaaagcagctccacggagaacaagtgatccttccttaaatgctgccgtgagggcaatacattgaggaccgaaaatggaccactggatttgacagattgggaggtcactggtgacctcgataagagcaaccctggaatagtaaggaggaaagactgattggagtgggttcaagagggaatgggaaactcaagaacaaaaagacaagcaacccgatttttaaatgggcagaaatgtgaatagacatttctctgaagatatacaaatggtcaattcgccacttgggaaatg

SEQ ID NO: 20745 - DNA, 932 bp, Artificial sequence
  DNA replication origin
gtgtcttctacccactcctgtgcatgttccccctggttctaagtcctcttgtctttgccttctagtttcctgcctcatgtatttggaatctggctctctcctggctgctctgtgacaggaatccattggaagctattgcacgaaactgttgccaggttccaagttcccagtgccacgatgctggctgtgaggaaaacctaaggaccccgtcttttggggtccctgccctctggccaggaaggagataaaagactcaggactgaaggcagtcagattgcaggtctctgaggctgaaggaggctgtgtgtgaccagaagagagcactctctgagctcagaagtttggttgtaacatggaaggaaggagggaacgaaggaaggaagggagggagggagggggaggggaggggaggggaagggggggaggggaggagaaagggggggaggggaggggaggggaatgggagggggaggggaccacagtctgtttgaagtttcagtgctgagtgtccctcgggagggaatgagggaagtgggtcagtgccatactctctagcattcccagtggagagggagctctgacgagccccagtgcatgctggtctcttctgtgcatgtgcatttacccaggaggagggatctggtgaagataaacctccagggtggcactacaggggtaacaggctgcaggggacagcctgtggttggagggactggtaaaggggtcccaaagaatttgggatgctcagcagtaatcgtagtcatttttcctccatagttcttcgaatctagggccctttccctgtcccagggaagaaggaggcacaaaagactgaggagggcacaagagccaattcttttttttttttttcttttttgagacagagtcttgctcttttgcacaggctggagtgcaatggcgtgatctcggct

SEQ ID NO: 20746 - DNA, 950 bp, Artificial sequence
  DNA replication origin
tttccatggccacacggacctaagcatttaggttatttcatacttcccttctctgtgtggcaggggaagccaacttaagccgttatatacgatagttggaatgatctttttagaactatctgcccttctccagtggtcaaggacaagccttagccaaaacaagtgatgggaaagacaaagtctgcaggacaacctaccgctactgaaagttctactttgcaataggtccttcttggagtacaaggcatttaacaactttaccctccaacagggaggagtcattcagctcgtaggctgagggatcctgcccgcatcagcacacgtggtccagagccctaagacttcagacgtaagaccagatatcagcccaggatcctggtgagagaactaccggcgccaaggccacagagtcccaggggggctgccccccagcattgagaagtggagtgtcccaaagctgccctggaaacggccttgggccttgtggttcttgcacaactcccacctccccctacagacaactgacagtcaccttacttcaccttccccccatggagagccccggtttaggaccgaacattaaagcttagggactgtctgtggtgggtggagctccagagtacagggtaggaggatgactgtgcaggaggattaaagttcaggacggggtggtggcggatggagttccaggtgtggaggctcagagtccagatgacccaaagggtttaggacggagggaggatggagtttgggactaagaggctcatgaagttcagatctgtggtggggggaggagtcggttaagtccaggataagggagtctgggtgctaggggatagattttggatctgggactactgggggctggagtcaaaccaggctacatttcgggtcggggcacggagccaaggagggagctagggcaggctaaggctgggctcggtggccct

SEQ ID NO: 20747 - DNA, 1022 bp, Artificial sequence
  DNA replication origin
ggcaaactactagcctcccccgcttcccctctgcgttcctgcctctttctagaaggaggctgagagggggaagcctgaacccccaaatcaagtccgccttctttctctgtgcctgacccagggcaaaataatctctctgatcctgttcttgaccattgaaaaagcactttctctggtcgggatactactggcactttacatggggggcagtttaaccgcaggagtccgctttctgaaaggtgcagagggaggggattccgccaccagccgactgagaggagccccggccccgcgtggtccctcccagccaccctccctctgggattagctgccctggctctgctctaggcgtccccagcccgtgcagtcccggctggcgcaccaccatcgcctctgcagagcgcggccgcagcccggagcccgcagcccggagcccgcagcctggggcccgcagcccgtagcccgcagcccgcagagccgcgctgtccggggcatcccagtgcacggcgtccgtggacctgggacctcgaacctgggacgggcggaaaatccactgggaacacttgcatttctgtaggtgcttatttcacattcttgtcttttcttgcttgctcgagctgttcgtgggttactttctgccttagttaaaccaaaagggaaaggcggaagaggggaagccctgaagaatgatttagtggttgcccagcctcctttccaaggagaggtgttcgctgagcggctctccccgtccccgacactggcccctttaagaagccaagtcagtcctgatgctgctgtttgtattgctaatccccaggagccccgtttaaaaaaaaaaaaaaaaaaaggaagaaaaaaggggaggtggggggaccgggcagctgtctctttaaatgtgatttccttctattgtatttgaatcgtgatcaggaaaaaggaaatgaaaccagagacagagggaagctgagcgaaaatagaccttcccgagagaggaggaagcccggagagagacgcacggtccc

SEQ ID NO: 20748 - DNA, 1137 bp, Artificial sequence
  DNA replication origin
gacacagcacatgtttcagagcgcacagggttgggggtaaggtcacagatcaacaggatcccaaggcagaataatttttcttagtacagaacaaaatgaaaagtctcccatgtctacttctttctacacagacacggcaaccatccgatttctcaatcttttccccacctttcccccctttccactccacaaaaccgccattgtcatcatggcccgttcgcaatgagctgttgggtacacctcccagacggggtggtggccaggcagaggggctcctcacttcccagtaggggcggccgggcagaggcacccctcacctcccggacggggcggctggcccgggccggggggctgaccccccccacctccctcccggacggggtggctggcctggcgggggctgacccccacctccctcccggacggggtggctgccgggcggagacgctcctcacttcccagacagggtggctgctgggcggaggggctcctcacttctcagacggggtggttgccaggcggagggtctcctcacttctcagacggggcggctgggcagagacgctcctcacctcccagatggggtcgcggccgggcagaggcgctccccacatctcagacgatgggcggccgggcagagacgctcctcacttcctagatgggatggccaggaagtgaggactgggcagccaggcagagaggctcctcacgtcccagacaatgggcagccaggcagagacactcctcacttcccagacggggtggcggccgggcagaggctgcactcttggcactttgggaggccaaggcaggcggctgggaggtggaggttgtagcgagccgagatcaagccactgcactccagcctgggcaccattgagcactgagtgaaccagactccgtctgcaatcccggcacctcgggaggccgaggttggcggatcacttgcggttaggagctggagaccagcccggccaacacagcgaaaccccgtctccaccaaaaaaatacgaaaaccagtcaggcgtggcagcgcgcgcctgcaattgcaggcacacggcaggctgaggcaggagaatcaggcagggaggttgcagtgagccgagatggcagcagtacagtccagctttggctcgg

SEQ ID NO: 20749 - DNA, 883 bp, Artificial sequence
  DNA replication origin
ctaggaagtgaggagcgtctctgcccggccgcccatcgtctgagatgtggggagcgcctctgcccggccgcgaccccatctgggaggtgaggagcgtctctgcccagccgccccgtctgagaagtgaggagaccctccgcctggcaaccaccccgtctgagaagtgaggagcccctccgcccagcagccaccctgtctgggaagtgaggagcgtctccgcccggcagccaccccgtccgggagggaggtgggggtcagcccccgccaggccagccaccccgtccgggagggaggtggggggggtcagccccccggcccgggccagccgccccgtccgggaggtgaggggtgcctctgcccggccgcccctactgggaagtgaggagcccctctgcctggccaccaccccgtctgggaggtgtacccaacagctcattgcgaacgggccatgatgacaatggcggttttgtggagtggaaaggggggaaaggtggggaaaagattgagaaatcggatggttgccgtgtctgtgtagaaagaagtagacatgggagacttttcattttgttctgtactaagaaaaattattctgccttgggatcctgttgatctgtgaccttacccccaaccctgtgcgctctgaaacatgtgctgtgtccactcagggttaaatggattaagggtggtgcaagatgtgctttgttaaacagatgcttgaaggcagcatgctcgttaagagtcatcactactccctaatctcaagtacccagggacacaaacactgcggagggccccagggtcctctgcctaggaaaaccagagacctttgttcacttgtttatctgctgaccttccctccactattgtcctaggaccctgccaa

SEQ ID NO: 20750 - DNA, 1296 bp, Artificial sequence
  DNA replication origin
agaggtcggggcttgggggcagagaagggcatgggaaatgaccggggtggggtggggggacttgggggcaagcccctcggaagctccagcgggtccggagataaaggacacccgggcgcagcggccctcttcccctgcagcggctcggtcccgggtggcgctcaccgtgcgcgcgcggaggccgctggaaatcacgagtgggcagctgagggggcaagggtggtggtcccttccgggcagtgtcgcgcgctccgtgggcgcaggccgcttcgccctgtcccgctgcaccgagagccgctcctagtgaggcgagagccgggagcgggagggacttagccagccagcagccctctgggtcgcgaggggcgggagaagcggagagcgggggccttcgcggccgctcgggctgcccggcgcgaacgcctgcccggaagaggccgcccgctagcttctccgccgtcccccggccccggcgctgtggggcgcctcctggacgcaggtggggatggccccggcaaggccgaaggaaaggccccttgagttttgagagcaatcgacgctagggtccttcaggcgaaatcgtttgacgcccaaacggggacaataggtgtcaagcagctggctctggagctggcaactgccccttgaagagcccttatttggggtgggggtgggggttggggggcaaaggtttctgcaagtaaggggtgcgtggggtgggtggtgcgatcccagcttctagaattccttctgtatgcagagcgagcaaactccataccccaaaacgtcttttgaaaaaaagacaactcgccgcttccccaccaaacaatcacccagtaacctaggagttctctgtagaacgtgtcggacacggtcatggttggtggctttttaaatcctaaagctctggcctcacaaagagtcttcagctaccctatgatgttatacatccagtaggcctgagtattacgaattattagacttttgtttcctttttttttaggtttacctaacactgtaaagagaacgttcaatgaaatacaaagaaaaagatgatttttttgctccaagagaattattccagccttggggtggagtgggtgtggacagtgagcagaaaaacaagaaaccaagttctgggaggaaataaaatgaatataatcagtggaaaattcagcaacgcaatattgtgtgacaacagtaaatgaccaatttataatttaaattctatgaaaaagagatttagaagagagttctaccaaacccactgttccctagggaataaaatgagtaacg

SEQ ID NO: 20751 - DNA, 950 bp, Artificial sequence
  DNA replication origin
cagggtcttccggatctctgggatgctggggatgggactgctgccatagcagtgggtgaagatggtagccagttgctggatgacggagtcgttctgtggggagaggagagagggcctgtgagctgcccgctgtggctggctgttcacagatgcagatacgtcaggctaatttcaaaagtccaggccaggagtagtgcagccgctatcttttgttcctgctggatgtggcttggcaagagatgcctgttccttcatcagtgattcccgaaatggcttttttggtcaggttccagcccatggcccctgccctctacagccaggcagcgcaagtctaagtctgggtgctgtgtgtgtgtgtgttgggtgggggggttcctgggtgctgggggcgagcgtgcacgcgcgcgcgtgtgtgtgtgtatgtgtgtgttgagtgggggggggggcctgggtgctgggggcgggcgtgtgtgtgtgttgggtgggggggtccctgggtgctgagggcaggcgtgtgagtgtgtgtgcgttgggtgagggggtccctgtgtctgtccacgtgtctgcctgtgtgtccatctgtgtgtcccgtggtctgagtctgggccgtgggcttgggaactggccactggccacacttactttgctggtcttgaggatgtcgaacatgagctgcaagccctcggtcaccagctcctcgttgtactcctcctctctgatggagctgaagtcccgcaggaggctctgcaccaccgagtaccgcgactgcgagaacgaggtcctcagagactcgatccagatgtgcagcttccaggggactcctggtccaggcagggaagggcaggcagtcacgcaccacagctgagcgctcccggcacagaccacagccttttctgggcagactctctcgggatgcccccgctgtctgcagagcaccccgcccgccccct

SEQ ID NO: 20752 - DNA, 839 bp, Artificial sequence
  DNA replication origin
agggcaggcgtgtgagtgtgtgtgcgttgggtgagggggtccctgtgtctgtccacgtgtctgcctgtgtgtccatctgtgtgtcccgtggtctgagtctgggccgtgggcttgggaactggccactggccacacttactttgctggtcttgaggatgtcgaacatgagctgcaagccctcggtcaccagctcctcgttgtactcctcctctctgatggagctgaagtcccgcaggaggctctgcaccaccgagtaccgcgactgcgagaacgaggtcctcagagactcgatccagatgtgcagcttccaggggactcctggtccaggcagggaagggcaggcagtcacgcaccacagctgagcgctcccggcacagaccacagccttttctgggcagactctctcgggatgcccccgctgtctgcagagcaccccgcccgccccctcccgcctgcccccttcctgggcatggagtggccctctcaggatggccatagaatgaaagctttaattcattctaataggtcttgctggcaggtcagagtggagtttcaggttctcatgagatgaggtggaggaatggcttcggcccaaatgcagggaactcaagctctgaaagttgaccgcccagcctggggatttggaagtatgggcccagcacccaaagtagccttgttgcttagtgggctcaagaattacttgctagagaggtctcattagttgtggaggggtggccaggagggcttggatggccagagaatatgccaggcactcaaggacacacaggcctccttgtctgcacggaagcttgaaacgaacccggtcctatcacgagggg

SEQ ID NO: 20753 - DNA, 1098 bp, Artificial sequence
  DNA replication origin
aatcccattactgcactccagcttgggtgacagaataaaacctcgtctcaaaacaaacaaaaagaatgaattgactgtccttacactctatttgggtctccctgaaaactattcatgcttcaacttttctacactttgttctggcatgactaatatataacaactgggcattaaatgtactatatataaaattccagatcagagaatggaaacacttaaaaataaaaaaattttaaaaaggggttggcttatctgggctatttggaaaccgttcagtggggcagtataatttttattttcagaagcttatggattgcaccccacccaagcttcccgcgcacctaagaaggctggcagaagacgccctgccaagtttccttgcgagtgcagtaaaggagtaatcctctgccctctggttttcctttcaaagaaactagggacaggcggtggccttggctgccttggccatgagcttccctgagccgggtagctggtgggctagtggggccgttggtggcaggtgcagaaatggtaccacactcactgtcccattgcccagaaagaacatttacaagtctggggagagcgctcgtaatggttgctgagtttggaggacagttatgttacagtcttggtggctttttgatgaatggtcagataaagcttcactataaacctatccagttttacacagaaaggacatcttttttacatttaaagttgtgtgtgtgtatatgggggaaagtggtggtgttatagctctggaggaaattaaaccataggaaatagtaaaaacaaggtctctgtgttcccactgttgacaattcacaagttaaatggtggaatgagaagggataaaaaggatttcaggggtgcacctgagtgctgtcgcacacataggggtcagagtctagaatcccagtgctgggaggacttgagaagccatagattccacccccgtggtttacagagaagggaatgaaatccccatcaatttggcctttggcctaagccctgcttctaaaaaccctttagaagtctggcttgtcatcccaaagtgcagtccaccagcttccgtcagcttggaagagacagcgc

SEQ ID NO: 20754 - DNA, 1477 bp, Artificial sequence
  DNA replication origin
tactccggctccatgaacagccgccacaacagctgggacacggtgaacacggtgctgcccgaggaccccgaagtggccgacctcttctcgcgctgtccgcggctccccgagctggaggagttcccctggaccgaaggagacgtggcccgggtgctccgcaaaggcgctggcggccggcggctgccccagttctccgccgaggcggtgaggcgcctggccgggctgctccgcagggcactgatccgcgtggcccgcgaggcgcagcgcctgagcgtgctgcacgccaagtgcacccgctttgaggtgcagagcgccgtgcgcctggtgcacagctgggcgctggccgagagctgcgcgctggcagccgtcaaggcgctgtccctgtacagcatgagcgccggcgacgggctgcgccggggcaagtccgcgcgctgcggcctcaccttctcagtgggtcgctttttccgctggatggtggacacccgaatctccgtgcgcatccacgagtacgcagccatctccctcaccgcctgcatggagaacctggtggaggagatccgggccagggtgatggccagccacagccctgatggcggaggggccggaggcggggaggtgtctgctgaggccctggagatggtcatcaacaacgacgccgagctctggggcgtcttgcagccctatgagcatctcatctgcggcaagaacgccaatggtaagcgcgcgggcctcggactggcagactgggtaggcaagaaatcccgccctgggctactgggggagtgaatttcctgagacaaagctggtggctgtgccagttctttgggagaaaacgtttggtctgaggatagggttcattacatggcacttgccagagattgttctaagggtgtctgacttttggagggtaaacttgtgaatgatctccatcctgttctgcgtggcattgttactatctgcgggctgttcattgattgggtgagattgaatctcttgaccaagccattcctgaacctctcttgaaatgaaacttactgccccgtggctctttaccgtgattgactaggtctctagctgctgtctttccccaacagctggttagattgactgattctgccccctagttttccccagctcaatagcagcaaccaaagggtcccaacttaaagacctgaaccttggataagtaagatgggcggagggaagtgggaagcccaagatctggtgctgcgccttgtgctttgctgggctgaaggatgctgtcaggcgctctcttgggggatggaggggtagtggttcgctcttacctatatgtgcccaggaatgatgaaacctggggaccccgactccccttcccagaaaagtaaccacagattgtctcctgagacctgatttttccaagctgtcaccaaccaagtgagccattggttaaaaccttgcattgtattaaatgttctttcctgaaaagagtggtggc

SEQ ID NO: 20755 - DNA, 1105 bp, Artificial sequence
  DNA replication origin
gcgagcagcgaacgcccaaagcctgggtggcgggaaggtggcagcgccctgtagcttttcctttgcatttttctttaaatcgtgagctccggagctatcgtttcgaccgctgctttccggtctccacctccacctcccagttggctggctcgcccttcccccacccccccatcccccccatccccccccatccccacccccatcccagccgcgtgcccgaccctcggcctccagccccgcctccttcgccgcggggtttaacccgaggcagagtgaaatctgcatagtgaccgccccctcggagatcattggtgcagccccgcccatcgcggccggtgattggtaagccgcccggggttatttgcatgtcggacgcagccgggtacccagctgtgctgccggccggcgcagcgcagaagtttgcagagcgctttctcgccggctggtcccggactcgcgctgcgccctgcgccctgcgccgccgcctcctccttctgccgccgccgccctgttctcccgggattccttctctgtggaggactgactctctgcttgtgggaattagaggtggacaagggggagtgccggggggtagcgacggggttctttccagtggcagctgcgagtcgggacgccgggagcgtggggctcctgctggccacggatctcggccaccttcccgcggcctccgggcaggcaatgcggccgccgagccccgcgacgcagagaggaaggagggtggcccggagggcctagagcttgtttctgcccacttgggaaagagggcatggagttgtgagtgcccctcgctcggcgacgccgccctcggcaggctccccatggccgggacgtacagctcgactctgaagacgctggaggacttgaccttggactccgggtatggggccggggactcgtgccgctcgctcagcctctcgtcctccaagtccaactcgcaggcgctcaactcttcggcgcagcagcaccgcggggcggcctggtggtgctactccggctccatgaacagccgccacaacagctgggacacggtgaacacggtgctgcccgaggaccccgaagtggccgacctcttctcgcgctgtcc

SEQ ID NO: 20756 - DNA, 1644 bp, Artificial sequence
  DNA replication origin
cgcagctgccactggaaagaaccccgtcgctaccccccggcactcccccttgtccacctctaattcccacaagcagagagtcagtcctccacagagaaggaatcccgggagaacagggcggcggcggcagaaggaggaggcggcggcgcagggcgcagggcgcagcgcgagtccgggaccagccggcgagaaagcgctctgcaaacttctgcgctgcgccggccggcagcacagctgggtacccggctgcgtccgacatgcaaataaccccgggcggcttaccaatcaccggccgcgatgggcggggctgcaccaatgatctccgagggggcggtcactatgcagatttcactctgcctcgggttaaaccccgcggcgaaggaggcggggctggaggccgagggtcgggcacgcggctgggatgggggtggggatggggggggatgggggggatgggggggtgggggaagggcgagccagccaactgggaggtggaggtggagaccggaaagcagcggtcgaaacgatagctccggagctcacgatttaaagaaaaatgcaaaggaaaagctacagggcgctgccaccttcccgccacccaggctttgggcgttcgctgctcgctttcgagccctccgcagccaggcgtcctggggttggggccaggagaatggggagggccccatccaggcgctccacctctcctccaccttccgccaggcccctcccgcaatccgagatgaaacgctggctgtgtttggagggaggagggagtccctgcctctctttccaagtccgtctggttcctttgcgctgccgtctaggctccaataaggacagaatttcttaacctggtatctgatcaatggacgggccccaggaagcctgtgagtgcctccgcccatttgtggtttcacctgcagttttctgagtgccactatggggaaggggcaccaacttttgtcagattctcaagaggatccgtgacttccctgttacctctgtgtgacgataccacttgctgtcaggtgggtcctttttgtccgagatagacagtgttcttacaggaagaatgagaagaaggtggcagagcagtccctcgccctgggctgagctcggaacacctagctggatgcaggtgttcgcctcctaacgcgtgccggtgggcgagccgtatgcccccgcgggacccagttcctccggggtacaatgagtggctgacctccaggcagcgccagtgccaacctgcctccgggcgggtgtcccaaacggtccgccagagcgctgttggttcagcagtcccatgcccggtgcaggcatgtcccgccgctgccctgtggctactcacacgcacgtgcgcaaacggacctgtgccccctccagtggaaccgcaggctcaaggcggggattgtgcattcgctctccccaagtcagcctcccccactcctgaatggctcctttgtgttgcattttacacagttctgaccttgggccgtgagttggatatgaactagaaatgtctggtttgtctctttccttcttaaattaatggcctttacccccggtgaaactgctttttatttggcagtttcgcttaattttgcctttccgcgggtctttatttatgcaacatcgccgcccgat

SEQ ID NO: 20757 - DNA, 1967 bp, Artificial sequence
  DNA replication origin
tatttgatggacatacttaaagggcaaatattaaattatggctttaatctctattcttttatatatgtcaagaaagcctcatcaaatcttacctttcatatgcatgaaatattcctttaaagttggcttatcagattactaaaagaacttctgtaccaaagatttttttaaaatgtgctaggctaagacaacattgtgagatatatttaggagtaggaaaaaaggctgaatttccctttttttttttccttcttctcctttcagggatccagtgaactcaatgtcctttagtaaatgtaccaggtagagcagttgaattcatgagaaaatcatcaagtagtcaatattctggttgtctcaaaaggatttctttttaaaaaaagaagacccaaggaaaacactatcaatagaaagcattgaatgctcataaggaatttaggcaataccaggaaagtgtgtttggggtgaggggaagggtgaagagggagaagtggagaaatgggagggtagagggagagagaagtggagagatgggaggggtggagagagagagaagtgtggagatgggatggtggagggagagagaagtggagagatgggagggtggagagagagagaagtggagagatgggagggtggagggggagagatggaagattggagggaaagagaagtggagagatggaagggtggagggggagagatggaaggttggagggaaacagaagtggagagatggaaggggtggagagagaagtgtggagatgggagggtggaaggagagagaagtaaggagatagggtggagagagagagaagtggagagatgaaagggtggagggaaacaggggtggagggagacagaagtggagagatggaaggggtggagagagagagaagtgtggagatgggagggtggagggagagagaagtggagagatgggaggggtcgagggagagagaagtaaggagatgaaacggtggagggagagagaagtggagagatggggggttggagggagagagaaggagatgggggtggaggaaaagagaagtggggaaataggaaggtagagggagagagaagtgaggagatgggagagaagggaaaaggaagttactttcactttttctctcaatccagtggggaagatgttgatatcagtcctatgtcatggatgaggaaattgaagttcacatttgtcgcttgctgaaggtcacgtgaccagaaatgcaaagcccgatctgactcatattctcctaattataaatgttacgtgctttctattactcaggcattgctactctttcggttgtgccaggaatggcataaccaatattgtgtttgattctcacagcaaccccagaaaatgaatgttactctaaatctcaaaattaagaaactgcctcaaagaggttaggtcattttgcatagggccccacagtaaaaacagcatttagcaaataagtgggggcaaagctctgccctttttgttacttcagtgtttccaaaacacactctggggatttgaggtgaagaaatgccacaatatcctaatccctttgaacaaggtgatctttacataaagtttgatgtgaagtgtcctgaaaacaactggaacaacccagacaaacgttctcaactagaagatccgctgccatctagatcagaagtttcaaacacaattggagaaaaagtggcggtagagcttcaggaatgtgataacacttgaggctgaggaggtggtcagaggcatgaagcctaaatcatagctctgatgaagaaaacagcagccctcatgttcctggaggtgtgtgcctgcccatccgcaaacactgcaaatgaattgcacaggaggactttccttccacacttgcctgatttgttctcagcgatcccactggagtgtcccatcaatccagatgaactgatggacatccattggtctctgcgtaacttttaaaatt

SEQ ID NO: 20758 - DNA, 1184 bp, Artificial sequence
  DNA replication origin
agcgaacggccaggcccgaaaccccgccccgcagctaaacgcccggcccgctaccctgcgcccagctccagccgccgggtcccgcctgggcctctcctcctgggaataccgggcaccggtggccccgcccctacctgcgcgccgcatctccgggaacaacagtctccctcccgagcatcacagccagacatggcccagaccagggacccgcgcggcctccaatctccgcacggctttgcgcgcggcgcttagcctgggatacggcagcgaggccgcaaatgcaatcaggcggcgctgagggcagcccgggggcggggcgaacggggcgggggccggggtctggtaaggccccgccggctgagatatccagcggcgcacctgacttcccgggaggcaaggccaacgtggttggaggcggggctgggttggggggcgggggttcaagtctgagagacctaaaggcaccgctagcgtctgggggcgtggccaaccatgcgggaggcggggccttgatgctggacatcaggctgtgctgcgggcagccagtgagaaggccgtcaagatggcggcctcctggaggctgggctgtgatccgcggctgctgcgttatcttgtgggcttccccggccgccgaagcgtagggctggtgaagggggctcttgggtggtctgtaagccgcggagctaattggagatggtttcacagcacgcagtggcttcggggtgagtggccggggctcgctcagcttctctgtgtagctgagtgatgggcctgggacaggggcagttatgattgagggcctgcttttgggtgtgaaggtgcgcgggctccttattccctttcctctttctccggttggggtccgccgacttggcctaatgcatgctgtgaagggctttcttggcagctgagagaactcgactctgccctaggccccctggtttgtatggctttgtgaccttgccttggaatttgggttatttgtgaggcgcagagagggttcccaaactctcctccctcagccccctttccaatcaaggctcaggtttctttagggttgtcaaacgtctcggacgagaaaaagctgcccaaggttgccgagattgaaaagccactgttgggagttcttacttattctctaggcctctctctgttaggaggtgttttcattgaggccagtcgag

SEQ ID NO: 20759 - DNA, 1651 bp, Artificial sequence
  DNA replication origin
ggagttgcccgaggcggcggcgcgggtgatgtcagctctcgacgaaaatagagagggatcgcctgcaaatccccagctccggcggggctaaaccttgcaatccctccctggccggcgccgagccagagcgcagcggcctccaccgcctccccaggcgcgcacacacccgcacacgcgcacgcacgctcaccgtcctctgccaccactctctgctcccgccactcgccgcgcccgcgagccccgcagcaaagcacaggtggcagcggctgcaggggcgcatcgccggcgtgcgccctcctgcagccctgggcgcatcgctctctcggggaagccaccctcggagcccccggagctccccgccaagcgccatccccgcgggcggaggggagcgcgggtcgcgcgccgtggagagccgggacgcggattagcgcccgcaggagcctcctgcgcccgttgaggcgctaaagggcttaccccggaggcgggtggaagggcgggcagaggctcctcttaaataccgctcccggccgcacttcgcgctcaccccggcgtccgctttctccctcgcccacagctgccggatagtgctgaagaggagggggcgttccccagaccatggcatctacggaagggtgaggggatttttatctgtacccgcgggaaagcggggtcacgcgcggggtggtggcgcccctatccgggatgcggatagagaggcggcggcggcgggcctcggaggtggtggcggagccgtagcttggctggggatgggatggtggggaggggattgattttctttcctggagattgctgcttaatcctttgaaaatgcgagaggtggagggttgttttattttgataaaaagggtaaggtgcgctgggggcctgagagtgtgaggaagaaatcctcttgaggttacttttgggatttcaaaacaataggggattgggcatagtgtgagcagacaccggggtagcagcgcctggagcgcggcgccccaggcccgaggcgggcttgcaggtggtgccggctcggaaggaatgagccaagacagggccctggggcggggcaaggaccagcgcgcgcggccttgaacgccaggtttgcagagtcgccatggagatgctgggcccgctccgatcggtccttgtccctggaaggcggaatctccctggctagctctaaggaagggtggaagagatttgggtgcttcccgggaggcgggaaaacgtgtggtttgggacaagggcaggagtcgccagactccagcgggcagggatagcattggcttccctattcagcccgaggatctggagtcgtgtcctgcctcccaagattccagctggcatggggaaagctccctcgcagtgataactaaagacaattgtctttagcaagagacagaaggggctgcagggggcaaaaggattctttgaatactcacacatcaaaggaaaggtccacagagtccttggaccagtatctcccagaaaactttttgggcttcgtagaacctgagtggcaatgaaaagactgggcagctcagccctttggttaattcccaaaattgcagttactcacttgcaagcgatcacaaaatccatgttatgtgaaaagcaaatatcaggggcttctctgggctcaagtggt

SEQ ID NO: 20760 - DNA, 1176 bp, Artificial sequence
  DNA replication origin
gagagtttgcacgtggccggtcgcgttccatcgtctaacaaggtccagcacagcgcaaatccgaagatcgtctaccccggggaaaaagagagtctgtttaattctcctgtggccctccaagtgagttcttttgggttccattgcctagacgaggaaagtgaggctttgcctgctctgcgctcacagggtcggcaagtagtgggaccctaggttcctgcagtattccagagataatcaaagctgcacaggtctcgtcatttttatgcaaaggcgtccggaaggctcgaactctcccttgcacaagcccatctgtctctgtgcgccgcccccgggacacggaagcaggcggcgagcagcgccgagtgggtggagaaccgtcccccgccactcacccctcggccaactctccgcgccttctcagccggcacccacgaggccgacctctctcggcctaaaaaaaaaaaaaaaaaatcccggcctcccctgcaccccgcccgccgcccccagggagctgcattaatattaatctcgctgaataattgaaggccagagatttattcgagcttcggcgggggagggagcgcagctgggccgcgtttaggctgcaccacccgcgtgtttcagccgctcgactccgctggacctgggacccccagacgtgggaggatggggtgggtgtgcctgcctgtgagtttgggggtgagtgtgagctgaagcgggtgctccggggagtgaggagggagcgccaggggctgctccagggaggcggagacggaggggcatcccgggtctccgcgcggtcgcctgcgcttcaccccgcacggggtgacctggggccacgcgggcttcaggggaaacaatagctactccttagatcctgggctcctgccaccggctgcccaagccttcccggacgagcggcggggcctcttttcttatttggctaatttatggcgagaggctggggggagggatggcagaggagggaccgcgactggagatgggggcggggggcggcggttaaaggagttgcccgaggcggcggcgcgggtgatgtcagctctcgacgaaaatagagagggatcgcctgcaaatccccagctccggcggggctaaaccttgcaatccctccctggccggcgccgagccagagcgcagcggcctccaccgcctccc

SEQ ID NO: 20761 - DNA, 1119 bp, Artificial sequence
  DNA replication origin
gtagctattgtttcccctgaagcccgcgtggccccaggtcaccccgtgcggggtgaagcgcaggcgaccgcgcggagacccgggatgcccctccgtctccgcctccctggagcagcccctggcgctccctcctcactccccggagcacccgcttcagctcacactcacccccaaactcacaggcaggcacacccaccccatcctcccacgtctgggggtcccaggtccagcggagtcgagcggctgaaacacgcgggtggtgcagcctaaacgcggcccagctgcgctccctcccccgccgaagctcgaataaatctctggccttcaattattcagcgagattaatattaatgcagctccctgggggcggcgggcggggtgcaggggaggccgggattttttttttttttttttaggccgagagaggtcggcctcgtgggtgccggctgagaaggcgcggagagttggccgaggggtgagtggcgggggacggttctccacccactcggcgctgctcgccgcctgcttccgtgtcccgggggcggcgcacagagacagatgggcttgtgcaagggagagttcgagccttccggacgcctttgcataaaaatgacgagacctgtgcagctttgattatctctggaatactgcaggaacctagggtcccactacttgccgaccctgtgagcgcagagcaggcaaagcctcactttcctcgtctaggcaatggaacccaaaagaactcacttggagggccacaggagaattaaacagactctctttttccccggggtagacgatcttcggatttgcgctgtgctggaccttgttagacgatggaacgcgaccggccacgtgcaaactctctgagtaggtcccggggatggtgccagaggagccggagtcccagcaggaccgattggtagttaaatgccaggcgctgatatccgaaggcttgagttcttcaccaccttctagctgagtaacctggggcaaattcctccatctctctcttcatcccacctgtaaaatgggactatcttctcccacttctctgtgctaagagaactaaatgaaatggagaggatatgtaaaactcctaaagtggcgtctggcacc

SEQ ID NO: 20762 - DNA, 959 bp, Artificial sequence
  DNA replication origin
gcggtggcggcggcgccccgcatcctcctgcccatgctcccgcggctgtgccggtgcgccgccgccgcttcaagccgagcccaggcacccgggtcccggcggcgaggcgggcccggcagtttgtgggctccggggcttcgggcgcttcggccccatcgcggccgcggggcgctgcggggctctgtccggcgctccgcccggcgctgggaactcgagtccccgccgcttcccagctgcttttgtatttcgctgtgagaccctccggtgggcgcgattcacaggcgcccggaccacgtgggagccagggggatccccctccccctcctccgcctccgctccccgccccccgctcccccgcccccttcctctcctcttccacttaaagcggcgatggctccttccgagagggagaggcggccccacactcggtccgggacttgggggcctggaggaagccggactggctgcgcccgcgccggggcgtaggagggggtggcgcagagccggagtctggggcctggcgggagggacgcgccctgggccctcgcgggggtgtcttggtcgccgggtccctttgcctaggcagcgcgggtctcctgcaaacttcagacagatttccacctctttccgagctccgccaggctaggatcaggcagggtccctttgctttctcagtttctgtctgggtgattcacgctgctttatgtaaatctctgggaatgtctccgagccacagaggatgtgattccagcggaaagaggaacccgctgtagccaacaactttgaaccgacactcccttttccgagctcgcacatcagcaccaatcagtattggccgctctgcctttcccaacggactcccagggaatgaagcctcgctgtgcacgtgccccttgaacacctaggccatctcccattcattcatgcatccattcaacacagcgactgcccctcagttc

SEQ ID NO: 20763 - DNA, 1276 bp, Artificial sequence
  DNA replication origin
gcgtggtgagcctgacacgctggctgcccaacctcacggacgtggtggtgcccgcgccctggcgctcggaggacggccgtctgcgccccctccgggatgccgggggtgagctggccaacctcagccaggcggagctggtggacctagtacaatggaccgacttaatccttttcgactacctgacggccaacttcgaccggctcgtaagcaacctcttcagcctgcagtgggacccgcgcgtcatgcagcgtgccaccagcaacctgcaccgcggtccgggcggggcgctggtctttctggacaatgaggcgggcttggtgcacggctaccgggtagcaggcatgtgggacaagtataacgagccgctgttgcagtcagtgtgcgtgttccgcgagcggaccgcgcggcgcgtcctggagctgcaccgcggacaggacgccgcggcccggctgctgcgcctctaccggcgccacgagcctcgcttccccgagctggccgcccttgcagacccccacgctcagctgctacagcgccgcctcgacttcctcgccaagcacattttgcactgtaaggccaagtacggccgccggtctgggacttagtgtcaccgggaggaaaagagagagatctggggctggggtatggatgatggggggaagggcggtcgcctctgccactgtcagggaccagccggccaacgcccacccgcaaaggtgtctaaaaacttcagcttttcacccacctgcccctttctttcaatcccacgctgtttcctttcaaagttctgggaggacgaactcaccgaggcgagaagtgtaacattctctccacccagcttataaaaggattctttactgtgccagcacggggattggatccgaagaaactggctactggggtttggcccccgagtggccgtccctgtgggagatgcaccccattcttgggccccccctcattccctttccgaaaaaggaaaacttgcgtttgagccgttgagctaattctgcaattttctaccaaacagagcgctggtggccccggagcagggctgtgacattggctggtggagcccccttcctgtgttctccctttgttccagcgccgcgatggtgagatcactgttccaagcagggggacggctcgcgataggacaaagagagcaggacctccagactctggggagccctgcagaccttgacaatttgcctgactcattcctgacctcttgtcattttggcctgaaggctacaaattcagggtcagctgtatgcac

SEQ ID NO: 20764 - DNA, 887 bp, Artificial sequence
  DNA replication origin
gccatgtgggtgctgtgacgcggccaaggcctcggggccccggggctcgccgccttccttccgcgcggcctcacttcctcctcccgccccgggtcccttcctagggagtcgcctcccgcctggaccgcgccgcgtctcgaagcgggacctggggccgcggcagcccctgcccgggcgcagcagcaaagaccctttccgccggctcggcctgctccgctctgtccctgcgcttcctctgccgcgcaaggcacttccggcgcggccacccggcgcccccgtcggcccccgcgtcgcgccgcccgctcagcctcccgctaccagggagagatcgcggcagccgccggcccccgcgccgccccggttccactttccctttccccgtcaggaggcctccttttacttcctgagtcatttaaagtggcaatgacccttttctgcttttcccgcggggctcagctcctccgctccaaatctcagcgtgccttggaggaggaggagggagaaggaggatggaggaagtctcttactctctccagaagcaggaattgggctccacctcccccattccctccctggaagtgtcaacttgagttttcacggccactaggctggtgtccctgtgcatttcagtctctcttgtgccaatttgtcgccgcccgtcacagtccccagtgttctgcaaggtgcccggacagtgttgtttaccagactgaacctgacctcttgggatttcctgagtgcggaagggctatgtttgttctaggctaggggaattggagttaggatgagcaaacaaatattttcgatccaaagcaatactgtgctttgtctatttgcattgctacctcctaggatctcagaatttctggggtggtaacctctgtgcg

SEQ ID NO: 20765 - DNA, 929 bp, Artificial sequence
  DNA replication origin
tggccgcgccggaagtgccttgcgcggcagaggaagcgcagggacagagcggagcaggccgagccggcggaaagggtctttgctgctgcgcccgggcaggggctgccgcggccccaggtcccgcttcgagacgcggcgcggtccaggcgggaggcgactccctaggaagggacccggggcgggaggaggaagtgaggccgcgcggaaggaaggcggcgagccccggggccccgaggccttggccgcgtcacagcacccacatggcctctggagtgggcgcggccttcgaggaactgcctcacgacggcacgtgtgacgagtgcgagcccgacgaggctccgggggccgaggaagtgtgccgagaatgcggcttctgctactgccgccgccatgccgaggcgcacaggcagaagttcctcagtcaccatctggccgaatacgtccacggctcccaggcctggaccccgccagctgacggagagggggcggggaaggaagaagcggaggtcaaggtggagcaggagagggagatagaaagcgaggcaggggaagagagtgagtcggaggaagagagcgagtcagaggaagagagcgagacagaggaagagagtgaggatgagagcgatgaggagagtgaagaagacagcgaggaagaaatggaggatgagcaagaaagcgaggccgaagaagacaaccaagaagaaggggaatccgaggcggagggagaaactgaggcagaaagtgaatttgacccagaaatagaaatggaagcagagagagtggccaagaggaagtgtccggaccatgggcttgatttgagtacctattgccaggaagataggcagctcatctgtgtcctgtgtccagtcattggggctcaccagggccaccaactctccaccctagacgaagcctttgaagaattaaga

SEQ ID NO: 20766 - DNA, 1324 bp, Artificial sequence
  DNA replication origin
aaacctaacccattttccataaatccatttactgacatctagaaaccccactgagaaatctttttctggtctccttttgaagagttatttaattcccaggaagcctggcccagtggcaagatatttccaagaaaagggaggggaatctaattctctatttggtttaattttgttctggaacacttatgaaggctcaaatccaaggggagaaaaaatacactcctacttcaggctgcacagcaaggacagaaagagaaagcaaaaaattccctgtaaaaagaggtaggcacaacctcactaatatttgcaccactttacaaacttaatttgcctgaatttggagggaaacaggacttccaagaccaagggcaggtggagaagatggaacaaaatgaatgtttccatcttgtaaaggtttgaaagggagtgtactttaacagtggaagaggaatggatggatggagggatggaggtagggatggatggatgggtgggtgggtgggtaggtggatgaatggatatgtgggtggaaagattagtggggtggatgtatggctgtgtgcgtgtatgggtagatcaataggatggatggagggaggatggatggatgaatggatggatatgtgggtggaaagattagtggggtggatgtatggctgtgtgtatgggtagataggatggatggatggatagatggatgggtgggtggacgggtgggtgggtgagtgagtgaactgatatgtgggtggagagattagtgggatggatgtatggctatgtgtgtgtatgggtagatagataggatggatggatggatggatagataggtgagtggatagattagtgggtggatgtatgtttatgtgtgtggatgggtggatggaaggagtgtgcatggataaatggacaaatggatggatgtgtatacgggtgggtgaatggatggctggatgggcgggtaggtgatgaatgggaaggtaggagaactaggtggctagctaaatcctgcttatgcttgaattttgtttggcctgcatgatgttttggaaacatttgaatcagttgctttcatttaaagcagagaaaattttacctaaaacctttgatttctgccttctcttgaaaaatcaagggagctggcaaaagtgagaccacatttcttcatggcaacaattaactagagctgagtaatgactgtccctttaaacagggcacacatgcttcagtcccccagagtccctgctgatgcacattggctctaacacctgtcaacttcactctgccaaagtatctgcctgcccaggaggcattcataaatgcaata

SEQ ID NO: 20767 - DNA, 1846 bp, Artificial sequence
  DNA replication origin
gaccgaaaggctgaaccctccgccgcgctcggcggcccctcggagtcaggacacccagggtaacatgcgggtggccacgcgcagcccaggcgcttgcaaaacttagcggagccgggccggggccgggcccggggaaggcgggagggaggagggccaggcgggagggcggggacggcgcggcgaggggcggggtcagcgccgaggccgcgggggcagcaacgacgccgggcagcgggagcggcggccgcgccatgtggctgctggggccgctgtgcctgctgctgagcagcgccgcgggtgagtcggggggcggccggcgaacttcccgcggggcgcggggcgcggggcgcggggcgcagcggccgggtgcgatcgcgtcctctcccgggcgcgggccgctctccgggcgtgggtgagcgcggagggcggaccccggcgccgggctggcccggaccctgccgaggggccgccgcggggtgcgagccgtcctattgtgtgggcgtgcgcgccgggtcgtgttgtgctgtgtgcgcgggcggggctctgtgtgcagtccgggtctggggagcccggcggctgccccgattgggcgtagctcgagtgtggctgtgtgtgtgttgtgtgtgttgaggaacggaggcggggaaaggaaaggagaggagaggagagaactcttccctggtctcatcttcccagacgcctggtcgcgcgcggctgcgttagcctcctctgggcctcttcccgagtctctggcgtgcactccgtgcctcagtttccccacctgcaccgcggagggagtagcaaagctgcttcctttcattcctctctgggactgtttggtttgggtaaagtgagttgaagcaaggccggatctgggaattcatttttccccactgatcctgggaaccgaagctttatttaagacgtctgaccaccctacttgccccgcgatgggcgccctgaccggcgaggggccctgggagaggacacggggcttcatccggcggccctttgaacctggcatcaccaccgcgtgtgcatcccggggcctggaccgcagcaagcctctttcccttccagacagcgtgctgttcccaggaacttttctgctgatgtgggcatgatccgaattccagcctgggagcccttcctcctctgcccctgcccgccgcccacagctgtcagctgtccctcctggactgggcccgcccttggccccttgacgtttatttctgggcatctgatgcctagaatgtgggtgacagggcccagtgaactttcttcagcagaatcttgcctgcctggtgtttgtgccatccacatgtccaatagctgccctattttgccaagtgcttctagcagcttggctgtcgaggtgtctttggtggcctgtgggtttgctaagttgaggctcacttcattcttagctgtgccttggagttatgaatgcgttaaagggatatctcctctcttccttgatgtccctggtcctgggcatcctcacagcccactgggcagcctttcctgctctcagacccatgacatcatctccactcctctgataccccatttagatgcttatgggtttgctgggcttccagggagggactagacctcctggtgactgctgtggatttttaaccaggtctgggtgagagtgcccttaaattagtccacctggggagagagttctcacaggacattgggcagccaggagcaggtgtgaattgtttggaggctgttagagcaggtcgattttcagggcgtctacagatatgaagacctgtttggattcacaaattcaatctgtgtagctgtggtgtgtcccctcatagcacctgagaag

SEQ ID NO: 20768 - DNA, 1309 bp, Artificial sequence
  DNA replication origin
aggctgcaatctcggcactttggggggccaaggcaggcagctgggaggtggaggttgtagcgagccgagatcacgccactgcactccagcctgggcaccattgagcactgagtgaacgcaactctgtctgccatcccggcacctcgggaggccgaggctggcggatcactcgcggttaggagctggagaccagcccagccaacacagcgaaaccccgtctccaccaaaaaaatacgaaaaccagtcaggcgtggtggcgcgcgcctgcaatcgcaggcacttggcaggctgaggcaggagaatcaggcagggaggttgcagtgagccgagatggcagcagtacagtccagcttcggctcggcatcagagggagaccgtggcaagagagggagggggagggggagggggagggggagagggagagggagagggagcctccaacactttagaatgcgactgcatttggaggcaaggtctttcgagaagtgattaagctaaaatgaggtttttgttttgttttgtttgtagggtgggctctaatctaatgtgaagacatagcaaggagatgccatctacaagccaaaaaaaaggggtgctgggagaaaccagacctgctgacaccttgtgcttggacttccggcctccagaacagtgagcagatgcatttccgttatttaagccacccagtctgtggtattttgttagcagccacagccaactaatacacttaggaaggctggaacacacagtctccatacctgtttctctttttcctgtggcattctccctgggctcaaacaggaagtgggaaaatacataatttccaggtacaggatcctcctgcccaatgaggttatttctgagctaacaacagccaagacttttggcaagtctatttttggaagaaggtccgccctgaaccgtggagaaagagagtggtcaaagccacattcacctgatgtgccagcttcttctggtttctcattcaaggccaccacgggaaagaggtagaggacgccaggccttgggtttcctttctggccagggagttctttgtgacttttaagcaggggaagcaaggctgccggagacagcgcgttgtgcctggggaacaggttcacaggctcacagacagaattgggttcagatgctggttctgatcactcctaggtgaccccaggcaaaatgctttcccagactgagactcaatgtcctcatctgtaaagtgaagttaaccccacccgcctcactggtgaatatgcatctgcaatgttaagcacttagcatagtgcctaccacatagtacgtg

SEQ ID NO: 20769 - DNA, 1176 bp, Artificial sequence
  DNA replication origin
cccacctccctcccagatggggcagctggccgggcggggggctgaccccccaacctccctcccggacggggcggctggccgggcagaggggctcctctcttcccagtagaggcggccgggcagaggcgcccctcacctcccggacggggcggctggcagggcggggggctgacccccccacctccttccgggacggggcggctggccgggcagaggggctcctcacttcccagtaggggcggccgggtagaggcgcccctcacctcccggacggggcggctggccgggcggggggctgacccccccacctccctcccggacgggcggctggccgggcggggggctgacccccccacctccctcccggacggggcggctggccgggcggggggctgacccccacctccctcccggacggggtggctgccgggcggagacgctcctcacttcccagacggggtggctgccgggcggaggggctcctcacttctcagacggtgtggctgccgggcggaggggcttctcacttctcagacggggcagttgccaggcagagggtctcctcacttctcagacggggcggccgggcagagacgctcctcacatcccagacggggcggcagggcagaggcgctccccacatctcagacgatgggcggccaggcagagacgctcctcacttcctagatgggatggcggccgggcagagacactcctcactttccagactgggcagccaggcagagaggctcctcacatcccagatgatgggcggccaggcagagacactcctcacttcccagacggggtggcggccgggcagaggctgcaatctcggcactttggggggccaaggcaggcagctgggaggtggaggttgtagcgagccgagatcacgccactgcactccagcctgggcaccattgagcactgagtgaacgcaactctgtctgccatcccggcacctcgggaggccgaggctggcggatcactcgcggttaggagctggagaccagcccagccaacacagcgaaaccccgtctccaccaaaaaaatacgaaaaccagtcaggcgtggtggcgcgcgcctgcaatcgcaggcacttggcaggctgaggcaggagaatcaggcagggaggttgcagtgagccgagatggcagcagtacagtccagctt

SEQ ID NO: 20770 - DNA, 1254 bp, Artificial sequence
  DNA replication origin
tgaggggcgcctctgcccggccgcctctactgggaagagaggagcccctctgcccggccagccgccccgtccgggagggaggttggggggtcagccccccgcccggccagctgccccatctgggagggaggtgggggggtcagccccccgcccggccagctgccccgtccgggagggaggtgggggggtcagccccccacccgccagccgccccgtccgggagggaagtgggggggggtcagccccccgcccggccagctgccccatccgggaggtgaggggtgcctctgcccggccacccctactgggaagtgaggagcccctctgcccggccagccgccccgtctgggagggaggtgggggggtcagccccccgcccagccagccaccccatccgggaggtgaggggcgcctctgcccggccgcccctactgggaagtgaggagcctctctgcccggccaccaccccgtctgggaggtgtactcaacagctcattgagaacaggccatgatgacaatggcggttttgtggaatagaaaggggggaaaagtggggaaaagattgagaaatcggatggttgccgtgtctgtgtagaaagaggtagacatgggagacttttcattttgttctgtactaagaaaaattcttctgccttgggatcctgttaatctgtgaccttacccccaaccctgtgctctctgaaacatgtgctgtgtccactcagggttgaatggattaagggtggtgcaagatgtgctttgttaaacagatgcttgaaggcagcatgctggttaagagtcatcgccactccctaatctcaagtacccagggacacaaacactgcggaaggctgcagggtcctctgcctaggaaaaccagagacctttgttcacttgtttatctgctgaccttccctccactattgtcctgtgaccctgctaaatctccctctgcgagaaacacccaagaatgatcaataaaaaaaagaaaaaaaaaagtgttggaggttaggacttcaacacaggaatttaggagagaacaaaattcagcccataacaccaggtaaatagccaaatgaatgggtgctggtgagaagcaccaagacctaaattcttattcagactcagtcactgctcagcctcctgatcacactccaactcaagttgtcacccataaaatcagaataatgtcaccctgtgcacttacctccctggattattttgaatatcaaatgtccgatgaaagtaagaact

SEQ ID NO: 20771 - DNA, 973 bp, Artificial sequence
  DNA replication origin
gagttgctgaaggggaggaggagtgagatggggtgaagtgagttgggggacattggagagacactaaagctaggtgcccgggacaggaaaagtgggaggagaaggaggaagaggggaggagggggagaagggggaggaggaggaagaggaggaggaggaggaggaggaggaggaggcggccgtaagatgagagaggagggaaacgtgtcaccagcccggctgtgggagctccgcggccgaagcgtttgttgactcgcgctggagaggaaccgaggctggacgggaccccatctgagggcagagctgggggaggagggagggacggagggagggagagctgggcagagcgcgacggggagaaccatccaggtcgctcatttctctccggtgagaaaacttcctcgggaagaccggaaactttttcctaggcgcgcggagtctggggcggaggcgagcggcgggtgtgcgcgactcggggtgattcacgccggggaccccaaggaggtgagtggtgggtggggggcgtctctgggaggggccggagtcataggctcagcaaccgcgcaggattgagcgaaaattaccgcgcgctaatctgacggggcgcggcgtggcgggggtaggagctagggaaaagtgtcacgtttgggggggcaaccaggtgggaactcctgcatggttaaggatcctccgatcggacgctgcaggcaggcgtaggggatcttactcgagaccaccatggtggggaggtgggcaggccacgctcccggtctgctctttagggtggttgaagtaccgccgtgaggtgggatgcggatgctggtgatcatgggacctaggctgagccgggaggtcgaaaaagaaagtcggcttgtttgactctctcgttctccctctggggggcaaatctaaagagctgaccccgcttaagcacgggagatttcgcgcctgcagcagccttttcccggcggtc

SEQ ID NO: 20772 - DNA, 1329 bp, Artificial sequence
  DNA replication origin
acggggcggctggccgggcggagggctgacccccccacctccctcccggacagggcggctggccgggcggagggctgacccccccacctccctcccggacggggcggctggccgggcagaggggctcctcacttcccagtaggggcggccgggcagaggcgcccctcacctcccagacggggcagctggctgggcggagggctgacccccccacctccctcccggacggggcggctggccaggcggggggctgacccccccacctccctcccggacggggcggctggccgggctgaggggctcctcacttcccagtaggggcggccgggcagaggcgcccctcacctcccggacggggtggctggctgggcggggggctgaccccccacctccctcccggatggggcggctggccgggcggggggctgaccccccccacctccctcccggacggggtggctgccgggcggagacgctcctcacttcccagatggggtggctgccgggcggagaggctcctcacttctcagaccgggcagctgctgggcggaggggctcctcacttctcagacggggtgattgccaggcagagggtctcctcacttctcagacagggcggccgggcagagacgctcctcacctcccagacggggtctcggccgggcagaggcgctcctcacatcccagatggggcggcggggcagaggcgctccccacatctcagacgatgggcggccgggcagagacgctcctcacttcctagatgtgatggcggctgggaagaggcgctcctcacttcctagatgggatggcggccgggcggagacgctcctcactttccagactgggcagccaggcagaggggctcctcacatcccagacgatgggcggccaggcagagacactcctcacttcccagatggggtggcggccgggcagaggctgcaatctcggcactttgggaggccaaggcaggcggctgggaggtgtaggttgtagtgagccgagatcacgcccctgcactccagcctgggcaccattgagcactgagtgaacgagactccgtctgcaatcccggcacctcgggaggccgaggttggcagatcactcgcggttaggggctggagaccggcccggccaacacagcgaaaccccgtctccaccaaaaccagtcaggcgtggcggcgcgtgcctgcaatcgcaggcattcggtagactgaggcaggagaatcaggcagggaggttgcagtgagccgagatggcagcagtacagtccagcttcggctccgcatgagagggagaccgtggggtgagggagagggagaggga

SEQ ID NO: 20773 - DNA, 976 bp, Artificial sequence
  DNA replication origin
gcccggccagccgccccatccgggagggaggtgggggggggtcagcccacctgctgggccagccgccccgtccgggaggtgaggggcgcctctgcccggccgcccctactgggaagtgaggagcccctctgcccggccagccgccccgtccgggagggaggtggggggggggtcagccccccggcccggccagccgccccgtccgggagggaggtggggggggtcagcccccctgcccggccagccgccccgtccgggaggtgaggggcgcctctgccccgccgcccctactgggaagtgaggagcccctctgcccggccagccgccccgtccgggagggaggtgggggggtcagccccccgcccggccagccgccctctccgggagggaggtgggggagggtcagcccccctgcccggccagccgccccatccgggaggtgaggggcgcctctgcccggccgtccctactgggaagtgagtagcccctctgcccggccaccaccccgtctgggaggtgtgcccaacagctcattgagaacgggccaggatgacaatggcggctttgtggaatagaaaggcgggaaaggtggggaaaagattgagaaatcggatggttgccgtgtctgtgtagaaagaagtagacatgggagacttttcattttgttctgcactaagaaaaattcctctgccttgggatcctgttgatctgtgaccttaccctcaaccctgtgctctctgaaacatgtgctgtgtccactcagggttaaatggattaagggcggtgcaagatgggctttgttaaacagatgcttgaaggcagcatgctcgttaagagtcatcaccaatccctaatctcaagtaaccagggacacaaacactgcggaaggccgcagggtcctctgcctaggaaaaccagagacctttgttcacttgtttatctgctgaccttccctccactattgtcccatgaccct

SEQ ID NO: 20774 - DNA, 1415 bp, Artificial sequence
  DNA replication origin
gcttctcctcgctctaaatctaggggaacaaaaacccggcgcgtctgggacagcctctagagagactggggagggggcttccccggggggggggggggcatcgcgcagccctaggcgcccgcccctccggcctaagcagggttcctccccaccttccttctcctcgccgccccaccctcccgcgcccttctcttcccccagctcgggctccctgggctccgaggcttcgcccccgcgcgggagctctcggggcgagggcggtgcgcagcggtgcgggggcagaggtgatgctgggcggggcggggcggcacggggagggagcgggcggggcggggccgcgctgctacgtaagcagccgcgagaggggatcctgggtgcaggccccgccccctcacgtgccctgggcgcagggcctcgtgctgcccgcgtgacctgcaggcgcggcgctgccaccgcctctgcttctgcttggcttccacgcgtgggagggagcccgtggcgacgggggcggctggcttgtggaggctgcgggaaagtcttcctcggcggccgcgtccctgtcccaggccttggtaccctggccgttctccgcccgggacttgggggtgctgagtgggcatgcgggtgtgcagagctctgtgctctcctggatttgagaaaaggaggtctcctattcctaccctctgtgctcttgcattccacgcatgggaggaggaggaggcagagtaagggggttcttccccaagggatgaggcggttcaaatttaaacctaagtttgggagggaggtgcggaagagcttttgaaattgaagggtggagtccccacagcggtccgttcagcctccattactgtgcctgtgacctttgggtcaggagccctgttttactgcaacctgggcccagctcagcacccagctaagggcatgagcaagaatccagcgtccttcatggttccttggtgggtgccttactgattccctcagcctcccatttccccttctagaaatggcaggcagagcatttggaaagcagcagtgagagatggagaccaccggacaggccaagcaccaaattgggtgtccccagcaacagaataggaaacccattatctgtgcctttgcaatgtgtccttaagtgactcatttgcctgcaaggtgtcaggtgctgaggtagtccacaaagcctgttgctgtctgcaaacttgtgtctctactagttgttatttccaatagctggcaaaatcgaaaccgcctttgcaaaaattataacaaaattattacagtgaagggcatctgacctaactgactctatcttgcttgtaacctccaagctgtcccttgttcattcctgggcgtaggctgaactaactttgggaggaacttacagtttcactttgaaacaaagatggtaacag

SEQ ID NO: 20775 - DNA, 694 bp, Artificial sequence
  DNA replication origin
ggcgctcgcagtggcgcgcctgctcgctctcccgctaagcgacgagtcttcaacaagttggaggaaggcaggaacgcaggggttaagctcggaaagccgcaattaccaagatcgtgaccctcccacacagtacagtaacttatatacttacctggaagaacccgctttgccgccgggcaaacacccgtggggggcggggaggggccggagggagcgggccggcaggagaggggctgcttccagctggctgcagtgcggacgggaccggcgcgctcccgtggcccccagaccgaggtaaggagcagggagtcggcgcccgggtcggctggtggtcggtcggctcactggtagtcggtcggctcacgggtagtctgagcagaacttttttttcccagttgccccgcgccgcggcggcggcgggcgcagaccgcggagcccctctggcgcggcgggcgcgcagacgctcggagggtgtgtgcttgcgtctgtcagtcccggagccgaggggatgccgtgggagggtgagtgggtcgcggagctgcaggagggtgatggatgggcgaagggggtgggtcgacagggacttgaagacagtgcctccaccgtcgagagacgttttctccgggcgtgctgggcgagggtgggagtgtgtgtgcgcgcgcgcgcgcccgcccgcacgtcgattccagggtgc

SEQ ID NO: 20776 - DNA, 607 bp, Artificial sequence
  DNA replication origin
tgaggtttcccccactgggggactatactgctagggagggagatagtcaggacgtcccttagcccacaccctgcttaggtactaatggggggggggaggggcaggagaggatgtgggaagggtggcgctgcactgcgaagaagggcaacccctcaaagtttggatggatgggatggaggagggggccgagcgggatggaggaagagggagggaggaagagggagggagggagagtgagggaaggagatctcctttctccccatctctagtcttccctcccctcctttcttcctcccgcagaaggtggaatctcccgtcgttgtggggtcaggcagtcaatgacgggttcgccccttgttgttccccctagcattctgcagaatgggtagagagttgggggcgggggggtgggctgcagagttgaaagtgcacctgaggcgaatgggccattaaacacccaatactgagacggtttcggggaggatgcggagggaggagcttcacctagttgagcattcagaactttgggtgggaaagggggtgttgagacattctcaattttctagaaataggatgactagtgtggagtttgggtttattttatgtt

SEQ ID NO: 20777 - DNA, 1278 bp, Artificial sequence
  DNA replication origin
tcgcttcaagacgcagccggtgaccttcgacgagatccaggaggtggaggaggagggggtgtcccccatggaggaggagaaggccaagaagtcgttcctgcagagcctggagtgcctgcgccgcagcacgcagagcctgtcgctgcagcgggagcagctcagcagctgcaaactgaggaacagcctggactccagcgactccgactcggccctgtaaggggcgccgcccgcgggggggacgcgcgcgtccgcggtccgcgcggggaccggcgtgtgaaccccgagagtgcccgcgccctgctcccgggggacccgcaaggacccgggaccgccgctcctcgcgcgctcggactcccgccccgctgcgaaccggtcggtgcgcccctcgccgcgctcgccctggcccgggagcgccgggagcggggccgctttcctcgtccttgtaaatgtttattttttaactcttcccagtgcgaactctgctgtgagtgtgtgcggggaggcgcgcccgcgctgagtcggcggcgggtagccactccatgcccttgtccgatggtttgcaactccgattttgcacaccgctccaccgtgccccccagcgcacacccattcacactcacgccaacactctcgctgaacacttttataattgttaggcgtggccgttgggactttgggcgcagcgcggctgctactgcgtctggaggattgatatttatttttgcattgcgatggctgaaggcatttatttaacgatctttttacctggatatgtctgtgaggctcctgaaaggagacaaataaagtcaatatatttgcacagtgcagttttccaggctcttgactttttgcaccttcggggtccaggctcccaagactcggggaggtgggggaggaggtggcagggggatgtcggaccagggagccgggagtggagctacctccacaagcttcggtcaccggaacgaggttgcgccaccggtgcgcgggtcggttgcctgcctccccaagtggatccacccccggtccagtgtgctcctgcgtccctggtctattccccatcgccggcatccgggctgaagtgaagccgcaggaggggcggaggcagagctgacgatggagagctctctcctccgtacagttcacttcccagagctggggtcagggtcctcgccccgcacccgccacagaagacgcatctccctctgcgctgattcctggcggcgggtggggagatgtcggagccagcaatgcgagatgtttgggcgttgggacccg

SEQ ID NO: 20778 - DNA, 1646 bp, Artificial sequence
  DNA replication origin
ctacatatttgttagttttataagcaacgcgtggtgtctcgtttgggtttaaggattctttaattatgaatgaggctgtctgagcatttcactgcggagcctgagcgcgcctgcctgggaaaacactgcagcggtgctcggactcctcctgtccagcaggaggcgcggcccggcagctcccgcatgcgcagtgcgctcggtgtcagacggcccggatcccggttaccggcccctcgctcgctgctcgccagcccagactcggccctggcagtggcggctggcgattcggaccgatccgacctgggcggaggtggcccgcgccccgcggcatgagccggtgaccaagctcggggccgagcgggaggcagccgtggccgaggtaagcgcggctctccagggcggcggccgggcgggcgctgaagcgagggctcgggcctccgggggccgctgctgggtcgggacaagggccgagggagcgcggccgcgcggaggctccgtggaggcccgtgggctgcgagaggccacccccagccccgccggggctgtgacaatgactgcccgcttttggagcgctccgatttccactcctgcttctccttctcctccggcggcggccgcgctttcagcatcttggtacccacctgttctcctagccaaccttcgcccccagtccgctccttcctttcctcctgcgacccgccctccgccctccgccgtgacccctcccttcctgctgccaccttcccgccagccacagggatctgattcctcccagggggatgtcctgcgcctcagggtccggtggtggcctgcggcatcccttgcggtgccagaagccgtgggacgaggtagggaaggggccaggggcatgttatgccggggactgggtggtcgggggcgtgttaggccggggactgggtgaccgggaactagatggccgggggcgtgttaggccggggactgggtggccggggtcatgttgggccaggcactaggtggctgggggcgtgttaggcaggggactgggtggccgggggcctgtcaggacggggcaggagtatgttagactgcggactagattgctggtggcatgttaggccagggactaggtggcccgggggtgtgtcgggccggggccaggggcatgttagtctcgggactaggtggccagaagcacactggctctgggcttcaacttgaagtccagaggtgtttggggctttgttacattcggtgggaaccagatctaaacacacaattttgagaatcaaagaattgcttggtgttactgattgggcaatgctaatctagaaaggttcttgacttatttatgtgaagatatggtcttgaaatatgtacatttaaattcttgtaagtcttaacttcttgtaagtcaggtaagtgctctatgtactttaactggacttagtttgtaactttcagaactcaaaggctattcactgtaataaaatagatgattcagtttccatcattcactttccccgacttcctggttgcatgtgagggtatgaatggataatcagttttggggccagactgccatgctgtgaatcctagctttggcatttccagttgtgtaatattgggccaggtacttaaactttctgttgtactatccccatctg

SEQ ID NO: 20779 - DNA, 1787 bp, Artificial sequence
  DNA replication origin
gacccagtaaggcctttctgttatcaccccaggatgcagatgaggaaaccggggtttgggaaggtgtttgctgtcaggtcacactgccacgggttaggggcagtagcgggtcaagtggctggccctttccgtcagctccaaaggctagtgcaagtagaggaagggccaggctggctgtgggggcccagcaggacacagagagagggctcaggggaggccaggcctctccgccttccctctggacctgaaggcatttaaccaagaggtggggagctccttaggctctcttcttgcctaatgtatcagcctcttcagaggtctcactggtaattttcattaaaatatgaaaattcaatgcagtggagagagagcatgagctctctggctatgcaggatgaacctccatgggtcccctagtctgcgacctgccctcacctaatagtcctgaatgacagggacgagctggggcctgcatccctgggctgggaaggacagccagtacggacagggctgagagtctctgctggcttagcacggaaagagtgcctgtatgagagctgtgtgtgtccatgtgcggagctgtgtgtgtctgtgtgtggagctgtgtgtgtccatgtgtggagctgtgtgtgtccgtgtgtggagctgtgggtgtccgtgtgtggagctgtgggtgtctgtgtgtggagcagtgggtgtctgtgtgtggaactgtgtgtgcctgcatgtggagctgtgggtgtctgtgtgtggagccttgggggtctgtgatctgaatgcctgatctcattccaactggaggtgaagaggaaggtggaggaagtggggaagggccactgaatctttctaaatcttctctcagttctgtcctatgggtttgggagtatgtggctcattcgaggccacatgggcatgtgttcttggggtatgaccacatcggctcctaaagaagatgctctctgcgtgtgtgtgtgtagagtgcaattgtagacaagcatatgactgtgaatgtttgtcagcagccatctatgaactagttctgcgcctgtgaaagaaggaacctgaatacgagaaaatatctgccatcggctgttttcccaaagttattctagccaccaaggcctccgccgtgtcccagcctctgtccccaggcctagtgcctctccatcagcctggatcagggcaaattccctgcccccaactcttcccaccagggccggacctgaaggccaaggcctccgggtatgtgctcaggactcctggcccagagaaggtttttccctttctgcgtctttgcttccccttccgctttggggttcaggaaccccgattctctggaagaagagaaggcctaggctactgagctgctctggctagagacgtccttgagtgtctctctctcccgggcaatggtggctgtgctctggggggcccaggcctgcctcctgtggctgcgttcaaggcagcttggaggtcatttaggccagctcccccgggttccccgtgggctcaaatcaggacccagacccttctctcttgccacagctctgggccacctgggactcgggacttcctgtctcccttcctactctgtcctaaaccattgttcagaggcctgccgcctccaagaatcgccgagggagaagctccaggggaactggcctgcccgcatccccactgccagtagcgctcagggtcccaggactcgggtcttgccagaccacagtgtcccctgggaccctagggtctctggctccgcactgtgttgcgccagtgcgcctggattt

SEQ ID NO: 20780 - DNA, 817 bp, Artificial sequence
  DNA replication origin
aaactcccagccaaggcgcgcggtggcgtcctcgcgccctcgctcgcgtccccgcccgccgcctgcgcaagccaggcatgaatgctgagacttgcgtctcttactgcgagtcgccggccgctgccatggacgcctactacagcccggtgtcgcagagtcgggagggctcgtcgccttttagggcatttcccggaggcgacaagttcggcacaactttcctgtcggccgccgccaaagcacagggattcggggacgccaagagccgggcccgttacggcgctgggcagcaggacctggcgacacccctggagagtggagctggggcgcggggctcctttaacaagttccagccccagccgtcgaccccgcagccccagccgccgccgcagccgcagccgcagcagcagcagccgcagccccagccgcccgcgcaaccgcatctttacttgcagcgaggcgcctgcaagacgcccccggacggcagcctcaaactccaggaaggcagcagcggccacagcgcggccttgcaggttccctgctacggtgagtgcacgtgcgggtcacctggtgctggggaccacggggtgcttggcttccgcatcccttgaaactggtggcttgcgggaggtatgagttggcgggctgggggcggggtggtgactctggtcggtaaacgggatcgatcgctgcgagggagccaagggatctgttctgtctccttcttgtccgccggcctaggcacggagcgtttcggctgttaaactcgacttggagtttgtttttcccggtcccttcggcatttccccaaaccgctcgc

SEQ ID NO: 20781 - DNA, 1564 bp, Artificial sequence
  DNA replication origin
ggagagacgggaagtcttcctagaggaagatgctctaggctgaactctgaatcattagccagacaaaagtgcaggaatgagtttagggaattccaggtaggggaaaccacctatgctacagtgcacaggctagagaccttggcaggttctaggaacttgaagaaaccgctggacaggagcatttaggatgatggcaggagcactccgctttttgctaactggaaaattattttggttgagtctcagtctacccatatgcaaaatgggtatgataagccttgtattgccagattgttggcacaacaggagctcaataaataaaggactctcaagtggcttaggtctgcgggccagtgaggcgcggttcccattgggcatggagtggggggcggctggagcctgcgcgctcctggcttggtttgcggaatatctttattaacgagcacttcaaggtaagccggcgatggaaaccagatgtgggatcgcgcggtcggcggcggagcaaggaccagagatactaagggggtagggtgggggtaagaattagcccagatgagattgggagcagaagcgcgaccccccaggtatattttttctttgggagaccttagatgcagaaagttgacatctgacccacattccttggttcacggtgctcaggccctctttaattttaccttgcacttttacctctcaccctactcccagactccctagaggtacgttctcgcttaacgattttctcagcggtttaaggaaggctgctctcgctggtctccttcaacttgaaccattccacagccgggggccagtttcccctctgcatctacgctgtccgcacggccttccaggtcggtggagggactagcctgagcagaggttccagggcgcgacggctatttcccagctgtgtgacctggaccaggtggccgcccctctctgagcctccgttagctcatcagaaaattgggggcgccaatctctagcacggttgtcatgaagcgaaatcgaggggctgcacgcgcaaagttttttcccttgctgtggcggtgccaggggccttgaggctcgcagtggtggtgaaaccacaacctatcaaaaccaagcagttcgttttacagtcgggggcagtgaggccagaaagggaagagacggtctcacccctctccccgacccctgaccccaaggagtgaacaggtgacagcgcgactatcgggcaaggtcagggggtctccagagtccgctctctgtacttcgcctggcaggaaatcccctcgcctgggcgcagacgtggggcgtgaacggtgcggcctctagacgggagcgcagagggcagcgctctaaagcttctgaagccgggcccagcccagggcttctccagggcttgagggagcacagattccgctacatcccagcccagcgcccttacagcagagggaaatagttaacaagacgtgcaagtgaccatgcactggacgacgaaggcttgtgtgtgtgttaatctcccgtaggaacgggaatggggaggaaggttggaaacctaggaaaaggtgccagcgggaag

SEQ ID NO: 20782 - DNA, 1817 bp, Artificial sequence
  DNA replication origin
ctactagggccgggggatggggtgggctcgaaggagaaagtgaaggaggcgggggcgctgggagggcccgggaggagaccgggaggacgaggtaggcgggagctgggcgggaccgttaggcagcgccgtgagtggacagggctggagcggggcgggcttaatccccagtgtaacctgggggcggggctgccgggatagaggagagactccgtagcggggcggggcctcagctccagctgggcccgggggcgaggctggttggggtacggccatagtgggcggggcctggccggcgggagcgcaccgccttcccaaagggctcgggggcggggccggcggagggggcgtgtcttctgggggcggggcctgccgagtccgcggcgttccccggctgcagccgggagggggccgaggagtgactgagccccgggctgtgcagtccgacgccgactgaggcacgagcgggtgacgctgggcctgcagcgcggagcagaaagcagaacccgcaggtgagcaagggggcagcgggccggggtagcctgccggacaaccataggcaaagttagttttagcccccgcttctgcggtccggctcggacaactttcctcggaactagtgacaggtcggggcagctggtgggtgaaaaggagctttagccaccagtcctgaacccccagttctcacactcggccgtgcacagctgcgtgatcctgggtccgtccctctacctggctctggacctcccgggttccagcaggaggaagtgaaccaggtgaattccacgctcccgttgccctttctcacttaaaacgccggaaggtgagagctggcaggtgagagcaggctgcaggtcgccacaggtgttcccatcgcgttgccctctgcagtttctctccctgcaaaatgggactgagagaagcgaattgctttaaagagtgcactgtttcctcggttggggctcgaacccaccaaccctggggaagaggaggccaaagcagggaggttccatttcccgcctcacctgcttcccaccaattctaacagttcaactgagccggaccccctaagacttcaagttggaaactcagtggggcttttccaggtgagctggcctgagcaggaggttggaaactggggaacagttcttacactggtgagtggggaagagaagggaaaaccccaccaatccttgggcccagggtcaagcccagggccccaggggcccttgaagcatacccggggttaatttcttggctgacgggttctgttcctggaggtggtgggtgctctgtgctgggccccagtagcggggcagcatagttctgtggtcaaggcttgggctttgggatcaaactgatttggattccattccccctccaaacttcagtttcctcacctgtaaaatggggataatgacaatatccaatagcaggagcaagcactaaatagaataatgtgtatacactacttagcaaggtgccaggaaaccagtgagacctccctctgtgacagctgctttgatgcgggtgggcaggtgatgggcttgcttcctatggggaatgagccttttttttttcttggagagatggggttggctacagcccctcctgaccttgtgaaagccagaaattgccacctgccaccaacatcactctatttgagggatgaggactgtgtcatctggaacaaagagtggctgagttttctgtaatgttgcttgaggttggtaagtgttgagttaaataagtctaaaaatgtttactgagcacctactatatgctagagagagctagaggatacagaggtgaactagcca

SEQ ID NO: 20783 - DNA, 1049 bp, Artificial sequence
  DNA replication origin
agggggtgggggtaaggaggcttcctggagggggtgagacttgaataggactttctctctgggctcctggtcctggtttggcttggatcaacatgggaccacagtctcttcaagcactgaagtggcataaattggagtttggtatggtggggagggagagggtctggtaggtggtgcctgaggtggggaggaggagacgttcatttcaacagagcctacctagtgagccttaatggaaagccctccccaccaccacccccacttcctgctcgatgaatgacaagcgaccacataaggcctgcaccctcaggttgcttaccatccgggaaggggcttacacaagaataccagggactctgatggaagataaatgaaaaaaggattagagggatcttcagggccttacagactgggaagatttcggcagccagaatgaagatagtgtcttgaggagaggaaaatgcctaggcagaggcagggaggtcaacctgtcctgagaattctcgagaaacctctaggttgctcattctggctgaagtttgggaacgtgtggggatatgcagtgggaatagtaggtgggatcagcttacggagggccttgaatgacaggataagaactttggatctgatttgcagaaagtgggagccactgaaggtttctgaggagaggagtgacacaacagagcagcactttaggaaagtcagtctgtaccagatgtgctggggtggaggatccagcggtcaagggataatgaaccaatggctgcagtgactgggaagaaggggtctgggtggctttggggatgtctgcaactgggagtgaaggaagagacaccagccacagggagagcaaaggcaccattggaggggtgggaggggactgttccagcacatttgcacttctttctcctccctatcctgtctggtacatagcagggtctcaggaaggtggctggattgggtgagtggcggggttgctgggagggtgatgaatgctacagaggggtttgcccatgaaggggaggcatctgggccgaaaggtgggagcc

SEQ ID NO: 20784 - DNA, 1305 bp, Artificial sequence
  DNA replication origin
ttgaccatatagttgataccgaagttccaggtccctcagtcttggggccccctccaggcatctaccctgctgtcttgggggccctgtttggagaggctgcactctggtccttggaagaaggaaactgagctgggctttcctccctgtccctccttctccctgaagctgccctgtgggaggtgtaaggattcaccaagaagttgcatgggtctggctctggtgcctggcagaccatggtggttaggtgtgcattcagcattcacgtaccccacacaactattctgtgccaggcttggcgctagccacgggggaccctgtagtgagcgtgccagatgtggtccctgcccccacggagctgatgtgctagtggagagagatgataagccctgaaaaccaacaagcatgtaacgtcagtgctctaaagagaaatacagcatgctttcccttgtgggataagggaggccggggaggggtggttgattggttgggggagaggggatggggaagggctgatattttgtagagtggtctggtaaggcctttctgaggaggtgacattggagcagagccctgaaggaagcagagggtgagccatgttaatgtctaggggaagagcattccaggcggtgggaacagcaggtgcaaaggccccaaggcaggagtgtgcctggcacaaagacagcacagaaatctagtcagttgaagcagagggaggaagaacagaggacagaaggcctggggaggcagacaagtggtgtaggacctcctaggctgttatggggacaatgacggtgggaactgccctggaggtgggaggcccctacggggttttcagcagtgacatgagaatattgatgtttacagggccaggctgctgccaagcgcagaagagatagtggggcaggagtggttggcactgcctgcatcgggcaccctgggagcgccaggaaagtggctggagccatgagcgtgtcccagggttgctgaggggaacggggggaggcagtttaagtaggggtgaccacaggtgggcacgggtttcaggaaatctgaccctgacctttgtcctcccccctgcagctgaagcaggagatgggcggcatcgtgactgagctcattcgagactacaacagcagtcgcgaggacagcctgcaggatgcctgggactacgtgcaggctcaggtgaggtggggcggggctgcaggaggctctctggcctgggtgtccctgcatttggggctctgtgcacccacatgtctgggactggcatctgcagtgctcgtgtgtgcctgacagtttgtagga

SEQ ID NO: 20785 - DNA, 1508 bp, Artificial sequence
  DNA replication origin
gaacatattccctgccatttgcatattgtcacagcgatgccagcagatgcttttaggagaggaagagacccatatctcaactccctctatctttgatagcgtaagtaaggaacatgcttataaaaacaatggaaagtggcacatatctactttgaaaaaagtgggggttatgtagaataaggcccaaagaggatcaaaaacaaattgtcactctgccaaactagaaatttccacaggctttctccttgcttgagtcgagcatttgagaaattgtattgggattacattaaatttactatttttgtttgctaaaatgaataaatcaacccactcttatttgtatttaaaaaaaacaacaggcaccacacatatgatccccaaaagggagcagatggtagagcagaggcactctcagattcccttcctgggccggggctgctggtcagctcctcagttataaaatgggaacaaatcacatctttctcgtaggactactgggaggaaaagagagtgtgtgagaggactctgctcattgtaagcactcttgaaagctgggtctttccaatgtttctcttctgcccacctgcttcccaagcacagacccagttccacctgcagacccagcagaattggtgtcagctgtggatttaacgcactgtcatgcaagctcctgacggctgggggcaccattaggtccaggcaataaacatttattaacatgtcacaaggcgaagcatgctgatcccctgaggagatactgtggcacttcctagttcatggagaactcaataaatggtagagggatggaagggagggtggagagaagactgattagccagatgaaagacagagggctgagcagagggagggaggagggcagaatagaggggatgggtgcaggaatggagacatggatggatgaaggatgggagggtggaaagtgaatagaataatgaagggatggagaaattcaggaaaggatagagaggtggagaggagatgagatggaaggagggagggaatgatggctggacaaaaggataaataggttaaaggaattggtgaagccatggagaaatggtaggaagcatggaggggtgggtggagaaatggagagatggaaggatgaagggatggaagggtagaaggtgaatggaataatggagcgactgagagatccagggagggatggagaggtgaacggatggataatgggatggagagaggtaggaaaagatggatggtggctggatgaagggataatggggtgtagggataggtggaggcataagggaaagatcagaggaaggatagagaagtggctggaggaatagagagagagatggatgaagagattgaaaggtagagagggaatgaagaataaagggatggagagactgaagaaggaacggagaggaacaggaaacagagggaaggatggatggagaaatggagagatcaacggatggataatgggatggagagttggaggactcattgttctctga

SEQ ID NO: 20786 - DNA, 957 bp, Artificial sequence
  DNA replication origin
ggctgtaatctcggcactttgggaggccaaggcaggcggctgggaggtgtaggttgtagtgagccgagatcacgccactgcactccagcctgggcaccattgagcactgagtgaacgagactccgtctgcaatcccggcacctcgggaggccgaggttggcggatcactcgcggttaggggctggagaccggcccggccaacacagcgaaaccccgtctccaccaaaaccagtcaggcgtggcggtgcgtgcctgcaatcgcaggcattcggcagactgaggcaggagaatcaggcagggaggttgcagtgagccgagatggcagcagtacagtccagcttcggctccgcatgagagggagaccgtggggaggggagagggagagggagagggagagggagagggagagggagagggagccatgatgtttatcttaattccaatattaagaggtgcatcagacactgagaaacctacaggcttttatctcacttcatgctcatcactggcctacaggttgcttctgtgattagctcaccgtttgtgaatgacaacgtagtgacaagccaggtggaacggagccagggttcagtccccaacatctaggagcctggtctgagtggaaacagagaaggaaataagtatcccccagccacaggtggcacctcatctgggggccccaaccatgggctcccgctttggctcagaccctaggagggcttcattgactggtgaccttactgtgtgtggctcctgtctggggagggccccaggactgaccatatcccaaggcctcttaggtggtcccacctgcccctggtcagcagccgagaagcagtgtgcttgggagaaagaacgctgggtggcaggccgaaggtctgggctctagccccatcctactctcacctgccttgtcaattacacacgtcaaggtccagccacttctctgcatctcat

SEQ ID NO: 20787 - DNA, 1006 bp, Artificial sequence
  DNA replication origin
gccgggcaggggggctgaccccccccacctccctcctggagggggcggctggccgggcggggggctgacccccccacctccctcccggacggggcggctggccgggcagaggggctcctcacttcccagtaggggcggccgggcagaggcgcccctcacctcccggacggggcggctggccggacgggggggctgaccccccccacctccctcccggacggggcggctggccgggcggggggctgacacccccacctccctcccggacggggcggctggccgggcagaggggctcctcacttcccagtaggggcggccgggcagaggcgcccctcacctcccggacggggcagctggccgggcggggggctgacccccccacctccctcccggacgggtcggctggccgggcagaggggctcctcacatcccagatggggcggcggggcagaggcgctccccacatctcagacgatgggcggccgggcagagacgctcctaacttcctagatgtgatggcggctgggaagaggcgctcctcacttcctagatgggatggcggccgggcgcagacgctcctcactttccagactgggcagccaggcagaggggctcctcacatcccaaacgatgggcggccaggcagagacactcctcacttcccagacggggtggcggccgggcagaggctgtaatctcggcactttgggaggccaaggcaggcggctgggaggtgtaggttgtagtgagccgagatcacgccactgcactccagcctgggcaccattgagcactgagtgaacgagactccgtctgcaatcccggcacctcgggaggccgaggttggcggatcactcgcggttaggggctggagaccggcccggccaacacagcgaaaccccgtctccaccaaaaccagtcaggcgtggcggtgcgtgcctgcaatcgcaggcattcggcagactgaggcaggagaatcaggcagggaggttgcagtgagccgaga

SEQ ID NO: 20788 - DNA, 921 bp, Artificial sequence
  DNA replication origin
cgcccggccagctgccccgtccgggaggtgaggggcgcctctgcccggccgcccctactgggaagtgaggagcccctctgcccggccagccgccccgtccgggagggaggtgggggtgtcagccccccgcccggccagccgccccgtccgggagggaggtggggggggtcagcccccccgtccggccagccgccccgtccgggaggtgaggggcgcctctgcccggccgcccctactgggaagtgaggagcccctctgcccggccagccgccccgtccgggagggaggtgggggggtcagccccccgcccggccagccgccccctccaggagggaggtggggggggtcagcccccctgcccggccagccgccccgtccgggaggtgaggggcgcctctgcccggccgcccctactgggaagtgaggagcccctctgcccggccaccaccccgtctgggaggtgtgcccaacagcttattgagaacgggccaggatgacaatggcggctttgtggaatagaaaggcgggaaaggtggggaaaagattgagaaatcggatggttgccgtgtctgtgtagaaagaagtagacatgggagacttttcattttgttctgcactaagaaaaattcctctgccttgggatcctgttgatctgtgaccttacccccaaccctgtgctctctgaaacatgtgctgtgtccactcagggttaaatggattaagggcggtgcaagatgtgctttgttaaacagatgcttgaaggcagcatgctcgttaagagtcatcaccaatccctaatctcaagtaatcagggacacaaacactgcggaaggccgcagggtcctctgcctaggaaaagcagatacctttgttcacttgtttatctgctgaccttccctccactattgtcccatgaccctg

SEQ ID NO: 20789 - DNA, 1282 bp, Artificial sequence
  DNA replication origin
ttcagccctctatcccccaatatttgcttgattgcttgaatgaatgagtgttagtaaggattcagcagcttggatcttggtctgagccacacttggctaacgatgtccttttggtcatggcctcagcagggatgagctggccacgattctaacctttctagaaaacaaatactggcaaatactggcaatatccttttgagaactaggtggacccttagagccttatggtgggttctccagggtagagaggaggagggaggctcctgatcccagttagtctaagccaccaggaccagacatccactatggcctctgagagccagggtaaccatggaaaccaggcactgggggtgggaggagcaacgagtggaatgaagccaggcccacagagaggccagcaggccaggctgggctttgggaccactccatgtgtatatgtatcgggtgggggatgggagaggtggggagtgagtgtcccagaggccaggagagcaccagctgcaggaaagggggatctgtaaggcatagactcagagctcggagctcacgaagtgtccttgtgtttcccacagcacaggggccctgggctccagcccccttctctgagaatcaggaaagaaaaacaagtgagaggtatagagaaaggggctgatagtgataaaagacagcagaggcccaggagctgagcagggagggcaggggagggagagggagagagaacgagagagagagagaggctgtttgatggagaaaccacagagatggggagggagagagagagaacgtgatacctacatagaaaaagagaactggcagaagacagaaggaaaaacagcaacacagagactgagagacacacaaggatgagtggagagacagagggaaagggaagagctcacaggggaggatgaagtagaaatggggcagaggtggagggagaaacagcaacaaagagcaaggggaggggtcggagaaaaacggggcatagaaacagaatcaacaagtggggacacagagagggcgtcagccagagagaggccagagtgagtgtgagcaaacgtgagaggaagaaaacaagtcagaaacagacaatcaggagaagaagagggaggcaattgaggccgaaagatgatcagattggcagacggcacgggctgagctacagagaccggctcccagccctactccaggcaagccttgggccctctgccatgtaaaagacccagagaaaatcccagtctgccctagaaagtcaccagaactcggccccttgtctccccag

SEQ ID NO: 20790 - DNA, 1222 bp, Artificial sequence
  DNA replication origin
ggcgtgcggagggcacggaggtgcggagccccataccttccagcggcggctgccggaccccgcgccaaatcccgccggcggccggggggaaactttcctggtcggaggggcgcgctcgcaacttgcccggcgccggctgccttcccggcggtggcggcgcgtccggggacccgcagcgcgaggcggcggcgctcgctcggggctcggggccgggaccggggccggggccggggccggggccggggccggggctggggccggggccggggctggggctcgggcggcctcgcgcggctccgcggtggatcgctcggcgctacgtccgccccgcagcctggagccccgcgacgccggcggcagctgcacgcccgccagcccgccggccccacctccgccgccgtccgtccctcccctcccccgccctccctccccctccccaaacctccgcccctcccggctccagacgccgttgctgccgagaagcgcgtctcctctgcgggctgcccctcgcctcccgccagcctccgcctcctcctccaaccccgcgtccaggccttgtctgggggtccctgggcccaccctctgcccatctccccttcctccgcctccgaccacctcccgctctgctcgcgggccctctctgcgtctgaattcggaagatcgttgcgggagtggggagaggggcatgctggacccgaagtgtttattccaggggaactttcagctgaccccggggcccaaacgcaggggttggggtgagatcctcggtcctgatcgggctcctgggcttcccgctgccgggggaagtacctgttgaaagcctggggaactcaccctcctctgacttgcagataagaaaggggacttcctgcatggaggggcctgaccccaggtcagatgcaaatgacttgattgcaaggggccagatctgtgtctccggcctcagggctgaggttcttgcggggctggggagcttatcttttcttctctgtactgctgccacagcagcactggctcccaacccctgacatgacttgcctgagacttttaacctctgagcctcctctaaacaactacccgaccctgccccagacaaaacggacaagcaagcagatcaaaactgacagcccaagtgaaagtactgatgacaggggctcgggtcgcccactcctcttcccttggcaactctgttttgagtcccagcttgaagcttccacacccc

SEQ ID NO: 20791 - DNA, 1965 bp, Artificial sequence
  DNA replication origin
gtagcgccgagcgatccaccgcggagccgcgcgaggccgcccgagccccagccccggccccggccccagccccggccccggccccggccccggccccggccccggtcccggccccgagccccgagcgagcgccgccgcctcgcgctgcgggtccccggacgcgccgccaccgccgggaaggcagccggcgccgggcaagttgcgagcgcgcccctccgaccaggaaagtttccccccggccgccggcgggatttggcgcggggtccggcagccgccgctggaaggtatggggctccgcacctccgtgccctccgcacgccgccgccgcgcccccggggacctggggacccccccgcgcgccgccccgggggtgctgctggacgcggcggggaattggggtggagtagggatcccaggacggaagcccggcaaccaagttccactcaaactagcacgcgggggctggggggccggggacggtctccaccccgtgcctgcccggagtccgctgagggccgggggctgcgcccaggacaggtgcagagccggtgggctcccagtgctccgggtggaggagtgggggcttctggagaacggcgcggggtggcaggtgtggttacaaggttcggggtttcggccagggctgcgcccggaaaggggctgctcgccacgccacccggtaagacagtgagggaccagggactgggagcggcgatcggggccgggagggctgtggggcccggcagctgcatggagggcgggctgcctttggggtccctggcagcggggcggggcggggcggaggcgccactcgttcctccaggaccccccttattccttaggtgtgtgcggtttggggaagtggagactccatggagtgctgggtgggtgggaggctcgggcacgtccagatttagggggcagtgggagccagttgggacggtgctcggctcgggtgggatcgcgccggctccgggtcctgctggagtgaggtgactgggctcccgccagggggcgcactgccccggccctcgccagcaggaagcgcgttctggctcctgcgaggcaaccgcgccgacatccaggacgcagggaccacagacacccaacttacgcggggtcccgccccgaggagcccgccctacactagccagacgggggagcgggaccaagagtgaggcgaaaggttcacagttataactgcgccgtgggctggaaaggctaggagtcaggatgtgatttttctcgggaaggctgccagggcaaatggatgagtaagaaatttacccccagaaaaagatgtaagaaactacaactgcgaattggtgcagagagagtgggttggggaattaactttttgacggtttttggagttgcagaaacccaaaccccaaaatgcatgcaccctttttgtaaaagttgcacctttgtttcctggatctggtcgaatccctgtctggtgaaggcaggatgggggtcttggggtatcctctctctgggcacaagtaaactgggaggcacagggcgggcggtgggggatggggccttaaagacttcagcagtccaggcagaagtgttaaatttctcagcagtcaacgagccctggcccccaccctcatcccctgggtctgtggtctctaggccacattcttctggtcatttcacaattattggtggaaatctgccctgggtcccagttgtctggcctcagggtccctgtatgttgagtctgtgtgtctgtgccttgggaagtcgacggctgctggcatctgtgaggactgtcatctttgtcatgtgcggggctaacattgaagggacattggagggactattgcctcatctttctctccagttccctccctcctcccatcaccccaagtgagtgcaaaggagcaaatcatagattgtgccgtggcctcattgtggttggtagaagttttcatctttctcttagctggtaacctg

SEQ ID NO: 20792 - DNA, 843 bp, Artificial sequence
  DNA replication origin
taaagcccaggatgcatttttttttttttttttgagactgagtctcgctctgtcgctcaggctggagtgcaatggcacaatcctggctcactgcaacctccacctccagggttcaagtgtttctcccacctcaacctctcaagtagctgggactacaggcacatgccaccatacccagctaatttttgtattttttggtagagaccggcatttcaccatgttgtccaggctggtctcaaactcctgacctcaaatgatccaccctcttggcctccccaagtgctgggattacaggcatgaaccaccatgtccggccctaggatacatttctgactttgctggcaggcccatggcaaggatctgggaagagttgagttcactgtgggggttggggtgggggtgaggtgtgcagggatgcatggcgtggccacagggacatcctagttgctctgtggccccctggtccacattggtggtggacctgggtagacagggggcttttatactggtgccagtgagaaaggacagcaggtaagaccagggtgatggcggtaaagacagagaggtgtgtggatctgagaaatgttcaggaggcaaaatctaccagccttcgtgatgggtcctcattggaggaggggcaggaggaggtgctgagtgactggcttctggtttggggacgatcttgcattcagtctggggcatgttgcgtctaagaaacctttggaggccaggcacgttggctcacgcctgtaatcccaacactttgggaggccgaggcgggcggatcacctgatgtcaggagttcgagaccagcccagccaacacggagaaaccccgtctcta

SEQ ID NO: 20793 - DNA, 1012 bp, Artificial sequence
  DNA replication origin
tccacattggtggtggacctgggtagacagggggcttttatactggtgccagtgagaaaggacagcaggtaagaccagggtgatggcggtaaagacagagaggtgtgtggatctgagaaatgttcaggaggcaaaatctaccagccttcgtgatgggtcctcattggaggaggggcaggaggaggtgctgagtgactggcttctggtttggggacgatcttgcattcagtctggggcatgttgcgtctaagaaacctttggaggccaggcacgttggctcacgcctgtaatcccaacactttgggaggccgaggcgggcggatcacctgatgtcaggagttcgagaccagcccagccaacacggagaaaccccgtctctactaaaaatacaaaaattagcctggcgtggtggcatgtgcctataatcccagctacttgggaggctgaggcaggagaatcacttgaacccgggaggcggaggttgcggtgagctgaggtcatgccactgtgcttcagcctgggcagcacagtgagactccatctcaaaaaaaagaaaaaaagaagcctttggaacagctgagcagaggtgtccagtgggcagctgggtgtatggggtggagctggaggggtcggtgctggagatgtacgtgtgggaagcattgcgtgtgggtgacccattgtggtggcaaccaggcctggctgcccctcatcagattaggtgggtggtgactgtgggtggcagcagggggtgggggatgtgcccacccagcagagagggaggatggcactggcaacagcccacatggttagaagactcatagtctgtggtggcaggctggggagaggctccccgccatgtgtctcaccgggtggtgacaggggaaaccgtcacggggtggagatggtgggtggtggtgaagcaatctccaggtgtgtagatgtaagctctgggctacagccagggcctggcccataggagggagaacccagccgctcatgccagccccctttc

SEQ ID NO: 20794 - DNA, 1668 bp, Artificial sequence
  DNA replication origin
ggcgccgtcccgcagccccttccgtctcccctgcgcgctctcccctcgccgcccctccctctgactcggtttcccctctcccccggctccgcggtcgccctcctcctggactgcttatttcgtcctcggccactgcctctcgggctcgagctttctgcttcagagcaggagagaaacggagcgaaagcagtttctgtctccccggggtctgactcggtcccccgcgctcggttctctgtcccctccccctcccgccattgttcccggcaggaggagtgcgcggcgcaaacttgcgagttcccccagtctttgcccccgcagggccgcggacggaggtggtggcggagttcccgctgcccacaagtctggcccgaccttctggggtgggggcctgggggcaggggccctgggccggagaacccggggccgcctaacggctcggagctcaccgccgggggacaccggcgctgaggcctgggtctcagaaagtgggtgagtgtctggagcggggacatcagggacagattgcagggggaggggcgaggctgagagagtcccccgtccccaggctggaaaggggcgggcagaaacccaggccgcgccttagcccagttagggggtgggtaggggacgcacaggtggagacgccccccactctccccaaagtcgcgcgatctgcaggaagggtacagtgtggggccactggccgggcgctgggtgggttagggcccctgccgtgggcagaacactcgcacctacccgggggaggctgtgtggaggaagggccagaacgccgcgcccaccccggcgcgccccgctgggcggggcggggcggggcgctcgccttgggtcccctcgctctaccttccttcgccctgacccagtctcgggcttccgcctcttcctggagcccggggggagtgggtttctccgccggagagatggaggctggggcaagagcagcgcggaggccaagaacccccaggctcctccaaagcccagagcggctggccaaggccccctcaccgccccactaccctgcacttcctgattggtttctttcaaacaaacttcttgacggggcgggcctgcggggagaagtcaccggggctgcccaccccaactatgtggtcccttggacctccacccctgacggcctgtggagaggggaccaggatctgcggcccgcagatcccagggacgcgggggtcgttttgttgcagagccaggagggggcactgtccgctccttagcctcagccccagacttcgagaaaggagagaaaagatttttcttgttgggttgttaggaaataagactattctccaggcttctgttgtcccatctgtaaaatgggtcgtcttgttcctgaggccccctctgtccccaccatcccaggaggcccctgccatggccgcttctttcccagtcacatgtcgtcaacttcctccgtgcttccaaatttggagtggagggctaaggccgaaagccccttcacccatgtccagctgtcatgacctgccagttctaggactgcgacctattttctgcacagctctgcctccaggccccttgtggcttctccagctcacacccagcctcccaatttcttttgatagccccacctctgtgggaagaagggcctgcccctcttggggtatgggggag

SEQ ID NO: 20795 - DNA, 1535 bp, Artificial sequence
  DNA replication origin
tcggaagcggcggcggggagcagaacttacgggcctcgcgcgtgccggcgctgggctacgtggagctgatgccaggcggaggctccgggctcggacgcctcacatcgcgccgcccgtgccgggccgggcagtgcagggcagggcagggcagggcagggcaggacagggcagggcagggcagggccgggccggctggactgcgcgcggcgccctgcgcggccggggcttaccgagtctggcggcccgcgctggtccctcctctcggttccgcgcacaagccaatggcgcgccgtcccctcccacgcgccgggctgcctcgcccccagggtggccgccggggcgggcgggatgggggttggcggggaaaccaggctcccggctcccccgcgaggctctcccgggggccgcctgcagggggcgcacgcgcgcccgagagaaggcgccgggggaggaagccgcgcggggagaccctggcgtggcccgcgccgcccaggatgactttcctggcaagttctgcagacggtgcccctttcttgggacgatcaacgtagatgggcaaaccacaccatcttaaatagccttgcggtgtctcccgggcccaggccggtgcctgaaatggaagggactgctttggctggcggtgatacccaagtgtgtaataacacagtcacgacaatagtcaccgtttgctgcgcactctctgatgccagacaccatatgctaaaggagttacaagtattaactcatttgattttcacagcaacccataagggcgctgtgcttagtcccattttacaggccatggtcgttaaagtttgagttcactcagccttcaggcttccagcctaggcccacccttctctctccctgcttggtgtgacttggccaaataacatgaccccactgtcactacggccaccttcttcatactccaccctaaaatccagcctcagagatgctgctgtcagttgcgctgtcaggaggctaggatcttatctggggctctaggacgcttgttggcgctacagttgtcaaaccttttgtctctacacatcctatggggggctggggtgaggatgagggttgggggtcatggaggctctctggtggcgtgtcaacctgagagaaccaggctcctacagacaaggccccacccccaaattctgggctccttcaaccccttatggtgggaaaataatgtgctctctcccaccccaacccccaccaccctgtgctctccttagagaaatgcctggatctctttcatctgatctgatggtcacagtgggccaggaaccggggtggggggctgcgggaaaaggaaggcaaggctgatgacatgctccatttcacaagtaaataagacagaaagaggtgagtggctgcctcaggcatctagctaggtgggcattctgactccaggtctcggttctgtctgcaccagttccttaacggttaatagagcaggctctggaaccagatcacctaggttcaaatcctgactctgccttttagtgcctgtgtggccttggaca

SEQ ID NO: 20796 - DNA, 1117 bp, Artificial sequence
  DNA replication origin
agggggtgggggaggctgagagagcaggagaaggaagtgagtcatggtggggaagaggagaaaaggcaggaaggaagaacatgcaggaagaaaagagggagagagggatatgacgggaggaaagaggagaggaggggaaaggagaaggaaagggaggggaggggaggggaggggaggactgaagggaggaagtagagggagcagaaaatgggagggaggaaagaaggaaggaaggagggatggaaggatggaaggaaggaaggaagggagggagggaggaaaagacggaaggagggagggaaggagggaaggaatgaagaaagggagggaaggaatagagggaaggaagggagggaggagggagagaaggaagggaggaaggagagaaggaagggaggaaggagggaaggaagggaggaaggagggaaggaagggaaggaagagaggagggaaggaaggaagggaaagaaggaagggagggaaggaagggagggagatgaggagacactggcagctcagtacctggcagaaggagataaacagagtctggagccaccactgcccttgtccagccaccagcacaggcatgggggcagggaactgggccggctggccttgccaactgcttaacaacgcccttccccaacctgccaccacagtgggatcccgccaacctgccaccctgtctgctgggaacaatagggagctgtctgaagctgtgtcactggctgcctcccccaaaagaaggtgacagcgatgtctccctgccatgggcctcaaagccagctgccagcccttctaagccgtggggacaggaatctacagctgggcctccctctgtaacagctcccccttggaacccctccacacccacctcctccttttatttcctccagccctcagctccctcagcctgatctccccaggcatcccctgacatttggccttgctccccgctgctatctgctcatcatgttggggacaggagatgggaaagggcagtagagacagtgctggggagtcaggacgtggggtttcagtctcgcctttgtcactgtggcacagatggccagccgtctctcatcatctattctcccctcttcctgatgaacgcacc

SEQ ID NO: 20797 - DNA, 975 bp, Artificial sequence
  DNA replication origin
ttaggcccgcgccctgcccggaggggggaacccggctctccaaacccaaagggagagggagcgttttataatccagcccgtggagaaatcgagaaaaaaatagatgaaaaaaagaaaaggttaagagagaactttcgaactgggatacttttttggggtcagaagtaaaagttctcaaattttaataaagtcattgtgaggggggctccctggctctcccggtcgcgtggctgtccatttggaaccaaatagtcggggggagtcgacgcgtttggatttttaaccctttcagggctccgcggctggccccctcccggtcccatttaaccctttgaatgctcagcagtttggagatacaaactgaagttgcgagacgcaggcgtcccgcgaaggctgagggtgaggggcttggggttcgttaaaaatattaactctttatgtggggttgcggttttgtagtcacgaatcgcacatgttcttcaagtcaaaatatgttacagagggagagagattctgagaactggaggggctggtccctggctggcttggaaaagatgtttaagcggcattcacttgctcgattcctcagtttctccatctgtgaaatgggattcgacatcacagagagggggtgaagagggaaagactgggccgggggtggaattgtcacagagtgcttgagtgcttgacatgctttcctgagcgcctggaaaactgacaggttgcgatggggctggaagccttggaggagggcaagggacactgcagggtggcgtaaccaggacaaccattccccaatcaacccctttctcgtggcgtcctctacaagtcctgtggcccaatggcgacgtctctcctaccaagggaggatgctctgtgcaagctccaaaattggggcagtaaaccccagttggtgattcccaggaaggcacctgggcgaggcgctgtccagtgctttccccaaacatccacgaa

SEQ ID NO: 20798 - DNA, 1415 bp, Artificial sequence
  DNA replication origin
ccattgaaaatggcttcggagagcgctcggcagtttgccagcgagcgcgggggccgccggtgcgggggccgggagcggcggctgggggcgggggcggccgggggtctcggcgcgggcgcggggcgggggtccggacggcgccggcgcggggtggggggcggcccgccgtggccgcgaggtgggtgaaccctcggcaggtagctgccgccgccgcgggagccgggggccgccctccgcctccttcctcccagctcgctcgctcctcgccttgttacaatgtagccttttctctccgcaagcggcgcgcccgctgacggacgtggccgccgaccaatgggagtggcggcccgggccgagcgctcggaatgagaacgcggtgacacggacggggcggggcgcggacgccgacgccagagggctcgccgcggccgccggcctagttctcgcggacgccctcggccccgcgccgggggctgctgcggggtgctcggggatgaaggtgggaggcgtcctttgggatgcgacgaagccttctccatcgcggttcgcgattgcccgcgaagcgtggccgagccggagggcatttctggaatgcgttttaagtgtcagttgcggtgtagactcttcgggaaacctctccggagcgtagcctccaccccccactcgcagtccccaaggtactctcctatgcagaaactgcagaaacttagcggccaatgacctctctccggtcaaggccagcgtgctctaggcgagtcgctgcaaagagaataccaatgtcttgggcgatgctggtgaaaaattgctggtgtgtgtctagagcccagttgggagatgggggcttagaaccccccaggctgggctgggatttaggggagaaaaatgtgaaacgtctcctctttcctagacgtttgcttcgtgtggagaaaggctgtgctgtataatttagagtggctgtaaggaaacacacccagccctttgtgcgtggggccaggaggcaatgatgagagattgctcttggtacctggaaaccctataaactttgggggtttggggacagaagaattttctgtggagcatgatgcctgtagcaaccaagctggtccttgcccacatttcctcttgggagggaggaaggttcgggctttcctagggtcattgttggaggtgtagggtcgtagttggggagcagggcacagtctttgcccgccgactctctgaaaggtggacaagcagagttctatagggcacgtgtagaaaccttcccttctgggaatagagcccagacctcttgctgtattcagtttaatggaaaggctttctctctttgaattctacctcctcctcatagtcactgtctgactttggacttcacatcgttgtctttggcctctctgagccttgtgtctccatcc

SEQ ID NO: 20799 - DNA, 1702 bp, Artificial sequence
  DNA replication origin
ggggcgggcgcgggcgggctctccccctctcgccagccttcccggcggggagctccctgcccggcccggcccgcccggccctgcccagcgcccgccccccgcccgccaggcccggcattccttgcgggggcatgtggcttcttgccggccctgggggcacgcagttggctggcggccgggaggggggcgcgcagggagcgggaggaagcgggcgcccgggcggggcggtgggagagggcgccgcggggggtcgctccgggtcaggcggtggacgcattccagggcctcccacggggcccgatgcgcactcggcccggggggtgccagggctgggcgacagcgccgcggaggccgggcgggtgtccccagcctccgagctgccttggtgtggcggcgacgacagggcctgcgctgccacccgtgcggacaccggacacccgctcgctcagccgcggccgcacctgcaccgcctggggcgcctgccactctactgcctcctggctgcgttatgccagggactccccgctgggtgctcgaccgacctcaaagcctgtgggatggccccctgcctcctgtgagggcgcaggaattggggcctggaagatgtcaagcgacttgccgaaggtcatgcagaccacacccgatggctgcttagtaaattggaaactggctgaacccccagattcaagtgtttcaagttggcttcaccatgcagtatcctcagtccagtcctctaccgaacaatcgctgggatcacccttaagtgggttcaggtcccagctcagaagtccagctgccaggtgggagcaaggccctgtggatttgtgaaggatccctgaacacctgctgccctgaggaactctcactgggatgggcagtaccccccaccatacatcctggggtggagcctcagtggttaggtgcctgggcactggacaggcagtgcctgagttcaaatcccactgatgggcggtgtgatcctgggcaggtgttatggaccccactccccttcatatgttgaagccctcagccccagagtatctgtatttgcagatggggctgtgaggaggtgatcaagattaattgaggtcataagggttaggtgcccttataaggagaggaagacacaccagggccctctccaccatgaggacacatccagaaggcagccatccacaaggcggagtgccaccaccaggaaccaataggctggcattctgatcttggacttcctaggctctaaaaccgtgagaaataaatggctgttgtttaagcacccccatctacggtattttgtcatggcagcctgagatgactaatacagcaggttatctaacttctctgtgttctcatttcttcatctagaaaatgtggctaataatagattctatcacagacatagctgtattccgtggacacagacgagtgtggaggggccagtctctgcacatcccactaaagaatgctgatcaggaagatgagtgctagtgacatcatcaaggggtggcttcaaattctctccattggctgggatttattttttttaagtcagtcatttggaaactctgacgctttattggaacggactgctgaggactgctttgcatggggctcccttgctctggcccctctgccctccacaagccccacctgtatgccattctccatcctgccatggggcctgtgaacttgctgagtccta

SEQ ID NO: 20800 - DNA, 1689 bp, Artificial sequence
  DNA replication origin
tctctccactagtgtccttgaccacctccatgccctgtgggatggtgagcgccgcccggtctgggatgcccacgggcaccggtgtgtcagacacaaacaccggggggccatggtttgggcattcatccacgaagtactcctggcaggactcacagactggagggatggaaagagaagggagggcctcagttgttgcagggaggtaagacccccatgggggaggtagaggggctgacaggaggcccactcatggacagccagctgcaggccccagggtcatcggtagcaataacccatactctccctgggggctccaagaacaggcctgcctacgtcaaggaggccagcagctacctttgtctcaagttttaaaaaactggaagaaagagcatggctttggagtccaagtgcaactgtacccctttgggccagaggactcgaggcgtgggatacttaaccctcaccaagactcagtgtgctatctggaaaatggggctaacaatagccatttggatggctaatgatgatgacgaaccaaggcctggacctgggcctggtatattgcaggtgaggacctatcttagtagcattgttgtgaattccctagccaggaatggggcgatgggggtgaagggaggagcagcccagagccccaagctccacttacaccagaagtccacttgctggaagcttttgggcacgatgaggtcgcgcttccccttcagtttcttgggctcaacttccatggccgaggagtccggtctcctagagctggccagggcagaggcccgcaaagaaagcaaagaagtcatcagagagtgagagcccagtggggacaaaagctggggacctggccaggagaccgagaagatgtggggtgggcagaggagtcccagccagcctgctgttcagtgcaggaggtggtggaaaaactggaggattgagatgcgagcacagacctccctaggccactgcttggatttttctagagcctgcgcccaggagctgccgggagcagggttagggaaggtgggcaaggagtgagaacgtttcccagggttcccaaccaaccgagcccaggcacctcccactcccacttctccctctccagttcccacacaggggcctcaccagggctggccatactcctggtctcggagtggtgagcagacctccgtcttcaccaccgtcaccatatcccccacggctgcattggtctgggccaagcactccttcatgttctcggtcattctgtcctgggacgcaggaggtgggaccagcacaggaagaggatcaaagaaacaggggaagaggagtgagcggcggagagggcaagtgggggtctcgcggagtctggttaccctccctgccatccccagaggaagcacttgagaacacagacaacaaaaacagctgtagcccggccaagaggaaatgccgtttctatcccgggctggtcctggggacgactggagccaccagccccatggggtcaggagcctagagcagctcaggccaggaggccgcgctgggaagcatagcctggacccctagaccaaagggcaaagggcaggaggatcccacatgagcctgggcgcaaaactgcaaaggggagaagggagggttcacaactcaagcccaacttgggccaaggggtagtgggcagaccgaacgggccctcagcgcctg

SEQ ID NO: 20801 - DNA, 1674 bp, Artificial sequence
  DNA replication origin
cctttggtggcctcattacattcagtctcagggagatggaggggtgagcggagcaggatgcagggaacaggctttactggatgctgacccccccattttttcttatcacggggtggaatcctcttaagacttaggaaaacactgattcacaggaagccagcagacccgggttcaagtcctgcttctgaattgagctcagggccaccttggttttcagagcttactttctgcattgcaaggaagttgaactaaatggtctccatgttcttttccagtcctaaacatctgactctgtgaactgccacctgtcaggagccccagccaaacaggaagcaagtggatcacaatggcagggggcccgggaagggaaggtgcaagtgagtctttgcaaagcaccttcccatgggctgagccacggctgcttccctggggcccctcctgcctggctcccaccactcacgagccggtcaggcagacggcctctagtggggactgcagctggcggggcacgggggagatgtgcagaagtggaaaggaagggttgcagtccctgcggaggcctttagtgctcccccttctgctgagccccaactagaactccagccccaagggacacccgcctcggccgctggggccctggcttcaaagtgcatgtgagacacaggaagtagagaggaaaggcagggacaagtacagagggagaagaggggtggggagcgggtggcggagcagccaggaggatggagagggagctgagaggcagcacacagaaaagtgggggcaggcagcgtggctcaggcaggggagtaataatagaggaacaaagcagtcaggaccagacacagaaaggaactgatctttccatggcccggcccgggccttcacagcttggccgcctcgtctccagccccctcccccgcgctgctacacttgggctttcctggcttctcactgttcctggaacgtgccaagcgccttcctgatgcggggcctcgtacatgctgttctctgcctgcgcgcctcccctccccttctccgcgccccacgctgctgcctggcctggttaactcttactcttcacatcctagtccgctggacttcttcagggagccctccccagtccccagtggagccagttttacccactccttaactctcagacagagctgctacataacctgcagggtcaaatgcaaaatgaaaacgtggggcccctggctcaaaaactatgaagaatgtccagatggcgacagcagagcctgaaaccccgcggcccctgtgactgttcaggttgcatgctcatgaagtcagccctgctctcgggacctcctggactcctgtgtcctccatcccttcgtttccagtttactcgtgcaattatttaacgttggtttattcctaggagtccagggtctccccaagagcagggcctgcgtggggtttacacacagctgtcttcccagctcctagcacggctctggcacggagatgctcagtaaatattcgagaatgaatgcaaaaagggatggagaggagaagagtgggagaaggaggggaggatggaaagagtgggctggacagagagggacaggagagaaccagagggaaagtcggtgggagactgtggactgtaagctggggggcaggcagccggctgggtggcgggggggactg

SEQ ID NO: 20802 - DNA, 812 bp, Artificial sequence
  DNA replication origin
aggaacctgaaggactcttccccaccccctagcagctctgagctccagccagtcagagggggttggtatggcctcccccaagatgtctctgcagacgtccctggagacaggagggcttttatcccatgcatttgctcatggccagagccccttcgtgcaggaaatagcccgtgctcccattgtaaagagcagcagaaggggtctggggaagcagtttggaaggatttccctgcataggctgtgacctccaggatgcatttccaaagtacagaatgcagaatgttctctggagaaccaggaggcaaagagtcctgctagagtgatttgaggaaggatggccctggggcaggggcatgacttaaaggacctcctaaaggccctctagatcccttatagactgtatggttccaggagtggcactaaaatgctgtgactccatcttcctttttccaatcaataattcaaaagctcagaggacccagttgtgtggggcctgtgtcagtcactgtacagtgagagtggaaaggaaatggctgctgtccttgaggcacttataatccaagaacagtgacattgacagtggctaaataggagccggctgcacagcagaatgtgggacttgggacgatctggaaaaggggaatagtgggctttccactggccaggtgttgggagtccttctccacaagtcgtggtcggccgcctctcaaccttctttcctgcccaacacacttgaggaacagccactcttctgcctttcagtgatgtctctccaggcaccgccccctccccttcctagagagaaccactgg

SEQ ID NO: 20803 - DNA, 1142 bp, Artificial sequence
  DNA replication origin
gccggttgacgtggctgcgggtccagcctcctctgacgtcctcgcagccgtcctccctccctccgtccccgcccctctggcggcgggagagctgctggctcgcccggatcccgggagctgcctggaggcgggcccggcccggggaaggtgagcggctgcgggacccagcccctcgccgggagcgggcaccatggtgctgtcggtgcctgtgatcgcgctgggcgccacgctgggcacagccaccagcatcctcgcgttgtgcggggtcacctgcctgtgtcggcacatgcaccccaagaaggggctgctgccgcgggaccaggaccccgacctggagaaggcgaagcccagcttgctcgggtctgcacaacaggtgagcgggggcggcgcgcaggcccttcccgggcaaggcggggttgccgggcagctgcagagggggaactggggtgggaggcggtcgtggatctttgcgcgacaaagcttggcggggaggggacagcagacgcgttggaggacaggtcaaggagtcaaaaaggtagggggatgggggaggctaggggatgggggagacgagacctgaaggagaattagggagcggcgagcttgtggggactgagagaagaatgggggccagcagcgagacctaaagggaggggacaggaaaggggacctggataagaattagggctgggaagggtaagaggagagggaggctgggaggggaatcgccagggttagggaagaccctgagaggtaccagagaatgaggagtttgcagaattgggaagaagactggggtctgtgagagggagatgggtggtggttgtggagccagggtagggcaagtcctgccagagctgagaagaggtaatgcctgcaaagccagaggggaggtggccgcggtcccgcaggagctgggaagctagctagcggggtctagagagctgaatccgggaggaacctgaaggactcttccccaccccctagcagctctgagctccagccagtcagagggggttggtatggcctcccccaagatgtctctgcagacgtccctggagacaggagggcttttatcccatgcatttgctcatggccagagccccttcgtgcaggaaatagcccgtgctcccattgtaaag

SEQ ID NO: 20804 - DNA, 1068 bp, Artificial sequence
  DNA replication origin
taaagagctgttattcatacaggaggcaccgttgccaagtgacaggctggggctggtcgtggcccgggcctggggagcagaagttggaggccagggagggtctccgccactgggtacctccctgcccactgcccgccaccaggcctgagctgtggagccaggaaggtcaggtgtctgagaggctctcctagtgttcccagtttaggggtgggagctccagagaggggcactcctaaggcaggaggtgggtggggattagggagaaggccttcctggagctcagccaggtggagagctgggggtcagggtggacgggcagctaatatggagattgagggagtggcagagggacagatgggaacaaagatggaaggaggagtcgcagggaggaagggacagctgctgagcatggctgggtgccaggccagggcgctctgggccctcggcctcattcgcccagcaggtcagtcttcagaggcagcaactgagatgaacccttcccctgaacctcactttccccacgtgtggagtaaggggccaagtgaggtgaacaagtgaaggaagagagagaggaaaggggatggcgatgagggggtgggcagaggggcccccagagagaagggctgcagttgctaacaagtcgtccctgcagcagccaagcacggtcctcaagggagaggggtttgggcaggagagacttccagggaggcgagggaattctgcacatgcttttccagtcaggaagtgggggagggaggtgctgagtcccccagtggcaattttggcagaatgttcctgatgttctgcagggaaagcagagtccttggggtgtgggagcagctgttggtgggagttgggcctcaggttggggagggggtggggcacacatctcccatctgggaaggcacttgggggctgggccaagaaggataacctggttacaggggctgtgtgtgtgtgtgtgtgtatgtgagtgtgtgtgtgtatgtgactgtgtgtatgtgtgtaggtatgtatgtgtgtgtatgttcatgttttacaaacccaggagtagatttgctaccccat

SEQ ID NO: 20805 - DNA, 918 bp, Artificial sequence
  DNA replication origin
ccgagcgactgtgcgaggagagccccaccttcgcctacaacctctcccgcaagacccacatcctcatcctggccaccacgcgcagtggctcctccttcgtgggccagctcttcaaccagcacctggacgtcttctacctgtttgagcccctctaccacgtccagaacacgctcatcccccgcttcacccagggcaagagcccggccgaccggcgggtcatgctaggcgccagccgcgacctcctgcggagcctctacgactgcgacctctacttcctggagaactacatcaagccgccgccggtcaaccacaccaccgacaggatcttccgccgcggggccagccgggtcctctgctcccggcctgtgtgcgaccctccggggccagccgacctggtcctggaggagggggactgtgtgcgcaagtgcgggctactcaacctgaccgtggcggccgaggcgtgccgcgagcgcagccacgtggccatcaagacggtgcgcgtgcccgaggtgaacgacctgcgcgccctggtggaagacccgcgattaaacctcaaggtcatccagctggtccgagacccccgcggcattctggcttcgcgcagcgagaccttccgcgacacgtaccggctctggcggctctggtacggcaccgggaggaaaccctacaacctggacgtgacgcagctgaccacggtgtgcgaggacttctccaactccgtgtccaccggcctcatgcggcccccgtggctcaagggcaagtacatgttggtgcgctacgaggacctggctcggaaccctatgaagaagaccgaggagatctacgggttcctgggcatcccgctggacagccacgtggcccgctggatccagaacaacacgcggggcgaccccaccctgggcaagcacaaatacggca

SEQ ID NO: 20806 - DNA, 1596 bp, Artificial sequence
  DNA replication origin
ttcatagggttccgagccaggtcctcgtagcgcaccaacatgtacttgcccttgagccacgggggccgcatgaggccggtggacacggagttggagaagtcctcgcacaccgtggtcagctgcgtcacgtccaggttgtagggtttcctcccggtgccgtaccagagccgccagagccggtacgtgtcgcggaaggtctcgctgcgcgaagccagaatgccgcgggggtctcggaccagctggatgaccttgaggtttaatcgcgggtcttccaccagggcgcgcaggtcgttcacctcgggcacgcgcaccgtcttgatggccacgtggctgcgctcgcggcacgcctcggccgccacggtcaggttgagtagcccgcacttgcgcacacagtccccctcctccaggaccaggtcggctggccccggagggtcgcacacaggccgggagcagaggacccggctggccccgcggcggaagatcctgtcggtggtgtggttgaccggcggcggcttgatgtagttctccaggaagtagaggtcgcagtcgtagaggctccgcaggaggtcgcggctggcgcctagcatgacccgccggtcggccgggctcttgccctgggtgaagcgggggatgagcgtgttctggacgtggtagaggggctcaaacaggtagaagacgtccaggtgctggttgaagagctggcccacgaaggaggagccactgcgcgtggtggccaggatgaggatgtgggtcttgcgggagaggttgtaggcgaaggtggggctctcctcgcacagtcgctcggccagcccggcctctgccagcccggggcaggtgtgaaaggacttggcggtgaaggtgcggatggccgtgtactggatggcaatggaggccagggcaaggaggaggacggccttccaggaacattgcatggctgggcaccttcatggggctgcttctccaaggggtgaggtctgtgggcaaaggcggccagcggtcaggtgcctccacggcgggggcactggcttgtcccttggaagagccggtctccaaggggcccagggaaaggcccggctcctgtccagtgctcaccacacaccctgaagacctaagcagcttctacactagactaccgttctctgggggactcctgggagctttggggagctgaacaaacattccttgcaccccaggatttaacctgcggacagctgcggaagcctcttatcctgagctctgagttccttagaggggcctcacggggcaagagcctgactccccctactcccacactgaggaaatgacgagggcctgcctcaaacactgcccctcctcactgccagcgtctcccacccccacgagctggcgcccagttctccaggtggtcctctttcctctgtcctctgcccatccctaggggaaagaagagtccctatcagatgcctccatctgaccccaatcccctgagcatgaaggacccctgcagaccatggtcggtgagctgccagcacggccaggcaaggtggacaactgtgtcaagccccttccaactcatggatgcaggtgaccacttactccagatgtagacttctgggg

SEQ ID NO: 20807 - DNA, 2105 bp, Artificial sequence
  DNA replication origin
cctccggcgcccggggctgcggcgctccgggtcccggcccctgtcccggcatctctcgggtccctgagccccggccccgggtcccgcgtccggccggagagaacgcactcagctgctcgagccgccccgggctcgcgcccccgggccatgaagaggggcccgtgaggcgcgcgcggagtcggaggaagaggagggaggagggaggccgaggaggagggcgcgggaggcggaggatgccgccgcggctgctgccgccgccgccacccgcgggtccccggcgaccctgactccagacccgaggatggagccggcgctgggcgctgcagctgctcccggcgcgtccccgaccaggtattggccgggccccgcgggctccggggcgggcgggagcggacactccgccgcagcagccgggaggggcgcgggcgcggtgggagacgcccctccgctcggggacagcagctaccggcggtgagcggaggggtggcggcggcgaggaacggcggcgtgttgggcgcaggaaggggctgccggggctggtggccggtgagcgccgcgatcacctcagccctccctgcccccattcgaggagggcagcaaacttgagacgcgcggtggcccccgaggcgcttggctcccctccgctgcggagcgcactcaggggctgctccgggctcaccgtcccacgacccgcctggctcgggtctgcggaggcgccttgagaccctgaggtccccgcgcccgcaccaactttccaaacccagctgcacccggaggcgggggcgccgctccctgcttcctgctcccagccctggcccggcctccgcacccagaccgctgcgatgagctgggcccctgtggggccggagccgccggatggtgcagagcccaccacggaaagccggaacaaccctcccgctcttctctgggtaggacccggggatcagcccctcccaggctccagggacccagtgctggctttcgcggtaacagcccagagtaaccctagctgggatgctgggcgttaaaaggccaggctgcctgaggaaggtaagacccgggggtcgtcctggagtggcaccttggcctgatttcaggtgtgccccctcccccaccccgggcctgccctttcacaggactgccttcctcagctctggggccggcttcctcttggtggacttaaaactgctcttcggcagcggactccctaggaagggccactcctagggtccaggtgcctgaagacgggcttgggccggccattgacagggagctggaggctggggcaggggaggtggctgtccagtcaaggacagaaattcagtccagcaacttctggaggggtgggaggagctgggggcaggcttgggcgcaggagtcaggcaccctggctgggaggaagctgctttgaccagcacagggacgtcagaggcaagcaggtgggaacgagtgggccaggtgtctacctccagaggttcctcagccccttgcagtggggcctgctgtctcaggcagagaccttacctgggcaggcagttcccaggctcctgtcctcagcagtggggacacttccaggcatcatgatgaccctgtttctttttcaaagtgctttcatcgtcatgactcacacatcacattcaccagggaggtatcaggcttccaacctattcaattcccctccctaccgggtctttagggagctgctggggaaaggaatgggtggatttgcccttgagccttgaacccctgcaggaggccaggagcctggcatggcacctttgattttcctgttgccagtccctcatcctggcggtgagcagccctaggccaggatgcttcacagtgatggggtggggaggggaggggcaccagggagagcaagtctctgctaatcatcccccaaactctgctgggtcttcaaaatcatggccaggtgccacccccagcccccttcactcaacacccggcttccccatctcaaagcagaaacgcattttccctaaaatccaaatctccctctttgctgagtagttgcaatgcttttggccaggggtttcctccccaacatccaaagtcaagcttccctctgtcctggcccctgagcc

SEQ ID NO: 20808 - DNA, 1774 bp, Artificial sequence
  DNA replication origin
tcctctctacccgaaatacaccagaatttgaaaaatgaggcgctggatctggtagtgcaagatagagaaagctttctctaaaccctgactattctcgtcagcctgaaaacttggggagggattaactctgggtgaaaaggaaggttctgatggctcagcccaaggctattagagcttggttttttatagagggacagtcacgatttggaaacatgaagtcttagcttttggaaggtcagcaccactcttgttaggcatctcagtacgctgccactccctgggtgggggtggggagggggaaggcaggtggagaaacagacttggtagccttggagtcaggactgaggactgactctgccatcccaggtgctgtggctacaggaatgcgcactggaaggtgctgttagcccctccagcttgatgggggtggagatgggggagaggagtttatagttatgagtttgcaattgtgaccaagataaatgaccatttggtctagtgggacccttggggcaagggccttcataccatctgctctgggtggagagagggagaccttcttgatgacccgagagcccagtcctccagggaagtgcagctgtcatgttctcctcttggcgagtgagtgaatgtttgttcctggctaccctgaacgcaacaatgtgcaattattaagtactcacccccttgccagacactgctgaatgctctacacacattaccatccagtgttcacaacacccctacagggtgaggatcagtacctctgtcttctggatgaggaaactgagccgcagagaggctgatcactcacacaaagtcacccagcaaacacacagcaggttcctctgacccaggaaactgctgtgctaaccattctgctgtgcttcactgtgtgggatggaggcagcagctgcttgcccatacatcggggacgaggctttcccagaatgcctggagttttcaagccatccactgctctctgcgccccagtccaggagtgatggagagctatagtcgggaatcagagattccaggtggagatgaaggctgactgttcctctgcttcagaaataaccatttggtcagaactgaggagcatcagaggttcagccagacaaagcaccttcctagtctccagatgaggaaacaggccactggggtgggcagcctcagtcatgtcagatgtggtggcagagctgggactcctggccgtcctctccagcccaggggccactgatcacatgatattgctctgctcatgcaccctgcttctcctccactccactctgagaggttcatcaaccagtccctggtgcccatgaaggccaggcctgtggaagatgctcagtcaatatttgtgcagaggatacaggcccaaggtgctcggctggccagctctgtccccatccctcatccataaaagcagtggtggctccagattgccacctagaaagccaggggcagtctggtaggaagaaggtgggcagtgtggaggagcggcctagaagacggtcagccagcaaacccactctaaggtcccattaagacaccccctgaccctgcccaagagggacaactgcagcggggacaaatgattcatccccacacttgagaagcagaggggcggggaaggaggaaaggctaggggtgtgtgtcagggtattgcacacagagatggttggcttcagttctgggttctgaagtccctctgtgccgctggctgggcaagaggtaaaggacagctgggccaggggccaggctgggactccag

SEQ ID NO: 20809 - DNA, 883 bp, Artificial sequence
  DNA replication origin
ggagggaggtgggggggtcagccccccgcccggccagccgccccgtccgggaggtgaggggcgcctctgcccggccgcccctactgggaagtgaggagcccctctgcccggccagccgccccgcccgggagagaggtgggggtgtcagccccccgcccggccagccgccccgtccgggagggaggtggtgggggtcagcccccgcacccggccagccgccccgtccgggaggtgaggggcgcctctgcccggccgcccctactgggaagtgaggagcccctctgcccggccagccgccccgtccgggagggaggttggggggtcagccccccgcccggccagccgccccgtccgggagggaggtggggggggtcagcccccctgcccggccagccgccccgtccgggaggtgaggggcgcctctgcccggccgcccctactgggaagtgaggagcccctctgcccggccaccaccccgtctgggaggtgtgcccaacagctcattgagaacgggccaggatgacaatggcggctttgtggaatagaaaggcgggaaaggtggggaaaagattgagaaatcggatggttgccgtgtctgtgtagaaagaagtagacatgggagacttttcattttgttctgcactaagaaaaattcctctgccttgggttcctgttgatctgtgaccttacccccaaccctgtgctctctgaaacatgtgctgtgtccactcagggttaaatggattaagggcggtgcaagatgtgctttgttaaacagatgcttgaaggcagcatgctcgttaagagtcatcaccaatccctaatctcaagtaatcagggacacaaacactgcggaaggccgcagggtcctctgcctaggaaa

SEQ ID NO: 20810 - DNA, 1023 bp, Artificial sequence
  DNA replication origin
tgaccccccccacctccctcccggacggggcggctggccgggcggggggctgaccccccaacctccctcccggacggggcggctggccgggcagaggggctcctcacttcccagtaggggcggccgggcagaggcgcccctcacctcccggacggggcggctggccgggtgcgggggctgacccccaccacctccctcccggacggggcggctggccgggcggggggctgacacccccacctctctcccgggcggggcggctggccgggcagaggggctcctcacttcccagtaggggcggccgggcagaggcgcccctcacctcccggacggggcggctggccgggcggggggctgacccccccacctccctcccggacggcacggctggccaggcggggggctgacccccccacctccctcccggatggggcggctggccgggcgggaggctgaccccccccccacctccctgccggacggggtggctgccgggcggagacgctcctcacttcccagatggggtggctgccgggcggagaggctcctcccttctcagacggggcagctgccgggcggaggggctcctcacttctcagacggggtggttgccagacagagggtctcctcacttctcagacggggcggccgggcagagacgctcctcacctcccagacggggtctcggccgggcagaggcgctcctcacatcccagatggggcagcggggcagaggcgctccccacatctcagacgatgggcggccgggcagagacgctcctcacttcctagatgtgatggcggctgggaagaggcgctcctcacttcctagatgggatggcggccgggcggagacgctcctcactttccagactgggcagccaggcagaggggctcctcacatcccagacgatgggcggccaggcagaaacactcctcacttcccagacggggtggcagccgggcagaggctgcaatctcggcactttgggaggccaaggcaggcggctgctccttgccctc

SEQ ID NO: 20811 - DNA, 1099 bp, Artificial sequence
  DNA replication origin
gtctccccggctgcctggtgagtggcagaccacaggctagacttcccaggccccggccctggaaggggcggggaaccctccccctcactgccagctggaagaatccgagcggtccccgcacgcacttctggaagtgcaagccggtagcgcggcgggccagggatacagccaagtcccgggacgtgccagctgcggtaactgaagccgggtcccgggcgggcgggggtaccagggacaggagtagccttggaaagaggagagggcctcctcccacgaccgtccggatcaccgcctctccgccggcacccccggggcccatgccgcgaacaggccggcgaggctggcaaggtgcccgggcccggggcggaaagcaggaagtcgatcccgcgggcgcggcccagggtgcggcgctgcagatgcagcacggggtcgcggggcgggcgcccagtgcaccggaggaggtgagcgccaggtcgccttcgcggcccggggacacaggcagggacgcgggagctgatgcggctggaccggccggggaaacagtattttctggaaggggtaagagatgctgtcttgagcctttggaatctcggatccgggccgcccagaggacctcgacaggagcacagggaggacaaactgaagtccgagagaggcggcgtggcctccggcctcggggagcgctgccgggggtctcgggcttgggagagggcctgggggcggtgaaaatggggggaaaggaggggaccacaacattgttatggaagagtgagctcggattggcagagggacgcggggctgcaacgcgagtctccggaggtggaggggtccaggctgatgtagcgccgcccgggtcctgggtcggggttccgggaagtggacctgcgagccaagcctagccaagtcgggggacggaggctccggggcggacggagctgagggtgggcaggcgaggttgatggagcccttccaggaagcagggcgaggctcaagcacccagaaaaacctgtggctgccgaggtcccccgccagcagcgggcagcggagcgcaggggcggggctggggactggcgaactccgcctctctggggctgtcgct

SEQ ID NO: 20812 - DNA, 780 bp, Artificial sequence
  DNA replication origin
caagctggggaagtccacggcaccagggcagcaggcggccagagcgctgaggcctttgcacagcagcgtggtcaccaggcactggtagaaggtgacgaagatgggggtgtccagccgcagggaggggctgtccagcaggtacttattaaggaacaccatggagatggaggtgacccagtagagggagaccaccagcgcgatctgcaatgcccgcagcagaaagggcttctccccgttggcctctgcctctgcagaggggtctgaggccccggtcagcgccatgtgcaggatcctggaccgcttcagaggggccctattcatggtagcagaggagctgggtcaccccgcggccagaactctgattccctggagtccagggcagtgagctcacttgtgctctccgcaaggaagccgcagccctccattgtcacatgtgggctggcctaaaggcctccccattgtcctcatggattgagaagttctgctttggggtgagcccagttgtgctgctccacaacctactcccaccccgagggggctctgagacaagacacagggcaagggagaggaataggataaggcggtgaggccaggacagagaagacctgtgaggggagaagaggctggggcctaacagggaggggtcgcagagagaagggaggggagaggaatggcagggcggggcaggagtaggtacgcggggcgaaggtgcaggaaaaggacgcgtggcagagtgggaagaggtgccgagagggcgtcatgggcggctgtgggagggag

SEQ ID NO: 20813 - DNA, 934 bp, Artificial sequence
  DNA replication origin
ttccggcgcctctgggccaatcgccaggtggaaggcactcagccaatggcagaggggctctggggccctgtgggcggggactaagggtggagttgcggcgtcataggtcactgggcgggctatgggcggggtccacgtcgcctaccggggcggagcgggggtggctggagcagtctggacagtcatggcggcgactgtggcgacggcggcagctgtggccccggcgccagcgcccggcacggacagcgcctcttcggtgcactggttccgcaaagggctgcgactccacgacaacccggcgttgctggcggccgtgcgcggggcgcgctgcgtgcgctgcgtttacattctcgacccgtggttcgcggcctcctcctcagtcgggatcaaccgatggaggtgaggggacccggggctgggtggcggggacgcagccaggaccctgaccctggggtgaccggcgaacagcacgatccccccaaccccgccacggctggaaggccagaggggagaagccgagaccggggaagtaattcgtcatggtcctaacgcgccggtgggccagggttcagcctctgacaaagcgcgttcgcactgttacccctttgagcctcacaactgcctgtggaacggagatcatgatccccgttgtacagatgagacccttgagccctggagacccaaagtcgacctgcccaaggacttgtagccagtgagtggcagaacaggggctcctggtctagggctcttacggtctactcagggaggggcggaagggagataacgtagtgtgagggcgggacgggtttttgctcgcattcttcaagagcccgttgctgggctcggggagatcactccgaagcctctggctcgtttgaatccgccctaccacccatcctggctaccctgcacccagaccgtcctgcctctaggg

SEQ ID NO: 20814 - DNA, 1349 bp, Artificial sequence
  DNA replication origin
taaggatgttccctagctgaggcaggtctacattctaaggaacgattagtagccatgatggcaagactgctttcctgagaggaaaagccaggcaccatggcagcagatgattaccgtgagggcccagtgaaaggggcctgatcacgaaagctgagaaagtagtggccacccctctgggccccagggacagggaaaagagaagcagccatgacctttggctctaggtattgggatattctcagggctggtggtcggaggttgccttctgcacggaaggtgcctccagctccttgctaggtgccgcactgaaggaaaggggccagcatgactggtcggcagtccagatttgcaaataggactccacgagttgtggcacagtttgctctgcacgttttctgccctgtggacagggtctctagggttctctcgagagaccagagaagccaatgaggtttgaccagaggctctacgacccagcaaagctaaggccctagccttggcagtccgtactctgaaataactcaatcgggaaactcagggacttgaaggcctggaagcccaggaataacaccctctcgagggagagacaatgaggaagaagccatggccaaagcctagcagggatggaggtgccagagggaacagaaacaaccaaaatgatcccaagaagtcaacagtgggaggagagggaaaggcgccaagtcttagaatgtgtgtctgtgggtgcagaagaggggtgctctgcaggaaatgcagttgaggcgctaagaaggagaatgctgggaaggtcctggcgagagaccgagaagcctggagggctcaattcaccacgagtagctgtttggggctgaagagagatttgggtcaatctttagagaagacagcctctagggagagtctttgggagggtcccctcaaggtaaagggacaggactggggtgagggctggatcccagcgcaggaggtggagtgtttctgggtctcaggcaacacatttgtgttacgttacattctcacaacaaccatgagagggactgctattgtcccatttcacagataagaagaccaaaccttagtgctctgaagtcactaatgcaaggccccactgcccagtcacttgtggagccagtgaattcacaccacctgactccaaacctgtacactttaagagcccactgacatcctctcctttctctgccttcctccacgaccctccttttccgcctgccttcttggtctctgctgcggggggccaacctggaccttggggtccagtgtcctgccattagtcatctgatacccgggcactaagcccaaccggagggacaaagcccacaccggccacgggg

SEQ ID NO: 20815 - DNA, 1366 bp, Artificial sequence
  DNA replication origin
agggcggggctgaaccaagcccagggccgcgggggccgtggcttcagcaccgcggagagcgccatctccgggggcggggctggcggggtgggggcggggcctgggcggggcgcgcgagaccccggccgggtcccgggggcgcgcgcggggcgctctcgccagtcccgcgggccgtgcgcggtgctgtgccgcgccctgccagacacaggtgcgcccgcctagcccgaactccgcggcggcggctgccctctcgccgcgcctccgcctccttcgcagccgccgcctcctccgcgccgcgctccgcccggatggccagggctgtgcccgagaatggcggagcgagaaagcggcggcctgggagggggggccgcgtccccgcccgccgcctccccgttcctggggctgcacatcgcttcgcctcccaatttcaggtgagagtccccggccgccgcgcgcctcgcccttcagcggggactgatccgcattggctgccctgcccgccccccaccccagaacctcgggaacccgggaacgaaagggctgcgtgggagtggggtctcttcccgggacagagcccccctcagaagccccgccagcctcaagtccggactggtagccgttgcatgttcacgaggctgttccctccgccattcctggtcctaggctgggaggtctgcgctggaattggaggagggggctcggaggcctccttctccccaacctccgggctgcggcagggtctggggtcggggttgcgatcccggagcgggcaggcaggctgcatcttagcctgtgaatagagctgggaacagcctggaggggcgcgggtcgcagtttcctggggcaacgacattgttggtgctgggaggaggatgtttgagcccctccccgagccctgcctggccagatgggcctacctgccaggcctggcgtggccgggcccctctctggattgggcagcaccgacctaggcaggtgtgtctctcagggcaggcgctgaaggctcagcctcaaccaggggaatcctaggcccggctgcgggaagggaagtcggctcggctctggagtagccagggccagcgagggtgtcgaggggatccctgctggggtaaatacccagaaccctgacctgagctcctattccaccacccccaccccccaatctggtgttaggcccgatgcatttcagagaagtgaggggtgagtgttgtgtggaggaggaatagatgtacctcccccataattctgaaccctagttggtggggaggaagaggccgaagtcactgctcccggcctagagagggaggcttagacataccccattgtttccccatctcgagaactggcgccttcccctctcctgggg

SEQ ID NO: 20816 - DNA, 1035 bp, Artificial sequence
  DNA replication origin
ggccagcgagggtgtcgaggggatccctgctggggtaaatacccagaaccctgacctgagctcctattccaccacccccaccccccaatctggtgttaggcccgatgcatttcagagaagtgaggggtgagtgttgtgtggaggaggaatagatgtacctcccccataattctgaaccctagttggtggggaggaagaggccgaagtcactgctcccggcctagagagggaggcttagacataccccattgtttccccatctcgagaactggcgccttcccctctcctggggcaccaccccagccaggctccagctgggctgtggtgccagcccctcctgggagcaaggggtcactggctcccaggtcctcaggtgggcagagacccctggggatctctaatagcatcatcaaactcagaaaccttccctgaggccctgagctgagctggaaggaccagagggggccagatggaggaggccaggcctgaaggctccagggctgcagctctctgataatgccttagactgaggtctgagactccacctggcatggtgcatgaggcctccatgcaaatactgcctccccacctggaggcctctgcagtggaagcacatggggcttagagggacctgggttcaaatcctagctccactactttctaactgcatgacccaggcaggtttttgtcctctctgggtgccatctgttaagtgggctaattaatattgattcttgcctggaaaggagaaaaagcacatcaggtcagtgttcaacaagtgtcagcccccacactagcagacaacactacggctcgctgctgtccagagtgtcttcccaaggcccctcctttaaccctcataactgccccaagagagggtagtgacctgcccattttatagatgaggtgattgagattaacaaaggcagggtggctcatctggagactacaaaagagtcagagactaaggctacactgggacccaggtctgtgcgtgtttagtccactctacgtcccagccctgcctctggccca

SEQ ID NO: 20817 - DNA, 1530 bp, Artificial sequence
  DNA replication origin
gtatactgcttggcacgtcttgagtgtacaatcagaatttcatttggtattattattattattactgctgtcggggactaagacaggaagtagctccttcaactgcccacgagatgggagaggccaggaagtcttgagacctagggcagtaacaattaggaccagacttaagggagactcagggctacccctgaatccttttgggagcagccctggcagagggcctgaggcagacagggtggagtctggtggaatctgcagtgctttagggcaggaagaaacagccaaggcacccctggaatagctcctgtggctgctggctgctattacaccagacagatggcaccacgcggcctcccagaccctctctggcctatagtcctaaaggcccccactgaggggtttgcccagcattgctgctggtttgggccccttggctttgtcatagggaagatggctctctcctgtccctaaagatctgaatgctgccaggaggtccccagcacctgggtaactggggtcagatggggatcccaactatgtcttttcagaacaggaagaaggggccggcttgccaggaaatggaggacagagcacagggctaggttttagagcccagagctcctctgagcccccaagagggcgggtagccagatacggtgtcaggagagtggttaccataggagcgtgaggtgtgccttggggagggagtacctgtctctgtgttgacctcctgctactcccagagactcagtaagctctgcaagaggaaaccaaggggtgaggataatcccctagtccccagtaccccaaccttccactctctggccaggccaggaagaggcagaggcctctagatttggggaatggtctcagagccctgacttagcttctcagaggtcaggcacctgttctggactctcaccctgccctctcccccagctgcaccagcagagccttggagagggttgcctccgagctaggcaggggccccaggcactactggccagaggtgtgcccctaaggggcctcagacaagctccagcgggcttcacacacgttccagtgaatactcagctctctcagaggctgggaggcagtagtgttatccccactcaactgatgagggggcctgaaggatcaggggatctgtccaaggtgccagggagttggcggcagaactggagctagatggggctctgcatcctcaaggcaggctcgtggaggaccgatctagggctggaggggccccgggccagctggcttagggcgcggctgccaccgccttggttcctggcccccgctcgcccctccccctcggcgtctccttcccatccctctcaggtctccgccgttccttgcttggctgagcctcagtttttccagttttcctcaagaccccttcaaatactatttccccaacccccatcccttgcccaccccaccccgaactccttggcgaccactgagtccccatagcaacagcggtgacttcactctgggctcggcttacaaccccggtgaggtcac

SEQ ID NO: 20818 - DNA, 2425 bp, Artificial sequence
  DNA replication origin
ccctcgtgcccccttcgcgccacagaatggactcgcccgggcggggggcggtgcaagcggcctcggccccgccccggccccgccccctgacgcccctccgtgcgctgtgcagcccccgcgcgccgggctgctctctgcgggcggcggcggcgcggggagccggttgcaggccgagatgctgcagatggacctgatcgacgcgacgggggacactcccggggccgaggacgacgaggaggacgacgacgaggagcgcgcggcccggcggccgggagcggggccgcccaaggccgagtccggccaggagccggcgtcccgcggccagggccagagccaaggccagagccagggcccgggcagcggggacacgtaccggcccaagcggcccaccacgctcaacctctttccgcaggtgccgcggtctcaggtgaggcgccaacgtggggggcggcgccctgggccgccgcggagatgtgagggggagcgcagaggggctgcagcgggaaggggcacccacgggtccagtgcctggggacagcgcctgcataggggccgcggtggctcgctcccggtgttgggatccgaggagcgggcagaaccatccttacgaagagggggctgagtccagctggccgggcttggagccttgaggcgggattgaaggagggaaggactggggttaggagaggagtagggaattaagagaatgaggctttgaggggttcgaagggtttggagcctgggacctcaggctgtgacagggtttctcctttaggatatggggctcctggtgaaagtggagcaggagcagggcctggagaaaagggcatctgaaatggtcatcgtgggggaggccgtgggagatcgtggcgaggtggggatgggaagctcaggggccacagccagtttaagatctgggcagctgcgaattcccagaaggcaggggggaggaatgggagatggagctgcttggctaagttggggacctagggcccctgggagggtggctggatgccaaggagagttgaatagggttgggggagctggctgtggccctttgtcttccaggcccatcgggagcggtgcaggcaaggagctcctgggaggtggggcggctggggctgcggggaaaggcttggtccctttcccaggatcctgtgaatggcttttggcagcccggctcaggaacgtgagggcttgggagagagctcccaggggagggagcctccgtggagtggagggagccctgtgtgggcattgtggggaggggtcccagggctgagaatgtagaatgggcagcccaggagatccaggaaggagggctgctgacaactgcatctgtcactcctcagtctcatgccactgtggtggggggtgcaggaaaactctgttatggatttgtcactgggatgattcatcctggtcccccaggccagctgctagggagacccttccttgtgctttttccaggctctaccagaaggtcctcaccccttctaggccataacttcccaagctccagagcagagagtcacctgtctctgacttgggctggatttgagcattttccaagtaaccctcagtacctgggactgggggtctgactgtgtctccagagagctcctgcttctcttctcccctgcctcctccccctcttgccaccacacacattggccatcaccacctttgttaaggctgataagagcatctccctgagggttggccagcttccctgagcaaggcggagggccatccagagccggcaagcctggctgtgacttgccacccttcctgcctgctccagaggagagttacgagtgaggcctttgacagtggaggcggggtggacacagcaaatggccctagggatggcctgagggggcagggccggggcctccctgtgccgggcactgttgaccacttccatcacaagagccttttgttccctgcacaggacacactgaataataattctctgggcaaaaagcacagttggcaggatcgggtgtctcgatcatcctcacccctgaagacaggtaagtcagggccctcttccttacctggacctccgcctgccctgactcagtccccactacagagagcaaaccctacagtctccaaagggctgagtagaggtgaactgcccacccacatccctgcacgagcccatccaggggctgagatcagtggtggcatgagtgagttgactggccccagagcctgcgaagggcctgttgcccagggaggctttgtcttggtttctgtgtcaccaagctgagagtggcaggtgcaggtagctgggagttgggagagagcccctgccttcatgacctgcctgctctccaggggagcagacaccaccgcatgaacacatctgcctgagcgatgagctgcccccccagagcggccccgcccccaccacaga

SEQ ID NO: 20819 - DNA, 1528 bp, Artificial sequence
  DNA replication origin
acaggtgacaaatggagccacgtcagctgctgtctgttcctctgctgatccctcctgtcccagggcctgagccctttactgcctctagacacctgcgtccctctgccccagggacccatccaagggaggagaagggagagggctcaggtaccttttgcatagcagcacagaggacgtcattgcccttgtgatagggaacctggactgagcccaggaacttcacccggaactggtccacccagtcactgtttttggccagggctggaaagcaagcgtgaattgaggaggggcagaaagagcaggagggagctgagcagccaagtgaaggagggtgggtgaggcacggggaatggcagagcccacagaggctgccacaatccctggctgcccaacttggccgggcctcactttgcttgatcgtgaaaaggacctaaaatcacttccactcagccccccacctggctggctgagatctggagtacacgttcacctagcagcaagttggggcagacagatgtggtggctgggggcacaggccagggagggaacactacctgccatgtgctcgggctccttggtgacctcgatggcgtaataggcaggaaagacaccccgggcaccagtgcgcatgttgtaggcctcgtaccagtagtcttcagcctggagctccactagcagagggtcatccacttccagctcaagttcgtcttcgtgtcgaggcacaaacctgtccccagcaaggacaggtgagaaattcggcaccaaggcctgtccagccaggcctactctggggtctgggagccacagcagcatcgttatttcagtaaacatttgcaaaagcatcctgtgtgcctgttgcagtactaaccccaggggagagcaaggtcaagcagacatgcatctgccatcgaggaaacacaggccaagggagggtgtgggcagggccccctctaaaatggagaggctgtgggaagcgcaggcttttgtctagagaagggtcaggtggggtgtgggcaggcatcctcctggtcaccctcctgggtgccctgcccctggccagactaggtgcacagttctgggatccctcactgtagccatcctctttgtcaccatactctgagtccctagagagtggacactgtcctcccagggctgagtggataaatgaaggctgatggcaggggttaggctgaggccatgtaggggtgacaagtagagggtggtgtgtggcccaaactgctgcctggctaggcccagccagcccatggctctcacctgaatatggcccggtgggtctgctcctgctcctccccgttgatgatgcaggagaacagcccgaaggactcagcacctgcaggtgaggtggtgtggctggatggggggtcgcagctctgatccaggtttagcggggcaggtagaagcctcagtcctaaccagatggggcctggggtcgcctcccagaacacttcgcattttggctctgcccccgctagggacccccccaccccactgcttccccttgctgact

SEQ ID NO: 20820 - DNA, 816 bp, Artificial sequence
  DNA replication origin
agaaaccagcagtgaagcacagtcccctgccctccgcctctcaccaacggaggaaacaggcatgtggatgcaggcaccacactggggacttggcaggaggtggcatgtccagagcggggtctagcttgggggtgccccggtaatggcaactgcctacctgcagtggtgacagaggtgaagggtttcatcgggctccattggccaagccttgactcaggcaggcttgaaaccggtagaactgtccagtttttcggtagacagcctgcaaggggccgctgtgtgcccagggtcacagctctgtggagccatgggaggtgggagctggacgctggaggggaaggtcggggccaaactgaacatagcatcacatatccaggggagaaacttggacctggtctatggtaggcggggaggggtctgtgtttgtaaatattccagcagcctggtggaggatgctttggtgggcagaggtggaagaatgggggccgtgacattggaggcagtggtctgtagcagtgggaggggcaatggcagtggcagcagacatagggagattaagggtaaccccagctagtcttggggactggcgtggaggaagagggtggtgtctaggagacgaggagcaagaaggacgaggggctttggggttagacagagtggacagaactccaggttcctggcagggcaagccttggtgggcacaggatgctgaggcaggctcgtggagacgtgttgtctccaggacttataaagggaggtggccactgggaagtgagtgcgggaacaacatgcagagggtgacggggctgaaggaac

SEQ ID NO: 20821 - DNA, 2175 bp, Artificial sequence
  DNA replication origin
cggcatccgacggttccccagcccgcgaggagcccccgaagcccccttctgggctgagtttcccaccaggacgaggggagggctgggggagcgggagcagccacccgcgaaggcccgggccccgctacctgccctgaccccctgccctgcccccgctctggggccgcgtctcctcccctcactccccaaggggaggggccagtgtccccgggcccgggatcaaagacactgcgggagctcgacacgagggaggaggagggggccggaatgcaggccgcagggtctgggacacctgctctggggacaggggcggagccggccgacacctgcgccagagccgcggagcacctgaagccttcgcctcactcccccactctcagtccaggtggcccggccgggccctgccggcgccgccaggacaaagcgcccttgtgaaggccgcctcccgcccgggagctggcgaggggccccagacgcgggcggcctaggctgcctgggcagggccggggatccccactcttgtccagatcgtcgtgattgtgcccgggcgcaccggcctggagctcgtctttcctccctctcccccgcgcaccccatagcaggccagggaatgggtggggggcgctctggaccctaaaccagcacagcgtgccaggccctgtgctaaggatttaatcaccctcgattaatcccatgatgcgggctaattctcccccggagagtttaagtgacctgttagacaagaacaccctccggcccctcccgtctcaagcggccccactccgttccccaggctctgcgctgcagaagcagctttcttgctcctcctccggaagggtctcccgccccaggacttgcccttgacgttccttctggcagcggagcctcccagggctggctagcactcatggaaagttgaagttgtttgcttgtttattgcaggtctccctcccagaatgtaagctgctcaccggactggaaccttgtctgtccagtccccagtgcccaaccagggcctgcacataccaagtgctcaatacctgttgaaagtggattggaatgagaatctcccctcccatgacctggaaagggggctcaggctgtgtcatttgcccaacttctggctgcaaaaagtgaggcaaactcaaaagaagctgtggaaagcagcccaacctgagaccccctttctctgggagatggggaaggtcaggctttgggtctctggagggcagggataatggttgctatggagactgatggtggctccttgtgcacccagaaattgagaagggccatgcactggccactcaggcgtctggagcttgagcctccagcctccctgatcttcatctgtagcctaaagctggggtggggaaatgtgattccctctccaggaccctcaacagagacggtttgtgggggttaaacatgtgagaccaggccagaacagtggcttatgcctgtaatcccagcactttggaaggccaaggcaggtggattgcttgagcccaggaatttgagactagcctgctcaatgcggccaaactgtatgactgcaaaaaatacaaaaattgctgggcgtggtggcatgtgcctagtacttgggaggctgaggtaggaggactacctgaacccaggaggtcaagcctgctgtgagttgtaatcacaccactgcactccagcctgggtgacagagtgagaccttgtctctaaaaacaaacaaacaccatatgggatccatagttgggtgctggcccaggatgagtcttcaataaaggggctgggggagtcagtgcaggaagctgggtctgcagatctcactgtagtcactcacaatgttggcccttcttctggctcaacctcaccactcagggaaactgaagtgctgagatacctgctaggcccccaaggggttgttctgggggcgtggagggagaaagagggacacgtatgggcatataaacaggtgctgttcctcttggcctaagacccattttgacccagctctgcccaggactttgctgtgtgaccctattagacgagtgaggctccatctctgggcctctggtactctcgtaggtaaatgttggactggtctacctctcttcccctgtgacttggggcaaactgaaggagagaggatacggctcaatctgcccaaaggtccttccagcc

SEQ ID NO: 20822 - DNA, 1001 bp, Artificial sequence
  DNA replication origin
gcgcgagccgcacaacccggccgtcgggccccgccgcccagggctgagtctcccatctcgcccctcggtccgcagggcctgcgatggagcctgcagccccgggtcgcgtccctccctgagcgcccccgtcggcggccatgctgccccgagggcgcccccgggcgctgggggccgccgcgctgttgctgctgctgctgctgctcggattcctcctgttcggtggggacctggggtgtgagcgccgcgagcctggcgggcgagcgggggccccgggatgcttccccggcccgctcatgccacgtgtccccccagacgggaggctgcggagagccgccgccctcgacggagacccgggggccggccccggggaccacaaccgctccgactgcggcccgcagccgccgccgccgcccaagtgcgaggtaggtgcgcgcggccctggcggcgggagtcctgggggcgccgcccccgagcccggcctcttggacatctgcgggaatcacagtacctggcgtctgtccagcactggccagccggctggggcgcacctcgaacgtgcagctcctctgctcccgacctcatttccccatttgaaatgaagggttggctcctgctgccccctccgcacactgttccgggctctgctgcggggtggggcagctcaacatgggtcctcaccgcctagcggagaaggggggctgctgccgacctgggcgtccctccccagctcttgcatgtggccatcgtgtgtgcggggcataactccagccgagacgtcatcaccctggtgaagtccatgctcttctacaggtacagccaggtgtccgtggaggagggtcaggagtggggaagggacaaagcccgggacaggctgctggtctcagagcttcagcttcctcatctgtgacgcggggacagtgtccccttcctcccttagaagggcagttgtaagaacatcctgccgggcgcggtggctcacgcctgtaatcccagcactttgg

SEQ ID NO: 20823 - DNA, 1149 bp, Artificial sequence
  DNA replication origin
tcccagggctgttaaaattatcccccatttaatggatgagaaaactgaggctcagagggagcacgagagctggccaaagtcatccagcacacacaggactgttggaactgctgtctgtctcttcatccagggttcttttcacagcaatgttcttcctgggggacttcctagcattctttgccccacccagccccaggggcccaaggaccagcagaccaccccgcctgcctcccctcaccactgtccccacctgtgttaaatccccggcccaaggcaggccagggcctgtggttcttccagaggttgcccaggtaccagtcactctggttctccacaagaccgatcgcctgcgtgtctgggaggggagggcataagggagctgtctgaagctgccacaggacctgggctcagggctggatgcagggatcctgggcaggccaggcaggctcccaggcctctcaccagaaaagtgagcaaagagggcccagagctccgagatgtcagaggcgaaggtgacatccgtgtccaggacaatgacgcgggccagctcagcaggcaaggcactgggcagcaccagcttcattagcccatagaggccggagtagtgcttgttggggatccaggagacctggggctgtgtgggggaaaggcaggagatgagatggcagagaggggcctatgagcaccagaacacatgcttgcagtgacacagaggagagggggtaaacccccaaaagagaggggtttgcgcttcagtaggtggaggggggactgatgattctcttctccaaccccaccaggtcttggagagaggagagcggtggacacagctgaggggaggggggaagggctgggcccctgccttgagctggtcggcatgataaaagctgacacggacagcaggcaccatccatgtgtggaagagcgtctccaggatgtttctggccacggcgtcagtcaccaagtggaggtgcagtggatttttccttttgggtgggcaaagaggaagcctgagaggccccagcaggagcaacatgggacagcccccaccccgaggggcgcagagatggaagcgccatctgcaaagagcttttccacgcccggctcaggatgttcttttttttttttttttttttttttttttttttt

SEQ ID NO: 20824 - DNA, 1361 bp, Artificial sequence
  DNA replication origin
caagacaaatgcaccaacacactcacactcacacacacacaaacacacacactggggcccggcagcgtcagcagccgcagcttttttttttttaaaccagatccctcagtcaacaaacaagatggttttccaaaaaaaaattttttttaattaaataaataatcataataaaaacttccccccgacagcatcccggggtggggtgggggggatggaggagccccagctacctccccggccgagggacagccgagggggggcgggcgaggctccgtgccccccgcccccgcccgcagcccccggccggccccccgccgggacaatgtgacgccccctccccgccgcccccggcacgccgcctctgtcaccggctccggccctgcactctgcgcccaggcttccgaggctgctcataaacttacttccaatttatcctggggaggggtggagggcagaggggaggggggggagccaaggttttcccattgtcttttttttcgggggggaggtatgggaagggcacgcaggggggcgccccgaaggggaagttattgctcaaatctcaagttgactgaggggtcctgacgagaacacccccctttccctcctccctcccacacacccctcccctccccctacctccccccacaacaaactccaagcaggcagcccctgatcctcccagagacaaacaccagcgacaagacagagggagagaggagagaggcagagggggaagggggagggaggggaaatagagctactccagaaaaaaagagagagaggagagtgagaagaagagagaatggaaaagctgggatactgcaccctcctgctgctggctggctgtcccccctggcagctggaggcaggaactctgagcaggagaagcaggaggaggaggaggagggaactcttcttcatggggagggagggaagaagctggagctgctgctgctgcttctgctgctgctctgggcctctcgcactttttagatattagtgtgttaagatggtaggttgttcccttctccctcctcctcctcctcctctcctctcctctctctctcactcactctctctctctctctctctctgggctgtttctttcctcctcttccccaggcaagggggggtggggaggagggggttggggggaggaactggatcctcctcctcctccaggagggacacacacaggccccgggccggaatcgggaggggggaatcagagcagcaggagagaaactgtaggagacaaacaagcccaactcttcatcctcctcctcctctcagcagcagcagcgagcaccaccagcccattcaccacccggccccgggccgcagcacctccgccgcct

SEQ ID NO: 20825 - DNA, 1035 bp, Artificial sequence
  DNA replication origin
cccgcgcctcggcccgcggctcccgggacgctcgggtccccccaccgggggcggtggggcgtcggcggggggggcgacgggggcccgcggcggcgctcgggcgggcggactacttgacgtgtcggtgcggcgaatttatttcactttgcctaaggaacggggtgtgctgcggcacccattgcctagggaaaaaacccggatgtaaagtgagtgaaactaaactagagtgaagtagggcagcggcagccaaactccagtgcagcggcggcggcggcggcggtgatggggccgagcaccgagcggcggcgaaggcagccaaactccggggcccgtgcagcgccgcagctcggctcccgtgcagccgcagccgaggcgaggccggagcccgcggcggcccccccaactccgcggcccgagcccaactcccccctcccgccggcgggagctgcaaaggggctccagagcggccccaactccctccagtgcaacagcagtttgaagggggggggggaaagccgtgaggggcaggagcgaggagaagtgatggggaagcactgcaatgggggagcgtggtccaggcaacaggagaaagatgcaacctcaagtcgaatgcaacatgcaatccccggccgccgctcgcccgctccctcccctcgccaccccgccccctttccaaataactacccttgaaccactttattagcagtacttagtccagcactcgctcccgggaggggcgggggacgggggccttcgctcacctttatttattgctgctttctcccccctctccatgttttttattcctaagttcttttgttctaagggggatgatggcatttacttttctgctttgtgtagcagggcaatcactgggaatcggccacgtataatccggcggtttgtcatattttattagtgaaagtattttatgcctattctacctccaaggactgtaacatggagaattgcagggaggagaaaaacatcagaagaattcttgttttgagagatttcttggcggggcgggggagg

SEQ ID NO: 20826 - DNA, 1344 bp, Artificial sequence
  DNA replication origin
atgggacccaaataggaagtgaaaattgcataatctagaactacgtgtatccatgtgaacacatttcaagattatcctgctgggtgaaaaaagcaagttgcacaattatatacccagtataatggtatttcttcagagtttaaaaacataccaaacaattctgtaaagtgcttacaggcacaaatatatgtagcaaaaatacaaaagtatgcataggaatggtaaaactcaaaggcagaaagtgattaccataggggagggacagaaatgagttcagaagactagatctgtgaggttttatgtcctttaaaaaagatctgaagaaaatagagcaaatgttaagctttgacaaagacgtggctaggggaggggaaggcacacagaatagtgattaattatattattcgctatagttttttggtatgctttaaatttttttgaattgcactttgacctattaaaggcgaattccactgagttgggggtgggtgggtcagggaaggcttctcagacgaattgagtcttacttaagatgacagctgaaaattgagtagaagaggaagggcggcaaggtgtttcaggcagagaagcctgcgctaagaggctggactgggaaggtgaggtaggggccagggactgagaccccctgtgtggccagagcaggggaagaaaggagctgatgttgaggggaggggaggcgaagggggtgtgcacagaccatgcaggaccccacaggccatcctgaaggctcaagcctctcccctaaatatgacaaaatcagcaggcggcccagggacacttcactcggccagatagcggaacagggagggcgttcttgaaaaggtgactcacatcttgagttctggaggatgagtaagaggaagccggtagggggagggggagaagggaggaaggggaaaattctctggatagggcctaactgcagcaaagacctgaggaccttcaagagtgtggccccagcgggctccagcctccgagcctagctcgggaggcgtggtgtagaaaatggcagactagggcatccatgaagaccgggcggccccaagccgagaggcatggcaaaacaggggttgcaggtggctgttctggcagagcgaggaggatggatttgaagaagacaggcatgcaggggagacctttgaggggaatgtgtcaacagccaaggggggcggggcgccggggaggtctggatgaagtgggaatgaggatggagtgcagagtgcctggagaagtgttcaggagggaaggcgaggcatcgggacgaggggctgggcggtcgcgccatctctgcgatagacaataatcgggtcaacacgcggcgag

SEQ ID NO: 20827 - DNA, 954 bp, Artificial sequence
  DNA replication origin
ggcgggtgggactgggcgcaaaggaccgcgccgacgccgcatggctgccgggaattcagctcccccggccaggttgagcgggccccggggcccggagcgggcgtcggcatctccggcctccccgcggggctgcaggcaggcggcgccccgagcgcaccccgcgcgagcaggcgcggaacagcggacccaggccgggccttcccgcagcttttctggccgcctcggagggcagggtcccagcgcggcccgaggcgcctcttgccagcggcccgacctcctgccctcccggccccctccaggctccccgcacgtgcaggcccggcgacgtcactgcggctctgacgcgctcttggaggcccgggcggaggcggcgcggcgcgggcttcctccgggaggtcccggtcccggcagcccgcggccgcgtccttggccctcctccgggggaacctcgttcattccaaactctggaaggccggctgtccttcggttactgataaggacgcgagctcttggtaaaagatttgaacaatgcccggaaagaaatagctggacctaagaaacagactaataatagctgccagctagagctccactcgtgtgctcagcgcctttaggaacaataataacgaccacagccatagtagccaccatttattgagcgcttactctgtgccaggtgctgtgttaagcgctttgcaggcaacaaccctcggaggtaagtaccattatcatccctattttgcaggaaacccgggcacagagaggttaagtaacttgccccagggcacacagctagctgatgtcagtgccagaattccaaccgcggctgtcggaccccatgccatcctcatgtcaacccactaaggacgggatccttctgtccatcttaaagatgaggcaactaaggcacatggaaatttaagtataataccttgcccaaggtcacctagctgg

SEQ ID NO: 20828 - DNA, 1076 bp, Artificial sequence
  DNA replication origin
gtattcaaagattgagcccccaggaggggcgcttagctccaaacacatgtcgctcctggagaccctgcgctgaaccctctccccggctcctgcccagtgatgtgtagtcgggtccttctaggggcccaggcgcgccgcgaggacgggtgccgaggggtggaacgggaacggagacccttcatcttaccgcattgttgaggaagtccgactcgttcagatcccccaagtccaggaagctggatccggggaacagcctgtcggccgggaagggttccaagacggcgtccatcgcagccggctcccgggacccccttccactgggcttccctcactccagggcggcggcgcgcccagtccagagctcctgcctgagcgctggcaaacgggcggggggcaggtccggggcgaagccccgggggaggggcggacggaggcggcgcggccccgggtggggggcgcggggcgcgcgggggccttagggcagcggctaggagcgggatgggctcaggggccccgggcgcaccgtgggcattcagccgactccacctcctcctgctcctcctggggcacagctggcttccatggggagcccggggttggggctgagggcttcaggagccccccggacagggtgggagccggggcgggggagctaagtgctcccccgagactgggtggctgccggcctctcctctgtctctgcgtctccctccgcacgtcttctgtcactttcctctctgtgaaaccgggaacccctggctggctagcccagctggccaaggcgccacgcccccacatcaatattcacaataatttaatattaatgagaagagggcgtggctcgaggaatcctctctccttttttaaagagacatctgcaacttcgtcttagtaatctctcttctctgaatgctcaaggtgggggcttaaagcaacaatagtcctggaaccgataacagtgttcctggaacattggcattttaaggcttcaccaaccactgtcccgtaaattgatgagggagctatttccatccttccagccttatactaaagcctgcacgaaacccagtcaggga

SEQ ID NO: 20829 - DNA, 2354 bp, Artificial sequence
  DNA replication origin
tgtgaatattgatgtgggggcgtggcgccttggccagctgggctagccagccaggggttcccggtttcacagagaggaaagtgacagaagacgtgcggagggagacgcagagacagaggagaggccggcagccacccagtctcgggggagcacttagctcccccgccccggctcccaccctgtccggggggctcctgaagccctcagccccaaccccgggctccccatggaagccagctgtgccccaggaggagcaggaggaggtggagtcggctgaatgcccacggtgcgcccggggcccctgagcccatcccgctcctagccgctgccctaaggcccccgcgcgccccgcgccccccacccggggccgcgccgcctccgtccgcccctcccccggggcttcgccccggacctgccccccgcccgtttgccagcgctcaggcaggagctctggactgggcgcgccgccgccctggagtgagggaagcccagtggaagggggtcccgggagccggctgcgatggacgccgtcttggaacccttcccggccgacaggctgttccccggatccagcttcctggacttgggggatctgaacgagtcggacttcctcaacaatgcggtaagatgaagggtctccgttcccgttccacccctcggcacccgtcctcgcggcgcgcctgggcccctagaaggacccgactacacatcactgggcaggagccggggagagggttcagcgcagggtctccaggagcgacatgtgtttggagctaagcgcccctcctgggggctcaatctttgaatacactggcctccaccttctagggggaaggggccatcgaggtatcgggtccgtccgatcctcggatctgagctcaagagacaccaatcccgccctccacccacgtcttctagccgtccccaacccaccccaggttccaggaccagactgggcgcaaagtggcagcgccctttcctgcgcctcccttggggcttcggtggctcataggctggatctccgctggggggcgcaccggggaacgttcagagggcctgagacccgacccctcggggaagccaggcccagaaatttcagggtgctaccctggcagccccagggaatcaggcccagagaccccccaccccagggagggacctgaggctgggggctgggaagaggcggtcagggcaacatagggtgatggctcaggaggagggagccatttctctccatctgcctctagatctctgctctgtccctctgttcctggagtctggctgactttctccctctccctatgtcttcttgactaggtccgactgtgagcttgtctttctcctctttctcactcttcccctccctccctaaggaaacgtggcttctctctcttcttccctccctccctctctcaggctcagccctaaggccttgatgggggaggggcacggacttagaatgggagaaaatatttgggttcagaagggcctgcccagatgaaatgtggattgtttggggagtctagtgggagccccctcttcagtgaaccaccagttgcgtgtgcatgcctgttcacacgccacacacacacacacaccctgtgatcaagcacttgagactctttacctgctgacctctacctcccaggaccaagataaacttggccaggcaagagtcaagtccttagaggacttgagcatcttggacttccacctaaactgtcccaggccactagattgatggtgaggaaccaggccaagggacaggagccggagtcaaggaggcatgggggctgaggtctccctgttctccattaagcagcacatcctggtcaccctgcgctctgaggaaggcccctgtcccaggcagagagagcataattcagcagacaagacaagggtataagggcagagggcttgcattgactgcagcgagacttggtttctagtcctggctctgcttcccctgtgagcttggcccctaccactggctctcctccctgagcctcagtttctttgtctgtaaaatgggggagaggttggatcaggtcttcctatagatggttctggcacagatcccaggaataaagcagcagggatcgggggatccacacctcctcttgaagctggtaaaagacactagtcagagggaaagaggtttgtcagagctcggacccttgaagtcaagcagggcagtagagccctgcagtaagcttctctcggcccttggcagctctgagttgggctttcttctgaatgaactcggccgcccgaagcctcttcctgctgctccattcagccctgcatccccagctgcttatctgggccttggtccagcacaggaaaagaggcac

SEQ ID NO: 20830 - DNA, 1587 bp, Artificial sequence
  DNA replication origin
cgtcctacaggggtgcctttccaggcaacgggggtgggaagccggagaaggacatattatgatttgtttccctcctcgttaaagactttttcctatagtcgtgccaatataagctccttctcggctgtcacgcgcagccggcgccggcttccctcccttggaggagaggttcccgagctctcctgcttgcagacctgcgtacccctcttctcggctgcaccctctcttggagcctggcctcagccgcccgccctttaaattttagagaaggatccgggtgccgccgtcctggagcggcccacaaagggttaacccgggaacacccggggccgcccctcaccggaatccggcctgctcactggtgggagccgcagagctcctggccaatggcgggaggctgcgagcagcagccggtggcggcgtggagggcaccggaggagtgcagggctcgcgcggaggagggtcccggcctgcgccgacggcccgcggctgagggagcgcagggtgcactggctcgggcctgcatgggaccccttctgcgtctggggccgaggcagaaatggcctggccgtctcacggtgtcctaaacccctcatcagtagcgcggccccgcccccacccccgcagggagaagtggagaccgagggtctccccgacgaccccgactcaaagggcgagccgggccttaaatccccttgcagctccatctcgaatcgtcctaccgtggggcgctttggtggctgtctctggtggcggcagaggggactctcccggggcagtaatggtaccagctctagccttgttttacccctccctaaattccttccccaaggtcagtgcagagacagggtaaagctctgggggcgcagctgcctgctggggtcggtgtaggagaatggtttccctgaccagaagcagcctcagcgcgccctcttccctcaggtccctggctccttggcgcctgcacccccactcctaacttctgcccctcccccggcccaggctggttcagtctgtgcttggggaaaggagggaggagaccagagcgggtccaggctgagctgtgggataaggggtgggggggaatcctgagcccggacattccttccgagagagtgagagctagggagagatgggaggagaggcctctcacatttccccctttctttccccccgcaggctggggcccacagacccccccacaccccaacacacactgacccatgcattcccggacggttacttgcctcgtggtcactagaaaattgtccccatttcaagctgaagggccttcagtctgagtcactgctgtgcctagggggcggggagtggtgagagcagggagaggaggtgggccccttgagtccccggttgtcagcagacccccctgtccttaagcattgccatccagtagctggggttcctacgaggcccaggccttgccttcccagagctaaagccgccctgtgaaggagaaaacgcactgaactgaaactcaggaggccctaattcaagacccaggtgtgctctgagacctgggcagtggcaggtgtctcctctcctggcctcggtttcctcatccattac

SEQ ID NO: 20831 - DNA, 1746 bp, Artificial sequence
  DNA replication origin
aaggggatttaaggcccggctcgccctttgagtcggggtcgtcggggagaccctcggtctccacttctccctgcgggggtgggggcggggccgcgctactgatgaggggtttaggacaccgtgagacggccaggccatttctgcctcggccccagacgcagaaggggtcccatgcaggcccgagccagtgcaccctgcgctccctcagccgcgggccgtcggcgcaggccgggaccctcctccgcgcgagccctgcactcctccggtgccctccacgccgccaccggctgctgctcgcagcctcccgccattggccaggagctctgcggctcccaccagtgagcaggccggattccggtgaggggcggccccgggtgttcccgggttaaccctttgtgggccgctccaggacggcggcacccggatccttctctaaaatttaaagggcgggcggctgaggccaggctccaagagagggtgcagccgagaagaggggtacgcaggtctgcaagcaggagagctcgggaacctctcctccaagggagggaagccggcgccggctgcgcgtgacagccgagaaggagcttatattggcacgactataggaaaaagtctttaacgaggagggaaacaaatcataatatgtccttctccggcttcccacccccgttgcctggaaaggcacccctgtaggacgctcaccccctgcagaaccctgtcgccctcagagcgttgacacatggctcccctgaagttcgtgaactcctggccgccgaccccttgctcttgctccccaatttccatcggacaatctaaacctgaacttttgtgtgtgaagtggagggagggctgggtgtggttgggggtagaggggacaagggggcgtgctggagcggaggaggtctgaggtctccaaaatgggctttccagggatggggccaagtggatgcggtggaaggagtgagaggaccagaaggtcccgcacacgccagggcagccctggacttcaccagctcactttgcagccccggacatcaccagctcgctcactgtgcgtcctgggtagctgtgtttccctctctggactggagttttctctactaagaaataggagggggggaacgaggggcaggggaccgtcggggagctttctcccgtcccttctgcctctaacttggtgatagaaaccaaccctaccttagccgccatgagaggccaggcatcagacggaactagggccgcagagcgctctaggggagtccctgatggcagtgctcccaggagggcgaggtgggcctagggatgatgggacgcgcccaccgtccacccagcacctgaagaagcccggcgcaaagaggacctgggcgtcggagtgtcctccacccccaccccgcctgccccttggccgccctccccttccacttggctcccgttgctctggaagctccatcctgctgggttttggctgctgtttctagcaggtggggtggggactgctcacacaatggggccagctgagctctctaagcagtttcctgtgggcaccctaaaagggtctctgggaagaacctgggtcatctgcctgagccaaggccttcagggagtccagcccagatccgaggaagcatctttcctctcccaggccccaggaaggggcttggcaaacccttatcgcctgagaagcagctgctggagaaataccttagcggctgactcaccggctccctctgctcacagccccctccc

SEQ ID NO: 20832 - DNA, 1148 bp, Artificial sequence
  DNA replication origin
aaaaaaaaaaaatgccttctcatactcctatacccccacaccccctgccagaacataaaatcaacctacccttgttgttcccctgccctttggttctactttccctcccctccaatgaagaaaggcacaaagtcaggagttgatgctgcatctttttttttttttttttggttttgctttcttaaagcatgtgctgagctgatgaagagagcagtttggcaattaaaaaggcccagcggcttgggcagcagcaggggggtgccaggtgagggtcaggtagtccctctttcctgggccagggagcagcaaagcccgcactaacttcataaaatataaaacaagggaggggcgaagggaagagggagatttgtaaaatacaatatcttaggggattggcaataataaaaaataaggttcattatttacaaacaatttctgttcttggtctctgtacagtgggggtggggtaaggggtgtctgtgagtggggtgcgttgatgtgtctgtttgggtgcaggtgtgggggcagggaggcagtggtcgtgttgggcatatgagagaggaggtggggtacccagtgagtggtttgtctgagaaggacggatggatgttggtgggaaggagaatgagaacagagtggtcggcccaagggaagagtccaaatgtcaggggcaaggaagggctgggaagtggagccttttctcctggaatgggaagctccaggaggcaggggcacgaggcggatccgggttagtgagcaagaactcctcttctgggtaccaggggtccgtcctatgtcctgggtcttggcatggcctaggagagtttgatggtggtgttggggcccagatccctggagagagaagagaggccagcgatgactgtccagcaggaaccctcttaccctctgcaagctggatctagaccaagtagggatggggccttgggagggtgtggccaatgtggggaccaagggtgggcaggaggcaggtggagcctgagacctcaggagggaaaggggccacacaccccacctgtcgtggaaccactccttggagtgggagaagtcggggctggtgccgtttccaccgtctttaggccaggcctcactcaggtacttggtggtctcgtgggtgctgtccaggtgat

SEQ ID NO: 20833 - DNA, 1891 bp, Artificial sequence
  DNA replication origin
cagctgacccccttgtagggggtcggggacaagtgccccaccctacccactccagcagcaagacttctttagaacttggctctcgggaggaagctcccctgtgaccaagaagttgaatgcaattccactcatccgacagggaagtactagacagagacagagatgggaggtggaactgaagcaagctattccctgccctttgggaagcttccagattagagcgaagagggcaaactgcaggaggctgctactctgtggctggcagcatgatgaagtggaaaagggcgtgagttctgaggccagaagccctgaatttaaatcctggccccaccactcactgcctgagccatcttgagcaaataaatcacttgaatgatatctccgtgtcctcctccataagacggaggaagtgataatatctgccacccagggttgtggcgaggatcaaatgagatgttagttattgttcaagggtaaaggggaggcccaggaaatcgttatggggctgaaggagggagactgtatctgtactggagtattggggaggggttcatgggggaggtggcacttgacatgggccttgaagggcacttaacacctcttccataggcaggacagggaaggggacatactccaggcaatgggaacagtctgagcaaaggcacagggcagggcagctatgacacagctgtctccctttgtagcccattctctacctctgtgagtctggtccctcccaccttcccacactcatagtcacaacttcagtgaaaagaaagacacagactagattagacatctgaggcagagggccatggggtctgggaggaaagagagtgttgttcagctggagccatccaaggagacttcctggaagaggaggcttttaagcaaagcctcagaatttgaagtacatcaataggagatatcagatggaggggacaataggagatatcagatggaggggactgtacagtcctgatgcaagttcccagaataaggagcataaatgagtgggagaaaacggaagagcctgggctgcaggatgggggaagatcaaggcaggccttgagtgcaggctaaagtataggcatgaggaagctaggaaataccacgggagaagagtagatgctatggccagaaagatgagtctggggccgtgaagaggaggtgttccatcagagaagttcaccagggccccactgtaatccagatggagggttcacctgaggaacactgcaaggacaagaggaggtgacccaaggaggaaccatgggatttggagggaaagaagaagggggagtccaagatggacctcaaggagaactccagtctttccttttggagttggcttctcccctatctcatcagcctctcctgacccagcaggccgattaaatctaagagaccctggccctgaagcctcagtaattcaggtcctaggaggcctccctgccttgaggagacaccacccccatctggggccctctctaggcacgatccagaagagctctaggcctgaaggtagtgttacccgccatcgggtccatccccaaattcaaggtatccctgggtatgttccctctcctgtgccccttccccaaacccagtgggtctctaaattccagcggcgccgacggggttaatgttggctcatgtcaccgcctctgcacgcccccgctccaaacctgccagctgcagcggcgaatgccgaagcccgaaagcgagggaccaggcagccgtgggggtggaggggacacatcgcagtagctgagtgacaggcggcggggtgatgattggcagctgccgagctgcctggactaggacccgggcgggggcgcagaggtggtcgcaggaggcgccccacaccccgggccttgcgccctgagct

SEQ ID NO: 20834 - DNA, 1410 bp, Artificial sequence
  DNA replication origin
gcccgggctccggctccgctccagccgtccggggggcgccgcggcgcgcagagcgcagcaccccgactccagccaggagcccccgcccccccggagcgcaggaggaccccggcccgcctctcccaggcgcagcgcccagcatctcgctgctcctgtcgtctaagcgtcggcgtcgctagggacctgcggaacccggcgctcccctccctccccgcctcgcgtccccggcccgggcggactggagactcgaacttgagcgggtgcccgaaaggccgcaggagccgcgggcggaaggcggccgcacgatggccgaggggcagggcggcggagggcagcgctgggactgggctggcggcggccgggcagccgaggaggaggtggtgcggcggcgatgccggcgcggggaggaggcccaggtcgcgcagccctggcccgagggttcccggggcacggccgctgggcccccggtggaggagcgtttccgccagctgcacctacgaaagcaggtgtcttacaggtaaggaggacgtgggcagaggggagcgcggcgcttgggaccacccctcttgcaggcgtcattgcacaaacgtttattgtgcgcccgccgcctgcctggcgctgggagtttagagatgactgccgagggatctctgtcttttcgtgtacagcgggaaggaggcagcttctgagactccttctctgcctgaaccgtgaaagccgtattcatccaatatgcagtggctgagggaacagtgtaccaggcgctaaggagaggaaagagccatgacattgttcttacaaacctctatctgctggggagagccaggagatgccccctggcccttctgggggaaagaggaaccccctcttcattcaacaggtctaccctgagctttcccgtgggctgagtctgtgccaggcacaggcttgtggaaatgactgagaggctccctgccaccactgtggagaccctgctgcccagagatggggaacagaattccctcctgaacccccatgccccagcaggccctggctggcaacctccaggggcagagggaacctccccacccccacccaacatcttcttaattcaactgtcttctgtcagtgtcagagtctcttggcctgccacctctgcccagagggtcctggaggagccagctggagtgggccccagaggtcattttggtgacctggggtaggacgttaatgagggaggacagcccttcagaacaagggtgggaaagttacacagaggttggagctgggacagcccagtacacaccttaccttcctcttcctctcccaaaccacagcctcaacttggacttgctgtccctctcaagcccttggcccagagtgacctcccctggagagtctagcagggccactagggcagctgcggtcctt

SEQ ID NO: 20835 - DNA, 1333 bp, Artificial sequence
  DNA replication origin
gatctcttctctcagagcttggagtaagagccattgggaaacttccccaaaaggacccatgcaccccagaggccagttgtcaggcatacttggggattgatctgccctcctcctggccaccctggcaccagctgctggctggagggctggagccccacctccctgatcagaccttctcccaacttgcaggaaactgggagagggttctgggcctcggggtgctggttcttcctcaaaatcacaggcttgtccgcaggtcacagccctaagcattggctatttgcggctgactaaggctggaaaacgggctgccagaacccaagaggggaggatgaaagcgaaggtgacacaggatgtggcttggcagagaggcgtgcacacagaagtagtgggcagctggtgtgggcagcagggtggtagggtttggggaggtggaagaccatgcttcccagctcctggcctcccttcgtcagccctgcgggggccatcagaaacagccccggtgtgtgtgatggctgtgcccctacaggtgactgcttgggttccaattgctctcatttctggagggggacggcctcggctgcattgtggggtgtctttgtgtgtgcatgtgaggtatatttctggatgggagtgtgtgcatatgcacacacatacatatgtgtgagggatgtggcaaccggtaaccattgtcctgggagtatttgtatgtaggagaaaggtgtgtgttctgtgtgggcatgtgtgcttgtgaatgggagtgtggtacctgttgtccttctgtgtatttgtgagtgtgtaagggctgtgcaggtgattcccgtagcatatgagatctataggttctgttgaatactatgtcaggaaaatgcgatgtgttgggcctgggtgagaaggttggaaaccattgtgaatagctgtggaaggatgactttgtaggagaaacttgtgagttctttgttggtgtgtgtgcgagtcattaagtgactttggtcactgagtgcgagaggctggggtgggaagtgttcgtttaagtaatgagtgggcataattgtgtaagggatgtgtttgttctgcgtgcatggggagcactgtgtgacttttgttcccctgggtgcgatttgggggagccaaggaggtatgggtggagattgtgagtggctatgagtagggtgtgcgagagcggaggggaggtggtgacagcagccctcgcgagtgtacacttgtgagcgtgcagttgtttggtagcggagggatcgggggaggaaagatgcgcgtctggatgcgcgcagtgcgagtgtgccaggccgggagattcagtcccatccaggcg

SEQ ID NO: 20836 - DNA, 1788 bp, Artificial sequence
  DNA replication origin
gcagagggcgctgcgggcccggtgccaccgtgcggccgagggggcgtgctcggcggcgggcaggcagcggcccggccagctatgcggggtcctgcggccgcggctggcggcacttcctggagcggcggcggcagcggcttcccgggcacctgggcgtggggagcgggggcgcgcggcgcggggcgggcggagcgagcgcgcgccatggaggtggcgggcggcgcggagcgggcgtgctgagccccggccgccggcccggcatgggcgtctcccgcgggccctccgccggccggggctagggccggatggagccgcgggacggtagccccgaggcccggagcagcgactccgagtcggcttccgcctcgtccagcggctccgagcgcgacgccggtcccgagccggacaaggcgccgcggcgactcaacaagcggcgcttcccggggctgcggctcttcgggcacaggtgagcggggcggcggcggggcaggcaccgaggcaccggcaggttaccgctccctcaccgggggacattcctcggccactgggggtccgggccacttcggtactgacactgagtcggggagaggctggcaccggcggcacgagccgtcttggcgtgggcacccactgggagtcatcccccagggccgggacacgggcgggatcggtcggcttggcactgtcaccgggtgggggtcattccctggcaccggcagtctagtgcgcctcatgtgtagtaccgtgggaggatcggctcccaaccctccagcaggaagatggaatcaccccagcccccggcacaagcaggttgggcccccaggactggtcacccacgccttcttggcactgatagaacagggcctctctgagcctcctggcaccactgaggtggggatcacaccgccctttggactttcgtgggaccaggttgcctaccatcactgcgtggcatctgcagaacgtagccccgttgataccgtcaccacacatggcttgtccccaagctctggtcactggtttaattgtttaacatgttaagcttctccttggggttgggggtgcctgatcatctgccctaccttgctcttaattagcagagagaccccagcccatccctctgctaggcaggcagcatgtctccctctaccctcttccagcccatgctgggaaagggatggggtgggctggagtctggaatctgctggctgttcaagcttcatcttgccccctcccccagcactccaaatgtcaccatcttgtgcctgtgacagagctttgaccaggactctagcggggaaccggggggagagtgtggaaagactgagtgcaggcagttcatggcaagtgtgctgctcttggtcgtgagccgctgcctgccctggtagccgtggtgtaaggtaagggacgtgaggccccaggagtacctgacctggctccctgcgcttcttcctgaccgagccttgcccttccctggtggccaaggagcttgtagccaatcagccaaggaccccagagccacctcagactgaactctgaccacttggagtctgcccaaggcctccctctcacttttctgcagctgcctagacttggtggcattcacccccaccccgccccttagctttgctctgccccttccctgggtagactttacccaccaataacatgggcggttttctcctgtcgtgtgggctagcatacccgtgatgctgacttgtgccctctacccgtctcacccgggctagggcccactctttgcacctgcactctgtctctgagcacatg

SEQ ID NO: 20837 - DNA, 1687 bp, Artificial sequence
  DNA replication origin
tccaccctgtccatctctcccccaacacccctgtacctggcctgaagctgctcaagacctgcagggcagtagcaaatcagtgcagtgtatggaaggagaaggtgctagacgtgcggcctgggcctgactcctccagcccttcatctttgccttcatccttcctcctgcccaacatgcgtccagggcatcacccaccatgcctaattaatgccagccttcaggggaccacagggcttcttctgtcagccccaggcagcactgtcccagggctgtgaccttgacctctgtggctgccagcggttaggatgcatcccccaccagtctctccccaggaccagggcccaggagatcacctgctgtggggcacaggtggcctcaggtacctggaggcatcgccagcctgatccatgccaggcaggctgcccttcccccactgttaggagaggtagggcacaggagctcgatgctggctgtgaagaagggtaggcagggctgaggtgagctggcagagggagcaaagcatgagttcaggatgggtccatggaggccaggtccaggtgggagctaggatgatgcccacagctcctgcctgcctgcaggagggagctctgggctgtgcagcgtttggaattgtgagtatgggggcttccagcatcagggccgcagaagaatgtgcagtcacaggctccatcaggagcagagtcagaagggtttcccggcatcacccagcttcaccctggggtatccgtactttgtcccttcagaaaggtgagacagagcagtcgagcaccagaaagttcttaccatcagcacttcagacatacaggcacgcacacacccagaatccagaaggctttgcttttggcccaagcctattgtcacggccccctgggtgtgaagggagactgagcagcctctctcccaggagagccagacagtgactctccagttccctgagacctggtctcccctgagctacacattagaccctctctatttccaggagtcaccttcagcctgaccccaaggctatgggctgagagactctgggggtcctgtcaggattaagttcctttgcagagagcctcattttgttatagcttggtttgctccatgtcccatgaggggacacctaacctgcccccaccatgttggtggcaaaacaaaggcccagcaagtgggaagccctgccctgggccccaccgtccatccaggcagaccgactccccattttctttttgttttcttttccatcagcttccggcagggcaggtggaggcctttaggcccagagctctgtagattctggtgcctggatgggggaagaaggggtagcctgaagcacccacctccctgggactccagggctccctagggtgcaatgggggagagcatcagtgccccaacagctgtaaacgtgggctcccctgagcacccctgggatcctcacatggaggtcagaggctgcagtgacccctccctccctcaggggttgcttcccttctcatggggcagaggctgtgaatgggctcctggttgcttcccttctcatggggcagaggctgtgaatgggctcccggacacaggacagaccgtggcctgatccagctcctgatgctcccggtctctgtgcccaacagccaaccgcctgccatggagactttctttaggagacatttccggggga

SEQ ID NO: 20838 - DNA, 826 bp, Artificial sequence
  DNA replication origin
gggctgagcacttgctgaccctacttcctcccacctcctggggcctctgccctttccgtgacctcggcaacagggagggcggaggagcctcccagcagccccagacactaagaggctccctgcaagagacatggccttttggggtacgctggcttcagggtactgcccagagtgttcccaagtggggaaccctcagccaggcagagcttcaaggcccatgcccaggccagacccacaggaggtcacaccactcgccctgctggccacagctatacctacgcgagcagggcgctccaggcctggggtccggccgccttgcgccgtagggctacctggcgcctgcgggacagtgggcgcacacgggtgggcagcatggtgccggcggtggtgcctgaggctcttcggcccccagggccagggtgctggcctgagggccgccgctggctgaggcgccgatagtagccgtgcaggccccagagagcgtggtcatatacggcatccgcggggagcaggtgggaggaggctcggcgcaggtagcggggtaggggcaacagcggctgggcgccccgaggtgggggtggccctggtgtcttggtgcctggctggatggcgctcgatgcctcggctaccacatcctcctggacaccctcctcctcattcatgcccacaagcccggtcaacagcaggggtgcacccagaagctgggcccccacggtggtaggctgtggagtgagcaccttatccacgatgaagcgggggttgcaggaagggggcacagtgctggagcgccggcggctggaaccctgggccctcaccccgcaactca

SEQ ID NO: 20839 - DNA, 1083 bp, Artificial sequence
  DNA replication origin
cctgcaacccccgcttcatcgtggataaggtgctcactccacagcctaccaccgtgggggcccagcttctgggtgcacccctgctgttgaccgggcttgtgggcatgaatgaggaggagggtgtccaggaggatgtggtagccgaggcatcgagcgccatccagccaggcaccaagacaccagggccacccccacctcggggcgcccagccgctgttgcccctaccccgctacctgcgccgagcctcctcccacctgctccccgcggatgccgtatatgaccacgctctctggggcctgcacggctactatcggcgcctcagccagcggcggccctcaggccagcaccctggccctgggggccgaagagcctcaggcaccaccgccggcaccatgctgcccacccgtgtgcgcccactgtcccgcaggcgccaggtagccctacggcgcaaggcggccggaccccaggcctggagcgccctgctcgcgtaggtatagctgtggccagcagggcgagtggtgtgacctcctgtgggtctggcctgggcatgggccttgaagctctgcctggctgagggttccccacttgggaacactctgggcagtaccctgaagccagcgtaccccaaaaggccatgtctcttgcagggagcctcttagtgtctggggctgctgggaggctcctccgccctccctgttgccgaggtcacggaaagggcagaggccccaggaggtgggaggaagtagggtcagcaagtgctcagccccctcctcagctgtcttctcctctctaggaaagccatcaccaagtcgggcctccagcacctggccccccctccgcccacccctggggccccgtgcagcgagtcagagcggcagatccggagtacagtggactggagcgtgagtgcctgaacacccctgggtcccagaccctctgggctcttggccaaggcgcagctggcgggtggaggcactaaaggcagctgggagagccaagcctggaagggttgggacagtggggcagacggaacagagcagggtcgatcggggcgctggagtgggtttgtcttgggagagggcg

SEQ ID NO: 20840 - DNA, 1873 bp, Artificial sequence
  DNA replication origin
cagggagcctcttagtgtctggggctgctgggaggctcctccgccctccctgttgccgaggtcacggaaagggcagaggccccaggaggtgggaggaagtagggtcagcaagtgctcagccccctcctcagctgtcttctcctctctaggaaagccatcaccaagtcgggcctccagcacctggccccccctccgcccacccctggggccccgtgcagcgagtcagagcggcagatccggagtacagtggactggagcgtgagtgcctgaacacccctgggtcccagaccctctgggctcttggccaaggcgcagctggcgggtggaggcactaaaggcagctgggagagccaagcctggaagggttgggacagtggggcagacggaacagagcagggtcgatcggggcgctggagtgggtttgtcttgggagagggcgggtgggcgggggctgatgggagggagggctgggcggccagcgtgtgctgagcaagcccatcccgtggctaggagtcagcgacatatggggagcacatctggttcgagaccaacgtgtccggggacttctgctacgttggggagcagtactgtgtagccaggatgctggtgagtgctcgtaggggcacgccgccccctgctggtggagccagtagccgcagcccttccgggaacgtgggattgagcccgctccctggcacccctgctgtgggccgccccaggatggtgaggggtgcaggggctttgtccggatgccaggactggggcttcccagtgcacacaaagggcagctgtgctggggcaggcagcctccgagatagacttacctggtgcctcaggggccctctcttcctgtcctgcagcagaagtcagtgtctcgaagaaagtgcgcagcctgcaagattgtggtgcacacgccctgcatcgagcagctggagaaggtgggtgggtagctcagctttgcccgcccctgccctttgggtgctgaggccctttcagcgcgcactcacacccacatgttatacaaacggcctgccaggagtgacccagcactcgggggtgaagagtcaaggaccctggagccaaatgcctgcgttcgaatcctggctcctcactgattagctgctgtatccccactgcctggaacaaacctggcgcctagtgggttcgttgaatatcactcaatggaatgaattgacgaatggtggcccttgtaccatttcaccatgtccaaactagtgcttagaagaggccattgatttgctgaagcttcataactcagctgtggctacaccctgcctctgtggagacctttccccaagggccattgtccactgtgcatttgcagctgggggcatgtctgggcactgtgcttctagaggtggaggcagcactgggcagacgggtcaaggccaggggcagaagggttcgcatggaggggcagcgcttcccagcctgcagaaacccaggccatcatacgggagagactgtaagactaggagtggttcaggcaggctcacacaggctgctttccccagcctctgaattgtaaagtgaggcttccttatacctctaataaggctgaagtagggacagttatgagaagggaaatagaaatgcagccccaagcactgtacactcatcatttaaggtggaaatcgacctagggttccacaaattagctaaaggtctccaggggccaggcagtgcaagtctgcgtgtgaggaccaggctggctgcgtgtgcccgggtcgggagtgccagagggcgaggaagaaaggatgcggccgagtgcggtggctcatgcctgtaatcccagcactttgggaggccgaggtaggtggatcaccctgaggtcaggagtttgagaccagcc

SEQ ID NO: 20841 - DNA, 1203 bp, Artificial sequence
  DNA replication origin
gcatgctgacgcgactcacctggatgcgcaactgctctggcaccggctgctggctgtcgggcagggccggcaagcgggggctcagcaagggccctgccttggtgccaccctcggcctggcaccaaaccacttgccgagagaaggtcccgctccactcccaacacccctggggcagagggacagtcagccccttttacagatggggaaatcaaggcccagagagggcagggtctggccttggcacccagggcacgtggcagggtgggacgtactcgctgtgcaggggggcggcgctccgccgcttggccttctgcaccatggtggcctggttgcgcagggcgatgcggatgcgtgaggctgcaagcttgcagggctcgccatccacctgcaccgggatggccttggatgtggtgagcaccacctcgcgacactgcgtcagccgctcgccgtgtccgcccacctgcagcgcggcctgtgggcacaggaagcttgggtcagatggcaccagggctgggggcaggggggtcccagactctgctccttccgaagcagaaactctagccagagaacaaaggtgagagtgacccctggccagagggcagaggggaggctgagaccccaggtaggaaagggaagggacagaggcaatgagggtgacgctccagtcagagtggggagtgaaggtatcccgaggcatagtgaggagagggggtaggtgccgctctcaagccagaggaatgagacaaagaagggaggtgagggtgaactaggccgccgtggcccatggaggtgagtatgggtgaccccttccacctttgggctgtgctcccaggcaccatgggcccagggcccactcaccaacgacgtcatggtgaagccaatgacctcgaggtagccgtcgtcatgccgctggggctcaaagtcgtggtgctccccagggtggccccagggcatggtgcccgcacagtacctgcaaaggcgggcgatgacatgggcctcaaaacacagtctctgcaggacaaggacagcagggctccccccagctccggtagccccctcctcacctggggatgttcaggaaaacaacacactggggtttcaggtcctggatcttgggagtcaagtccattccatcacactggaggcgggcggggagggtgttgaggtgcatgtgccaggtggcctccgcctccctcccttccg

SEQ ID NO: 20842 - DNA, 1562 bp, Artificial sequence
  DNA replication origin
cgtgaagctcaaaggctgtgtttgtgtaaggctgtgtctgggccctatccccaccccactgagcctcctgcccccaaccaggcagaaaggaggggccccagagggagaggcctcaccttgagggggtgcagcatccccttgcagtgacctgcaacagagcatgatgtgctgtgaccggctacggcacaggccagctggtcgccctccccaaccccaactgggggcatcttcatcctttccacagtttattgagtgcctgctacacaccaagcactattccaggcactggggatacagcagggaaacgagacagaggaaggccttgccctcatggagcttacattctagttcagggatacaaacaagtcaaataaataaggagttctgagagcaggggtgctcttaagaattcagaacaggtgatgtggcacccctgcagagggggtcctgggagtgatctctccaaggaggaaacagccaagctgagattcgaaggggatgggggtgggggagctccggaaagatgggggaagagttggaggcagcgatgacagaagtccagtggtggcaaacacctgatgcctcaaagaaccaagagaagagagtggggcaggaccatggaggtgaactcagggagggggctgggagcccagtgcaatgacggggggcctggggagaatccacgtccaaagggctgctgagaaagaagcttctaggttggggagtggcctggtatgctctgcatttttagttgaccgtggtatggagatgggggttcgagggcacgaatggccacagggatataagagctgggggccagggcgtggcagccgggaagggctggtggcagtaggggtggggaggagtgctcaggtggtgggtccgggggctgccaggactggctgaaggatgaggtccagaggagggagaagtcagggagggaaccagggtggacgtgaggccgcttccccacagaaccacagggctgaaggccgtcaggtgggctttggccaggttcaggttgacaccatttagttaactggtggaggggctagaagcagggattcagaagtcatcggcttacaggtggggctgaaagccaggggctggagggacgggacaccaggactcaccggggcgtgggtgagcagggtgaggtggggagaggggaagtgggggttgggaggtcaggccgggccgatgcccccagcagctcagggtccaggatataaatctcatcctgtgcgatctcagtcacatagttgaggtgctcctgtggggggaggtcagggcgggaggtcagggcacctgacggtgggggccgaggggcagcaaggctggtagacctggagaagcctctgccatgagcacaaacactgaaaggaggtggccaggcaaggggccctgcctgtccctctcccactccttcccattcctgacacctcctccgactgcccagactttaccaggtgagctggcgcctgaccagaatgcctttgcttctgtgtctccctggatggctctgggcttccaggccctcctacccacccagcaagcctttg

SEQ ID NO: 20843 - DNA, 2299 bp, Artificial sequence
  DNA replication origin
ccagctgtaaacatgtcaccgtgagagtcccgccccccacccccaggccgcacagtccgcgatgaaatgacaggggagcggggagggtcgccggagcgggtgccaagcaaggcagggcaggcaagtgcagcaggcgctgagtttccgggaggaagcccggaggaggtggggtggggcaggagcgggggctggggacccggccgaagaccagggggcccaggaagcctcttcccgaaggcctccccctctccagcccctccactcctgggagggcatctgctgcggccagggagcgccctgccccagaaccccggcaaaggcatatccaacccagccgtgtcttgttccctgtgagcctccgggtccggcggggtcctcaggggaacaggtgaggcccccccagctcctgagtccagccctaggtctgggcggctccttagggggcggcatggggctctttccctggggcctaggtccccccgtggccgtcccactggaatgtggcagtgaggtgggcaaggaaggcgctcgtcccctggccgcattgtccctcctgctgcccgtgggcggcccgctacacagccgtctcctggtcctcccgctggatcatctggtagtgctgccggttctccaggtaggcggccagctcggtgtcctgagccttctcagcccgctgccggggagtgtcgccctggaggagggcggagctgcgatcagcaggggccagaggcaggcctaacccctagcaggctgagaggcaggggctctacctccctgtggcctggtcagggagggaggcctctctgcccaccagctcctcccctgctggctcaggtttcccagggtctggactgtgtcttcccagggacagcccccagccccagctcccgcctaggaccttgggaaaggtttggttggtgccctcgtgggctccctgcctgccgtctgctcacctgctggtctgtcttcatgagcgaggccccggcctccacgatgtagtggcagatggtgcgctggcccagggccgctgcttggtgcaaacaggtctccccgctgggggagcaggggctggctgtgtaccccatcccgtcccctgatccacccatctgtctcccaagggccatcagaaagggcaggaagttcagggctctggggcaataggggtggcccaggggatgacagatgtgaccaggaagtttatgggctctgacctgacaaaatgggaggggtggggaaaagggtggtttccggggtgaccacggttctgcactgcccagatacttacttttcctccaccgcatcaaggatctctgggggggctggagaaggggaggtggtggtcagagaggcctggcagcccctcctcctcccaccttggccccaggccctgggctccactgcccggctcaccgtggtccagcaggtagcggaccacatccttgctgccagtgctgactgcgtggtgcaggagcgtgcgactctgctcgtctcggtgcatgaggtcgcccccagctcggtgcagctcctggagctgagggcaggaggcatggcagggctggacctcctggggccacccctccttccctgagctcacacgctggcccacagccgggtacaccagcacaggcctgaaacgagtgcgctcacacatcttactcctgagttgcctctgtgggtctctctggagcacaccggaggaggggcctctcaccccacagcctgtgggctctctggcagcactggtgaccaagccctggagcagtgcttcctctgacctgctcctttctaagcaccagggacaggtggactgagctaggaagcccctactaggagccatctattgtggcctagacagagatacagtgaagtggaatgggacgatcactggagatcccacagagggccagacgatgacagatgacagcacctgagcaggtcagctcttggcccaacccagaggcctcgctccccagggcccgagggagctgctgggggaaggaactggagcctggagctagtaccttacagaagtcgttcctcttggcagcctcaatcagctcttcacctgcacggaatacctgcctgttactctgcagtcggaggcctgggcttgggttggtgcctcagtggacaggactgtgccggccaggcatgtgtgcccagggctccgttggtgcgtgaagctcaaaggctgtgtttgtgtaaggctgtgtctgggccctatccccaccccactgagcctcctgcccccaaccaggcagaaaggaggggccccagagggagaggcctcaccttgagg

SEQ ID NO: 20844 - DNA, 862 bp, Artificial sequence
  DNA replication origin
agaccaccgctcggaagatggggccgggagaggccgccgtcgcagcgcagagggcaccggcggggagacgcgaggacgcggggccgggaacacggacgccggagtagaagcgcggggggcgcgggctggagcgggggcggggacgccggggtcgggggcggtgcgggtttgaggggagggggcggggcgggtccttccctgggggggtggggagagggggcgggggcccatgtgaccggctcagaccggttctggagacaaaaggggccgcggcggccggagcgggacgggcccggcgcgggagggagcgaagcagcgcgggcagcgagcgagtgagcgcgcggcggcccctggtccgcccggccgcggccgatctaggggctgggggctggaggcgggggtgggggtctgagctgcgtcctgggctcgaggcgtcccccggggagtcgcctcttagcggtgcgtccgggctagcggcgaggggccgccccaagtcttcccaccgccgccaccttagcagcccgacttggggcctggaaagtggagcacgcggaggtgggagggccctgcacgcggcccccggtggggaaggggacgggccagggattcagactcgggctctcccctcaggatgcagcaccgaggcttcctcctcctcaccctcctcgccctgctggcgctcacctccgcggtcgccaaaaagaaaggtgatgggggatgatcgaaggagggctggggacgggcaggcgaggcccctccacttctgggctgggccgcctgggttcctagcctggaaccccaggaaggcggctcccgagggagtctccccgtgccccagtcctgaactctgttcctcgcgcgt

SEQ ID NO: 20845 - DNA, 2434 bp, Artificial sequence
  DNA replication origin
ttcctcctcctcaccctcctcgccctgctggcgctcacctccgcggtcgccaaaaagaaaggtgatgggggatgatcgaaggagggctggggacgggcaggcgaggcccctccacttctgggctgggccgcctgggttcctagcctggaaccccaggaaggcggctcccgagggagtctccccgtgccccagtcctgaactctgttcctcgcgcgttgtagataaggtgaagaagggcggcccggggagcgagtgcgctgagtgggcctgggggccctgcacccccagcagcaaggattgcggcgtgggtttccgcgagggcacctgcggggcccagacccagcgcatccggtgcagggtgccctgcaactggaagaaggagtttggaggtgaggcggggcgcagtcagagggcaggagacggggggcacagcctcgccgaagcctgggcggacccttggcggagggcggggccgcgggccgcgcagcgctgacctgggccgctctctcgccagccgactgcaagtacaagtttgagaactggggtgcgtgtgatgggggcacaggcaccaaagtccgccaaggcaccctgaagaaggcgcgctacaatgctcagtgccaggagaccatccgcgtcaccaagccctgcacccccaagaccaaagcaaaggccaaaggtcagcgaaaggagaagggggtggggctgtcgcggggggctgcccccccccccccccgcctgtgaggggacaattccaagttaaaccttaagttttgagtcctggccagtggcttcctgacatcgcctcacttggcttccctgcctggaaaagtctgaagatgggcactacaagagaggccgcaggtgatgctggggacataaatcctccctggcccaaatagggaccaactcaaactactccattggagcatctggcttaggacccagggagagtgtcctggaacggcttgcctttgtcagctctccagccacgggcagcatttggtcagctctgccctttctagtgttgggaggaggtcaaggcccaccctgggcctctcagctcactcgtgactcagcccagcgaggccagcagggcaggggtgaatctgcccgcttctcaggtgaggaggctgaggatgcccagggctgctgtgaccaggactaggactggaaacttgaaggttttctgatcccaagtggaaataggaagctggggatgtcccatgtccacatcacaatggctgccccatcccctgcttccgagtcagctgattggaaaccactagggggcagaatcttctccttccctgatgcccgggtgtttgtggagccggcggtctgcaatgggtcagcctaactgctgatatggtattaatatttctttcttgttttacagccaagaaagggaagggaaaggactagacgccaagcctggatgccaaggagcccctggtgtcacatggggcctggcccacgccctccctctcccaggcccgagatgtgacccaccagtgccttctgtctgctcgttagctttaatcaatcatgccctgccttgtccctctcactccccagccccacccctaagtgcccaaagtggggagggacaagggattctgggaagcttgagcctcccccaaagcaatgtgagtcccagagcccgcttttgttcttccccacaattccattactaagaaacacatcaaataaactgactttttccccccaataaaagctcttcttttttaatatataaaagccccttcccaaggagtttgctgtggaaatgtgtttgggagtgggaaggtggggagaaagaccaggctgtagggactggtgggtttcagggggcttggtggtgggtgctctccagagctcatggaaaaagcagaacaattacaaacatttcttccagggcccctgaaagggtgctccccatcaagtcacctaagcctttcggtcctcatctccctcagggaccagggctggggaagggaacctggctgactcactggaaccaccacacccatctcagcctcacccagtcaaaggtcttttgatacaacccacagccaatcaggaaggttctacccatgggggagagcagatgcgagggctgcgtgcctacctcactgcccacctccccccttcccactgtcatggaaacccgagtgagccaccaggttgacccctttcctcttgcctgtgtgacccaggcctccaccctgcagaagccagggggtgagaggtttgaagagggcagatgggaatgccatccaccacagcctcaccctgactcgatgtgtgacctgggacagccttctaaggccggggctgcagggggctgtcttctgaatacgtggaccactcacggctcagcctgggatcgcagaaggccagacctcagttcctgagacagaacctctgacctccc

SEQ ID NO: 20846 - DNA, 1871 bp, Artificial sequence
  DNA replication origin
ttgcgctcccgggccgccatctgccgcttcttgcgcacctggttgcgagcgatgctggcgaacttgcgggccacgttggccgcagggcgcatgccagccggcgtggcaggcacaatctcaatggctgtcacacactcattgcctgtctgcttcgtcacaatctggatcttggaccatctggaggctgggttgagggcccgcggctgcaggggaggggcgggcatggcgggcgtggtggcctctgtggtggacagctctgtggctgggcgttccttggtgttctgggtggcactgcctgagctggactcattggaagtgtccttatcagccacggggcgcggtggcggtggcagcgctggcgggggggcctcctccagcttgccattgcgcagctcctcccgggcggcctccccgggcgggggcttcttgacgctctgcttcattagtgggctcttgaggaaggccagcgtcttggctttcttctccttcgggccctcgggccggtgcttgtggactcggctgcgactggccagggagatgtggatgtacagcaccgtcatgatgaccacaggcaggtagaaggcagcaatggctgtgccaaaggtcactgctgggttggacaggaactggatgaagcactggttgtcgggcaccgtccgcttacccaccacaaactgccagaacaagatggcaggcgcccagagcacgaaggacagtacccaggcagcagcaatcatgaggcctgccatcttggtggtgcgccgggcagggtaggtgagaggcttggtgacgcagaagtagcggtcaaagctgatgatgagaaggttcatgacggaggcgttgctcaccacgtagtccagggccagccacaggtcgcagaccacggcgcccaggggccagtagcccttgatgatgtacacggtgtagaggttcatggagaaggcgcctatgatgagatcagcacacgccaggctgaagaggaagtagttgttgactgtctgcagctgcctgttgaccttgatggacagcatcaccaggatgttgcccacgacagtcaccaggctcagggagcctgtcactgtggcaatgaagaccatttccaccgtctcatagcgattgtgggatgatgacgtgaccaggcgcacggactgattgcccgagctgccattgacaggtgtgaagttggccatgttggttgccaggggtgggtaggccgtgtctggggaggaaggggagagaaaagcatgaactacaggagggaatgggggagtcatctggaggtacactggattcaaggtgacagagggacattctctggcagaatgccttgagagaactctgtcccgccatcccgcatttgcccattcattcaacattaattgagcacctactatgtggcaagcattgctcagggtgctgtggctacagaagtgaataagacacacatggccccctgcctcatggggggagacatgcaaacacgtgagccacaaaagaaaaaaaaggcagggtgatgagagagtgagtcagaaggcaggacaggcatgactccttgctaggtggcctcacccaccaggtcatctgggtgatgaggagccagccacaggaggagctgtggagagtggccctgccaggggcagtagccacagcaaaggcctggaggcagcgcaaggcctggacagaggccagtgctgggggagctcagggaagcaagaggaggaggagagtggtcccagaggcccacgagcatgtgggctctggagggaggtgttctgttcatccatttacccattcggtcatttcttaacacctgctctccaacccctgtagaagacactgggacaaaggcaataatcggggtatgtatgagc

SEQ ID NO: 20847 - DNA, 1356 bp, Artificial sequence
  DNA replication origin
cccagatcctggcggctgggctgagccgggaccactggatggccggtgattaagtcctgctcttggcccgcgtgagggagctgccaggtgctgacagggcgaggctcagggtctccccgactccgccccgccccagctgtcgtcgttttggacacctcggggtcacccgcagacattccgaccccctctggcgccttccctggaatccagatacgcctggcatctggggagcgagccgccgccgccggggctgtgcgcaccgctagatggcaatgtcggtccctggtgcccgctccggacctagaccgtgcggccgccgttggccaccgcccccaactccaatgcgactgcgaacccagaggagccctcaggcacagcctcccggggaagtgacgcggggtcccctcgccaggccccgtcggacgccgccccagagctgccctcggctccgcgcggggttctcgggtgggaaagttgagggagcccggattccacccggcaccctgcgaggaacgtgtgggcgggagcgcgagtgcgagttctgtttgtgtgtgcctacgggggagcgcgagtagacgctagtagctgtatgcatgtgcgtgtgtgtgcgcacggccacgcctggataccagtccgcccgtgagagcgcgtgagcatgccgcgccgtgtgcacacgtgcatgtgcatgcgtgtgcgtgcctagggtgctgtggccgggaggatgcacacggttcgggtgcctctacacctgtggacttgcatgcacaagcaaatgcagggccgagagtgggtgaccggtcacattccaaacgcccctgccggagactcagccagaccttagctgtccgcctgagcgcgtagagggtcgggccaggagcctgcatcgggattgcacctggcctgtgggtgaagggttgtgcgggcgaggaggccagactactaggggctgcctgcgacgggccacctaactttgggacgccgtcttagcccggtgcccagaggtgtccaagtccttaaagatgtggcagagtcctagcctctgactgacatctgtcgaggggcctctgcgagagtcgcccaacctggccttgagggacaccaggcacgctcagctctaataactcccctaagaggcgttattgccaaaagccgcccattctcgcggcgagagggcatccgcagtgcacccacaaggcggaggcccggacagagctcgggtcaggcgagtgcaagactcttgtcctccttctctcctcaccctgcaccctaccccagaggcactgtctagcccctgtgaccaaagtggggacccagtttctcacgctagggtcgggcgggcctcgagggccgtgtttt

SEQ ID NO: 20848 - DNA, 1174 bp, Artificial sequence
  DNA replication origin
cggccagcccccgagaggggcgcggaccgccggggtctccgacgcctcgggtgttgacccccgcgcgtcgccgccgggtgaccggcccggggcgggcggcgcggccccgccacgattggctgcttcctcgtgacatcacgcggctcggggaaaagtgcgagcgtgagcgcgagtcggagccacagcgccgggagctgcgggcggagcaggggccgcccctcgacaccccgtccccgcccccggccctcggcccggccgcccgccccgccggcccgcggggccgcgcgtccgtcccgccgtctgtctggcgcgaggggagctgggcagaggcggcgggtaagtggctccgcggcggcgcgggggcggggggctcgccgggaagagcaggaagcaggtccccgggacgctctgaggctccccagaggtgggttcgactgggacagggcgccagaccccctccggggcgagcgcgggccgggagcggcagtgggccggggctgggggaccccgctggaagcaaggccgggggctctcggaggcttctccaggtgcgcccgggtgcgcccgtgggaaggggtgggcatccaggatgtcgggggcgggggattgcccgcccacagaccccacggagccaggggcagccgtcgggggtgggaccctgtactccagccctcccactggcggctcagcagggcgccgggcgctgaagccccaaagagcccttttcccgccgtctccccgccctccctctccctccacccctttgcccccgcgctgccagcccactccggcccctggagtcctccatctacgaccttgagccccgacggaaaacacccctgccctccccgacacccctcccccgctccggtactacccccctttgctgcccagcctccaagccggggtcctccagctccaggccccctcctccggccccgcaacggaagtgttgggcacaatgtcggtgccaaatcttcgcctctccctcccttggactctggagtctcctctcccgccccagggacagatccaggggccacagccttcccagagccatggagtgaatgcccaagaaccgaagacctacaccccaaaccaccccacgggcgtgcggagcaccccctccggtctcgcccggggaagaggggtgtcgaggactcgggaaacacag

SEQ ID NO: 20849 - DNA, 1630 bp, Artificial sequence
  DNA replication origin
cccgcctccgccctgaccatactcccgggaccctgagctattttcgcgcctctccgggacctcagcgccctgcgtggccccgctggcggtttggccgcgaggcgcgggagtctgaccccagcgggaggctgcgggtgggtggggcgggctgcgccgccagggatccgtcggggtcgagggccgggagctccagccgcgccgctgcgtgccggccgggccgcccgcgaggaggggcgccgtcggggcctggggaagcgcaggagcgggtggactggagaggttcggccggggagagaagagcccaccgcggaccactcgcccgcacccgctcggctgcctgctcagcgttccgggccggggaaggggcgcgcccctgctctcccagccctgggatgggacgcgccgccagtccaggcgcagcctggaccgccagttcaccgccgcctgtgagggacagtcggttgcccaaggtcgccggggccggagcccgggacaagatcccggagagcgggcagccaatctcagaggtcgctgggaaccgcacgggccgtagcctcaggactccgggcctcgcccaggctgggcggaccttggggcggcttcagcacctcggagagctccccgcgccctggcccagcagcctcgcctgcctgattccgctccagcgcttgtctccctccgagagcgcccttccgggggaccgccggggtcggacgctccccactgcgcccaggaccgaggcctgtaaccccaaattctgatcgcaaacatttgattaagcttaagacgtctgatttcttctctcggggaaacaactcaagaccctcccccgagggccggaggtggtgagggcgattgcgggggcggcggtggaggagaggcaggagcctcttggcagagaatgggagggaactcgagtagaagccagcgctgcggggctcttggtgtggggttctccgcgcggaacccggaagtggagttcgggtccccagagctcgcgagcgcgacggctggggttggtcggaattgggaacttcagggctggggttggttggctagagtaggaagccatcttctgttgttacatgaatgatcgggtctcccaagacctcataactgggggtgaaagaagcactactcttcttgccccacttcacaaataaggaaagttggttcataagaccctaagacggcactcctgcacttcttccactttgccatatccttcccagggcacagaagagtgtgatactcctaagaggaggtgggggttgtggaggaggaaggcagatagatccttaaaacagtcagatgagaaaacaagcaaggccaagggcgggaggctgcatacacaagacacgcctccagctactgaccccagctcttccagaagctggcaggcaaagtcactttaatttctccacaatccctgttatgaagggcttttgacctctctcaatctcccaaccccaagaacccacggtggaaccctggagagctgaattgggaacaaggggacttggtggtttctctgctctgcttttgatgccactaggtcagcagacaagtaacagaatttctctgaacctatttcctcatctccaaaagggactgcccctatctttgccct

SEQ ID NO: 20850 - DNA, 702 bp, Artificial sequence
  DNA replication origin
agacagaggccctcccaaagagcggcgggtaggacccagactgaggttgcggagcgtgttgccggcagtgctgctctggactgtactgaaggcagacggccggttcaggaggccctggtcctgctgcgttgacgaggcctgctccgggggatggaagggctcggtctgtacaaaagaaaaggaaggggtagtagctctggcagaagcaggggggacactgtcctggtgtggcaagagggaaggaactcgagtgccagagcagcggctgcaaaggcacaggatcccaaggtgctggcagcactcagctgtggggtaactgacccgctgtcggagcctgatgtaagcggaagtcctggggcgctccgtggagggctgagggggaggcggtgggggtgagggggtagcagaatcttgcactgtgctttgctctcccacctggatgccagaagagcgggaggacagcatgtgcaggaaattgtggaggagaggcgtccggcgaactggctgtgattgcaggagggcacgctgacggtagtgggataattctgttccatctatggggatctctggttcgtcatcaccctgcaacgtggaccagcatggggcagggggtagagcaaggcagttaggtagaacctccaagtaaatcaagaaaaactaaccactgacaatcatccaaggaaaacaatgttcataggtagg

SEQ ID NO: 20851 - DNA, 1126 bp, Artificial sequence
  DNA replication origin
cccctttaaggctgcgggcggcgcgtgcccacaggcctttcaaatggaccaataaaagtccgatgggcggtccgtcgaggaccaataaagaacgaggacactgcggggtgtgcggcggcccaagcggtttcaaacggcttagagcaggccgcttggttctgacccagctgaggtgagtggtcggtgggcctgccccacccgcgaggccctcgagtgcaggcatcgcgcgcgcagaggagcccctgaatcctgggcggctggaggtctccagacgcgcgccccacttgccccacgaacccggcaggtctgaggcggcgaagcgagccggaggccgggggacctgcggcgggcagggccgggggcgtgggcgctcgtgtgcggcggaggccggggttgggctccaggtggccagagcgcgccgcagcgtggcgcgggtggcagcgtccgcggggcgcgggcggtgcagggccgcgcctggcggcagcgatttaccaagactagggcgggggccccgagagccggccctgctagagtgcctctcgcgtaattgtcaagtgaatgaataagtaagcgcctacgagggctgtggtggttgcgaagggccttgtcgccctggagcaaggacagcggcaccggggcctggccgcacacctgtgtccctgctggcttgctgcgatgtgaacgattccgatcatccaccaccccgcccttaacgactggctttctctctctcaacgtgtcgggagcgttctggtgtccttccagccctggaggtgttggggaaccaatacaatagccagcagtgtgggttgggccttgctactttaaggtcgggctcggtgaactagattcttacttttgagctctcccctctacttgtaatcgtggtaattgttgagcaggattgaaatgcattccgttgtgtttcttggatagaaaatgatgaaagggttgttgccagagtggctagtgtgtgttagaaaatatattcgtgttgatgaatcttaacaatgagttttttattcagcatcaatagaggttgaagtggtttttgcagaacttgccccaaatttatgcgtggctctaatttaattctcatgggaccaaggcatcaaatcttggccca

SEQ ID NO: 20852 - DNA, 1080 bp, Artificial sequence
  DNA replication origin
cagagtcggggttctgagcaggggcagcagacaggcagctgtgtttcctatgggtcaggcatttgaacggtgtgacctcatttcgtcctcacaataaccctaggaggtggggatcatccttcccatttcacagatggggagactgaagcacagagaggataagtagcttaccaaaggccacacagctggcgagtagcagagttgggattccagcccaggtctgcatgaccttaaagcccttaaccatttcttcttttttattttttatttttatttttttgagatggagcctcgctctgtcgcccaggctggagtgcagtggtgcgatctcggctcactgcagcctccgcctcctgggttcaagccattctcctgcctcagcctcttgagtagctgggactacaggtgtgcgccaccacgcccggccgcccttaaccatttcttagacagccttcccactaggcctggaaagtagatggggatgtgggcagaaaagcagctcggcagcctgggagcgggagtgggaggacgacagaagggagatctcttgacctgcctggtgttcccagatgtgaatgaatgtgccgaggaggggtattgcagccagggctgcaccaacagcgaaggggctttccaatgctggtgtgaaacaggctatgaactacggcccgaccggcgcagctgcaaggctctgggtaagggctgttggcacttggctgggtgggcagagggccgagcatggaggaaggccaggtactctggtgctcagggatttgcagagaggtagagagatttctgtcacagtaaaatgcagcaacagttgcattctgagccccaagaaaaatgctgctggggtggagtggggtggggaggggtggaggaatatagtttaaaggttgccactcttctggtactgatgctgacagcttggggcatgtccttgtgagcaagtggctccatcggtcagctgaagacctgctgatgggtaccaggggcggctctgaaacccagtgggtatcccatgtttatactgtttcccagggccagagcctgtgctgctgttcgccaatcgcatcgaca

SEQ ID NO: 20853 - DNA, 911 bp, Artificial sequence
  DNA replication origin
catcccactgtggagtcctggggagaaagcaaatgcagacattcagccagccctgtctgagctgcttcctgcccaggaccctcaccctcccaccttgagtctcatctgtctccagcttaccctagaaaatgacaggctcccatctctttgttggcccaagccctgccttgctatgacctgaccctccatctctctaggaagcccccaatgtgccttggaccagttcctgtgttggaatgggcgctgcattgggcagaggaagctgtgcaacggggtcaacgactgtggtgacaacagcgacgaaagcccacagcagaattgccgtgagtgtccccagtgggcggacctggcccatggtttgtggccgaaccccacccatagggttcaaagggaatcctccctcaggactcttgcagctttgggagctgttctttgtggtccaggtggaatgccaagttggctctctgggggaggattctgggctcaactcccaactctggcttggctggcacagggccccggacgggtgaggagaactgcaatgttaacaacggtggctgtgcccagaagtgccagatggtgcggggggcagtgcagtgtacctgccacacaggctaccggctcacagaggatgggcacacgtgccaaggtgagctggggcctggtttgcagcagagtcggggttctgagcaggggcagcagacaggcagctgtgtttcctatgggtcaggcatttgaacggtgtgacctcatttcgtcctcacaataaccctaggaggtggggatcatccttcccatttcacagatggggagactgaagcacagagaggataagtagcttaccaaaggccacacagctggcgagtagcagagttgggattccagcccaggtctgcatgaccttaaagccc

SEQ ID NO: 20854 - DNA, 865 bp, Artificial sequence
  DNA replication origin
gtggcgcatgcctgtaatcccagctactcgggaggctgaggcaggagaatcgcttgaacctaggaggcagaggttgcagtgacccgagacggcgtccctgtagcagagtgagatgacatctcaaaaaacaagacaatccgggaggtgaggggcgcctctgcctggccgcccctactgggaagtgaggagcccctctgcccggccagccgccccatccaggagggaggtgggggggtcagccccccgcccggtcagccaccccgtccgggagggaggtgggggggtcagccccccgcccggccagccgccccgtccgggagggaggttggggggtcagccccccgcccggccagccgccccgtccgggaggtgaggggcgcctctgcccggccgcccctactgggaagtgaggagcccctctgccaggccaccaccccgtctgggaggtgtacccaacagctcattgagaacgggccatgatgacaatggcggttttgtggaatagaaaggagggaaaggtggggaaaagattgagaaatcggatggttgccgtgtctgtgtagaaagaagtatacatgggagacttttcattttgttctgtactaagaaaaattcttctgccttgggatcctgttgatctgtgaccttacccccaaccctgtgctctctgaaacatgtgctgtgtccactcagggttaaatggattaagggcggtgcaagatgtgctttgttaaacagatgcttgaaggccgcatgctcgttaagagtcatcaccactccctaatctcaagtacccagggacacaaacactgcggaaggccgcagggtcctctgcctaggaaaaccagagacctttgttcacttg

SEQ ID NO: 20855 - DNA, 994 bp, Artificial sequence
  DNA replication origin
gggcggggcggtcgggcccgggacaccccctcccggtcccctggcggggcagcgtcggctctggcagcactggaggcggcggcggcccgagggcgacttgcggggcgcgcaggccgccgtgcacccgggacgcttccccctcggggaccctccgcgggcttctccgccgcgccgtccggcgggagccggcgggaccccgggcgagcggcgcgggcggcaccatgaggcggcagtggggcgcgctgctgcttggcgccctgctctgcgcacacggtaagcggcgcccgccgggaaagtttgtccctgggtccggccgctgcaggactcgcctcccgggacctggacggcgcgggccggggcctgagacccctcgccctcgctcctagccgtggccctggggctgcgtgcaggggagaggacccggagcggccccggctccagcagtccgagcgggggcatcagcggaggcgcttccgcgggttcgggtctgggccggggcgcgggtctgggccggggcgcgggtaaggtccggggcgttcgttcgctcgccctccctcgctgctctttcaagagcgggggctgcttccctttcaggttaggtcgggggctctgtgtccttggtgcgaatgaatgcgtgcgaagaaagggaggcgggtgaggagggtcgctaaacccataaattgtaaatagccctccttcctggggctgggggctcgggcgggttgcggagagaggccccggtagaatctggtacttgggcaccgggattcctctactcggagaacgattcccggactccaggtcttgctcccaccaaggggctctggggcactgtttgcgggcagcatctcccctcggcggtgtttcggggtccctctcttggctgcggccagtcagcttccagccctggatcgtcctaaagggaggtggttggaaagggggctgaggaggaatatagggaagaaactgctggaaggctcccgcagatctgccc

SEQ ID NO: 20856 - DNA, 1322 bp, Artificial sequence
  DNA replication origin
agtcttgcctagccccaagatcatgtaagcctgacctgacgctactgccgccttcagtcagcaagaagaactacacacccagaaaatgcttcagtaatagttaccatggtgatgctagttcaaccacattgcatctggataaaaatttcaggcaaaacgatatagaaaactactgcctaacaaggagttaacaccttacatcttttatgttgttgttgttgctgtcgcaaagtatggttcatgttagctttggtaaaagatggtaatttgaagtgaaagtactgaaaaaaacaagcaaggatgaaatgtcaatgtatccatttagagaaatctaataaccactttgcactatgccaaattactttcccctcagctaacagggggcatttgggtcttcctgactctatttactggtgaggaaagtgagttaatgaaatccatagatgatccaagcccaagaaatgctggcatatcagctgggagggaaaaaagcgatatactgggccatcagaaagttgggcatttgggcaaaaggaacaaaacaagattcaacctggaaaaatggaaggtggtgaaattaatccgtattattaatatgcattagggagagtagaccacaaaaggaaggaagactagagacaagtttatgattttatgcagtaaatcaaaagttaaatctgagggaaggacctacagactggggctggaaggaggctgagggctttgtgggagtgcagctgcccatgaggactcctttcctgaccccctcccttccttgtcaggatcagaaagtcaaagaaggtgaagaggctaacaacagtgatttacaaagacagcaaggaggaactaagtctgtatgggccgaatctgggcctctgagctggagcaacaggacccagacaaccatctcaggaaatgagtgaatgaaaaggggcgggggggtcggtgaattatttagccctagaacaacgctgcctagaccgggggaggccagggagaagaaaatctccgaaaaggaattttgacagtgagaacgccagttaagatacagcactccaggccccctgatgtcccttgtttgatgtcaataaagacccaagaggattatgcatccacaagccttgcgtattcgcagacatcaaaaaagtctggacttggggccggtaggcgggggcagggtcacgtccaggcgacttgggtcagctcaggtgctcgtctgaagcatagagctggagtgagcgggggcgagacttgctgctaggataattttttttttttaagttagggaaatttaagcagtagtaatagcgacagggaggggg

SEQ ID NO: 20857 - DNA, 1011 bp, Artificial sequence
  DNA replication origin
gggtcagccccccgcccggccagccgccccatccgggaggtgaggggcgcctctgcccggccgcccctactgggaagtgaggagcccctctgtccggccagccactccgtccaggagggaggtggggggtcagccccccgcccggccagccgccccgtccgggagggaggtgggggggtcagccccccgcccggccagccgccccatccgggaagtgaggggcgcctctggccggccgcccctactgggaagtgaggagtccctctgcccggccagccgccccgtctgggagggaggtgggggggtccgccccccgcccgggccagccgccccatccgggagggaggtgggggggtcagccccccgcccggccagccgccccatccgggaggtgaggggcgcctctgcccggccgcccctactgggaagtgaggagcccctctgcccggccagccgccccgtccaggagggaggtggggggggtcagccctctgcccggccgcccctactgggaagtgaggagcccctctgcccggccaccaccccatctgggaggtgtacccaacagctcattgagaaggggccatgatgacaatggcggttttgtggaatagaaaggggggaagggtggggaaaagattgagaaatcggatggttgccgtgtctgtgtagaaagaggtagacgtgggagacttttcattttgttctgcactaagaaaaattcttctgccttgggatcctgttgatctgtgaccttacccccaaccctgtgctctctgaaacatgtgctgtatccactcagggttgaatggattaagggcggtgcaagatgtgctttgttaaacagatgcttgaaggcagcatgctccttaagagtcatcaccactccctaatctcaagtacccagggacacaaacactgcagaaggccgcagggtcctctgcctaggaaaaccagagacctttgttcacttgtttatctgctgaccttccctccactattgtcctgtga

SEQ ID NO: 20858 - DNA, 1268 bp, Artificial sequence
  DNA replication origin
tggccgggcggggggctgacccccccacctccctcccggacggggcggctggccgggcggggggctgaccccccacctccctcctggacggagtggctggccggacagaggggctcctcacttcccagtaggggcggccgggcagaggcgcccctcacctcccggatggggcggctggccgggcggggggctgacccccccacctccctcccggacggggcggccggccaggcagaggggctcctcacttcccagtaggggcggccgggcagaggcgcccctcacctcccggacggggcggctggccgggcggggggctgatccccccacctccctcccggactgggaggctggccgggcgggggtctgacccccccacctctctcccggacggggtggctggccgggcggggggctgacccccccacctccctgccggacgaggtggctcccgggcagagacgctcctcacttcccagacggggtggctgctgggcggaggggctcctcacttctcagatggggcggttgccgggcggaggggctcctcacttctcagacggggcggttgccaggcagagggtctcctcacttctcagacggggcggctgggcagagacgctcctcacatcccggacggggcggcagggcagaggtgctccccacatctcagaggatgggccgccgggcagagacgctcctcacttcccagatgggatggcggccgggaagaggcgctcctcacttcctagatgggatggcggccgggcagagacgctcctcactttccagactgggcagccaggcagagacgctcctcacttcccagacggggtggcggccgggcagaggctgcaatctcggcactttgggaggccaaggcaggctgctgggaggtgaaggttgtagcgagccgaggtcacgccactgcactccagcctgggcaccattgagcacggagtgaatgagactccgtctgcaatcccggcacctcaggatgccgaggctggcggatcactcgcggttaggagctggagaccagcccagccaacacagcgaaaccccgtctccaccaaaaaaatacgaaaaccagtcaggcgtggcggcgcgcgcccaggcagttggcaggctgaggcaggagaatcaggcagcagtaccgtccagcttcagctccgcatcagagggagaccgtggagagagggagagggagaccgtggggagagggagagggagagggagctctggtactttcttatagccacacgaac

SEQ ID NO: 20859 - DNA, 952 bp, Artificial sequence
  DNA replication origin
ccgtccgggagggaggtgggggggtcagccctccgcccggccagccgccccgtctgggaggtgaggggcgcctctgcccggccgcccctactgggaagtgaggagcccctctgcccggccagccgccccgtccgggagggaggtgggggggggtcggcccccctgcccggccagccgccccgtccgggaggtgaggggcgcctctgcccggccgcccctactgggaagtgaggagcccctctgcccggccagccgccccgtccgggagggaggtgggggggtcagccctccgcccggccagccgccccgtccgggagggaggtgggggggtcggccccccgcccggccagccgccccgtccgggagggaggtgggggggggtcggcccccctgcctggccagccgccccgtccgggaggtgaggggcgcctctgcccggccgcccctactgggaagtgaggagcccctctgcccggccaccaccccgtctgggaggtgtacccaacagctcattgagaacgggccaggatgacaatggcggctttgtggaatagaaaggcgggaaaggtggggaaaagattgagaaatcggatggttgccgtgtctgtgtagaaagaagtagacatgggagacttttcattttgttctgcactaagaaaaattcctctgccttgggatcctgttgatctgtgaccttacccccaaccctgtgctctctgaaacatgtgctgtgtccactcagggttaaatggattaagggcggtgcaagatgtgctttgttaaacagatgcttgaaggcagcatgctcgttaagagtcatcaccaatccctaatctcaagtaatcagggacacaaacactgcggaaggccgcagggtcctctgcctaggaaaaccagagacctttgttcacttgtttatctgctgaccttccctccactattgtcccatgac

SEQ ID NO: 20860 - DNA, 963 bp, Artificial sequence
  DNA replication origin
aggtgcgtgagcagggggcgcgcggagtctctcgtcccgctggggcctgagggagggagaagggcggaggtgggttatgtttctggggtgtcggtgcctggcctttactcggggcccctgacgattcgctcatcgccgcctccacccaggcctgtttcgactgcggcgccaagaatccgagttgggccagcatcacgtacggtgttttcttgtgcattgactgttccggggtgcaccgctccctgggcgtccatctgagcttcatcaggtaggctctccgcgcggttgccgtgtttccacccggccggccaggggtgtctgggcaacaagggagagtggctgcctcgacttgggccgctctgaattcggtgggaagcctctgggccgagagggtccggtagcctcctgccagagggaaccacctgtgtgggccctttggcacatgggcggtccgtctccgcctctgggccaaaacttcctcttttttgacggtcaggcttgagactctgagcgttagttgaggggaaagggaggcattgaccttgttgttgctgatatgttgttagaccagtatgtctctagtgagactgtgaccatccattaggggaaagccaaatccaggcgtgcgtgcctgagaatgtgacctcctttcggatctggggacataattagtactctttggagtaaatgaacgaagaggagagttttcatggacagggtagtgtggaggaaatggggtgatggctgattaatgtttcctgggtgcctacagcagcctgaggccaagtgacaggtatccgggttgccagggaaatcctgctggtatctgctagtgggtgagacgcagcccttgtacacaggtccacagagttggattccaactggaactggttccagctgaggtgtatgcaggtcggcgggaatgccaatgcggtaaagctccttctacttccctcaccttcc

SEQ ID NO: 20861 - DNA, 890 bp, Artificial sequence
  DNA replication origin
gggactcgctgtcaggcttgctgttaaccgagaacggctgaaggctgggcgagacgcgggccaatgcgtctgcccgttcgggccggagggacgaggagtgtttgggcagcctaatccttattcatcgatctgtaattagctggagtgggggtccccgcccccagcctcccgcagcctgcgcggcgtgggggcgactccacctgggggttgcggcgtgggaggggcggggggaagggtactacgcgcgcgaggaggtttgggccggtccgcgcgccgtcgccccgccccggctgcggattggcccggcgcggcgttgattcttgcggccgcggttgtcgtcgccgcccccgtcccgccggctgcccattggtccagatcggactccaatcaccccacccctcggctggcccaggcaccgctgaggccggcctggtgagcccgccctccccgccgtggattggcccgcggcgggacccgtcagccgcggttgtgtctgggaaggagagaaaatggcggcggagccgaacaagaccgaaatccagactctttttaagaggcttcgcgcagttccaaccaacaaggtgcgtgagcagggggcgcgcggagtctctcgtcccgctggggcctgagggagggagaagggcggaggtgggttatgtttctggggtgtcggtgcctggcctttactcggggcccctgacgattcgctcatcgccgcctccacccaggcctgtttcgactgcggcgccaagaatccgagttgggccagcatcacgtacggtgttttcttgtgcattgactgttccggggtgcaccgctccctgggcgtccatctgagcttcatcaggtaggctctccgcgcggttgccgtgtttccacccggccggcca

SEQ ID NO: 20862 - DNA, 1321 bp, Artificial sequence
  DNA replication origin
cctgatcctgggtgagatctccagccccgtgttccttgcactctgagctgctccctttgcctcccctctccagcacggggcaggatgaggagtggtcagatgaagagagtccccggaaggctgccaccggggttcgggtgagggcactctatgactacgctggccaggaagctgatgagctgagcttccgagcaggtaccctgggacccctttcctagcttcagcctctgccttatctgcctgagcaggggtgtcagaaagggaagccaaatacccacttcttaagggccagtcctctgtcccttcagctgttccaggtccagatagctggtgcctggtggctgcattcagggtctggggtggggcagcttgctgaccttgacctgcctctgcctgagccatgtctttgctagctgggctctgggaccacaccatccccctcagtccttgacccagttgcaggaacagggcctgggccagggccactggcagtgaccaatcccctttcccccaggggaggagctgctgaagatgagtgaggaggacgagcagggctggtgccaaggccagttgcagagtggccgcattggcctgtaccctgccaactacgtggagtgtgtgggcgcctgagtgtcctgacagcccttctgcaacgtttacccaccctggttcagagcccagcttctcctggagagccggaccctcagggccctgaaccgtcgctctctggctgctcctctgtcccttgagggaggaagtcctgggacccagggaggggaggggcctttgtctagggaagggactggtagggaagggacgagtctaggctgagggcaagatgggaggtcagaggtgacagaagcgttcaggggtgcctgggcctccccaggagctgtggactcagttcctgacctctgctttggggttcctggggtgggcttggggtgagtgtagttctggcctagcagcaccctcttgtggcttgttctagcgtgtattaaaacttgacacacacccacacacaaaaacaaaaacaccactgtcgggctcatgtgcatttttttgataggacacccttgccaggccaccagagggcatctagagagaggcctagcgtctgttatggggccggggttggaaaagggtttgcctgcttggtacctgctctggaacttcgagatactaatctggagtggaggggactcgctgtcaggcttgctgttaaccgagaacggctgaaggctgggcgagacgcgggccaatgcgtctgcccgttcgggccggagggacgaggagtgtttgggcagcctaatccttattc

SEQ ID NO: 20863 - DNA, 2666 bp, Artificial sequence
  DNA replication origin
tggctaggcctggccctgccgctccgcgtggctccacgggctccgagttatgcagctccgggcggcaaggggtcctgtcgaggggcgcggtccataagggttgaggccagaggcgcgtagcctctgggcgccgagctctggagtggaggctggggttcggagtgcgtcatctggaagcaggcaccccggccggcaggtcgggtttccaaaagtgcccctttgttatgcccctccctggccctgcctcctcccgctttggctgcgccaccccctcccccagcctcctgatctcctggctggctctggcttctggttccagcccctctaacctcgctgtccctcttcggaccagcctactgacgccccctcccctcccccccgctctgtcctcaaatcctagagctgcgggcgcaccgggaggggctgcccgggaaagaagcccttgggcgcagcctgtgactcaggttccagggatgggccaggcagaatggctgagctccctcccaggggcaagcccccagcttctggaagaggttggggctggtctggggccgggtaccttcaggcctcaggtagggagactgggtcttccctgaaccagggacttcctaccttggcccgtgcagctgcaaggagaccctgccaagcccaggaagacctctcggagccgaacgtgctggctcccggggctgggaagattgcattacctgctttctgagctcttgcctgcggtggggactgatttgggtctctgctgagctcaggaggcacagggtgccaacctgctcaatgggggccaaggtgcaagccctccttgcttgcttgctgagaggtcaggctggggctgtggggcctggctgcacccggggcttgggcctgtgtttgctctgggaggccggagggagctgtgccagcccggtacacacagcttgctctgttctggggccagagagagggaaggggtggggggcagctctctggggagcagggaactcggaggctggaacaggcaaggggccccaggctcctgaggctggactggggcggctccagagccctgtgattcatggcagcagctctctttctctccatcgccctgtcaggtcctttctgggcagacaggacacactgcagagggaaccaagtgacgagcttgtgaggcccctggtgggcacctccattgcctgggtctccgcggagcccctagctctgtctcctgttagcagagggggaagcccacttggaccaagcattcccacagctgctggagcgggcgcgtttcctgcgctccaggtggacatcgcttcttttctcacttaactaattattgctgattccagcgcgtggggacacacaaatcagaatcctggaagcctctgtcggtgactgaagatagacactgtcctgtcagccacaactccatgggttatacaccccggctgaagggtcacccggggctacaggagcaaggacagagaaacaggggaagtgactgaggagaagatgccttaattggaggtttgaaggagaagcagaggtgcatgagtttggaggaagcgctgtgacagcgccctgctttggggacaaagggcgcacactgtcctcctgggtctggctgtgtcccttgggcctgctcagagaggaagcgatttccttctagggtctgtgagtcagtcagtgctggggacagctgagaccctgcccagaggcaggaggggagcagccacatgccactgtgtccttgagtccctggggccatggctctggggttggaattggcttgccgtcctctgcgattctagggaacttttttttttttttttgagacagtctcactctgttgcccaggcggtggtataatctctgctcaccgcaacctcctccgcctcctaggttcaagtgattctcatgcctcagcctcctaagtagctgggactacaggttcccgccaccacgcctggctaatttttatatttttagtagagacgaggttcctccatgttggccaagctggtctggaactcctgacctcaggtgatccacccacctcagtctcccaaagtgctgagattacaggcgtgagccaccacacccagcctgggagacattcttatagttggccatcgcttctcacttccccatgctgccctggacgccaggcctttggagggcaggcccgggttgtgtgttccccacggagccttgcgggccctcagtggatgtgtggagtgagatgagtatcttccgtgactgcagggcccctcgtatttctggtgcgttgcttggtttgagtttcacaccagccctggcatggcagctgagcacacagaggagttccatcttagagggagctggggcctccttaggaggagacagttacatacacttgttcgggcttcctggccaacacagaagccaggcctcttggttcccttcgtgccctcctcagtacagggagctactgggatgtggccaggcaccctctgacttggcctctcgggtaacagggttgtcttgtcactcaagggaaggcaacagaggccctagcctgggcaggagtcctctcatcggcagttgggggagtggggccttctgcccaccgcccacccccgcctgccatttaatccctggctggatcgtgtgacctgcctggcattctcctccct

SEQ ID NO: 20864 - DNA, 910 bp, Artificial sequence
  DNA replication origin
gcaaacacaggcccaagccccgggtgcagccaggccccacagccccagcctgacctctcagcaagcaagcaaggagggcttgcaccttggcccccattgagcaggttggcaccctgtgcctcctgagctcagcagagacccaaatcagtccccaccgcaggcaagagctcagaaagcaggtaatgcaatcttcccagccccgggagccagcacgttcggctccgagaggtcttcctgggcttggcagggtctccttgcagctgcacgggccaaggtaggaagtccctggttcagggaagacccagtctccctacctgaggcctgaaggtacccggccccagaccagccccaacctcttccagaagctgggggcttgcccctgggagggagctcagccattctgcctggcccatccctggaacctgagtcacaggctgcgcccaagggcttctttcccgggcagcccctcccggtgcgcccgcagctctaggatttgaggacagagcgggggggaggggagggggcgtcagtaggctggtccgaagagggacagcgaggttagaggggctggaaccagaagccagagccagccaggagatcaggaggctgggggagggggtggcgcagccaaagcgggaggaggcagggccagggaggggcataacaaaggggcacttttggaaacccgacctgccggccggggtgcctgcttccagatgacgcactccgaaccccagcctccactccagagctcggcgcccagaggctacgcgcctctggcctcaacccttatggaccgcgcccctcgacaggaccccttgccgcccggagctgcataactcggagcccgtggagccacgcggagcggcagggccaggcctagccaccgaagctctagacttcttggcca

SEQ ID NO: 20865 - DNA, 1114 bp, Artificial sequence
  DNA replication origin
tacggcccttcccgtcggcacgcagagcggggtggccgggggctccctgggcgggagtcggctccattgcaaacttcagaagccggagcaggagagggcgggctcgagccaccgcacccgccgccgcctacccgcgcgtcccctccagggcactcaccgcgtcctccctgggcccctcggcgggtgggggtccggccacgctccggcccgagtcctgccgctcctgggcccgcgccgcggcctcccggagcgcgccgggccctcccccgggaagcccggcccccggcccccggccccgcccctctcctggccgccgctgcctcaaccccacgcggcggggcagcggggctgcaggcatcgcggcgaccagcggctcttgtggcgcgggtcgaggtttctctgcttcgcccgtgtgcggagtgcctgggcgggctccccagggttgcgccccggtgccgcagggagccagatttcggctttgcctctcccggaccgttgcagagcctgggagacccgagggagcaagaagggaccgggccggcacgggcagccttggagaggggccgggggaattacactgccttacatttttagctgcacagcttgtttagaaattggctcaggcgaggctcacaaccaccccttgtaagcattaggattcccactgtacagatgcaaaaactgaggctcgggggcttttcagaggcttgcccaagatttccctctagtcaggcagggctgggactccaaaaccgtgccctaccgttccacagctgccctgctaatctggggcgccttctaaggcctgagacgaacacgcggtgggggtgggacaaaaaggcctaagctcctcccgctccgagttcttatttccagattttgtaccacgattcattcttacccttcgcccctccaccccctttatcagtctggtacatttttccatatcgccacgatgccaccccacgctaaataaatcccttctccctcctctctccctacttccctctccccgctttcccccgggggtgagattttgcagagcggctccgtctgttatttatatccactggagcggtccaagaatgttccgaagctgacctaatcgccacct

SEQ ID NO: 20866 - DNA, 1180 bp, Artificial sequence
  DNA replication origin
tcctatcaaaggctctcctggcctcctctcttatctgtggcccccgcagggcacccactttcagaaactccctggaaggcccagcacctgcctctctccacccctggatttctaccagcttggctgaggcctggggctagtggggagagcttcttggcctcttcccagaggcaagggaggaggagggaggctgggaaagccgctggggctcagtgtcgcaattccgggccgtgctgggacctttgctccacgaggtgcctatggaggggagggaacacgattctggaggctgctgggattggggtgggggttcctgggaggcagtccttttgcaagagctgctaagagcgctgggtaaggagaggaaggggagagacatggaacttggctggtctgcagggaaatgccactgttttggccgggagtagggggcgggagtggcgggagagggggtggccggctggggaggagccagcctggtggagaagctgccctgtgggcgggggtgaggaggggagggctgtggtcaccaggcaggaaggaggggtggcctgacccctcggcagtccctcccctcagcctttccccaaattgctacttctctggggctccaggtcctgcttgtgctcagctccagctcactggctggccaccgagacttctggacaggaaactgcaccatcctcttctcccagcaagggggctccagagactgcccacccaggaagtctggtggcctggggatttggtgggtctgctccttagcagtggcctggggctctgtgtgtgtatctggggtggggtcggggaatgtcctaaggatctgagaagggggtttctggggagaagtgaggggtgatggtgatggaagcttgggacaggagcaggactctgggtcccagaataactcatgaggggctcaggggaggaggtcctctatgtgaattggggagattcttggagacaggtttgtgctgggaccctggaaagtggcacgagcgaggttctctaataagcagcgtgtttcactgggtggagtgagctgtcctcagtgttggagtgagggggaaggggcccaagagaagcagggcagatgcacccaaacattccctgctggcctggaggggactttgggggagaaaagccggcacggtggctgggagcccagactttggagtca

SEQ ID NO: 20867 - DNA, 1276 bp, Artificial sequence
  DNA replication origin
gggccgacctcgggagacagcggctgcgcacagacctagcctagcgcccgtgggcgcgggagggcgcgccaggccgacccagcgccgtcgcgtgccaagtgggggacccacagcagtaccttctgtttgggttgctcagagagactctcacccgacggggtcatagcgcccgtttcgacgacatggggattcctctgaaagtcacttcccaagataatcggcccctgagacttcctgacgggctccccatcccccagtccccaccccccactcacgcgctttggcggtgctcggcgtccgagcagggaagccggctgccgagcggtggagcctaccaatcctgggcagcgggggcagaggggggcgcgcggccgcggttacctccaccgggcgcgcgcggggagtgggggggcgtggccgcgccgcggcgcccgctgggagatggagtccagtcagtccgcgaggacagccccgcctcaggacatcctccccgcggccacacggctcttctcttcctgtcccaaagggcctggggaccgacactgggttctaggtctttcaggttgtgcctttttcagatgccaaaggaaaaaccaaggcatgctacacatgcacgtgaggtgcaccgccgacgccttagcgctgaaatccaacacttcctcctccaccgcagaaaggcaaccggatcctacccggatcccagcaggggaagggggcgcctaagcctcagcattccatttacccatatggcgcagtgggggttagtaagaagaggccccctctcacggccaaggctgtcatttgtgactctccctcctctgggcctggaggcggatcctaaagatcgcaggcttcctcctctattaccgtgtccccacccccaatccagaaattggtttctctcattttgtattcattttgatcttcctgttcaaacagtaccagacctatcagtgaggcggcgctgaggcatttatggccataccacagagtgacagtggagaatttttcttggggccctgtgggaaaaacaggaagtggtggaggcaggatgggcagggctctggagaaccctgtgcaaagtggcccccaggcccatccgtttgtggggtcagcatgatcttcagacacagcacagtgttagcgagggctccactgctcagtagccacaaaactcgcaaccctttgactctcttttaatgccacgggaggatctccttgcccagctcccaggaatgtttgcccttctcagtctgttccacttctaggaggcagc

SEQ ID NO: 20868 - DNA, 1660 bp, Artificial sequence
  DNA replication origin
ggctcggtgcagccccggccccccgggctgaatggtacggccccggccccggcctccccctccgcaccccgcgcgagtggtgcgtgccccccagtgcagacgcggaactggcgcccgctcggagcggcgccgcgctggggagcgactgacgccccgctgccgggggacgtcgggctgggcctggccagtcccccagagcttgggaggtaggagagtctgggccggtggggtcctgggcgagcgtctggggactccgagcgggagacgggctctgagaggacaccgtggctcttggaggaaggggtctctcaggaggccctgggggagtgtgaaggggcgtggggacgggggtctgccgaggaggggcggggacggggatgggggcgccccgggcagaggagggggctcaggctactgggcttggttcctgccgagcgggcggctcgggttcaggttcggggcgggggcgggggcgggggagaactgtccagcaggtgagggggcgggcagagctggccagccctggggccgaacccgcacagcgcttggcgggtgtgcttgtgcgtgtgcgtgcttgcgccttatttttggctagaatttggagaaacacgtttggttctcaagaaattttttttttaacttgatatttcaaaattgacttgctggagagagaacaccatttcatctttctgcaatcgctctcctccccatcctcgtgtatctaccttcttccacctttccctgccctcccctctaccccaaccctgccagctgccagcctccttgctccagttctcccatacgctggaccagtctgtgctgatgagcttgcaaggtcactgcctggggaggtagaggaggggaggagagcctcctgttgtgttcacgtcagcagagatgtcatatcgctctctggttcctgtggttttactgtgagatcctgtccaaaatgagggacgaatccaaagggttggttagcatggctatttctgctgaaaaggcatagataacttaaaagtttgtgaatcctaaatctacctctgggtggagctgatggtgatgtcggacttcagcagatagatatgcattttgagctggatgcttttggaatacaggaagataggaaccagaggctctacgttagtaaacatggttgaggcaagaggcagagtcggagcctcgttggttgtgaagacaagagtgtgagttgtgggtgatgttagaggatttagtctttagaggagttaaaggtgttagtctttttggggaggggagagaggagagaatgagaaggaaaatcttagttatctttgcaatctgaataactgaaggcagtggctgctgatcagatgtgaactctggctaaaaatttatcctaccacccgtagctagaataataacaagatctcagggtccttgtggctctggaaggaaatgattgtgagtgacttgagtttcgtcagatagttgtcagtggagagggactgagatcccaccaaggctagagaggcctgatgcgtactcagtaggaggtgcttcaggcctgatctttgagattttggttggagagggctccgggttttcaatgtaaacatagattgcaaggtgtagtctagagctctggttctataaattctgttttactttaagatactttggc

SEQ ID NO: 20869 - DNA, 1183 bp, Artificial sequence
  DNA replication origin
ggcttacgcctgtaatcccagcactttgggaggccaaggtgggcggatcacctgaggtcgggagttcgagaccagtctgaccaacgtggagaaaccccgtctctactaaaaatacaaaattagccgggtgtggtggtgggcacctgtgatcccagctacgcgggaggctgaggcaggagaatcacttgaactcgggaggcagaagttgcggtgagccaagatcatgccattgcactccagcctgggagacaagagcgaaactccatctcaaaaataaataaacaaataaaaatttaaaaaaacatatttaaatcctggagattcctatcagaggagtgggcagtgggagtggggtgtcagtggtgacacagcctgtggccttgcctccccctccccacccccaggctcagagtgggtggctgccctgcaggggctgacagagcacacatcgatactggtgaaggacctgcccacgggggcccggctgcttttccgagtgcgggcacacaatatggcagggcctggagcccctgttaccaccacggagccggtgacagtgcaggagatcctgcgtgagtgcccctttgtgcagtcacaagacccgccattgacaccccaggcccttggtgtccagtggaggtggggacagttggggaggcccagaatgctctgcccagaacgctgggcagagacaggaggggttggagccatcgtccatgcgctaggcctagggaaaaagtgcagagagggtggccaggcacagtggctcaagcctgtaatcccagcactttaggaggccaaggcaggcagatcacttgaggtcaggagtttgagaccagcctggccaacatagtgaaaccctgtctctactaaaaatacaaaaactagccaggtgtggtggcgcgtgcctgtagtccctcaactacttgggaggctgaggcagaagaatcgcttggacccgggaggtggcagttgcaatgagctgagatcacactattgcactccagtctgggtgacagagtgagacaacgtctcaaaaaaaaaaaaagtgcagaaagggctctcttggtgtatgtcagtcccttagttctggaacagggaaagtaaaagccacagtacccaagctctcttccaggagtgtctcagctccaacaggtaaatattgtctatgtagtcagattgg

SEQ ID NO: 20870 - DNA, 2351 bp, Artificial sequence
  DNA replication origin
tgagcaggtctgtgcatgtatgtgagtggatatgtgttttaacatgtgtaagcatgtgtgtgttcccatgtgtgagcaggtgtgtgtggggggtgaggacgtgcttaagcacctgcgtgtgtgagcaggtgtgcatgtgtgtgaacaggtatgtgtatgtgtgaaagcaggtgtgtgaatgagtgtgtgagcatgaatgggtgtgagtgggccgggcgtggtggctcacgcctgtatcccagcactttgggaggctgaggcaggcggatcacctgaggtcaggtgttcgagaccagcctggccaacatggcgaaaccccgtctccactaaaaatacaaaaattagtcaggcgtggtggtgaacgcctgtaatcccagctacttggaaggctgagacaggagaattgcttgaacccgggaggtggaggttgcagtgagccgagatcgtgccattgcactccagcctgggcaacaagagcaactccatctcaaaaacaagagaatgggtgtgatgtgtgagtgtgagagcaggtgtgtgtgagcatgcatgagtgtgagctgctgtgagtggatgtgagagcagaatgtgtgtgagcatttgagtgtgcaagtaggtgtctgagtggttgtgtgtgaacaggcgtgtaagcatgcaagtggatatgcatgagcagaatgtatgtgcatgcgtgagcaggtgtgaggtgcaagtgtaagtggtgtgaaatatgagtgagcaggtgtcaatgaggtgtgaaagagctggtgtgagcgtgtgagtgataagtgagcagctgtgaggtgtgagcatgtatgtgagcaggtatgtgtgatgtgtgagcatatgtgtgagcatgtgtgtgtgcagatatgtgtgggcaggtgtgtgtgagtgggtgtgagatgtgagcatgtgtgtgaggtatgaggtgtgagcatgtgtgaggtgtgagcatgtgagtgggtgtgaatgtgtgaggtgttagcatgtgtgaagtgttagcatgtgtgtgagcatgagtttgtaagcataagtgtgtgtgagacttggtgtgaggtgtgtgaggaagtgtgtgtatggataggtgagcatgtgtgtgagcagacgtgagcatgtgtgagtgggtgtgtgcgtgagtgaatggtgtgaggtgtgtgagcacaagtgtgtgagcaggggcgtgtgtgtgtagctgagtaatgtgagatgtgtgtgagcaggtgtgtgcgtgtggggctgagtaacgtgagatgtgtgtaagcaggtgtgtgcgtgcaagtgtgtgtgaggtgtgggtaggtgcgatcatatgtgagtggatatgtgtgagtgaatggtgtggtgtaagcatgtgtgtgtgagcaggggcatgtgtgtgcaagggtgagcaatgtaaggtgtgagggtgagcagtgtaagatgtgtaagcaggtgtgtttgtgcaagcatgtgtaagcaagtataagcaggtgtgattatgagacctggtgtgaggtgtatgagcaggtgtgtgaacatgagtgtgtgaacctggtgtgaggtgtgtgtgagcaggtgtgagtgggcatatgagtgtgagaaggtgcattgggtgtgaccgtgtgtgggggcagtaagtgggtctgagtgtgtgtgcatgtgtgtgagtgggtgcattgggtgggtgtgagtgtgcatgtgagtgggtgtgaatgaggtgtgagcatgagtgggtgtgaccaggtgtgtgtgagtgggttgtgaatgtgtaagcagatgcagtgtgggtttgaacatgtgggtgggtgcaagcatgtgagtgggtgtgtcgtgtgggtgccagtgtgtgggggcatgttagtgaatgagtgtgtgagcatgtgtgtgagtgtgagctggtgcattgtgtgggtgtgtgagaaagtgacagtgtgtgagggcagatgtgggtgtgaatgtgcaagtgggtgggtgtgggtgcaatctggcgtttgggtgcattgcacaagcatgtgtgtgagcatgtgggtgtgagtctgtgagcacgtgcattgtgtgtgcatgtgtgtgacagcatgtgtgtgatcagatacattgtacgtgtgagcgtgtgtgggtgtgagcatgagtgagtggttgcattgtgtttaagcatgagtgtgagtgggtgtgagaaggtgcgttgtgtgagcacgtgtgtgagtgggtgtgggcgtgatgtgtgagcatgtgtaaggaggtgtgggtgcgttatgtggatgtgagcatgtgtgtgtacttggtgcactgtgtgggtgcgagtgtgtgcgcgtggggggggtgagtgcgtgggtgtgagtgggtgtgtgtgaacgcctgtgtgtgcgcaagca

SEQ ID NO: 20871 - DNA, 1372 bp, Artificial sequence
  DNA replication origin
tgggagggctgggtgggctggatgtcagcacccctcgccccacagcctgcaccctatgtgcagcacctcaactggccccccttttccctggtcttcttcctccagtctcctgtgcctgccattgtcccctgccctctgcactccttctctccccagctgacctccctcccagcccccctgagctgtaagctggcccttcctgactctgatctccttcccccaccgtccaggtctcctacctgccccggatgtgcctccagtacccatccctgtccccagcccagcccagctcagatgaggaggagggcgagcggcagagccccccactggaggtgtctgacggcgaggcggatggcctggagcccgggcctgggctcctgcctggggagacaggtggggcacctggccctccaccctggccccgaccctggccgtgtctgtgccctgcccccacccagccaggccaactgacccagcagccacgccaccgagtcgcgtgtgtgtgtgtgtgcatgtttgccagtgtgtgtgttttgtggggctgtctgtggctgtctctgtgtgtgtgtatctgctgtgtagtgcatacgggcatctccatgaagtgtgccaggtgtgtgtgtctctctgtgccatgagtgtgtgtacatctgggtgtgtgtgagcaagtgtgcagagggtgcgtgtgcacaggtacgggcaggtgcatgtgtgcgagtggctgtgtgagtgggtgtgtgagaaggtgaatgtgagagctggtgtggctgagagtgggtgtggccatgtttgtgtgtctgtcaacacatgaatgtatttcagtgcgtgtgagcagctgtgcacgtatgatgtcagtgggtgtcagcagtgtgtgggtgtgcctgtgtgagcagggatgtgagcatggtatatgtgagtggctgtaagcaggcatgtgtgagtgatatgtgtgagtgggggtgtgacagcaggtgtgtgagcaagtgtatatgtgtgaatgtgtatgtaagcagggatgtgtgtgatataagtgtgtgtgaatgggcataggtgtgtgtcagtggatgtgtgagtgggtgtgaacatgtttgagggtgtatgtaagcaggtgtgtgtgagcaggaaggtgtgagctggggtgtgtgagcatgtatgtgtatatgtgagcaggtctgtgcatgtatgtgagtggatatgtgttttaacatgtgtaagcatgtgtgtgttcccatgtgtgagcaggtgtgtgtggggggtgaggacgtgcttaagcacctgcgtgtgtgagcaggtgtgcatgtgtgtgaacaggtatgtgtatgtgtgaaagcaggtgtgtgaatgagtgtgtgagcatgaatgggtgtgagtg

SEQ ID NO: 20872 - DNA, 653 bp, Artificial sequence
  DNA replication origin
acacagccactcgcacacatgcacctgcccgtacctgtgcacacgcaccctctgcacacttgctcacacacacccagatgtacacacactcatggcacagagagacacacacacctggcacacttcatggagatgcccgtatgcactacacagcagatacacacacacagagacagccacagacagccccacaaaacacacacactggcaaacatgcacacacacacacacgcgactcggtggcgtggctgctgggtcagttggcctggctgggtgggggcagggcacagacacggccagggtcggggccagggtggagggccaggtgccccacctgtctccccaggcaggagcccaggcccgggctccaggccatccgcctcgccgtcagacacctccagtggggggctctgccgctcgccctcctcctcatctgagctgggctgggctggggacagggatgggtactggaggcacatccggggcaggtaggagacctggacggtgggggaaggagatcagagtcaggaagggccagcttacagctcaggggggctgggagggaggtcagctggggagagaaggagtgcagagggcaggggacaatggcaggcacaggagactggaggaagaagaccagggaaaaggggggc

SEQ ID NO: 20873 - DNA, 935 bp, Artificial sequence
  DNA replication origin
tgggggcagggcacagacacggccagggtcggggccagggtggagggccaggtgccccacctgtctccccaggcaggagcccaggcccgggctccaggccatccgcctcgccgtcagacacctccagtggggggctctgccgctcgccctcctcctcatctgagctgggctgggctggggacagggatgggtactggaggcacatccggggcaggtaggagacctggacggtgggggaaggagatcagagtcaggaagggccagcttacagctcaggggggctgggagggaggtcagctggggagagaaggagtgcagagggcaggggacaatggcaggcacaggagactggaggaagaagaccagggaaaaggggggccagttgaggtgctgcacatagggtgcaggctgtggggcgaggggtgctgacatccagcccacccagccctcccagctgggcctcctggtttaggactgtgggcaccggggaagtggtgccttgttctcctccctgcagcggtgctgtgtggacccgcattaggctggggtcagaagagggcatgctagggaccggtgcgttgggtctggaagggggtttcataggtgggatgatgagtgagtggagggaccctggaggtcagtaggggtggtagaggtcagcagaggtcactgatccgggttagggtcagtagggagggtcactggggagaggcagggtcagtagaggtgttcagtgacttggtgtgggatccatgagggctagtgaatgggggtggcagacagtgaggcccaggagggcccacaacaaggcgttgggatggggaggcttggtgagggtgcgagaattatctggggtctgtccatactcggggtgagatgagataaggggtgtggggtcatgaggtcacttggggggtcaggcggcagccgttgga

SEQ ID NO: 20874 - DNA, 946 bp, Artificial sequence
  DNA replication origin
gggtcagtagaggtgttcagtgacttggtgtgggatccatgagggctagtgaatgggggtggcagacagtgaggcccaggagggcccacaacaaggcgttgggatggggaggcttggtgagggtgcgagaattatctggggtctgtccatactcggggtgagatgagataaggggtgtggggtcatgaggtcacttggggggtcaggcggcagccgttggagctccagccgccgttggcactgtggggcaggaagctgagttgggtaagagcctgtgtcagcttcctgtgaagctcccgggccccaccacaggcctggcagtctcctgggggacggggcaggcggtggcatgcacctggtggccaagactgggatggggtggcaccatgggggtatcgaggacgtgcatctgctccagctccatgtggcggtagagctgctgcagctgcgggggctgcacgctctggagctccgtgaagttgttctcggcgaagctctcgaactcgctgtgcacgtggtgggggtggaagtcccagtaatggtctgtgggggacagccaggcagtatggggtgagctcagggttgggcagggcaggaaaaggttatagtaacattaaataatactgccaggccatatggggcctaaccatctcgtttaaccctcgccacctgcatggttactctaggcctgcattttatagatgaggacactgaggcttcgagcggctacatagcatgcccaaggtcaaaagcatccgggtcacagccaggactcagggctgaagcaaagctcgtgttctcagcaattccatcctgattcctgtgcagtcacacagaccgagcgtctaatcctggctctgccatttacttgctgtgtgacctcaggcacatatgtggcctctctaacctcagttgagttgcctgtaaaatggggatcacagttatt

SEQ ID NO: 20875 - DNA, 1134 bp, Artificial sequence
  DNA replication origin
acgaagtgggcggcccaggcagagggtgacggaggttgtctcagaaagagccaattctgcctcaagaaagccacaggcccactgtctctgatccctgacctctcaattctgaactccaggtggagctagatgggtggcagagctccttgggccatccctaggcacccccagccctctctgcaagctccagggtcactctgagtgtctcctggtagggtgggctcccaaggcagccccggtcccccaagcccagccctaagggccacagtgactgttatgcaatcctgggccacacgctgcgggggcggggaggcctgatgactgttgggaaggctcctgggtgtgcacggccctgtgtctgtgccagtagggggaggaggacagggaggagggaggaaggtgggaggaaagaaggaggacagggaagagggggaagaaaaggaggacagaggggagtgaggagggggaggaggaagcaaaggagacggggagggggatgcagtgaggagggaaggaggaggatagggaggactcaggagggagagtgaggggatcaaggccctccatgcgctcggcccctaagtctgcctgggtgacccctgcaccaaccgtcagtgtggagggtcattgtggtgccactcttgcccaggctgtgtgagaggcataggctgtgagagtggggctgggcaggcaagtgtgtgctgtgcggttgagtgtgcaggtggaatgtgagtggctctgggggtgtgagtgtgtgtgttgatggctggaacgtggtgtcatgtgagtgtcaatcaaggagactctgcgtgtgtgcatgagctgagtgtacaatgtctctgtgaggtgggtgacctctgagtgggtatgaagatgtgtgtgtgagggatagtgtgcaggcgcctgcatgggggtgggtaggggctgtgagagtgagtcctcgtgtgggattatgagtgtgagggtgacacagggatcgtgtggacatgtgcatcagtgtgaccaggagaggtgtgtgggatgaggatgggggcacacaggcgtgagtgtgagtgtgagcgtgaggtggctatggggagtagcccagcagagggggaccctggtcctcttctgacctctcacccccaaggtccc

SEQ ID NO: 20876 - DNA, 906 bp, Artificial sequence
  DNA replication origin
tcctccaccagcccaacccgtggccctcggacgcctgcctgcctgcccacgaacccgccagcccacccactgccctcctggcttgctatcagtgggaagtcagggtttcctccctggaactcctggcctgagacccagcgagggggccattggcttcctcggagcatgccctggcgggctgaggccaggcccacggtggggctgtgatcggtggggcctgaacagttatttatagacagggctcgggtggcaggcggaggccggggctcctggggagggtgctgggctgaggatggtgaaggcggtggtagagaggtagaggagggagatggggggactggcttgggggaggccggtcccctggatgggaaggggttgaaggcaggaggcaatgggcagaagtcttggcccatggccttggggctcctggaaaccaaagctgatggaactctgggtccccaacgcccagtctggggcctggcacagaggacatgattgttgaccaaagggtcagggccatgggcccacaggggtacccacaggagacagggactggtgctggaaaggagccaggagtggagctgagacagtgcagttagggctggccccagggctggagttcagggagaggcgcggcaggggacagggctgggacaaggccaggactgagattggggctgggtgggacctggggtgagcatgtgataagtgagaatgggggctgaggctgggacaaggacagggactgggtcttgggggtgaagaagtgggagccccaggggaccccgagaagagaagggcagatcgccactgctcctcactctcagtgacagttgcagccttaggcaggtgtcagaccagggtccctcggaaaggacccttctcccttttcccaccccatgacct

SEQ ID NO: 20877 - DNA, 1159 bp, Artificial sequence
  DNA replication origin
ttggtggatggatgaatggatggatggatagataagtggatgggtggatttgtggatggctggatgaatgagtggatggatggataggtggatgagtggatggatgaatgggtagatagctggattggtggacaggtggatgagtaaatgggtagatgggtagatgggtggataggtggatgaatggatggatggatgaatggatggctggatggatgagtgataccaaaaagatactgcatttgtatgtttatcacagcactattcataatagcaaagatacagaatcaacataagtgtccatcaacgggtgagtgaataaataacatgttatattgtatttatatatatatataatgaaatactattcagccataaaaaagaatgaaattatgtctttgcagcaacatggatggaattggaggacattatcatatgcgaaacaacgcagaaacagaaagtcaaatactgcctgttctcatggggctcctggaaaccgaagctgataggtgaatggatggataggtggatgaatagatgggtggaatggtaggtgggtggattggtagatgggtggatgagtggactggtggatggatggatgaatgaatgaaggggtaggtggatgatggatgggttgatggacagatgagtggatgggtagatgggtggatgagtggatgggtggatggatggacaggtggatgaatggatgagcagattcatagatggataaacagatggaattgtggactgatggactgatagcaggtggacgggctgattaatggacatatagatggttagatagacaagtagataaacagatgggtgggtggatgaattgactgacagatgaatgaacaaacaaacggacagttggataaatggacacataagtgaatgcatggtgggcttgatgaatggatagctggatggacaaatagacagacaaatagatgcatgggaaaacagatgaatggtggataggcaagaaaggtttgtaaaccaggagggttagattgatattcaggcattgccaagggatggggaaactgagaaacctgggctggaaacagagccctagggatttgaatgtggtaatcaagaagctgggaggggagggtataagaacccaggaccctcttctggtggtagg

SEQ ID NO: 20878 - DNA, 1237 bp, Artificial sequence
  DNA replication origin
gtccgcggtggagaggcccagggtgggagcttggagggctgaagacagggctgaacttgctccctatggtgggatgcagggcctgtcacacacagatagccacatgctacctcatctagttcatgcaaccccgcgaggtatattctattaatgttcccattttgcagatgaggacactgaggctctgagaagtgagtgactctcccgtcagccacatagtgaatgaggagcgaggataggattctaatcagggtctccgaagccatactcctaacctctgcatttgtggaggtcaatggaggaaatgtgcatttattgaactgctactgtataccaagcaaaggctttcacagaccatctctttccgtcctcaggacaatgctgggaagtgggtactgttgaccgctctgtaaaattggagcatctgagctctgcagaggggaaggaactcacccaaaggccacacagccaatccgtagggaaagactcaggggaacctagagaccagggcatggtggagggggctccacaggggaagggtctggggtggggaggcagctcctgtcctcagtgagcgagcaggggggtgtggtgctgcccgtggtgagcagaaggaagtcgctgtgggtggcggtgggtttgaggtgccgaagcctgagtgatgtggccgggaggtgagcgccccatctgtagagctggtcagcagggacaagggtgtgggaggctggccaggatttgggattcagaggaggtctagctgcccctggccactggggctggggcagagtgggacaagagactgaggcagagctggggagcggtggggggaaactagagggaaggcggtcttgggtggcagcctggaggaggcaagcccttgaaagagagagatctgagggtgtggaagtgggtgggcttgtgcgcaaaagctggggagactgagaaaggttccaggaatgctgagcggtgtcctctggctggaggtggaggtggggctggccacttgggctggggacgggcagaaaggctggccggactccgggcgttggaggttcccgcacaggcctcggaggtttgggcttcagcttgaggacaggcaagagctcaggaagacttttaggtggggaaatatccatgagagaacctcgagatagggacagccacggaggcacaggcctgaggggccctgagaaccacaatcacctcctgccctgctcccggctgtgtgcccttggcc

SEQ ID NO: 20879 - DNA, 1217 bp, Artificial sequence
  DNA replication origin
acccctttcctcttccttctcagaccccctcccatttttggcgaagacaacttagtttggggagctcctattgggttgtgggcgagtatcccgggacaactcgggcctcactgcaatggtgtccccccccccccgtctcggttatttatcacttccggctgcccacctgggggggctgggccccctctccgctcgactgggccgcagccgggcagctcgggcgctcccctgggggcgggcggcgcgggggaggggccctaggggggcggggccgggggccgggcctgcggcgggggctggagttggggggcggaagctgccggagcagataagggccgaggtcggccctgcggtgggacagtgcgggacaccgcctccgcccccggcctccccagagcgcccccgcaccctggagaccccctcctgctacccaggcttggcatcccgggaggagaccccagggagcagtgggggatgaggctccagcctgctcacagcctcagcgacgagcggcagcggggcttcacgcctcagttatctcagctggaaaatgggggtaggagctcggttttccccacagggctgttggtgatggaccaagtgcaggcttgtgaaggtctctgtgggttgggcgagttttgaacagagggtcctctaagcatcgcatcgcctcattcatccccattgtatagatggcaaagtggggagtttcacccaaagccccagagccagcatgcaaaaagcaagtgggagggggttggaacgctttccaccgccccaccctggggacagatctaggttcccaggagcctgaagcttaaaaccatttgggggggcactctttaaggaaaagattacaaagtcacaaatacaaaattgctgagaggctgggcgcagtggctcacacctgtaatcccagcaccttgggaagccaaggtgggcggatcacttgacgtcaggagttccagaccagcctggccaacatggtgaaaccctgtctctactaaaatacacaaattagctggacgtgatggtgggcgcctgtaatcccagctactcgggagactgaggcaggagaatcgttgaacccgggaggcagaggttgcagtgagctgagatgatcgcaccactgcactccagtctgggtgacagagctaaactctgtctcaaaacaaaaaacaaaaacaaaacaaaacaaaacaaaacagccgttcgcg

SEQ ID NO: 20880 - DNA, 1593 bp, Artificial sequence
  DNA replication origin
ttaaaatagtctcttaaaaaataaaaatagtggatcatattaaataaatatttctgcatctcacttttctcacacacctggaaacccctgcaattttattaatttgtaattttttttatttttttatttttgagacagggtctcgctctgttacccagactggagtgcagtggcacgatcagggctcactgcagccttgacctcccgggttcaagcaatccttccacctcagcctcctgagtagctggggctacaggtgcgcaccattacacctgactaattttaaatttttttgtagagaccagttctcagtttgttacccaggctggtctggaactcctgggctcaaaagatcttccttcctaggcctcccaaagtgctgggattacagatgtgagccaccgggccttaggtatccgatgggaattccaggccaggtgggaggaaagggtagtgcattggcaccaagtaacgtttctggctgggtcttgcccatccccttgttgggtggccaggagcgctcagcctccagaggcaggaatgctgactgtgttattgtgaaatcatttgcatattgtgaagtgctttgcataagatggagcgcttttgcatacagggaggggggcattttagaagtcctagggcaggatccctgagtagcttttctttgccaagaaactaacccagggattccattttggaactcagggagggaacagaacgtcctggcagttgtatgggcccggtggggtgagatggacagaaagcttcagaagacaagctgggccaccagggagaagttggcggtctaaggaaggccaacagtgcaacatgaagtgggacaggcaccagaggcagccctgagagctgagtgtgctctcaagagccccagcagaggggaaagtgacagagtaaatggttggagctgccatgggaggctgatgagggtcagagacttaagagacctgtactcagtcgctatctctgcccaagtgagtacccacatgccccttcctgaatcttctcctgtactggctgatttccagagaagaatacaaactcgaaacgccaagccagactcccactgctgttcaggacctagacgtgagaagtggtatcacatactctggcttcaggacacccaggtttgaatcctggctctgccatctgtgccactgtgtgaccctgggctaacagtacccaccacaatgggataatatgaggattcagtgagatagtgcgagtaaagtgaatagcacatagtaggtggtcagtaaattgcggttataagaactgctatccagtgtttgctgccttagtctaaccaaagaggtcaggtctagcttcctccaggtgagggaagcacagagccctcgcctcccaggtttggagttcccatcagcagggtccagccaccatgcattggaccccaaagggttacaagccctggagacagtggcctgaggttcccagtgaaaaaccaaagcataaaaataattcgatgagtaagaataaaattccctcttctgaggttcccggggccaggcccctccctgcggcaggcacttcccctttcccttgctcatggaggag

SEQ ID NO: 20881 - DNA, 1391 bp, Artificial sequence
  DNA replication origin
ccaagagctccagggcaagggcagtgaggaagaggagccttgggcccgccatgccacagccagggcagggacatccaggcatgccacgtactgaaaaacacaaaaggccacctatatgagctacagccttggccgcacacctgcttaggaaacgtggcgcctccctcctccccgcaagggaccctggcatccaccctcctgctgtccttgccagagcgtctgagcatccaaatgctgggtgcacagcaatggggccctgtgtctccacaccctactcctgagcactgcgtattttttccttctgagcagctccagactgtgtcagcacctccgcctgaggctaaactttccctaatgacagggtgaggcgctggctggctctcctcagccaccggcggcacggcccggcccagctgggtgtctctggctgccaggggaggccctgccgcccgcgacaccccagagactgaggcaccccttctaaggggatggggtggattcagagagacatacgtggggaaactgagcagatgagccagggcaagaccatccacgcttcttcctaggacatgagaccaatgtccccagggcactgagggcaacaggagatggggctgatgaggaaggagcctttagccaggggatgcctctctcttgtatagcgcaggctttagagcccccacggtgaattctatgctgcactttgagctgtctaactctgggcaaatctctgaagccccccctctgagcctcagtgccctcatctgcaggacagggatcaatatcacctgcctcagctgtgaggacgagataagcctgaaagtgcaggtggatgtacccggcatgaggaggcgcagaggccctgcctgtgccagggaaggcctggggctccctgcagcaggaatgtgcccagccggccgatcacaggatgtggacgtgagtcaaccaagcgagaagttccatctggaaactcgggcatgaggtttaaatgtggtctgctctgcctcaggctggctgtgaccttgagctggtgatgtccctgcctcagtttcctcaccttctgatggagatgggaggggaagaaagcagctgcctctgggtggtggcagagatgcccatgtctaggacctccaggccttaactaatcaggggcactgatgaagccagcggggctccactggggaccacaggcaagactgggccaggacgaggcggtcacgcagaggtgaggggaccacaggctagcgggagggaatacacggagagtccaaggggagaggaaagtagagagtgagagagctagagagaggcgggtgggacgcggagaggacagcgagggagggatggggcgtggggcgcggagcgatgggggagaggaggccgaagcgggc

SEQ ID NO: 20882 - DNA, 964 bp, Artificial sequence
  DNA replication origin
cccatcctgagtatggcagagatggcagctgcaggctgctggggtgaggagctccagccctcacagcccagccccagagtgccatgctggacaggcccagccccacaccctcctgagctccacacccatgctgatcatgggcactgtgggggcctgggcccctgggggctgccctacaagcgctcacctcatgggggatctcatgcaggaggatggccatggttgtcaggagcccgatctgcagggaggggagccgtggctgcggggtctgtgttgagggctgagcaccccactcgcccactcattccacagaggtttactctgctctgagctggctctgggtgggcactgtgttggccactggaaatacagcagtgactaaaggggacaaggaacctgccttcacgaagctagcggtatagaggggagagacaggactcactcacacactcacaggcgctgggaaggaaaggatggatagagtgcccaggggagcaggcccaggaaccaaatttagatgaggaggtcagcaaaggcctggtggaggagtccatgtaagtcgaggccccaaggatgagtcgtcagccgctcgaagcgtgggcgggagaacattccaggcagggggaacagtgtgaggtgggaaagatctcggccagctgcagagtaggctgcctctgggccagaggccagaggccagagggaggaggtagaggaagaagcatctaggagcaggcaggggccacgcctagcagcttgacagaggcacccaacaaggagtactgggaacaggaacagaccaggggctcaggatcagagaacagtggcggccaggacagcagcagggaggatgggggatgagagccttagatgagggcgctggcaatggaggggcaagaagcagagactccagacacaggtggaatccacatggctgccactggaatcgccagagccccactggccc

SEQ ID NO: 20883 - DNA, 983 bp, Artificial sequence
  DNA replication origin
agccggggaccccgacatgcaggaggagatcgcagccctaccccaggacgcagggaacgagaaaaggccgcgcccggagggccctgtgacccgcggcctccctaaccggacccgccccgcggcgcctccctcttgccttttttcccctccctccctcccgcggcccgttatcctgcggccgcagcactcaccagcggctgcacctgagcctgccgctgcctcagttgctgcctgcgcctccgcagccgccgccgccgcctcgctgctgaggccgaatcccgggggagcctccgcgtcccgccgccgctgccgctgccgccagagcagaacaccccaaaatggcggcacttccggcacctaccaccggcggggagggcagaggaggagggggagcgcggcgagggggaacgtatcaccgcggcgccgcccgcagcgccgatgcgagcggagcgcggcgtaggggcgggccgagcgccgggcgctgcagcgccccctcgggctgggaagtggaggagcagccgcacctaagcccctggggccgcgggcggagccctcaacctagggagctgcaggggcgcatctctttgtctccgatccctactggagggaagagccaggcctgggaatctgaagttctcgactccgcccatcgcacccacaggagctctagatgaccctggtgggcaaggaggcacccctactgggcactgaataggagcataataagatatttgttgaataaatggatgagtgagtgactggtgcttggccagcgttgggcacatggcacgcccctttttgccccagcagacaagcaacagcatccaggccttccttctttgctgggatgtgaatatgtgtgttccaagtgcagggagtgctttttagcaagataatcagtgtgaacgcacaacctggcaacgatcgctgcgacataaggaagttcacaaagattctattaagagaccgattgcccagccata

SEQ ID NO: 20884 - DNA, 2041 bp, Artificial sequence
  DNA replication origin
gtgatcaccccgcgcacgttctcgtcctgtaccagctgccgaggcaaagaggtggctcagcaaagacggtggagaccccagcggcccgacagggacggagcggcggggacggggcaggggcccgggctccccggcccggctcacctggcgcgtcaagctccgcaacggcagcgcgcccagcagcacggtggggtcgatgcggtggtaccagtcccggtgcgcccgacccggcaccttcccgcggaacagggtgtagagcagcgtcgggtagaagagcacccgcgccaggccggcctccagcagcgcggtggccgccatcccggcccggcgcagcggcgacccgtcggcccccgcgctcgcggtccggacccgcgagaagagcaggcgggtgccggggcggggctgccagctgcactaggcctctcgcgggctcgcaccgggtgacggcggggactggcctggactctgggggactggcgggactctggaggagggcccggcggcctcggaggagggaccgaggtttcctgggcgggaaactgggaccccggcgaagggagagcgcgtcgcaggccagacacgtgtgagccctgtagcgtgggaaactgaggcccccgcctgtggccggtgacctccctcctccgagggaggggggttgtgaccccaggtgagaggggcaggaaggacccctgcgtgtggaactgtgactccggccgagggaggaggggacactccccccaaccctcgaccagaggaagggggcagtgacccaggtgcgggtgtgaccccgccaaagggaagacaagacaaggagaggctgtgtggcggggtagccctgaagaggacagtggaagggcttagagctttcaaacagaggagctacctgggtgagggcctgatcccagggtgaacaggggtcctgggttgaggtcgccttcctcctcccctcccctgtcctagggcagggctccctccttcatctgaccaaacagcagtgtttacatagcaggaaaaaataggaaaatatacattatattaatatatccttaagaaaaatattatgaagagctcaaatataaaacctgcaacctacaaaaaggtaagaagaatggttgtaatgccagctatttactttttgtttgtttgttttgagacggagtctcactctgttgcccaggctagagggcagtcgcaagatctcagctcactgcaacctccgcctcccgggttcaaacgattctcctgcctcagcctcctgagtagctgggattacaggtgcatgccaccacacccagctaacttttgtttttagtagagacgaggtttcaccttgtcagccaggctggtctcgaacctaaggtgatccgcccacctcagcctcccaaagtgctggcattacaggcatgagccactgcacccggcccaagcatctggtggagtttttgttttttgttttttgtttttgagacagagtttcactattgtcacccaagctgcagtgcaatggcgtgatctcagcacactgcaacctctgcctcccaggttcaagcaattctcctgcctcagcctcccgagtagctgggattacaggtacatgtcaccacgcccagctaagttttgtatttttagtgagatggcttcaacatgttgaccaggctggtctcaaactcctgacctcaggtgatccatccccctggcctcccaaagtgccaggattacaggcatgagccaccgcgcccggctttctttttttttttttttttttttttgtatttttagtagagatggggtttcaccatgttggccaggctagtcttgaactcctgacctatggtgatctgccagcctcagcctcccaaagtgttgggattacaggcatgagccacacgcccggcccaagcatctggtggagattttgtttgtttgtttgtttttaagatagagtttcactcttgtcacccaagctggagtgcaatggcgtgatctcagctcactgcaacctctgcctcccaggttcaagcaattctcctgcctcagcctc

SEQ ID NO: 20885 - DNA, 2721 bp, Artificial sequence
  DNA replication origin
aacagttggctctatttgaggctagtcgggcatagaagcgtgggcatggtgggtaccaggctgatgtgtgctgtggtgggtgacagtgtgggccccacccccagaactggaaaggtacaggtgacacctagggagatagccctaggtgctcttaatgctggccctgggctcattcccactgatgcccaaagcagggtctcttgacctgcctgggcttggaacaaacattgcaagggtgaggcaacaccccaaggtgtgggccggacggagctgccacagacatcctcccctgctctgtcctccctgcctcacatcctcccctgccccgtcctccctgcctcacatcctcccctgctctgtcctccctgccctgtcttcctcctccctcccttactgctgaggaggagcagggagagtaggctctttccaaagaggtctttgtccttgggagagtcactggcactgttttaggtgactttatcctcagatgactatagggaggggaggagggtggggaagggtcttgtgacccgttggcctggagctctttaacaagggcattgtgcaatttaaaggaggtgtcctgggcatttgccaacatggtaactgggcttggaatgatgcttttgagatcagaggacctatgcctgggagggtgaatgtcaatgtgcatgtgtgtgcgtgagagggaggggaaaggagggcatgggatggcattcctgcccttttgtagaatgatgaagcactcgggacctctaccaggcagcagaggggcacttctgggaggctggggtgttcatggtgtagcatggcaggggcctgactcctctctgctgccccagggcagcccatggacagcaccagcgtgggaggtggcctgcaggagccagaggccccggaagtgatgtttgaggtctttcctcccagcctgggacatgggggtgggcacgtccagaggtccctaagctcagggttgggaagggggatgtctcagggtggacctgctagggttgggtggggcaagccagcatgcgtcctgctgcctgcttctgccccttcccccagcccactcttgctccctgccctgctccccaggccacagcccaccccttacatggctccccttgcagctgctctgggctgggctggagctggatgtcatggggcagctgcacatccaggatgaggaactagcgtccacacacccaggccgccgactcagactcctcctgcagcaccacgtgcccagtgacttggagggcactgagcagtggctgcagcagctccaggacctgcggaaggggcctcctcttagcacttgggactttgaacatctgctcctcacaggcctgtcctgcgtctaccggctccacgcagctagtgaggctgaggaacggggccgctgggcccaggtcttcgctctcctggcacaggaaacactctgggacctgtgcaaaggtttctgcccccaggaccggcccccttccctggggtcctgggcctccatccttgaccccttcccctgaccctcctcttttgttctttcacctgccattaccccctcccatctcctcctcaaccccccaggcagacccatcttgcgcaggggcttctgtctggcatctgattcttttcaccgtgttcagatctctgggcttggcttgcaccctggacaccccctctctgcttaccccgaccagatcttgtttcctagatcttgagaggctaagaacccaggctctgggtcgcaaggagtgcgcaaggagtgggcacagagctaagggcacgacttgcaggcagtgtgtgtgtgagtgtgtgtgtgtgtgtgtgtgtgtgtgtgtgtgtgtggagatcaggggtcagggttgagaagtgtgttcaagagatgctgaagggaagctgccccaagtaaggcctggtcagaccttccaactcctaccctggcagtctgtgacaggtcctgtggaattcacaggaatcctctaggtgctgagcatccccttttaggcacaaccaaggatttggggtctctgagcctccaagttcccatctgggttgggagaatcgactttttgagttctgtcagttggaagagtggagggaagcagggggagggaggaacattatctcttttggggtagggaggcaatatctcaacaagcgtcgggtgaatacctcagaggggggagtaaggctgggagaccaaggagagacaagcggaggtgggctggagcaggtgtggccctgattctgtgttgctcttctcataaaatgttctgtttcggcctcctggagcctgtgtcattctatgtcggaataagcgtctaacccctgctctgggcaaatcactctccccatcccgggaaggcaagagtcagggcaaccaggtatcaactcctcatctcattcccacgccctgctggaagaaggaatgcactgtttccttgaatcccatgcaccctgtggggtaatggggtgctgttccttgtcacagaaaggcatcagccgggggctaaggctgaggtcgtaggtcaatgatgagtcagagggctagacgaggtagggatataaaagggaggcccccaacggactaggcgaatgtggttccatcaaattcccacctcctcaccctcccagggtccaaggggaccttgctttccaacctccaaccccttccccgggcctgcgggcccgcagtagtcagcaccttcccgcctgccg

SEQ ID NO: 20886 - DNA, 877 bp, Artificial sequence
  DNA replication origin
gcgtcagcgtcggcgtcggcgtagactaggtagccgctgaaggtggcgccgggcgcgcctagcgcgtactgcggggcgccatgcagccgcagccacactgtgtcgccgtagtcgagctgcagcatggcgctctggctggctgcgcgccgcgcgcctggccgccgctgctcgtcgaaggccagcgcctgcacctcgtcgcggtttcgcaccagcatcaccgacaggctcttgtgcggggccttgccagccgtgaaggagaagaagtaggcgccgggcacgcggcagcgaaactggccggtggccacatcgaagtcgcccccgatgttcacgtacaccttgtcgaaggtcaccgccatctccgacgtgccctccaggggggtggtgcgtgccgccgagaaggccgagcgcagctcagaggatcccgggccgggggtcgggcccagggcccagcaggccgctgggcccagcaggcccagcagaagcggcagcatggcgcctgggagggagacggaggggcgagagtggagtgttggcaggggcggcttccaaacgcccggctctccaccgggagacaagggttctcttcccagccctgcccttgacccacaagtaggtttcaattttcctacatccttggattctcaaactctagcgagcctcactgtcacttggagggcgtgttcaaacatacatagttgggccccatcaccagagttcattcagtaggtctgtgatgggcctgataatttgcatttctttgttttgtttgtttgttttgagatggagtctcgctctgtgaaccaggctggagtgtagtggcacgatctcgtttcactgcaacctccacctcccgggttcaagcagttctcctgcctta

SEQ ID NO: 20887 - DNA, 1434 bp, Artificial sequence
  DNA replication origin
gattaatgatgcctgctctctagacccagaggacgaagctctaaggaggtcacagatgaggaagggtccagtgctcggcgcagactccgtgcggagcccctaggccccgcagctcgcccctccctctcccctactcccctcctctccccctcccgtctctcccccgcctcttcgctctcgctcggctccctctctagctgaccttccctttccctcacgcctccccacgcccggcccctggccccagcaccctgtccgctgccgcctcagagccgggaaaagcagccggagcccccgccgcccctgccgcagcgcgggcggtcagcgcgcagcccggcacccgcagcctgcagcctgcagcccgcagcccgcagcccggagccagatcgcgggctcagaccgaacccgactcgaccgccgcccccagccaggtgagggcagctgaggggaggcagggagccgaggttccccctttactggaagcgagggctggggaggcgcggggaaattgggtcctttttccttgaaaggaggacctgggagccttttcgtgaaacaggcacaagggctttcattccaaagggatggatggatggagggaaggtctcgggggagagggattggtttttgttttttaaaaataaggattaattggcttctgtgaaagtgggacttcttggaaggatgaggggctttcaaggtaggttggggagggggctctggcagggcttgagggaagggttaactggtgagtggcagggcaagggggaactctgcgatcccctcagcctgacatcgctgcacctcccgccttggctccggggctctgggtctctccagctctgtgtcccagtttttctctttgaagatgactattttgaaccccacctggacagagccaggaacagccatttccttccctggagctatgacacccacctgacacaccctcccacacctctgacctgctcagggaagggggttcagggaaggacgaggatccagggatctgggaattgggcagtgtgggtgaaacggaggctgggtactgggtgcacaggaagacccttggcactggtggggtgcaccagccttggtcaggaggttgctgggcagctgcttctggggcaggacccactaggaaagcagcggtatggaaaagctgagctgttttccgtgttcccagaagacaaaacactagagaatgtgtttgcttgcttttgtttggttttgctttctgtcttcctcaccctggatcccaagactcattcctctgatctcctctcctagttttgcaaaaaggtaaactgaggcacagaacaaattggctggacatacctgtgtctaggagggaagagtgacaggaaggcatacggaatttgagtcaaaaaacctcagtgctccatgggtgaccttgggccaaaatgctttccc

SEQ ID NO: 20888 - DNA, 1184 bp, Artificial sequence
  DNA replication origin
ctctcccccgagaccttccctccatccatccatccctttggaatgaaagcccttgtgcctgtttcacgaaaaggctcccaggtcctcctttcaaggaaaaaggacccaatttccccgcgcctccccagccctcgcttccagtaaagggggaacctcggctccctgcctcccctcagctgccctcacctggctgggggcggcggtcgagtcgggttcggtctgagcccgcgatctggctccgggctgcgggctgcgggctgcaggctgcaggctgcgggtgccgggctgcgcgctgaccgcccgcgctgcggcaggggcggcgggggctccggctgcttttcccggctctgaggcggcagcggacagggtgctggggccaggggccgggcgtggggaggcgtgagggaaagggaaggtcagctagagagggagccgagcgagagcgaagaggcgggggagagacgggagggggagaggaggggagtaggggagagggaggggcgagctgcggggcctaggggctccgcacggagtctgcgccgagcactggacccttcctcatctgtgacctccttagagcttcgtcctctgggtctagagagcaggcatcattaatctgagcagttggggaaactgaggccagaggcagcagctaacgcggggtggcccagagcgctctacagtccagcttccttcctagtgtggggagagagggctagagctggactcagaggctggactagcctttgggctgcaaggacagtggaaggtgagattttggctgggacagatgtccaagctaagtggccttgggggagaggtctgaaggaagagaaggataaatgggtcaatgttgccagtaaaggaagagctgaaaataacctagtttttcctcctcacctccaaattggaaaatgcccacggtcggttaggaaagagggagaagggagtctgcaggcatcagaggggcagcctgcgttccccggggtgaggggcagtaaggaggagagtccttggggcagaatggaattttctgctgggaaggttgctcctgcaagaagggacaggattgagagggcaataggtggggaagaaaggcctctggagagggaaactgatgccctgcctcgctggggccaggctagcaagagtccagcagggcacccgggctgggaacagcggtc

SEQ ID NO: 20889 - DNA, 1334 bp, Artificial sequence
  DNA replication origin
gcggtacccggccgtaggcccatcctgcaactctctccgccgggtcctcggggcagcacgccgggccgggacccggagccggaacccgacactgagccggactcaaccgcggcggtccccagccagcccgccccgtcggcggcgacgaccaccaccaccgcggtgactgccgccgcggcctcggacgactcgccttcagaaggcaagggtgcgcggggggacctgaactcgagctcagggcttgcggcctaggctcctcacggcgcctggccagacccggcgagggaggcgggcgaggtcggcttccgaggcctgcctgctgcgggcctgcaggcggggcggccctgggctccgggccgcagaagggccaggccgagttctgcgccctcggcccgggccaagcccgaggcgccatctgtggtgcagggcttgccccgggaacgtttgaaatatgaccgaagttcgggcatcctgagtctcccaaacgccccgggtcggttttgggtaacgcagagggtggatgtgaggatgagtttccgcgtgcgcggcctgtgactgtgggccaggcctttccacacgtcatctgcctcctttcggttttgtcgaaacggggatagagacgtttagaaaaagctcttaatattccagctagtaagcatccccacactagcagaactgctggagaaatggagctggtaggttcctaagtatttgtgtggttctcactggagtggtgcttagattaaaagtgactccaggactaggcgccggagaagccgcgaccgtttcacatgttcagagatcacgctggttcgttaattggaaaaaatccgcaatagcagtgtttggtgtgtcttgtaaaggtcctatcatagcctggagaatacttactgtttttgtatgtatttgtaagtattgcagatgtaactttttaagagttttgttttgtttttttcgagacaatgtctcaatctgtcgcccaggctggagtgcagtggcgcgatcttgggctcactgcaacctccacctcccgggttcaagcgatcctcccgccttagcctcctgggtagctgggactacaggaccctgccaccatgcccggctaatttttgtattttcagtagagacggagttcatgtttcccgggctggtctcgaactccagggctcaagcgatcattacaggcgagagccatcgcgcccggccatgcagatgtattaataatttttatttaccatggtaagagtcttcccttgatgttgaagtttgtaagcagatgaaagactccagggcacggtgactcatgcctgtaatcccagcactttgggaggccg

SEQ ID NO: 20890 - DNA, 790 bp, Artificial sequence
  DNA replication origin
ctcgccgggtctggccaggcgccgtgaggagcctaggccgcaagccctgagctcgagttcaggtccccccgcgcacccttgccttctgaaggcgagtcgtccgaggccgcggcggcagtcaccgcggtggtggtggtcgtcgccgccgacggggcgggctggctggggaccgccgcggttgagtccggctcagtgtcgggttccggctccgggtcccggcccggcgtgctgccccgaggacccggcggagagagttgcaggatgggcctacggccgggtaccgcccgggacttcttccccatcgcgagcccaagcgcgagcagagagcgtcgggcggccgagaggggcgggcactggaggctgggcgctgggccctgggcgctgcgacgcgtaatcaatattcatacaccgtgacaccgcctccagcccggatccgctttcaaccagcggagcacgcgcttgcgcaagcgcctcggacccttcggctcttctggctcctcctcaccaggagaaagggcgggattaccaactgcgctaggcgattggctgttttgacccagagaagggaccggtggccaatggaaaaggaaaaagggtgagagtccagccaatagtgcggtagggcctgaattagaacgacttccccacttccgtcgggttccacccatgcgctttccccaagccttttctttgcctacttgtcctccatcttgtggctattctcggcctagagtttcatgttgtctgtcttctagaaaggtgtgctgctgggcccagctcactcacgcct

SEQ ID NO: 20891 - DNA, 917 bp, Artificial sequence
  DNA replication origin
cggggtggcggccgggcagaggctgcaatctcgacactttgggaggccaaggcaggcggctgggaggcggaggttgtagcgatccgagatcacgccactgcactccagcctgggcaacgttgagcactgagtgagcgagactccgtctgcaatcccggcacctcgggaggccgaggctggcagaccactcacggtcaggagctggagaccagcccggccaacacggcaaaaccccgtctccaccaaaaaatacgaaaaccagtcaggtgtggcggcgcgcgcctgcaatcccaggcactcggcaggctgaggcaggagaatcaggcagggaggctgcagtgagccgagatggcggcagtacagtccagcctccactcggcatcagagggagaccgtgcaaaggggagagggggagggggagggggagggagagggagagggagttgttgatttttaagtttgttcagtttttacttattttaaggacagagaggtgacttctaagctccttacatgccagactggaaaccagaagtccctcaccaaaattattctggtacataagatctctaaaagggcttcctccacccgggaagaattggattttagttaacatctgtcaagcaccatctgtgagccagatgtctagtaaatactttcacacgcattgcttcattaagtcctcacaacagccctgagaggtgggtattattattatcatccccattttacaggtgagaaagctgatattcagaaaactaaaatgacttgacaaaattataaaggtagaaggccgggctcagtggctcatgcctgtaatctcagcactttgggaggccgaggtgggcagatcacatgaggtccatgaccaacatagagaaaccctgtctctcctaaaaatacaacattagccaggc

SEQ ID NO: 20892 - DNA, 1041 bp, Artificial sequence
  DNA replication origin
ggggctgaccccccacctccctcccggacgaggcggctggctgggtgggggctgccccccacctccctcccggaccgggtggctgccggctggagacgctcctcacttcccagacggggtggctgccgggcggaggggctcctcacttctcagacagggcggccgagcagagacgctcctcacctcccagacggggtctcggcggggcagaggcgccccccacctcccagacggggcggctggccgggcgggggctgcccccaacctcccggacggggcggctgccgggtggagacgctcctcacttcccagacggggcggctgccgggtggaggggctccccacttcccagacggggcggctgccgggaggaggggctcctcacttctcagacgggggggggccggtcagagacgctcctcacctcccagacggggtggcggcggggcagagacactcctcagttcccagacggagtcatggccgggcagaggcactcttcacatctcagacggggtggcagggcagaggcgctccccacatcccagatgatgggcggccaggcagagacgctcctcacttcctagacggcgtggcggccgggaagaggcgctcctcacttcccggactgggcggccaggtagaggggctcctcacatgccagaggatgggcggccaggcagagacgctactcacttcccagacggggtggcggccgggcagaggctgcaatctcgacactttgggaggccaaggcaggcggctgggaggcggaggttgtagcgatccgagatcacgccactgcactccagcctgggcaacgttgagcactgagtgagcgagactccgtctgcaatcccggcacctcgggaggccgaggctggcagaccactcacggtcaggagctggagaccagcccggccaacacggcaaaaccccgtctccaccaaaaaatacgaaaaccagtcaggtgtggcggcgcgcgcctgcaatcccaggcactcggcaggctgaggcaggagaatcaggcagggaggctgc

SEQ ID NO: 20893 - DNA, 1782 bp, Artificial sequence
  DNA replication origin
gcttccccggagacatggcagcggcggcggcggccgcggccacacgccggagcctagcgcggctgccgcgggggggccgcgtccctgagcgcgcaggggcttcgcggggcggagcgagcggcgcccacccccagcgcgcggctacccggtcccggctcccgcggctgctcccgctgcctcctccgcgcgtcatgcggctggggctgctgcagggagccgcggcgagcgctcggccccctcccttcccctccccctctgaatattcatcgcttcctcccgccccggccggcccggcggctgcggagctccgcagcccctcgccgccgcccgccgctgcccccgccccctccgagccggccgcggatcccctcccgcgggcagaggaagcgctcccgcctcgcccgcccctccgcccagccctcccacattcctgggacttggagcccgggaccaggctccgtggctctagcgcctcgagccggcacccctcaggacgggctccccagcctcacaccaggtccacggcgccgggttcgggtgggcagaggttgaccgagacccctactgagagcgcagccaagcctgattgtagacagcaacccggcgaaggcgcgtttgacctggccctgggtgggcttgggggtgcgtgaaccccgaaattgtagaaggcacgctgtacattgtgttctgtcccccagcccccgagcgccggccagggaggcagagagcccagtacaagccagtccagggattagaaccccagctgtggcatatggtggacggggctctgctggtagtaccagccctgtgaactctggagacgcatttctcctctctggccgaccccacccaccctcctctcctcccgtgtgaaataaagatcgtactaggacgtgtggagagagaggtccactgcattcgcgattaaacgagacagtagttagtaaagtcctaaacacctagcctgacacatcgtgggactccacatacattagctcttctggaagctttcatcacgttgttaaagaggtcaatgaactgacaggagttaaagatcacagcagatattactcctgtgcccatgcacagaggaagacactaggatcagggaggctatgccacttgcccaggagaagccgcaagagaaagggccaaaccagagagtgctaaggaggaagaggttaattccaaccaggagagaggtgacacctgagctgggctttgaaggatgtgttgagtttcaccaggccagtagaggggagaagtgtctcaggaggtggggccaacttggcagaaacgaggcagcagatgcttcgagcttggccttcggagaaacaggaatgggaggctgggggattcatactgggggagacttcaaaggccaggataatgagtctaggctggattctgtgtgcagcaagatgcagaccacgaggtgtccaacactacctccagacacccgttgggcctcaggttaccatctacaagatgggaatacacattcacttacagggtctaagtggttcccaccagacaacacacccagacaagcactgaggataaagaaactttgccaggccgcacgatggctcacgcctgtaatcccagcacttccggaggccaaggtgactagatcacttaagctcaagagttcgaaaccagcctgggcaacggggtgaaacccagtttctacaaaaattagccgggtgtggtggcacacagctgtagactaagctacctgggaggccgatacaaggatggcttgaacctaggctgcagtaa

SEQ ID NO: 20894 - DNA, 1176 bp, Artificial sequence
  DNA replication origin
gggccaggtaagcgccgggtgggctcgggcggggggcaggaggctggggcgggactggcattgactgcacctgcccgagcgtacccccccggggggttccggggaagggggcgggggtccggatccccggatccccggaaggcgacttgcggggaccccggccggcctcgcacgccggcgatcgatcccttttccggctgcccaggatcgggggagagaggcgggatccgggtgccgcggtgcccgagcctcccggggaaagcctccgcgcgggctccaggccgtccctggcccggctcttcccggcgctgggcacatctggcgggcacgggcccggcttcctagccggaggcggccggagggggcgtgtttgcggaggtctggggacgcagagccgggcggcctggctgagcctttgccgacagacctccgacccggcctgcaggggcccgaggggcggcgggggcgacagggcagggccaggcgctgggcagtggggccctgggcgaggcgcgggactccgggccgagggccctgttcctggggaaagttcccaggccggggaaaaggtggccgcacgctggcttttctcaaggcagccggccctcttggcgtcgtgcttgatttcatgggtgtttaattcgtgctttgtgggcgctggctccccctccccaccccaccctcaccctcttttctggcttcacttttcagataatgctgtccctggcgttttggtgaccgacctttccccttcctggcatttccataggggctgaggcagagcagctgaaggggcattcccatttcacagatggggaactgagggagagaagtgaaatagcggagcacccagcccgtgccatgggagctgagccagcgggcacgtcctcttagcctctggagcctgttggggtttgaacccgcaggggaagcggtctagggctgccttgctgtgcgtttctgcaaatgaccatcttgcttgttttatacagacaccatctctgaggaaatgagttattggctggggatggaacctggtttcagggaaaacttctccagcgcgaatacaggagagagcagaagcatcaccctggggcagcaatgccgcctagcaggctgtaggagaagggggctggggcctgggggctgcgtgaccctcggcacccaagggtctct

SEQ ID NO: 20895 - DNA, 1251 bp, Artificial sequence
  DNA replication origin
atataattacaataattaaaatatacaaaaaataaaagcatgaaaatagtgaaaaattttaaaaagggtaaacttgaaaattatttaatttttaatctcaaaaatcagaaagtgattttatcaatgtcctaaaaaattaaaataaaaacaaacttaataatgtaaaagaagggaggtttccaccgggctggctgccagagctagggcttccctggggatgcagaagcaagaagcagggaccttgacgcgcaacagactttcccagacagagcctcggccccccgcgcaagcctccagccaccagcatggtgctgctggctgggacccagccacagggtggcggggtgcgctgcatgaccccgccaccgccgtccccactcctaggcacccaggtcgaggaggaccgtgctgactgcaaagagttccaggacttctccagtctgcccgacacctgcagcatcgcctgggacgactctttctaccctttccaggaggaggaggagcatggtgttgagggcttggagagcgtcctggaggagggcgtcctggaggaggtcgtattggaggcgtggggctgctgcagacgttggtgcggcggggggtgagcgttgagaagacgcaggagactgaccacaatggctagaccggccttgatgtcgcctgctaccacggctttgtgaatataccctggtggccttagctgagtgccaccacatcgaagtcaactggcaggacagggaggggaacgcaaccctaatcatagctgcacaggcaggagctgcccctggccccatgggcacagttgccttagacactggctctcagccttgcgcttcctgcgtcagcatcacctgggctggttcttttgagctttaacacagatctggtggaaacacaggctgccaaacccggctgctggagtctttctttgaataggcctggggtggggcccaagaatgagcagaagaacaggtttcctggtgaggctgatgccgcttgcccagggatcccacgttgaggacggagggctttgtggttttcatgcctgatgatggccaggaacccttctcagtaggcattgaagaccagcagagtcccagaccccaggagagatgttgtcagacagacacagaggcatcacggaattaaagtgaaaatgaggaaaggagctgaacatcttcttcatgactttcctgcgctgttttactaaagaggctgttctggcccagtcagggcatgctatcatcacca

SEQ ID NO: 20896 - DNA, 1224 bp, Artificial sequence
  DNA replication origin
ctacacagacacagtaacaatctgatctctctttcttttccccacatttcctccttttctatttgacaaaaccgccatcgtcatcatggcccgttctcaatgagctgttgggtacatctcccagatggggtggcagccagacagaggggctccttacatcccagatggggtggccaggcagaggtgccccccacctcccagacggggcggtggccgggtgggggcaccccccacctcccagacggggtggctgccgggcaggggctgccccccacctcccgaactgggcggctggccggacgggggctgccccccacctccctcccggatggggtggctggccgggcgggggctgccccccacttcccggaaggggcgggtgctgggcagagggtctcctcacttcccagaaggggcagctgccgggcgtaggggctcctcacttctcagatggggcagctgccgggcggaggggctcctcacttcccagactgggtggctgccgggtggaggggctcctcactacccagatggggcatctgctgggcggaggggctcctcacttctcagacagggcggcggggcagagatgctcctcacctcccagacggggtggcagtggggcagagacgctcctcagatcccagacagggtcgcggctgggcagaggcgctcctcacatcccagacggggtggcggggcagaggcgttccccacatctcagatgatgggcagccgggcagagaagctcctcacttcctagatgggatggcggccaagaagaggcactcctcacttcccagactgggcggccgggcagaggggctcctcacatcccagacgatgggcagccaggcagggacgctcctcacttcccagatggggtggcagccaggcagaggctgcaatctcagcactttgggaggccaaggcaggcggctgggaggtggaggttgtagcgagccaagatcacgccactgcactccagcctgggcaagattgagcactgagtgagagagactccgctggcaatcccggcacctcgagaggcccaggcgggcagatcactcgcagtcaggagctggagaccagccaggccaacacggcgaaacctcgtctccaccaaaaaatacaaaaaccagtcaggcatggtggcgcgtgcctgcaatcccaggcactgggcaggctgaggcaggagaatcaggcagggaggttgcagtgagc

SEQ ID NO: 20897 - DNA, 1377 bp, Artificial sequence
  DNA replication origin
taaaagttacaaaagaataaaagcattaaaataaattgtgacaattttaaaaaagagtaaagttgaaaattatttaatttttaatcccaataatccgaaagtgattttatcaatgtcctaagaaaattaaaataaaaacaaacttaataatgtaaaagaagggaggtttccgccgggctgggggagggagctagggcttctctggggactcagtagtgagaagcatggaccttggcgggccccaggctttcccggacggtgccgcgatcccccgcccacgcctccggcatggtgctgctggctgggactcggccgcagggtggcgaggcgcgctgcatgatcccgccaccgccatccccactcctaggcgcgcaggtcgaggaggaccgcactgaattcaaagagttccaggacttctccagtctgcccgacactcgcagcgtcgcctctgacgactctttgtaccctttccaggacgaggaggagcacggcgtcgagggcgtggagagcgtaccggaggagggcatcctggaggcgtggggcagctgcggacgctggtgcggtgtggggtgagctttaagaaggcgcaggagactgaccacaatggctggacgggccttaatgtcgcctgataccacgactttgtggatataccgtggtggccttagctgagtacccccacattgatgtcaactggcaggacagggaggggaacgcagccctaatcatagctgcacaggcaggaactgcccctggccccatgggcacagttgccttagacactggctctcagccttgcccttcctgcgtcagcatcacctgggctggttcatttgagctttaacacagatctggtggaaacgggctgccaggccctgccgctggagtctttctttgaataggcctggggtggggcccaagaatgggcagaagaacaggcttcctggtgaggctgataccgctggcccagggatcccacgttgaggacggagggctttgagttttcatgcctgatgatggccaggaacccttctcagtaggcattgaagaccagcagagtcccagaccccaggagagatgtcgtcagacggacacaggcatcacggaattaaagtgaaaatgaagaaaggagctgagcatctgtttcatgacttccctgcgttgttttactaaagaagctgttctggcccagtcagggcaggctatcatcaccaactacttgttgaactatgtcctgggtcttgaccttgaaggagggatgagtttgggttgaaaaccgccatgcagggtcgaaccgatcacatcggagccctgagctagcaggggcgggtgtccacacgagggtccctgccgtgggatgtcgccagaggagtggcc

SEQ ID NO: 20898 - DNA, 1516 bp, Artificial sequence
  DNA replication origin
ttttgaagttcttgtgtgctgcagatgtggctggggtttctcttacagcaaaggcaagtaattgcaactcctctgttattgtacatcttgaaggcgaggttgattaattcctattgtggggtttgagggcccaattctaatttttgaagcttttttttaagtcaggagctgactgggtgataaaatgcatattgagaataagatggccttcaggcccctctgggactagggcagtaaagggtctaagcattgtggccaaatgggccatgaactgggctgggtttttatatttgatgaaaaagagcctaaacgctaactgatttgggagaggttggataaagaaaaaggagcattaaccttgactatgcctttagctacagtcacctctttaagaggaaattattgggcaggtgggggagggctagtcacggaacgaaactgtaagctggactgggtgtgaggaggggaaatgatagaagaattatagggtgggggagtggagtctgaggaagaattggagcctgattcagcctggcagggagtgacctgaggaggagcagtcttgggaggaggggagaggtcagatgggtcagtagaaaaggaagagtgaaaagactcagcgacgcttggggttgggactgaggggacaggtgggagggaaggaaggatttgggacgagtcacattgggaacagagactagggagggaccaatgtgtaaaagaatgcctggatgtcaggcacctcagaccatttgcccattttacgacaagaattatctagatcttgtacaatggagaaattgaaagtgttttctggctatttggagctattgtcgagtttgtattggggtcaagtggcattgcagaagaaaataaggcatttaggttttaggtcagttgtgagttgaagaggctttaagttcttggaacacaggccaagggagaagaaggaggaatgatgggtggaaggttgcctatagtgaagaaggcaagcccagagaaaagaaagggtagggacacggagagaaggggtgggggtacatgcccccccccccaggaaagtggtacttgccactaaggtgaaggatcaaggcaggcatccctgtggtgatcagacacctctgaaacgtgggtgaataatcaggcaggtgtccccacagtgattaaacaccaaaggaaaactgtcttcccgagtccatgactggtgccagagttttgggttcacagataaaatgcatctcttctgtctctaccagaaaaggaaaggaactgaaattaagcgaagggagagattcaagggtggcaccaagattgaaaggagaaagaggttgagggatagtgagagaggctggagaacagtaaaaagagcctgcttacccgatttaaaattggtgatgttccttgggcttgttggtctgaggaccagaggttgtagatgaatctttctcatggagcaaagagcaggaggacaggggattgatctcccaagggaggtcccccgatccgaatcacagca

SEQ ID NO: 20899 - DNA, 996 bp, Artificial sequence
  DNA replication origin
aaccccgtctgggaggtgaggagcgtctctgcccggccgccccgtctaagaagtgaggagcccctccacccagcagccgcaccatttgggaagtgaggagcatctccgcccggcagccgccccgaccgggaggtggggggcagcccccgcccggccagccgccctatccaggagggaggtgggggcaacacccacctggccagccgccccgtccaggagggaggtggggggtagcccctgcccggcagccaccccgtccgggaggtgggggacaacccccgccccggccagcctccctgtccgggaggtggggggcagcccccgcccagccagccgctccatccaggagggaggtggcgggcagcccacacctggccggccgcccatccgggagttgtggggcgcctctgcccggctgccgccctgtccgggaggtggggggagcctctgcccggccaccccatctgggaagtgaggagcccctctgcccggccaccaccccatctgggaggtgtacccaacggctcattgagaacgggccatgatgatgatggcagttttgtccaatagaaaagggggaaatgtggggaaaagatagagagattggattggtgctgtgtctgtgcagaaagaagtagacatgggggactccattttgttctgtactgggaaaaattcttctgccttgggatgctgttaatctataaccttacccccaaccccgtgctctctgaaacatgtgctgtgtccactcagggttaaatggattaagggtggtgcaggatgtgctttgttaaacagatgcttgaaggcagcatgctcgttaagagtcattaccactcccaacttccccaatctagcaaggcaggccaacgttcagattcaggaaatacagagaatgccacaaagatactcctcaagaagagcaactccaagacacataattgtcagattcaccaaagttgaagtgaaggaaaaaatgttaagggcagccag

SEQ ID NO: 20900 - DNA, 1124 bp, Artificial sequence
  DNA replication origin
cccgttctcaatgagccgttgggtacacctcccagatggggtggtggccgggcagaggggctcctcacttcccagatggggtggccgggcagaggctccccccacctcccggacagggcggcagccgggcagaggcgccccacaactcccggatgggcggccggccaggtgtgggctgcccgccacctccctcctggatggagcggctggctgggcgggggctgccccccacctcccggacagggaggctggccggggcgggggttgtcccccacctcccggacggggtggctgccgggcaggggctaccccccacctccctcctggacggggcggctggccaggtgggtgttgcccccacctccctcctggatagggcggctggccgggcgggggctgccccccacctcccggtcggggcggctgccgggcggagatgctcctcacttcccaaatggtgcggctgctgggtggaggggctcctcacttcttagacggggcggccgggcagagacgctcctcacctcccagacggggttgcggccaggcagaggcgctcctcacatcccagacggggtggtggggcagaggcgctcgccacatctcagactatgggcggcggggcagagacgctcctcacttcctagaggggatggtggccgggaagaggcgctcctcacttcccagactgggcagccaggcagaggggctcctcacatcccagatgatgggcggccaggcagagacgctcctcacttcccagacggggtggcggccaggcagaggctgcaatctcagcactttgggaggccaaggcaggtggctgggaggtggaggttgtagcaagccgagatcacaccactgcactccagcctgggcaacattgagcactgagtgaacgagactccgtctgcaatcccggcacctcaggaggccgaggctggcggatcactcgcggttaggagctggagaccagcccggccaacacagcgaaaccctgtctccaccaaaaaaatacgaaaaccagtcaggcgcggcggcacacgcctgcagtcgcaggcactcgcaggctgaggcaggagaatcaggcagggaggttgcagtgagccgagatggcggcagcg

SEQ ID NO: 20901 - DNA, 880 bp, Artificial sequence
  DNA replication origin
gtgaggagcccctctgcctggctgcccagtctggaaagtgaggagcgtctctgcccgcccgccatcccatctagaaagtgaggagcgcctcttcccggccgccatcccacctaggaagtgaggagcgtctctgcccggccgcccatcttctgagatgtggggagcgcctctgccccaccgccccatctgggaggtgaggagcgtctctgcccggccgccccgtctgagaagtgaggagacactccgcccggcagcctccccgtctgagaagtgaggagcccttccgcccggcagccaccccgtctgggaagtgaggagcgtctctgcctggcagccgccccgtccgggagggaggtgggggggtcagcccccggcccggccagccgccccgtccgggaggtgaggggcgcctctgcccggccgcccctactgggaagtgaggaggccctctgcccggccaccaccccgtctgggaggtgtacccaacagctcattgagaacgggccatgatgacaatggcggttttgtggaatagaaaagggggaaaggtggggaaaagattgagaaatcagatggctgctgtgtctgtgtagaaagaagtagacatgggagacttttcattttgttctgtactaagaaaaattcttctgccttgggatcctgttgatctatgaccttacccccaaccctgtgctctctgaaacatgtgctgtgtccactcagggttaaatggattaagggcggtgcaagatgtgctttgttaaacagatgcttgaaggcagcatgctcattaagagtcatcaccactccctaatctcaagtacccagggacacaaacactgctgaaggccgcagggtcctctgcctaggaaaaccagag

SEQ ID NO: 20902 - DNA, 1118 bp, Artificial sequence
  DNA replication origin
ctacacagacacagtaacaatctgatttctctttcttttccccacatttcccccttatctatttgacaaaactgccatcgtcatcatggcccattctcaatgagctgttgggtacacctcccagacggggtggcggccgggcagaggggctcctcacttcccagacgggggggccgggcagaggcgccccccacctcccgggcggggtggctgctgggcgggggctgccccccacctccctcccggatggggcggctggccgggtaggggctgccccccacctccctcccggacggggcagctggccgggcgggggctgccccccacctccctcccggacggggcagctggccgggcaggggctgacccccacctcctggacagggcggctgctgggtggagacacgcctcacttcccggatggggcggctgccaggcggaggggctcctcacttcccagacgtggcggctgccgggcggaggggctcctcacttctcagatgtggcggcggccatgcggaggagctcctgacttctcaggcagggcagccgggcagagacggtcctcacctcccagacggggtggcggtcgggcagagacactcctcagttcccagacggggtcgcggccaagcagaggcgctcctcacttcccagactgggtggccgagcagaggggctcctcacatcccagacgatgggcggccaggcagagacgctcctcacttcccagacagggtggcggctgggcagaggctgcaatctgggcactttgggaggccaaggcaggcagctgggaggtggaggttgtagcaagccgagatgacgccactgcactccagcctgggtaacattgagcactgagtgagtgagactccgtctgcaatcccggcacctcggggggctgaggcgggcagatcactcgcggtcaggagctggagaccagcccggccaacacggcgaaacccaccaaaaaatacaaaaaccagtcaggtgtggcggggcatgcctgcaatcccaggcactcggcaggctgaggcaggagaatcaggcagggaggttgcagtgagccgagatggcggcagtacagtccagcctcggctgggcatcagagggat

SEQ ID NO: 20903 - DNA, 1762 bp, Artificial sequence
  DNA replication origin
ttcttcactcgccccatcccccactaagtccctttctccattcattgcaagccctcttagttttttcttctggatctgatgcccttaagccatccctcctctgtctccgattccaggtccacaccttgcccctactacgacctctcccactgggccctgcctgatcctctttctctgcccctgtccagttgcccacccttgtctccccctcttctcctcgctctatccccaggatcctgtgggcggctgtgaattttgccctgtgcttccttctctcctctctctttgtggtggggtccacagccagttctcctgttgctcaaaaatgtggaggcagttgctaagagacagcgaaacgtcagtacctggccctcgaggaaaaaaaaggggagtgaaaaagggagagaactgggggagggatggagggagggagagagagagggtgggaaggggggagggagggggaagacctggctctggcggaagccttataccccagcagcctgggcaccagctgagtttcagaaagaagcattcagattctgtgaactttcttccgagcatcctgtctctgtgatttccctttgggtgaaagaaggggcagggggaccgcaggacgggaaatcatagaagatgctggcctgggatccgggagacaaggaggaggagaggccgggggaggggaacagcctgggaggcaatctgttctgaagcaagcaaggagcaagcggggattccaggaggagggagggagacccgcgtctgccgcagattgatggctgtgtccttggaacggagtgagtaggctcctggggcctgtgggagtgcgagggggagacctggggcttagaaaaatgagtctgcatgaaggggagctggggtgatttccaggtgggcgggattgaggcttgaagcggtaggaaaataggcagcgccaggccgagggtgaggggaggaccgaggacagcaggtgggcaagggagaagcgagagggcgcggggcgcgagggctgaggctctgggcgtggcatcactctcggtccctctgctgggggcggcgaggagagtgcagtgtgtggaaagggatgctgggatgaagggtgtgcgctgagaggggggcgaaagatgctgggggtcgactggggaggggtctgcagaatcgcctgtgcagaaggaagctggagcgaaaaccgcgaggcgtgagcacggggcagggcaaaatacgggggagtcacagaatggtgtgtgagtgagtgtgtgtgtgtgcgtgtgagagagagaggagtgcttagagtgtttgaaaggggtgtgcaaacccccagagtgtggatgcagatttttcttagggagttgttcaagggtggcgtgtttggtactaatgagggtggggttatgagaagaagaagaaaatgcatctaacccaagacaggaacccagaggaggatggctgcaggttgggtcagggagggctcgtgggtaacagcaatgtgagcctggggtctgaacctaccatggcccacacctgacagacagtaagcagagaactttgtggttgggggagcaaaggaaagagacaaagataagccaagcgtcctaggtgaagggacaagggagtgtcaagggcacaggatttctctgcctgagtgctttccttgttgacagagggaatttggcctccacctgctgaacacagaactgcgctgaggaaggcactggcttggagaagatgccagagctctgccagctgacactcagcctgcacc

SEQ ID NO: 20904 - DNA, 949 bp, Artificial sequence
  DNA replication origin
atgccaggtactgtattatgttcgtgtttggagaagaagaaaagcaaacaatcaactgtagcataattcactttattaccttgggcaaaacattgaccttgttgggcctttgtttcctacagatttaatgacttgtttagagataattttgtcctgggtttcttccatcctgtgactgccctcaaccttctaaagcatcctgtgccttccgcaaactgcaaactgcagtctacactagtgtaggggtatttctctagaaaccacaaaagttctcagagggagggtcaaagccaaggggtagagaaagatgaagcgagaggcaaagtgggagaagaccctcctgtgacacctggtctgggtgggggctgggggtgcaggaagggagccgagggggccagacctgcctgccaggaggacctgccagatgccctgcccatcctgcgaaatcttacaccctccttgctccctaccagccctggctccagctcaagctggattgcaatctgcataatgtgtcccatttagattggatggaagggggtgagaacaggagggcggagagcactgaggagggagtgccctaaagggcaggcaggaagtggtggccagaggaaagtggagggataggggctggggtgaaggtgggtggcagccagaaaggagaggcggggccaggaaagccgacttgcaaaaccacagataatgttcagcccagcacagtaggggtcaatttggtccacttgctcagtgacaaaaagaaaaaaaaagtgggctgtcactaaagattttgactcacaagagaggggctggtctggaggtgggaggagggagtgacgagtcaaggaggagacagggacgcaggagggtgcaaggaagtgtcttaactgagacgggggtaaggcaagagagggtggaggaaattctgcaggagacaggcttcctccagggt

SEQ ID NO: 20905 - DNA, 807 bp, Artificial sequence
  DNA replication origin
cgcacaagctctctgcctgagtgtgtgtgatggtgatgaatgtgaatgtgtcattttggggagtggccgctggacagggcgggcagtatgagttagtgagagagtgtgtggtgtgcttgtgccgtgtttgtattttgtttttagatggggtcttgctatgttgcccaggctggtcttgaactcctgggctcacgtgatccccctgccctggcctcccaagtagctggaattacaggcgtgagccctgcaccccatgtccagctgtattgtgttttgaggaagcagcagacagaagatgcatatgctgcatggaggtccaaggtgacccagcccctcatttgcttggcaaacatttgcttagtccggcgcgtagccaggctctgggtcaggtgctgggggcataaaggcagaaagggccccgtttttgcccttgaggagctcaccgacaggctatggggacaaagaaccacaggaaagaagcaggaactggcatggattggagcccagggctggtagggctgaggcggccatggtggctgggagggggcagggcagcttcggaagcagaattgaaccaaggggacagtaccaccagggacggtgtggtgcggggagctttccagaagagggagcagctcgttcaaagccagcagcatgtgagggccgggtgtcttctgatggtccctggttgctctgtgagcctggggaatgaagaggcataacgtgggggctgaagacaacatgagtccggagaggcaggtgggccagtacctggctcaccccaaggagtgtgactgcccgagcacg

SEQ ID NO: 20906 - DNA, 675 bp, Artificial sequence
  DNA replication origin
aggtgtgtctgtcccgggatgtgggtgactcaactggctcctgggcggggctgcccaagctgcagctgctccggagggagcagggccagggtgagggagagccagcgccagagccgtcggacaggtcccagcgcgggtagcagcccagctctatccctgcgcccggctggccgcacccagcagccccaaggcgggttgggggcggggggccatggcccagcctggggatggggaggccagcatgtctatcctggagcggctgctggccaacgctgcgctgagggatgaggctggccggctccgaagccctgagcccagggctctcccgcccacaagggtgagtcagggagcgtgaggtggggggtggggtgcaagaagccctggctgggattttcccctgtgccagaggctgcccctcttgtctttcctgggccagggtgagggctgagaggtcttcctggggaagattgagcagacggcactttggctggggaagaagggcctgggtacttataggaggatgggggtcagatggggcatgggggaggacgggctggaaaagctgtcattggtgttggaaccttgccttgcaagggaagtcgcagagaggctttgaatcttgacctctcctaatcaaaaggaaagtgcactgcctgccattcctgtgtgaagacc

SEQ ID NO: 20907 - DNA, 975 bp, Artificial sequence
  DNA replication origin
gcctcgtggggaaggtccattcgaaggactgtgataagctccagttggactctgccccaaagggacgatccagggccaactggctcccctggccttggggcagggcagccagcgagccccccagcttctcctggtcctgactgggtgactggagcacaccttcagagaatcggcgctgaaccaggctggtggggcggaggtgtgcgtcacccttggcctcctcctccccgccagatggaaacgtccgagtgagatccagcaactcacccacctcgatcaggggccggggtgaggtggcagggggctgatccaggctatggggctccaagacctcagggggtgggctgctgggtctgggggcctctggagccccctcggcagggagccccgggctgggggtgtggcgggagccctcgtcaggcagggctgcacttggagctgatggagtcacagcggggcagggagaagcctgggaagcttcaggagtctgggcttccagaagctgtgagtggcagggagaactcttatcaggcgggtgaagatggggagagccagggcctgagcctgaggcttctgcggggaggcctgggctggcagggcctccattctctgaggagggggctggacttgagggaatccagggcttggaaatctgcaagagaaagaaaggtcaagatccgtcactcacctctcagcggggcggggagggtcccctccgaccccacacagaccccaggtcagcttctcccaggctgggaggaggcaactggaacccgagggggtcctcttgggatagctgggaggggccccacagacgactcaaggcaggacttctcacagagccccctttagaccttcttccccagaatgcgcctatccttattcacaaagcataattcctttcgtctcaggtggttggaacccctcacccactcaacccaaagctcatgtgaggatctcctcagaggccacagt

SEQ ID NO: 20908 - DNA, 1636 bp, Artificial sequence
  DNA replication origin
gggaggacagtgagagagtccaccaagtggagacagcctccaggactgggggagggcgccatcagctgtcagatgccactgacaggtcaagtaagatgagcacagagaattggattcagctccagggaggtcatccgtgaccttgacgagagtagttaggtggcaaggtaaaggagaaagcctgtttggagtggtttcaagagagaaggggacaagaagaactgtggatattaatagtgaatatagacagggctttcaagaaaatggatggtagctagtgagtgatgtggggtcaagagtggttttttggtttgcttttttggcttttcaagacagaagaaattagagcagtttgtgtgctgatggaaatgatccagtagagagggaaaaaaaaatcgatgcaggagagagaggagggattgacctcagccccaagcgaggacagtgcctgatagcagaaggggaggcagagtgcttgggctcccatgcaggaagtaggtggtgtgtgtgtgtgtggcggtgggggggttgtcgggggttctctgctggtggcctctgtgttctcagggaacaggaagcaaggccatcagctgagagaggattgggggaggtgtggaggtctgacgggagaagatgctaaaacattgcctgggagagtcatggagtgaatggcagggggagtgccgtgggattctgggcagctctagggccggcttgaggtcagcagtgaatctggagtgagaccagctgtcacgattgtgtgtttttatccagccacatgcagctactcaggtgctgggctaggattggcccagctgtattggagagctgtatttaaacaggttaaacagtatgatgaagcagatgagggagttgagtgttgagtaaaaagtgacgttaatggtgataagaagagaggtgagggtatgaggggagtgggggacaatgagaaagaattagggttaaggggctgtgctatgagaggggctgaaaataagggcgttggggaaatagagtgagccggtcagataggcggtgggggtgggcaagtgggatacttgggattgagatgatgcagaggttgcagccactggtaaggatgaggtctagggtgtgaccttgagaggatgggtcgcacagtcactgaggaagaggaggtcaacgaaccagaggctggaagggtcgcatctggctatggagatgactgtaagctatcacaacaatgatggagagggttgcagtgatgcagcggttatggttttcaaggaatgatgggtgcgtaagggtcaataacaagaaagaattgtgggtgctgtagtttaagggcacgagctttgacattagaacgttgcagaggggagtgagcatggagggaacagaagggaccttgagaagcaagcaggaccctttattttgcccaggcctagtaggtgatgatgtgggagaattaacgacatgggagagggcggccagggaagtgtgacctctgcagagggcaaaggtcagatggagccagagtcacttcattgtctggggacaggtggagtgccaggtgcttggtgccttgtttgtccccctcttctctccacgtcctccccactctctgccgccatcatcccatgagtcctatgccgag

SEQ ID NO: 20909 - DNA, 1287 bp, Artificial sequence
  DNA replication origin
agtttctcctcatgaaatgcagtccctggattctgtgccatctgaacatgctctcctgttggtgtgtatgtcactagggcagtggggagacgtcttaactctgctgcttcccaaggatggctgtttataatttggggagagatagggtgggaggcagggcaatgcaggatccaaatcctcatcttactttcccgaccttaaggatgtagctgctgcttgtcctgttcaagttgctggagcaggggtcatgtgaggccaggcctgtagctcctacctggggcctatttctactttcattttgtatttctggtctgtgaaaatgatttaataaagggaactgactttggaaaccatgtcctcatgctttctttgtagccttggtgtgttgctcccacttttattggtggtgtttactgctctggtcagactgggcagggccttcctggccagccgggaagcaagtctcgaggtacatcctgttctgttcccggctggacgagcattggttttcacccgcctctgcccggatgggccacctgagagtctagaaatgagagctgatctgattaggaagtttctcccagttacactccattagccaaccaagctagggggaggcagctcttggctgcatccttacctatgagtcaagggtcttccaaggctttcgataatgaaatcaggattgactgtccttcccgcagccgggggagtggaaacctgagcctggagagtcggggaggatgagcgtgtgcgtagagtggtggtggttgcagcctggtggtggtgcaacaaagtacggagttatatgtgaagcttttgttcttacgggaagaagggggtatacaaacttcagtgtagggaggaacccatgtctgagaaggggcctaaaaggagataaaggtcactaatgaggaatgcagagctgccagacttcttcacggtggctctaaatctgaattgacacaggagggtggccacgttgcgcgcgttctcagcactcaggtggttgtatcaggaagccgcttcagtcagccggcggctaccttcttgccggcgtagctcgatgatactgtgctctgtgcaggcggcggagcccgggaggggccgccaaggcagtttctctaggcagtcgtctcggtggccattttacccgagcgctcccggctgaattgcgtcagtttcgccccggtctgagactggggcgggcccctcatctgcaagcctcatgaataattgagtgctgggccgcgcctgtttgccgacggtgggacgaattctgcacgg

SEQ ID NO: 20910 - DNA, 1971 bp, Artificial sequence
  DNA replication origin
ccgtcccccaacctctcctgctcataaatccagacttcccacagcatttcctgactctcgtttctttattgctcactttggggattactccagttcggaaaaatcctggaagcattcactctcgggaaagtgagccatggccgagtagggcggcccggtgggggctggcggcggcgctgggcggcagagcgggacctggggcggccggaaggcctccccgggcgtggggtagggttgggaggatggggacaggggtgtgggtggtgggagtagaggtggtggagatggtttgggagtaggggtgggagtgggaggtggggggatgggagtaggggtggggggatgggtttagggatggtgtggtgcaggtgaggggttggaagtaggggtaggggtgggaggtggggggatgggagtaggggtgggagtggggacgtgaggggttaggagtaggggtgggggtgggagatggggggatggaagtagggatgggtgtggtgcaggtgaggggttgggattagggttaggggtgggagatgggggatgggagtagggatgggtgtgatagaggtgaggggttgggagtatgggtaaggattggggagtggggggtgggagtagaagtggtggagatggtggtggggatgggagtagggttgggtgtgatggagggaggggttgggagtatgggtaaggactgggggagtgggggatgggagctcagttggtgtggggtgctttgctggtcctcttgctttgtttggattcagtatgcggtgcagggtggggtggctttccaaaataaaggtgatggagctgttttaagagttggtgtggaacactgaggtcccacctaggggacaacacgaggaagtggggagaaagcagtcttgtcttggggcagactgctcctctggccctatgcctttctggcttctggtaatggcccccaattttatttccagccacctctgtgagtccccagcctcctctgaggcatgttccccatccattcccaggagggtggtggtcctccccttccttcctcctggcctacctctgtagaggggccacatccttaggagggagcgacttctccccagcagggccctgggcacaaagccagggtgtctggtagttcccattcccagttctgcagccccaggcctctgtgtctctccgtcccccactttctcagaccctggggacattgagagacattattgttgttgctattaactttgtcacagatgaggtactgggctccaggaaggatgtagagttgatgaagtaggaaactcagaactgagactgggtatcaagacggtagagagccctggattgtagggggtggaggcagtggggagagacagacttcttgggagtgtgtttccacatggggcccagggagaatacaaaagtatttctgtgtgtgcacatgtacatgtgtgcgtatatatcttggtgtgtacatgtgtcagtgtttgtgtacatgtgtatacctgtatatgtgtgaatttgtatatgtaaatgtgcataaatctgtgagtcagtatgaatttgcatgttgagtatgcatatgtttatatatctctgtgtatttatggatatgtctgtctgcgtacacctgtgaatgcatatgtctccatagctttgcagccttatgttcccaaatctctctgtgtatgcatatgtgtcttcctctgtgtctttgactggtatgtatgtgggtgggtatatgtctcagtgtgtgtctgagcataactgcatacaggactatgtttgtgtgtttgtgtatatctgtaccagcatctgatgggatgtggtttcaggagcgaaaagaacttttcccagatgtgctgtgtttctaagggtgctaaagttgaggggacaggatcagagagccctggggaaagtgggtgatggagaaagcagagagatgaggcccttcaacatgggcaggcctctggc

SEQ ID NO: 20911 - DNA, 2094 bp, Artificial sequence
  DNA replication origin
accttgtctctatccatgacttcaacttcaactatcgcattcagtgctgcactagcacagtcaaccaagcccaggtctggattggaggcaacctcaggggctgggtaagtcaggggccaaatcttgggtgcagtaagttctttctgaatgtgttaaagtagcatctgatggtgccaagcctcaggccagcagctaaggtttccttaatgtggcaggcaatgatgtgctggagatggcttgtactggctcaggagaactgatggtgcacatctcttaccaactccatgctcagtgactacatgcttgcagcttgacatcagccatggtgggagtatttacacaaaggaaataggcaattgctacacatcagggctcctttctactccccatcctcccacccaccccaagagctggtataaacatttaccagcataccactggagtcatgagacagagtccaggcccagcttagtcacttagaaagctagttaaataggtttcttggagcctctgttttttttcaatccctgaaatggggaccttcttctctcagggtggttctggaattgtgggtgaataagtggcattatatttggtacggtccatagatcagcagtatggtccatagatcagcagtaccaccatcccctgggagcttgttagaactgcagaatcttggaccccaccacagacctcttgaatcagaacctccattttaacaagatccccaggagataacgtacgcacagtaaagtttgagaagcctgctctgtgtgatggctgagagagatggttgctcttcctgtcattgcctggaaactcttaggaatggctctctagggtgtctggctcctggccaggtaggcagtgagagaagtcaacagggggtattccatgaggtcctggatctgaacttctgccctctgacctagcctgtcacttctctagttcctgtggaagcggttttgctggactgatgggagccactggaattttgcttactggtccccagggcaacctgggaatgggcaaggctcctgtgtggccctatgcaccaaaggtgagggggaagggcaccagggcagggagaagggatagtaaagtggattcttaatactacccctttgagctgcctgaacacacctccccaaactcagaccctcccgctgactgaagaacaaaagtcctgtgtgtaaggagggctgagacatagggaatcctcaaagcaaaaccaggtgataggagttctggagacaggggggtgggctggatggtgtgtgtgtgggaaaattctttgcctcctttgatatgagggcaataaattcgaacaacaggtatgaccaatgagagtagcggaagtggatataaggcgtggatgagagaaaaggaaggatgggggaattagggatggctgagagacaagatgcccacctccaacagcagacatgggcagcagcatgggtgccagatgtgagtttagtatagtggctgagaccatatgtgctagagcaagactgctgcagttcacatcccagtgctgccacttgccaactgagatacaggcacgttgtttatctctactaagcccccgtttcctcatctgtgaaatggggatgatgacagcacccacctcttggagtcatggtaaggattaaatgcaatagtccacctaagtccatctaatgcagttagcacacagcctagctagcagtaagagctcagcaaatgtgagccagtagggatgtggggcaagcacacagctggcagatgacgatggccatagatggggacatagggggcccctgaggagggaaagaggtgaagcccaggccagaccccgcagggcggtggacttcactgtgctctgtgctgctaggaggttattggcgacgagctcaatgcgacaagcaactgcccttcgtctgctccttctaagccagcggcacggagaccctgccagcagctccctcccgtcccccaacctctcctgctcataaatccagacttcccacagcatttcctgactctcgtttctttattgctcactttggggattactccagttcggaaaaatcctggaagcattcactctcg

SEQ ID NO: 20912 - DNA, 994 bp, Artificial sequence
  DNA replication origin
ctgagcgagtaacagcattcaactaacttggttaggggaggcagaggcaagggggctgggaggctgaaaggcagcgaggagggagggaaagacaccgctggggttctagggggttctagagggagaagtttcaagagggagaggtaaaaagggcgcgggaggctgtgagcaagggaaaagaagaaggaagtgatggagagtgggaggtctgccccagccccttccgggcgggcaggagggggcggaggcgagcaggggactgggaggggctgcgagaggcgcgaatgcgaacctggcccgtgcggaaagggcgcggagagccccggcgcggagcaggcgggtagggcgaagggtcccctttcgggcgccatggggcgccgagcgcggcctggcccctcgggctcctctgcggggagggcaggccgcaggctggagcggggtgcggaggctggcggggagcggcccccggaggctttcctggtagaagttgatgcgaggaagggcggcggggaccaggtttgcgagtcctaggcgagggtcatgggagttgggggtatttctggcagtagaatggcctgcgtcgtgactaaactagccctgtgaccttgggcaagttcctgaaatccatgggagcttttgtttcattgtcagtaaactgaagataacaccaacttggcagcgggagtttgtgtcttctgtatgaaatctccctgcctctgcacctggttgagttgctgtcattattttaggggacggtattcagaattcgagcgcaggagctccgcttctccacctgctcccggggagctattgggtaagtcgtttatctcacctgtgactccaggtggccatcaagacctgcctctctacttgccacgtggttactcaaatgcagtgcctaagatgatgtattggagtatttattccccacatttgctgccagcggccatgatcatcctgcctcttaatgcacctcacaaataactctagtcta

SEQ ID NO: 20913 - DNA, 947 bp, Artificial sequence
  DNA replication origin
ccacccttcctccattcagtcaagtcactagggtggttgcagacttttatcttttgtgctttggtggtgagctggaaaatcctcagttctggctgtcccctatcgtaacctctatttcttcctcttaaaaaaaagaggagtgggcttggaatagctggagttcctgggccctcaggggatccaggtagctggggttgggagtctgcagactgcatctaatacgcaagaagctctccccaaactgagcttttggcaaggaaacggccacacaggccaaagaagacgtcagctcacgtgctctgggctggaaggatagtaaggcagctgcttagtaaggcctcacgctgatcacaagctccgatgagcaattatatatgtctttgattaataaaaaatggggcaatgaatggttaatcaatgcagtctggcgggaaggctctttcagaacctggggggcgggggtgaggcagggagtcatctaaggggtttttgggagtgaaaatatggggcagtcctccaggggatggtttctgaaaagccctcagtcctggttcttggcttcctgattctgtggttgggatttttttggcagctctgggagtgtgaaactgggagagacggttaagctggtgagcaaataggaaaaatatgttccctgccaacccagcggtcaaggcaaaatgcacaaatagagtgtgtgtgtccctatgccctcatgtgctgtctgtgtgtcctctgggtgctgggtgtgacattttccctaggtgggcctgagcgagtaacagcattcaactaacttggttaggggaggcagaggcaagggggctgggaggctgaaaggcagcgaggagggagggaaagacaccgctggggttctagggggttctagagggagaagtttcaagagggagaggtaaaaagggcgcgggaggctgtgagcaagggaa

SEQ ID NO: 20914 - DNA, 977 bp, Artificial sequence
  DNA replication origin
ggacggggcttccctttcctcgcagctcgtcccaggaggaggagctcccccccagcttcggggttccgcctgccttgggggcccggggtcccctcccacccctccccgaagagcgcgggccccgggaaccgatgacagcacacctgagtcagcccgccgcccacccgcccctcagcgtctgtctccgcatcttgtgatatttcgctccccgggagccagccccactgcgctccggaggcagctcggcaaacaaacccagcgacagattgtgccgcggctcattccggggaaggacgccaaaccccaccctgctacccccaacactccctccccgccgccgcctccaggccctccccccaggcgcaggccctagtcggggtgggtcctggggaaacgcagggtcctgtcctgcctcctggaaatagggggagccctgggtgagggaagacgggagccccagagacttttctttctgtttctacctgatccgaaaacgagaggggcgggaaaggaaatttaggggcacagagaggagctggggggccgagaaggtccgaaaatggaaccagcagggggcacccgagagccgaggtgcccacgggccgggagcctgggaatgaaactggggaagagggggagagaaagggaggcagagacaccgagacacacagagacgagagacagagacgcagggagccccgcggggaggaggagagagacgaagacacagagagacagtgagaaagacagaagaccgggcagggaaacagacgagtagagacagaaaaggtccgagagagagtgagggagggagggaacagagagacagagaccacgaaatatgagtaagagtcgggggagaaaaccagagaaatcgaatgagaacgcgagaagaacgagagaccgtggagggagcagagaatgaatgggaagaataagaccaacatttatcaagagccgactgtatgccaggcact

SEQ ID NO: 20915 - DNA, 840 bp, Artificial sequence
  DNA replication origin
cccctcccccccgcttaagcgacccggaggactgtgttcgatcgtcctcgcggcgccactcttctagagaaatcccttcttgggggaatgcggtagtttagaggaacgccgtggacttgtcctgttcccccctcccaactttccaggagaagatgagcttctgggtcaccccctcccccgcccccagccgcgtccctcgcgccagtgtcccagcctccagcatttctgtcccctgggacagctccaagattccacttttccttccactcccagacctcaagcccagtgtgcgactataagaatagtatatgcaagagtttgtgcgtgcaagatcgagtgcatatgagcgtgcacgtgcgcgcaaggatgcttgtgcaggtgtgactcaggatgcttgcccgttaccctttgtacgggcttggggaagcgggggggggggcacgtgagtgtgcacacgggtgagccgctgaaagtccgccagcgtgcatgtctgagctggtgggaaacgtgaggctgtgcgaggttttgcgcttgcgatcttggggatgggtggaaagaaatatgtgcccggtgtgtgtatgccccttagtgcatttacaagcgggtgcgagatgggcgcgcgtgcgagtgtgtgcgtttttttgtgtatgtatgatgtgtccgggaggggagaccttatctcccgcgggggtgcaggagaggacccaaagctggggagaagactgttggcttcgcgtgaacttcctctacccccttttaaagaggggcggattatggtctcactggagcccctctggcccttcatggcctggtcacaggcggtatcagcagacccatcac

SEQ ID NO: 20916 - DNA, 682 bp, Artificial sequence
  DNA replication origin
cgcgggctcccagccaagtgccctcctgctgagaacagccctggcggcgggggcgcggccccagcgctgagcttttccccttccccaggttaccccacctccccaactgccccaccctcaatccctgaaagaggggacgccctgcttctctccccaggatgccctccgctctcccgccgctggcgttcttaccttgcagcaggcgcctgagcccgggcagcatcttgtctcgatgctcgggggagggggcagcggggggagggcgctcccactcgctccctgagcccgccggatgcacggcggggaccccgcggggctccgggagggcccgggagtccccgggctgcgtggccgggccgcggcgctctaccctgcgccgcccgggctgcgggcctcgggaggagccatcggccccgacgggacggggcggggcgcgacggggcggggaaggctggggctggccgtcgacgcccagcgcccgcgccccgctagctgcgctgtccgctcgagagtccgtcagtccgtctgtccgtgtgcccaggctgctagccgagggagagtggggacagcgaggaagctcttcccaaccacccccactccttcccgcactcgctggctcctccctcgtttgctggcttgccgacttaaccctttctcgaccactaggaggcgggagcggctt

SEQ ID NO: 20917 - DNA, 1913 bp, Artificial sequence
  DNA replication origin
acggccagccccagccttccccgccccgtcgcgccccgccccgtcccgtcggggccgatggctcctcccgaggcccgcagcccgggcggcgcagggtagagcgccgcggcccggccacgcagcccggggactcccgggccctcccggagccccgcggggtccccgccgtgcatccggcgggctcagggagcgagtgggagcgccctccccccgctgccccctcccccgagcatcgagacaagatgctgcccgggctcaggcgcctgctgcaaggtaagaacgccagcggcgggagagcggagggcatcctggggagagaagcagggcgtcccctctttcagggattgagggtggggcagttggggaggtggggtaacctggggaaggggaaaagctcagcgctggggccgcgcccccgccgccagggctgttctcagcaggagggcacttggctgggagcccgcgggcgcgtgcgaggagctcgtgaccgaggtgggacgcagggggcaggtggacccggcccggagcggggagggaggctcaggttccgctgtccccgctccacctgctccgggggacgctgaggactcgggccggctggggaagcgccgactcagcaactcctcctgcccggtgcctcagcactttctggccacctgggaagacaggagatgtgggtagggggctgtctggggaggtaggaggcgcagagggaaatccaagtggccctctctggtaggagagatggagggcgctagaaagaggatagttctactgattgagtgacagataagggtgtgggccagagactgggggtggggtggggaggggtcagggggagagggataggaaggagaactcaaagatggagaaagtggtgagggaagctcaaaggaggagggagatggagcgggggagggggagaaggaataaaggttagatgggaaaagcgtggagggaagtgggacccaggtgaagaccaaggaagagggaaggagaggaaagaccagatcaggggagggatgggaagaagactatggacagggacccagaatcctgggatggaggtagcgggaaagagaatcaggactgggaccctggggactggaatggaaaaggagaatggaaagatcagaaaccagagaaggatggggatggtgactagagaaggggtatcaggaaccggcgaagagggttggagacagggaaccatggatgggagaggggctggagaggagggaagaggaggaggaagagaaaggctgagagagagggactggggattgggggtgctgcccagggatgagacaaagaggcttctggtaaccacttccacgtgggaagccctccattcccaaagcgcctgcctgccacatttcttctctcagggagtggctggtgggccagatggggggtgctttgagctcagggccctgggggtggctgtgagggacagagggtgaggactttggaaggggagtgacagcctccgagggtgggcaaacaggctggctcctgtgctgccatttatttatccggcctggacgttggattctgcagccgctgccgccaccacggtggctgcttattttggggtgttacattctggcagagtgagaagctgtttgcagcagctctaaacctccgtcacccgcgtcagtgcctccccaggcccctgcgtcactggcatcaccaccacctccatcccactcctcagctcccacctcctcagcccctgccccctcagcatctgcccgcaggccccagcccttccctgaagcagcccgttgggtgtggagcccttgcttctcgtctgggaccctgtgcccctccttccagagcgagaggcctctgctgcctttccagggagcatcctttcctgggaccactctgcaccagcgactctgccctgt

SEQ ID NO: 20918 - DNA, 906 bp, Artificial sequence
  DNA replication origin
gaagcacgttccaggttcaagtagggagagggcagaatttggatattttcacccccttccagccggaggctctgtagccaagggaagattttctctcagggtggtttggagggtgtgttattgcttcctggggaaatggagtgggatgatttgcgtgtcaaacagtcagcataacaacaataaacaataattagatcaataataataacaatgaataacaattactggtattccttccattttcagagcatccattctccagctgcataacagagatttacccttttctttcttcccctgcattgagatgacaggtttggaaaatgggaatctagaaggggtgtgggcttctcccgtcccattgcccagtgaattggagagaagcgcaactttctgtgggatgccagtggctgtggctctgccttctctctctacttcaccgtgatgtgggcagacttgagggtgggtgagaaaaacagctgcaaaggcctttgggcaggggaccctgggggaaggcagagtgccctgaaggcaaacacgtgagatcacagaaagagacagatacacacacgcagacagacatgggggtgtatgcggagtgggtgtgtgaagggagacagacagaagaggcagaagacagatgggggaggcaagttagtgagagaggcagtgatggatggaaagggatagacagacagacaggcagaggcagagaggtgaaggttgtggagttagagggagagagagagagaggaacagcaagggacctaaacaggtagagaggcagaagggaaaaagtaaagcccctggagaatgtaagagagaaaagagacatagacagagagaaatggagatgctgaggcaggaagggtggcctggggagagaggagggacgcacgccagggt

SEQ ID NO: 20919 - DNA, 1292 bp, Artificial sequence
  DNA replication origin
tgacgccgatgatgacgatgatacccatcctagactgatgagctctgtaagcgggggtgcctggcacagagtagacactcggtacagctctgtggaatgaatgaggcacatcccagaactcaccaattcataaaaatcagatgcagatgggatcttaaagatcacctatcctaagtcccttgtttcacagatgaaaagacccaggcccagagaggtgcttggagctgcgcaaggtcacacagccaagcagctcatttgattagtgtcagagccaagagctgggagtttggagggaggcaaggttaagaacaggatgctgtcagggaagcaggcagggatgctgtgttaagattccaaatggatgcagagagctgtgaaccggccagtggggaggcaagggaaatgtggtttttgaaatggaagaggatgactttagcagaggctctcagcccagagggaggggagatagggaggggagatagggaggggcggggggagggctagggctgtgaaagtcaagagcttattaatgcatagagaacggttttaacagtggagagaggaaggaccggatttgaaagctacattcaaggaagtggcaacgggatttggcaacagcttggatggggggaggaggcaatggaccccaaggcagaggctcagagaagggaggggcaggactttttgcagagaaacaaaaggagaggagaggaggttagaatcaagaaattctgtgggccaaaacctggggctgtgggtcaaaggcacctgaattccctaggatctctggaactttggtctactcttctgacctcccgaggtcccccaaaatgtggattacccctgctcactctcccccaacccccggccccttatcgatcctctgaccatacatctctgggtgtgtcctactcttgctgacacttcataaaaagaggaaccccatttaggtgttttgagtggcagggattccaagcctaccccctggatgggcctggaagagaacaagagcaccaggccatggtgagtcaggctgaggccagggaggtgcaaggagccagctggaggcctgagccaggatttggggtggtggcagcagggggcggagaatggtggtgtcagaggcagccgagaaggttgagggggacggatctcaatgtggccaagaggagggctcttggcacgctcagttcctgtagcgaagagggcggaagccagatgggagggggcgagaacaggcaggagcacaggaaggtggaggctgtgggtgtaggctgggagtcaatgccctc

SEQ ID NO: 20920 - DNA, 1353 bp, Artificial sequence
  DNA replication origin
ggcgcccccgcgagtcttcggcaggcagatctcggtagagggtggagggatcggctgggggcgccccggcctcggccaccccgtacaggtggttggaggagctgttgccgcgggcgcggctgcccggccgcgtgggtgccgcgggcggacacgcctggaagtcggcctcgcggagcgcgcgcaggtctcggccctggcgctccgggggggtggcgcaggtcacgtcggagctggacacgcgcgcgcgctggaaccaggcccagagcggccgcgcgcggcagtcgcacgcccaggggttagcgttgagccgcaggaactcgagcgagggcaggtcggcgagcgcctcgccgggcagcgaggccaggctgttgttgaacaggtagaggatggtgaggcggctgaggccgcggaaggccgcgcggtgcacgccctgcagccggttcccgtgcagcagcagccggtccaggctgcccaggccgcgaaacacgtgctctgtgagcagccgcaggcggttcccgtggaggaagaggtggctcaggttggccaggtccgcgaacaagtcatcctgggtggggtggagtggggcacagaagaagagaatgggcctgaggtagggtgcagaccccgctggggccttggccgggggagggaagggggtgcaccgtggcagaagagaaagggttgaccttttgattcatagcatcctggatttggattctgcctcctctaacctatttgctgtggaaaaagtggtattggtgaggtcagtggttcctaaactttcgggtgtattaggatcccctgcggatctctgagcggggtggggcggggggcagagtttctaattcaggaggtttggggtggagcctgggaatccccatgtctacaggttccccagggaagccagtgtggccattggcaggaccacagtttgagtttcagaacttctggtttggtgaagtatggagactggggagccagcctttctgatttcaaatcttggatctgtcattaactgatgccaccgtgggcaagtcactcaggatatctgtgactcagtttcctcatctgtataatgtagagattaaatgaagcagcatgtatgaaggtgcttagaacacctttccttgtggagttctatgagttccatgagttagccattattctttttttttttttaatttttgtttttgtttttgtttgttagccattattcttaacttggccaagccagtcatctctctgtgcctgtttcctcatctgtaaaatggggatgagtatacctacttcctgggtttgttctgaggattccagaggatggttcacataaagatcatatgagggaagtgctgg

SEQ ID NO: 20921 - DNA, 1062 bp, Artificial sequence
  DNA replication origin
ggggtctcgaagcttgcctctggccagccggaccccggtgggagatggaggcagaaattccggcctcctaggagaagggcgtctgctcactcccccactccccggggcttggggagggggctgggcaggggcggaagcgagctggagccgtgtttgtcgcggcgctgcggagtggaacagatggctggggaggggagagggtgcgtggcggggaggaggaggggtgcgggggccggaggatagggaacgaggaatttcgaagcctggagtctcccaggagaagcccccctccccgtcttttcccagaaaggggggcatatatgcgcctgcctttttcccggagagccctggcctctgccctgtggcagaccctgccgcgcaatcctctgccccagggcgcgcccctcacccccaaacccccgccgcgggacggggtggcggggtcaggaccgccaggagcggcccgggtcgcgagggttaatggggccgccctcccaggggcgaggaggcggcgggaaacgggctcggggtggggaacgagttctgggatcgcaaatagcaaaggaaaaacatgttaattggagctttatgcagatgagctaggactggggactgtggggtagaaggagggacaaggtcggacctcgaggagcgttggtgggctctggccgggggagtgatggacgcctatccaggtatctgcgtgttgagcctcccgggaaggccgctggtgcccggggatgagaggcttcctctctgacccaccccccagaaacaaggttgggggctctccagggtctccacgtcctcggtctcagattgccacgaagagagggcggggtgcaccctgcaagtgtctgcttcggtttctggctgctgacctgtctcaccttggctgtggccccctcctccccggtctggcttggtctccactcactttgcctcctctatctgttactccccacacctggcatcaccctttccactcggtattgtctgaaaccttccccaagtgtgaccccttccccctttgcattttcctttctgccccccacagaacca

SEQ ID NO: 20922 - DNA, 1379 bp, Artificial sequence
  DNA replication origin
ctgccactggggatcctcatggaccgctttggcccccgacccgtgcggctggttggcaggtgaggtggctgggctatggggaacgggaggacagggaccgtgctgcagggggaggggagggggggtgctcacaggccaacccctcgcccttccctgtgtctccacagtgcctgcttcactgcgtcctgcaccctcatggccctggcctcccgggacgtggaaggtgagttgtctgtcctcttgtggccccacaagaaaagaataggtgggatgaaggcggatgtttaccccagctcccgcccttggcttcccacagctccccaaatgccctcatctgctgctttcccctttccagctctgtctccgttgatattcctggcgctgtccctgaatggctttggtggcatctgcctaacgttcacttcactcacggtgagtgtcacaggcctggcctggcagcagagttcccccgagtggggtgagggcagagtgagtggggtgagggcagtatgaatgggctgggggaggggcctgtggacgcagatcactagatcaagtgagtgtgtgagaaactgtgcaggtggctgcaaagagcaggtgtgaggctgtgtgtgtgtggatgaggctgtgtgtcggggtgtatgttaatgtgtgtgtttgtgtgtacagagcccatgaatgtccatggagctctgttctaggtcctggactacagcacaatcaggactgaccgagtcatcctccctgctggaggttacattttgggggtgaggggcacagataacccaataaacaagtaaactaataaattatgtcagtcgtcataggtgctgggaagaaaataaaactgggtaacatgatcttgagggggagggagcagcttgagatagcgtgtgcacgcttgccatgtcgtgggagagtgggtgtgtgaccccgtccctgtgaaagccatgagttggtaggtgtgtttgtgagtgtactaggttgaaccatatgaaattgtcgacacctcgtcgtgcacatggcttgacctattacatgtggtgagtggtgtatgtgtgttgctcaaagtgtgtttatttatgtgagtgtgtaaacgcgttaaaggcttaggagtgttaaaggcttagggaggttggaggggaaggttcctggccgggctggctcggactgtttatctctgagaagggctgcctgactgggtggttttggctgaatttcacctctccccagcagccgcctttaattccaaccggggacatttcacagctctaaaggaaggaagcggatccctttctccccgcccctctgcgcagccccttctccctgctgtgcaacttggcccagggccctaaatcccttctctccggcgcttgacc

SEQ ID NO: 20923 - DNA, 804 bp, Artificial sequence
  DNA replication origin
ggagggatggcaaaggggcaggtggaagccagaaaaggttaggtggccaggtggacagaaagcagggtcagcagttggacagcctcacttctcgacctcttcaaacttcagggggagattgggtggcactctgcccactgtttcatttatctaatccagtggtcactgaatgccaggtgtcctgctggtcatccagaccctgggactaataggcagagtcctaagcctctgacagcctcaggtctagagctctttgaaggagacgtgctgggagaggaatttcttaatagggctatcataagacaagggagagctgcacaaagtggagtatgaatataaagggccccacatccttcccttttcaggagctgggagcccccaggttttcaaattactcatttggacaaagttacatagcctcatttactctaggagggcattgtggagagtctctggtttccacttcaatcaccttgtgtgagtggccccgaagctgggagtgggaattctaacactctttgggagcagtaactacagccataggctgtctgcagctgccttggggcagggagttaccactgctggtgtctaggacttgcctctgatgggtatcttcctattctgggaaggagagagctgtgctgacaagctccgcctcaggagctgggtggaaatggaattgggctcccctctctttttatcccctttccccaacctctgtgttgtggagtaagcttggaaggaagtttagcttggatttgaatcccagcttccatcacttttatcagttggtgacttcggtga

SEQ ID NO: 20924 - DNA, 1019 bp, Artificial sequence
  DNA replication origin
cctgccagcttctaggggtctttcctggcgcgagagtccggacatgggcccgcggtgcttcagagcgcgctctgccccttgctgtcctctggggacctgggcagatgcggactttctccccagcagcccggccctgagcgccctggcctgggtgagagaacccggcagcctgctaggaagctgcagcgcgcagacaggaccttccttgtttccgatagtggctcagcgggagccccgtgccgcgtgcacctctggcactgctagtgcgcgcggagccagctccttggcaccggctgggaagcccagggctctatggggcctccatgaggggctcctcgcgggctggcccgagaggtctcgggtgccaccatgatgcaggacccttccctggggccactggggggcccttcacccagcgctctgtttctgtgcaggctcggggccagcatggcccccacgctgcaacaggcgtaccggaggcgctggtggatggcctgcacggctgtgctggagaacctcttcttctctgctgtactcctgggctggggctccctgttgatcattctgaagaacgagggcttctattccagcacgtgcccaggtatgcctgaaaatgggctgggtgggctggggggagggatggcaaaggggcaggtggaagccagaaaaggttaggtggccaggtggacagaaagcagggtcagcagttggacagcctcacttctcgacctcttcaaacttcagggggagattgggtggcactctgcccactgtttcatttatctaatccagtggtcactgaatgccaggtgtcctgctggtcatccagaccctgggactaataggcagagtcctaagcctctgacagcctcaggtctagagctctttgaaggagacgtgctgggagaggaatttcttaatagggctatcataagacaagggagagctgcacaaagtggagtatgaatataaagggccccacatccttcccttttcaggagctgggagcccccaggttt

SEQ ID NO: 20925 - DNA, 1192 bp, Artificial sequence
  DNA replication origin
caggctcggcggctccggcagcttgctggggcaggggctcaaggcggcagtccgatagtggaggccgctgagaactgtcacggagctgcgtctgtacagcgagcatcccttatttattcagggcgagtgtgtatttggggcggcgtgcagggggctgacaaagaccggagagctcccggtgcggccgccggcggagcgaagactggaacccgtatgagcgccccccagcgcccctgagcgctcgccgccggtgcacggcgcaccccgcgggaggcagggatcagcaaagccgtgcgccccgaggcccgcccccgtctccgcacaaagaccgtgagtcccgggtccgagccttccgcgcggggatcgggcggttgtccggcgggtcgtccttcgacggcctcctggcctcgccggagcgggtgcggggaggcccacgcagcgacggctggaggaggggtgggcggggctgccgggggtggggtccccggggcggggcggggcgcgctgtgtcgcgggtcggagctcggtcctgctggaggccacgggtgccacacactcggtcccgacatgatggcgagcatgcgagtggtgaaggtaaccgcgtataggatgacccctttctcttggctcccctcgcctcccgcattccctcctccctccatcccctccgcggctctccgagcacatttatttatttgtctgggcaccagggctggctgaatccctgtcctccccgccctctactcagaggaggactggcctgcaagagtggccagagctggggttttgggggtttggaggcctctgcttgagccgttcgcgtggtgaagatgagccggctcccccaaaactggtttcaatttcgcttttcctgcctgaaacttgtgataacaactgggtgcatctccagtgcaggaaaagtccttggcatcttggtgccaggcattctgctactgctggtggtgggttatgaacacagatgaccaggatgaagtccttgccttggaataagcccatagcccatcccataatttgatgcctgtattactagagtcctgagaaacacggaatgctgattagaatttgggacaaagttccctgagtattctctggaggaaaagatgcggaggtggacctggaaggcctcctggagtaggtggcttgcgttcgtgagttctacaagtgttgaatg

SEQ ID NO: 20926 - DNA, 1204 bp, Artificial sequence
  DNA replication origin
tgggagctggctccgaggctggctggctccgcaggtccgctgacgtcgccgcccagatggcctccaggctgaccctgctgaccctcctgctgctgctgctggctggggtatgtggtcccttgtgggatgggggacgggggtggagacgggaggcgggatggtgcggggtgcgggcggtggctgaggattaacccttcaggctccggggaatgaggagagctcctcttgggatcattgagtgtgatccttgcacacgcactcgtagatggtggaaagagctcaggactcagacagatgcaagttctaatcttggcgggccatgtaggagctgcgcagcgtggtcctgaggacgtcacttttctcagcctactcctcctgatttataaaatgttgaataaacagatcccaccctgtccaccaagcaggcttggcaggaggatcacatagggcaaggagatgggaagcattttgtgatatcaaagcaagagtttgttgtagaaaagagctgtggggaggagaggtttggctgctgtgacacagacggtggtcccaggctagggcctgtgaagacagggaagaatggtagcaaacatacgtgggtctgggtgggggtcaatagcagtgagaggtcccagtggtctgggaggtcatggactagaaataaggctaagaagtgcaggatcccaggagaaaggtaggtaggggtgtgtgtatgtgcgtgtgtgtgtgtgtgcacgcgcaagttggtatcacatactcagcagatgatgtagttatgagcagggagtttggaatcagagaccttgttttgacccctagctgtttctcccatttctgtgagaccctggactagttaatatgtgtcggtatgagtttctctacctgtgaaatggagctaatgcgtggtttctcagtggaggatctgttgacattggggctggataattcattgctgaggggctaccctgcgcattttaggatgttttgcagtatatctctagcctctacgcactagattccggtagcatcttccctgctgtctccctgtgacaaccaaaaatgtctctggacattgccaaatatcccctgggagtcaaaattgtttcagagccgctggcctatactacttctctctccctcccttcctgcctcccttctttcctccttccctttcttcgttcccttcctaatgtgtactgttttt

SEQ ID NO: 20927 - DNA, 770 bp, Artificial sequence
  DNA replication origin
ccgcatttggcgggaactggatctgccttcacctgcagccctgtgcggggcgtgacggaaagagcggggagaggggcgtcctggtgcgggggttgttgaggtgagaagccaggggagggggctccgggagcgccctgacctcgcggactgttgggaggcggaggggatgggggttgggggagaagaggggagcctggcagccaatgggagggaggatctcgtttcaaaagggttaacccacagccaatgggagcctgggggagcggatcctgctcactccattcaagaatcccaagtattcaagatggacggcagggagtgtggaaggagaaagggggcgaggggggaagagcgagatcggcagaggagagggtctccgcggcccaccggcctcgcaacctcggtcccggccggcgggtggcggggcggccgctggggatccaagcccggcccgggagaggggctggcggggtgcgagagggcgtgagcgagggggagcgaggccagggaggggagccaagagggagggaagggcagagaaagagcccgggaagaaggaggtggcaggcagaggatcctaacgaagagcaatgtgtaggtatcgagagcttcccgaagggtaacgacaccgattttcggttttattctctcttggggaagggagggggacggtctgggctctttctctcgtcttcctttttccctcctcattctccactcgtgggcatcttttctattttttcctttggaaacactgtaactgggaagca

SEQ ID NO: 20928 - DNA, 891 bp, Artificial sequence
  DNA replication origin
cggcgggtggcggggcggccgctggggatccaagcccggcccgggagaggggctggcggggtgcgagagggcgtgagcgagggggagcgaggccagggaggggagccaagagggagggaagggcagagaaagagcccgggaagaaggaggtggcaggcagaggatcctaacgaagagcaatgtgtaggtatcgagagcttcccgaagggtaacgacaccgattttcggttttattctctcttggggaagggagggggacggtctgggctctttctctcgtcttcctttttccctcctcattctccactcgtgggcatcttttctattttttcctttggaaacactgtaactgggaagcaccaggcgtgtctttctgaggtggcctcactgtcattttccagtggggggcgtggtggggtagggatggggggctccgctgggcacggccgagctgggccatctgtctccacctgggttgtgtgcgagggcgtggagtgttccgagggggaccgggggccgaagggctggagcagggcagggagttctgcacctccagaagttgtagggtgagccaggggcggtgtgggggtgtgaggctggttttcgagctgatagttgtggggtgttgaggggtgcggggatgtgtgtgtgtggggggcgtgcgctcacactccagttcttgttgtttgggtgtgtaatgagggctgagttgtgcagcaagtatggctgagagtttgtgtgtgtgtgtgtgtgtgtgtgtggtgtgtacgtgcgcctgtgtggtccagcctcgaggtgtgtgtgttcggggggagcacagttgggtgttgaaggagagcgcccctcaccccccacttcccagctgcctctctcatcccattcacagaacat

SEQ ID NO: 20929 - DNA, 861 bp, Artificial sequence
  DNA replication origin
aataagtgcgggaatcgtcagagcttggagagggatggaggaaccgagagagaggagcggaggcagcggggagggggaagggaggacaaagggtggatgaataatgcttttgcaaaggggagaaagcaacacgcagcaggaggaggaaatttgcaaagagaaaaaaattcatttggagaagggctgccccctcaccttgaggtctgctccagagatctccgtctatctctctctctctctctcaatctctcaatctctctgctcactcttctctcttctctttccgctccttcaattgggaaggggatgggggtgggtggggggagggtagttgggggctcaagactggggctgcaaagctggccagctgctgggggggcagaggttgtctctcgttctgtacctcggtctgtgggtgaatgtggctgtgtgttgtggaactgcatcataacactgtgagtcatccatcccccccaccccccctcacctcccacgtcagagcagggctgggagacacaggaggcgggtcggaaggaagggagggggtaggcatcaagggacggggctagaggagtgggggccgagggacaaggcggcgatggtgggcaaggggagaggcaggttgttaaggaggaaggcagtggggccaaggagatacgaagaacctgggggaaggacagggctgggcaaggatgcagtgagggtggcagggctggaggaaaggaggtggcaaggctggtgaaggaagagatggatgcagagtgagggagcacacacacatttaagatgatacactttcccatttcagcttggacaccagccctgaagcagggaaaagacagatgtactaattgtcatgga

SEQ ID NO: 20930 - DNA, 992 bp, Artificial sequence
  DNA replication origin
aggtgggggggtcagccccccacccggccagccgccccgtccgggagggaggtggggtcagccccccgcccggccagccgccccgtccgggaggtgaggggcgcctctgcccggccgcccctactgggaagtgaggagcccctcagcccggccagccgccccgtccgggagggaggtgggggggtcagccccccgcccggccagccgccccgtccgggagggaggtgggggggtcagcccctcgcccggccagccgccccgtccgggagggaggtgtgggggtcagccccccgcccggccagccgccccgtccgggagggaggtgggggggtcagccccacatccgggagggaggtgggggggggtcagccccccgcccggccatccgccccgtccaggagggaggtgggagggtcagccccccgcccggccagccgcccggtccgggaggtgaggggcgcctctgcccggccacccctactaggaagtgaggagcccctctgcccagccaccaccccgtctgggaggtgtacccaacagctcattgagaacgggccgggatgacaatggcggttttgtggaatagaaaggggggaaaggtggggaaaagattgaaaaatcggatggttgccgtgtctgtgtagaaagaagtagacacgggaaacttttcattttgttctgtactaagataaattcttctgccttgggatcctgttgatcggtgaccttacccccaaccctgtgctctctgaaacatgtgctgtgtccactcagggttaaatggattaagggcggtgcaagatgtgctttgttaaacagatgcttgaaggcagcatgctcgttaagaatcatcaccactccctaatctcaagtacccagggacacaaacactgcggaaggcggcagggtcctctgcctaggaaaaccagagacctttgttcacttgtttatctgccaaccttccctccactattgtcctatgaccctgccaa

SEQ ID NO: 20931 - DNA, 1333 bp, Artificial sequence
  DNA replication origin
cgggcgaggggctgacccccccacctccctcccggacggggcggctggccgggcggggggctgacccccccacctccctcccggacggggcggctggccgggctgaggggctcctcacttcccagtaggggcggccgggcagaggcgcccctcacctcccggacggggcggctggccgggcggggggctgaccccacctccctcccggacggggcggctggccgggtggggggctgacccccccacctccctcccggacggggcggctggccgagcggggggctgacccccccacctccctcccggacggggcggcaggccgggtggggggctgactcccccacctccctcccggacggggtggctggccaggcagaggggctcctcacttcccagtaggggcggctgggcagaggcgcccctcacctcccggacggggcggctggccgggcggggggctgaccccccccacctccctcctggacggggcggctgccgggcggagacgctcctcatttcccagacggggttggtgccgggcagaggggctcctcacttctcagatggggcggatgctgggcggagggtctcctcacttctcagacggggcggctgggcagagacactcctcacctcccagacggggtcgcggccgggcagaggcgctcctcacatcccggacggggcggcggggcagaggcgctccccacatctcagacgatgggcggccgggcagagacgctcctcacttcccagatgggatggctgctgggaagaggcgctcctcacttcctagatgggatggcggccgggcagagacgctcctcactttccagactgggcagccaggcagaggggctcttcacgtcccagacgatgggcggccaggcagagacgctcctcacttcccagacagggtggcggccgggcagaggctgcaatctcggcactttgggaggccaaggcaggcggctgggagatggaggttgtagcgagctgagatcacgccactgcactccagcctgggcaccattgagcactgagtgaaccagactccgtctgcaatcccggcacctcgggaggccaaggctggcggatcactcgcggttaggagctggagaccagcccggccaacacagcgaaaccccgtctccaccaaaaaagtacgaaaaccagtcaggcgtggtggcgcttgcctgcaatcgcaggcactcggtgggctgaggcaggagaatcaggcagggaggttgcagtgagccgagatggcagcagtacagtccagcttcggctcggcatcagagggagaccgtggaaagagagggagagggagacc

SEQ ID NO: 20932 - DNA, 812 bp, Artificial sequence
  DNA replication origin
gccactgcactccagcctgggcaccattgagcactgagtgaaccagactccgtctgcaatcccggcacctcgggaggccaaggctggcggatcactcgcggttaggagctggagaccagcccggccaacacagcgaaaccccgtctccaccaaaaaagtacgaaaaccagtcaggcgtggtggcgcttgcctgcaatcgcaggcactcggtgggctgaggcaggagaatcaggcagggaggttgcagtgagccgagatggcagcagtacagtccagcttcggctcggcatcagagggagaccgtggaaagagagggagagggagaccgagagggagaggggagaggggagaggggagaggggagagggagaggcagaggcagaggcagaggccagaatttgttttcattctttattttctttccctagctttttattgttgttgttatttagtttttatttcataatcataaacttaactgcaatccagctaggcatgtaagggaacaaggaaaacacggaacccaaagggaactgcagtgagagcacaaagattctaggatactgcgagcaaatggggtagaggggtgctctcctgagaggagagcacagaaggaatggtctggtggtgaagacaaaacaagtcaaacttactagacttatccacagtcagcaatggtgatcttcttgctggtcttgccattcctggacccaaagcgctccatggcctctgcaatattcatgccttctttcaccttgccaaagaccacatgcttgccatccaaccactcactcttggcagtgtagatgaaa

SEQ ID NO: 20933 - DNA, 1018 bp, Artificial sequence
  DNA replication origin
cacagtaacaatctgatctctctttcttttccccacctttcccccttttctattcgacaaaaccgccatcatcatcatggcccgttctcaatgagctgttgggtacacctcccaggcggagtggcggccgggcagaggggctcctcacatcccagacggggcggccaggcagaggcgccccccacctcccagatggggcagtggccgggcgggggctgccccccacctcctggacggggcggctgctgggcggaagggctcctcacttcccagacggggcggctgccgggcggaggggctcctcacttctcagacggggtggccgggcagagacgctcatcacctcccagacggggtggcggtcggtcagagacactcctcagttcccagacggggtcgaggccgggcagaggcgctcctcacatcccagacggggcggcggggcagaggcactccccacatctcagacgatgggtggccgggcagagacactcctcacttcctagacgggatggtggccgggaagaggcgctcctcacttcccagactgggtggctgggcagaggggctcctcacatcccagacgatgggcggccaggcagagacactcctcacttcccagacagggtggcggccgggcagaggctgcaatctcggcacttggggaggccaaggcaggcggctgggaggtggaggttgtagcgagccgagatcacgccactgcactccagcctgggcaacattgagcactgagtgagcgagactcggtctgcaatcccggcacctcgggaggccgaggcaggcagatcactcgcggtcaggagctggagaccagcccggccaatacggcgaaaccccgtctccaccaaaaaatgcaaaaaccagtcaggtgtggcggtgcgcgcctgcaatcccaggcactctgcaggctgaggcaggagaatcaggcagggaggttgcagtgagccgagatggcggcagtacagtccagcctcggctttcacaactttggtggcat

SEQ ID NO: 20934 - DNA, 950 bp, Artificial sequence
  DNA replication origin
cgcgccgccagcggtagcggaccttgagtggcagggggtggggggggcgccctcggagccgggcggaggggaggggggaaagaggagcgcagggtgagagtgagccgcaggcttcgggaggcgagggggcggggggagcagcgccgaggccgccgcctccgcctccgccgcctaggactagggggtgggggacggacaagccccgatgccgggggagacggaagagccgagacccccggagcagcaggaccaggaagggggagaggcggccaaggcggctccggaggagccccaacaacggccccctgaggcggtcgcggcggcgcctgcagggaccactagcagccgcgtgctgaggggaggtcgggaccgaggccgggccgctgcggccgccgccgccgcagctgtgtcccgccggaggaaggccgagtatccccgccggcggaggagcagccccagcgccaggcctcccgacgtccccgggcagcagccccaggccgcgaagtccccgtctccagttcagggcaagaagagtccgcgactcctgtgagtaacagtctttcaggcggtgggaaagacccccctctgtccgtacgcaaccctctcggctcccgtagcgcctactccacgtgacatcctgcctggtctgccccctgccggctccgcacgccagatgtcacaccgtttccccgggagccttcgtgcctcctctctgcgccaccctcatctcgctcctgtaccttcgcttgtcgggccgtttccccactccccgaaatcatcttttgatacacccctgcactcgctagtgatccacctcctccctgacacccgcaggctcatccctctttctggcatccgcaccccctttgtcaccctatccctttcctttaggcggctctccagtattacatcacatgccctttagggaatacacagcccgatcatagcct

SEQ ID NO: 20935 - DNA, 1068 bp, Artificial sequence
  DNA replication origin
aggctgtttttctctcattggatgtaaatgactcatctctcatccactgtggaagccaattatcatcactccagacagtgattgaagggaaggaccggatgagcgcgcagcgcgcgcaggtgggtctgaaggccgggccgagggtactgcgcgccaacccgcccaccctccctatttgtctggatgacccttcccggtctcagtgatcccctccccggcaccactcagtccacggccagttcccgtgtcccaggataaactaagcaatcaccgccctgctctttcccgctcatgggcgtcccctgtctcccagtggaggctagggaggagctgcgcggtagctgggcggagtgggaggtgcctggaggtttcgcgctttctccgacttttgattgccagcgcgctggcgggagccgcgcgctggcggcagctgcagggcgaatagcccgccaagttgcttaggtgtgtggcagttgctgcctttctgcagcggcggggtgggcgacggtggcgggatgagcatccaggcgggatcctttggcggcagcagcagagagagctccacccggataatgcagaggcccaggctccagcggacttcaagtcccagagcaggctgcacccgcgtctgcgtgaaatctaaagggacttggcctgatcacaaatgagctaacttcgcggcggggctggcgaacacagacaatgccagcctggaggaggcagtggccagcactgcttaggcctcgttcccaggacgcgcattactgagtgctgtactttaccctttggatgaaggctccagagtacgacctccccaaactgatatcaaagaagtgctttgcatggggcttgagaaaacatcttactgtttaagaaaagaacgtcttactgtctgagaagctgaatagaatgagatgccatcagtattgggtgttatttttcagaagttgctcaaagaaggagagaagatggttaagtggggatggagacaattattttgtaactcatagaaggacagatgtttatgtaacagttgatagttttggtggaataatcatgagcatgttt

SEQ ID NO: 20936 - DNA, 1103 bp, Artificial sequence
  DNA replication origin
ctctgttgggagaaagataaaggtagaaggatgcaaaattctaacaatgggagaaatgacagctgcaaggagagggagggggaagcaactcttctaaaacataaaagggtcatatgatatttatgaaaaaattgattatttcaaaaagattcacaatcccattctctaacacataatctatttttactttcccgcatcctataacttggatcttgataagactcgattcgttgttttatgtggtttgcaatctcaacaaaacaaaatttgtgttctttgacaaggataatgcataatcctgacttcagtcttcccttttagtcagaacctacctatttaaggttattttccatattaactattgatgatcaaaataagtctaactcgtgtttttcctagtgtttcataattttagttacagaaacgatgcagataaaattaatctaacatgcgtcttcctgactctagtacgttgaatctggccagaaaaaccacatttgctctctacgtaggtaatataaatccatcattagcgaaattgctgcatccctttggactgggtctcattagcagaggttggagtggccactggccggcacacgacactttaggccagcagggggcgggtaagctccagggcactcgcccgagcagcagggggcgtgtcttctgcttccttgacggacagctaaggatgcgggagaggatgaggtaataggagccggggcaaggaaggagttggggtgcgcgcgcgtgtgtgtgcgactgtgagtgtgccagtgcgtgcgcaagccccgagacaatgcgtgtctccagttcgcgctgcggacactgatcatgctgcattaaggaaaaaaaaagagagagagagagaaaattacatttgggggaaggaggctgcaaagttgcggctgggcgacagtggtggtcccggggccgtgtcatggcgggtcgcttctctgcatcaaggaaccagggaaacacacgcgggcgcgggtttgccttagcgccctgcttgggaggggtggttcattctggaaggaactgagcagagccacaggcagggggagctctcccagcggcggggactgcaattcgtgcgg

SEQ ID NO: 20937 - DNA, 1462 bp, Artificial sequence
  DNA replication origin
gtcagccccagctcgcggccgccggggctcgggccgcgcgcccgccgagtggcttttgcaaggcgggggcctgtttgcagagagccgggcatttgcatgaagcgactcgaccccacagagcagcggcagcagcagcggaccccggcggcggcggcggcgcgcggtcccagccaggcggccccggtgtcccggccccggtggatgcacggctggggaggagcccatgggccggagctgaggctgcccggggcggcggggcgcggggcagggggcgcggtcgaggcccggaggcggcggcgcaggaggaagcggaggaggtcgggcgctcggggcccgggaggcgggccgcgcagcgccgcagccccgggctcgccatgctcctggcctcggccgtggtggtctgggaatggctgaacgagcacggccgctggcgtccctacagcccagcggtgagccaccacatcgaggcggtggtccgcgccggcccccgcgcggggggcagcgtggtgctgggccaggtggacagccgtctcgcgccctacatcatcgacctgcagtccatgaaccagttccgccaagacacgggtgagccagccgcccctgaccccgccccgcctgctcccaccttcccaacctgccaaggtacctccctccctgtgaacccaccttggccacctagtcggcacttctgtgcagcagtgtcaccaagaggtggtggtgggaggcgattcactccgctgaatcctcgcaggatcctccctcccccttaaacatccatgcaaatagtatcagtgttgtggttttgcaaacccagcttcaacctagtcggtaacaatccactccccacccctttcatgcccccgcttttcagcagttggtggccctaagtctttctatgtagaaattctagggccgccccagactacaggcaatcccagcccttcgcaaaggcttcctgccctcatcccgtggcggccggcaccttggctgacctgaccctgttttgcttcaggcacgctggggcttgccacacgtcccctcacccccgatctcactgcctctgcgtctcctgtgtgggatgcctccccgcagctgggtcctgggtgtgggaactgggggaggaagaagggattccccggaggttctcgctacagtcgggtaagggaagcgccgggctccctgggaggagagactagggctggggtaccctggacgccgcggcattggcgaatgcctctgctacacactacatgcgcggaagcaacaggccggagcagatggagagaggagggggaggctcggggcttcggaatgcatggcagggaagccgctccctttgtctgcggaggaggaggacgcagattcctaaggagaaactgtccccaggcttcctcttgaaaccatagcctgtaaggaacccatggtctcctggagcgccaaactcctatcttttcatgagaat

SEQ ID NO: 20938 - DNA, 1124 bp, Artificial sequence
  DNA replication origin
cgctacagtcgggtaagggaagcgccgggctccctgggaggagagactagggctggggtaccctggacgccgcggcattggcgaatgcctctgctacacactacatgcgcggaagcaacaggccggagcagatggagagaggagggggaggctcggggcttcggaatgcatggcagggaagccgctccctttgtctgcggaggaggaggacgcagattcctaaggagaaactgtccccaggcttcctcttgaaaccatagcctgtaaggaacccatggtctcctggagcgccaaactcctatcttttcatgagaatcaagttgtcactgtagccagcacaaacccgcttcccagctgacctgcctttccaggtcagagccaggaagggagcctccaggatggggccttggggggtggggagtgggggtgctgcccaagggagagcaaaactgcctctctttgctcggtccttgcttaatcgatgacccgggaagagtttctgcctccgtcagtgacaggtggggagggggccattgtttctggaattctggctcggctttcccaagagtgcaaccgaggagcctggagaggccggtgtgctggggaggacgtagagaagatgactcggaaaggccctccccagtgaacagctgtttgagcagagtctctctgcttccttggaaagcccccacatcctgtgtgctaattaggattgtcatgggaaaggggtatctttccaccctcatgtccccatctttagtcataactcccagcaacccctttgccaaggactctgcagacactggctgattgaggagagctttctggggagaggattctggaagtgttagaatctggaggggcttcaaccgtgtgtggagctgagggagactgggaggagcagagaatagagaggaatgtggggagattgagaaagaggattaagtgtggctgagggggagggagagaatgtcattgcgcaacttgggtaaaggttgtggaggtgagggtggaggcatcagaaggtgagggtggagggggtgtgtgttgggcggagctgagccacggaggtgggaccagagagagagagagagaccagcagttaaagcatctgacaggggatt

SEQ ID NO: 20939 - DNA, 896 bp, Artificial sequence
  DNA replication origin
gacacggcaaccatctgatttctcagtcttttccccacctttccccgctttccattccacaaaaccgccattgtcatcatggccagttctcaatgagctgttgggtacacctcccagacggggtggtggcctggcagaggggctcctcacttcccagtaggggcggctgggcagaggcgcccctcacctcccggacggggcggctggccgggcggggggctgacccccccaacctccctcccggacggggtggctgctgggcggagaggctcctcacttcccagacggggtggctgccgggcggaggggctcctcacttctcagacggggcggctgccgggcggaggggctcctcacttctcagacggggtggttgccgggcgaggtctcctcacttctcagacggggcggccgggcagagacgctcctcacctcccagacggggtcgcggccgggcagaggcgctcctctcatcccagccggggcggcagggcagaggcggtccccacatctcagacgatgggcggctgggcagagacgctcctcacttcctagatgtgatggcggccgggaagaggcgctcctcacttcctagatgggatggcggccgggcagagacgctcctcactttccagactgggcagccaggcagaggggctcctcacatcccagacgatgggcagccaggcagagacgctcctcacttcccagacggggtggcggccgggcagaggctgtaatctcggcattttgggaggccaaggcaggcggctgggaggtggaggttgtagcgagccgagatcacgccactgcactccagcctgggcaccattgagcctcatttatgaattctatcaggatttctttttttggtggaattcttagcatgttcacat

SEQ ID NO: 20940 - DNA, 923 bp, Artificial sequence
  DNA replication origin
catcccatctaggaagtgaggagcgcctcttcccggccgccatcacatctaggaagtgaggagcgtctctgcccagccgcccatcgtctgagatgtggggaccgcctctgccctgccgccccggctgggatgagaggagcgcctctgcccggccgcgaccccgtctgggaggtgaggagcgtctctgcccggccgccccgtctgagaagtgaggagacctcgcccggcaaccaccccgtctgagaagtgaggagcccctccgcccggcagccgccccgtctgagaagtgaggagcccctccgcccggcagccaccccgtctgggaagtgaggagcctctccgcccagcagccaccccgtccgggagggaggttgggggggtcagccccccgcccggccagccgccccgtccgggaggtgaggggcgcctctgcccagccgcccctactgggaagtgaggagcccctctgccaggccaccaccccgtctgggaggtgtacccaacagctcattgagaactggccatgatgacaatggcggttttgtggaatggaaagcggggaaaggtggggaaaagactgagaaatcagatggttgccgtgtctgtgtagaaagaagtatacatgggagacttttcattttgttctgttctaagaaaaattcttctgccttgggatcctgttgatctgtgaccttacccccaaccctgtgctctctgaacatgtgctgtgtccactcagggttaaatggattaagggcggtgcaagatgtgctttgttaaacagatgcttgaaggcagcatgctggttaagagtcgtcaccactccctaatctcaagtacccagggacacaaacactgtggaaggccgcggggtcctctgcctaggaaaaccagagacctttgttcacttgtttatctgctga

SEQ ID NO: 20941 - DNA, 1109 bp, Artificial sequence
  DNA replication origin
gctgtagaatgacaggcccgagagaaatgccaatatccgcggggtcttcctcaagtgacactcagcggcaccaatcgacgtccttcttcccggcggccgagccctcctccccgcggctggccgggcggggcggggacgctgcgcggcggtggctgatgcggtagccgtgtggggcgctccgggcggcgacggcggctctcgtaggcggttccggtcttgtatctccaggcggcggcggctcatggcggcgacggagctgagaggagtggtggggccaggcccggcagccattgcagcacttggcggcggcggcgccggtcccccagtggtgggaggaggcggcggccgcggagatgcggggccaggctccggggccgcgtcagggacggtggtcgcggcggcggcgggaggcccgggcccgggggccgggggagtggcggcggctggcccggcccctgcgccgccgactgggggctcgggcggctcgggcgctgggggttcgggctcggctcgagagggctggctcttcaaatggaccaattatatcaaaggctaccagcggcgatggttcgtgctgagcaacgggctcctgagctactacaggtaactgcttccggggcgctgtcgctcaccttgcctcccccatatctgccaacagtcccagctccggcattaccgccagccggcaccgcagccagggttgccccaggccccttttcgtcatctgtgcggattgacagcccaggggtcggagcccactgtcacgaaagtgaaaagcccctggacgtacacctcccctcccctcgggttacccactcttggtgccttatcttcccttcgctcccggcctttccagtcattagtcgtttggagagcgtctgtgcttccattgtatttccaccagcacatgggtgcaattattaattctgcaagcaaggcactggtgtaggtactaagggaacacatgcagcagaacaaacccgaggcactcctcccaaggaacttacagtggaagtcccaagttgtagctgtcagtgcccagtctccaaaactcaaggttattcgtagctctggatgtacccgtccttgctcccttcacattcagacat

SEQ ID NO: 20942 - DNA, 1048 bp, Artificial sequence
  DNA replication origin
acattgaatacatgtatcacaatatcagatgtatccctgaaaatatgtacaactatatcagtttaaagatataaaaaaaattttctgtccaaagttaaatatgtacaactacgatatatcagtttaaagatacaaaaaataataattttctgttcaaagttaagcatatacatggcacctatgatgctaaaaccaagggcctttaggtctggaagagacacataaagtcaggtcctcgcgaatctacttctgaaggggacagaatcggtataggcatatgacagtctagaatcaagacacaaggggtgtggagcgataaagagcaaacagggaagggaactagggggaccatggatccaggaaggggctggaaaagctacttctgggcacccctggaatctgggtatccagcttcgagttagaagggggtccttcaagagagcctcaggcgggggctgactgccgagagttactctgtcctccaggttcttcctaacaagaagctacgaagttcttattcagaaaaacggaacacgacatcacacccacgtgaaaaaaacgcttttaagaggccaagtcactttcacctcccaccaacttgccaaaggctgaaagcaggcggacacgcccccaagcgctcttctccgatttcattggttgccccggcctgctcctcattaggtctctctcactggtcagcaatgccgctttcacagccaattctcagaaccaatcatctccaactattgccccgcctctccaccacgtgagtggcataggtgccaaccaataaaaaaagaaaataaggatgtaaagacgagactccttccctttttcctcaactcgttcagtaaatggtagaaaaggtggagcagctgataccaaccaccaatccatgagggcggaaaaggatgatgagaagagcgatgggagggggtgacgtggcagtgacaggcgcataaactgaaatgaatggcggaaacagcagccaatcggcgatcagattggccgggcattccgcattctcccgtcctccctgagcgctgga

SEQ ID NO: 20943 - DNA, 1248 bp, Artificial sequence
  DNA replication origin
ccacgggtgacggagaactcgtgaccggcccctgagctccaagccgagcgcctagagggcgcggagaaagagggggcggagctacaagcccagatcaccaggcagccgaagacgggcagcgcgtgcgcagtctctcgccacgggacctccttcccgccgctgagactaggaagcgggacgccaaatctgtccctgcgcagccgccgccgccgggcgccgagcggggtggccgccctgcctgaggcgcgcctgcgcacgtccccacgcacgctccggcgtacggcggcggccaggggtcgcgagccggtggaggacccgcgcgcggaggagccggggagtcagcgcttcttccctccctccccctctcccctccccgctccctgcccccctccccaagaatgttccgctacgaggtgagctgttgcgaccggaagtgacccctccctccctcccgcgcccctctccctcactctctctccgcgcgccggtcctgtgttcctgcggggcagggggcgggctgggggagtcgcaggacttagctggacgcgactggtctggggtcgcgggtctaatcctagggctgggagctggcttcatgggtcgagacagtcccattagttgccgctggggaaagttggcctccgttttggggtggggagggcccgttaagtgctgtaaccagaccacacccccgcccccacccctagaggagccacggagggtagagcactgcatctccccgggtgcttttcttaagtaggtgtcacccgggaattcccagagccgcgtttcccgccctggacccggaaccaccccccacccacctccactcgaattacactgacacacatcccattcacacaggctaccttcaggtgaagggggcctgggcttgccgttggattagggccccagcccgtttactaaagagggctccgagttgggaggggggcgtgtcctgcagaagttccttctgggctagtgctgggagacgcgggtttggagaaggtgccgggaatgtagcaatagcagcagacagtactgaccctgtcaccaactcactgtgtgaccttgagtgactcctaatctctggacgtaaactttctgaatttgtagcatgaaagaactgatgtaaatgatccttaagaatttttaatttaaaaaagcagcgatttggtaaagtagatatttgtgatttggaagggagtactgctggaagttgcctctgataaggaggcagtggcatgc

SEQ ID NO: 20944 - DNA, 1232 bp, Artificial sequence
  DNA replication origin
cacatgtttcagagagcacagggttgggggtaaggtcacagatcaacaggatcccaaggcagaagaatttttcttagtacagaacaaaatgaaaagtctcccctgtctacttctttctacacagacagggcaaccatccgatttctcaatcttttccccacctttcccccctttctattccacaaaaccgccattgtcatcatggccagttctcaatgagctgttgggtacacctcccagacagggtggtggccgagcagagggtctcctcacttcccagtaggggtggccgggcagaggcgcccctcacctcccggatggggcggctggccgggcggggggctgacccccccacctccctcccggacggggcggctggcctggcgggggctgactcccacctccctcccggacggggtggctgccgggcggagacgctcctcacttcccagacggggcggctgccgggcagaggggctcctcacttctcagacgggcggctgggcagagacgctcctcacctcccagacggggtcgcggctgggcagaggcgctcctcacatcccagacggggcggcggggcagaggcgctccccacatctcagacgatgggcggcagggcagagacgctcctcacttcctagatgggatggcggccgggaagaggcactcctcacttcctagatgggatggcggccgggcagagacgctcctcactttccagactgggcagccaggcagaggggctcctcacgtcccagacgatgggcggccaggcagagacgctcctcacttcccagacggggtggcggccgggcagaggctgcactctcggcactttgggaggccaaggcaggcggctgggaggtggaggttgtagggagccgagatcacgccactgcactccagcctgggcaccactgagcactgagtgaaccagactccgtctgcaatcccggcacctcgggaggccgaggctggcggatcactggtggttaggagctggagaccagcccggccaacacagcgaaaccccgtctccaccaaaaaaatacgaaaaccagtcaggcgtggcggcgcgcgcctgcaatcgcaggcactgggcaggctgaggcaggagaatcaggcagggaggttgcagtgagcagagatggcagcagtacagtccagcttcagctcggcatcagagggagaccgtggaaagagagggagagggagaccgtggggagagg

SEQ ID NO: 20945 - DNA, 936 bp, Artificial sequence
  DNA replication origin
ctggaaagtgaggagcgtctctgcccggccgccatcccatctaggaagtgaggagtgcctcttcccggccgccatcccatctaggaagtgaggagcgtctctgccctgccgcccatcgtctgagatgtggggagcgcctctgccccgccgccccgtctgggatgtgaggagcgcctctgcccagccgcgaccccgtctgggaggtgaggagcgtctctgcccagccgcccgtctgagaagtgaggagcccctctgcccggcagccgccccgtctgggaagtgaggagcgtctccgcccggcagccaccccgtccgggagggaggtgggagtcagcccccgccaggccagccgccccgtccgggagggaggtgggggggtcagccccccgcccggccagccgccccatccgggaggtgaggggcgcctctgcccggccacccctactgggaagtgaggagaccctctgctcggccaccaccctgtctgggaggtgtacccaacagctcattgagaactggccatgatgacaatggcggttttgtggaatagaaaggggggaaaggtggggaaaagattgagaaatcggatggttgccctgtctgtgtagaaagaagtagacaggggagacttttcattttgttctgtactaagaaaaattcttctgccttgggatcctgttgatctgtgaccttacccccaaccctgtgctctctgaaacatgtgctgtgtccactcagggttaaatggattaagggcggtgcaagatgtgctttgttaaacagatgcttgaaggcagcatgctcgttaagagtcatcaccactccctaatctcaagtacccagggacacaaacactgcggaaggcggcagggtactctgcctaggaaaaccagagacctttgttcacttgtttatctgctgaccttccctccacta

SEQ ID NO: 20946 - DNA, 853 bp, Artificial sequence
  DNA replication origin
gcccctctgccccgcggcccagtctgggaagtgaggagcgcctcttcccagccgacatcctgtctaggaagtgaggagtgtctctgcccggccgcccatcgtctgagatgtggggagcgcctctgccccgccgccccgtctgggacgtgaggagcgcctctgcccggctgcgaccccgtctgggaggtgaggagcgtctctgcccggccgccccatctgagaagtgaggagcccctccgcctggcagccgccccatctgggaagtgaggagcgtctctgcctggcagccaccctgtccgggagggaggtgggggcagcccccgcccggccagccgccccatccaggagggaggtggggggtcagcccccaccaggccagccgccccgtctgggagggaggtggggggcgcctctgcccggccgccccttctgggaagtgaggagcccctctgcccggccaccaacctgtctgggaggtgtacccaacagcgcattgagaacgggccatgatgacgatggcagttttgtggaatagaaaagggggaaaggtggggaaaagatagagaaatcagattgttgctgtgtctgtgtagaaagaagtagacatgggagacttcattttgttctgtactaagaaaaatttttctgccttgggatgctgttgatctatgaccttacccccaaccctgtgctctctgaaacatgtgctgtgtccactcagggttcaatggattaagggcggtgcaagatgtgctttgttaaacagatgcttgaaggcagcatgctcgttaagagtcatcaccactccctaatctcaagtacccagggacacaaacacctcggaaggccgcag

SEQ ID NO: 20947 - DNA, 1042 bp, Artificial sequence
  DNA replication origin
ggtacacctcccagacaggttggtggccgggcagaggggctcctcacttcccagaaggggcggccgggcagaggcgccccccacctccctcccagacggggcggctggcctggtgggggctgaccccccacctccctcctggatggggcggctggccgggcgggggctgcccccacctccctcccggacagggtggctgccaggcagagacgctcctcacttcccagatggggcggctgccaggcggaggggctcctcacttctcagatggggcggccgggcagagacgctcctcacctcccagacggggtcgcagccgggcagaggcgctcctcacgtcccagacggggcggcggggcagaggcgctccccacatctcagacgatgggcggccgggcagagacactcctcacttcctagacaggatgtcggctgggaagaggcgctcctcacttcccagactgggccgcggggcagaggggctccttacatcccagacggggtggcagccgggcagaggctgcaatcttggcactttgggaggccaaggcaggcggctgggaggtggaggttgtagcgagctgagatcacgccactgcactccagcctgggcaacattgagcactgagtgaactagactccgtctgcaatcctggcaccccaggaggccgaggctggcggatcactcgcagttaggagctggagaccagcccggccaacacagcgaaaccgcgtctccaccaaaaaaaatatgaaaaccagtcaggcatggcggcgcgtgcctgcaatcgcaggcactcggcaggctgaggcaggagaatcaggcagggaggttgcagtgagccgagatggcagcagtacagtccagctttggctcggcatcagagggagaccgtggaaagagagggagagagagaccgtggggagcggcagcgggagcaggagcgggagagggagagggagagggcagcactatgagttttaagaagcaattgaaaatgtatgcaggttccaggcacggtggctcacacctgtgatccca

SEQ ID NO: 20948 - DNA, 925 bp, Artificial sequence
  DNA replication origin
cgccaggcagccaccccgtccgggagggaggtgggggtcagcccccgccaggccagctgccccatccgggagggaggtggggggggtcagccccccgcccggccagccgccccgtccgggaggtgaggggcgcctctgcccagccgcccctactgggaagtgaggagcccctctacccggccagccgctccgtccgggagggaggtgggggggtcagaccccgcccggccagccgccccgtccgggagggaggtggggggttcagccccccacccggccagccaccacgtctgggagggaggtgggggggtcagccctctgcccggccagccgccccgtccgggagggaggtggggggttcagccccccacccggccagccgccccgtccgggagggaggtggaggggtcagccccccgcccggccagccgccccgtccgggaggtgaggggtgcctctgcccagccgcccctactgggaagtgaggagcccctctgcccggccaccaccccatctgggaagtgtacccaatagctcattgagaacgggccatgaggacaatggcggttttgtggaatagaaaggggggaaaggtggggaaaagattgagaaatcggatggttgccttgtctgtgtggaaagaagtagacatgggagacttttcattttgttctgtactaagaaaaattcttctgccttgggatcctgttgatctgtgaccttacccccaaccctgtgctctctgaaacatgtgctgtgtccactcagggttaaatggattaagggcggtgcaaggtgtgctttgttaaacagatgcttgaaggcagcatgctcgttaagagtcatcaccactccctaatctcaagtacccagggacacaaacacctcggaaggccgcagggtcctctgcctaggaaaaccagag

SEQ ID NO: 20949 - DNA, 1198 bp, Artificial sequence
  DNA replication origin
gcggctgggcagaggcacccctcacctcccggacggggcggctggccgggcggggggctgacccctccacctccctcccggacggggcggctggccgggtggggggctgaaccccccacctccctcccggacggggcggctggccgggcagagggctgacccccccacctccctcccagacgtggtggctggccgggtggggggctgaaccccccacctccctcccggacggggcggctggccgggcggggtctgacccccccacctccctcccggacggagcggctggccgggtagaggggctcctcacttcccagtaggggcggctgggcagaggcgcccctcacctcccggacggggcggctggccgggcggggggctgaccccccccacctccctcccggatggggcagctggcctggcgggggctgacccccacctccctcccggacggggtggctgcctggcggagacgctcctcacttcccagacggggtggctgccgggcggaggggctcctcacttctcagacggggcggttgccaggcggagggtctcctcccttctcagatggggcggctgggcagagacgctcctcacctcccagacggggtcgcggccgggcagaggtgctcctcacatcccagacagggcggtggggcaaaggcgctccccacatctcagaagatgggcggccgggcggagacactcctcacctcccagatgggatggtggccgggaagaggcgctccccacttcctagatgggatggcagccgggcagagacgctcctcactttccagactgggcagccaggcagaggggctcctcacgtcccagacgataggcggccaggcagagacgctcctcacttcccagacggggtggcggccgggcagaggctgcactctcggcactttgggaggccaaggcaggcggctgggaggtggaggttgtagggagccgagatcacgccactgcactccagcctgggcaccattgagcactcgataaatacttttttaaaaaataaatcatttttagtcccaagtatactgactctacctgaataggttggactacttatagttagaagttatcagtaatatcaccttatatactcaagaccttatgacttgtttttatccttattattcacagagcaaattgatggttaaccactgtcactaattgccag

SEQ ID NO: 20950 - DNA, 1341 bp, Artificial sequence
  DNA replication origin
ctcaatcttttccccacctttcccgcctttctattccacaaagccgccattgtcatcctggcccgttctcaatgagctgttgggcacacctcccagacggggtggtggccgggcagaggggctcctcacttcccagtaggggcggctgggcagaggcgcccctcacctcccgggtggggcggctggccgggcggggggctgacccccccacctccctcccggactgggcggctggcctggcggggggctgacccccccacctccctcccggatggggcggctggccgggcagaggggctcctcacttcccagtaggagcggccgggcagaggcgcccctcacctcccggacggggcggctggccgggcggggggctgaccccccacctccctcccggatggggcggctggcctggcgggggactgacccccccacctccctcccggacggggtggctgccgggagacgctcctcacttcccagacggggtggctgccgggcggagaggctcctcacttctcagacggggcggctgccgggcggaggggctcctcacttctcagatggggcggccgggcagagatgctcctcaccacccagacggggtcgcggccgggcagaggtgctcctcacatcccagacgggtcggcggggcagaggcgctcccacatctcagacgatgggcggccgggcagagacgctcctcacttcctagatgtgatggcggctgggaagaggtgctcctcacttcctagatgggatggcgtccgggcggagacgctcctcactttccagactgggcagccaggcagaggggctcctcacatcccagacgatgggcggccaggcagagacgctcctcacttcccagacgggatggcagccgggcagaggctgcaatctcggcacttcgggaggccaaggcaggcggctgggaggtggaggttgtagcgagccgagatcacgccactgcactccagcctgggcaccattgagcactgagtgaacgagattccgtctgcaatcccggcacctcgggaggccgaggctggcggatcacttgcggttaggggctggagaccggcctggccaacacagcgaaaccccgtctccaccaaaaccagtcaggcgtggcggcgcgagcctgcaatcgcaggcactcggcaggctgagtcaggagaatcaggcagggaggttgcagtaagccgagatggcagcagtacagtccagcttcggctcagcatgagagggagactgcggggagagggagagggagagggagagagcagtttttgtgttttctaatcattatttaggtagaattaataagatgttcttttg

SEQ ID NO: 20951 - DNA, 873 bp, Artificial sequence
  DNA replication origin
ccatctgagaagtgaggagcccctccgcccggcagccgccccgtctgagaagtgaggagcctctccgcccggcagccaccccgtctgggaagtgaggagcgtctcccggcagccaccccgtccgggagggaggtgggggggtcagtcccccgccaggccagccgccccatccgggagggaggtggggggtcagccccccgcccggccagccgccccgtccgggaggtgaggggcgcctctgcccggccgctcctactgggaagtgaggagcccctctgcccggccagccgccccatccgggagggaggtgggggggtcagccccccgccaggccagccgcccagtccgggagggaggtgggggggtcagccccccgcccggccagccgccccacccgggaggtgaggggcgcctctgcccagccgcccctactgggaagtgaggagcccctctgcccggccaccaccccgtctgggaggtgtgcccaacagctcattgagaacgggccaggatgacaatggcggctttgtggaatagaaaggcgggaaaggtggggaaaagattgagaaatcggatggttgccgtgtctgtgtagaaagaagtagacatgggagacttttcattttgttctgtactaagaaaacttctgccttgggatcctgttgatctgtgaccttacccccaacgctgtgctctctgaaacatgtgctctgtccactcagggttcaatggattaagggcggtgcaaggtgtgctttgttaaacagatgcttgaaggcagcatgctcgttaagagtcatcaccactccctaatctcaagtacccagggacacaaacactgcggaaggccgcggggtcctctgcctaggaaaa

SEQ ID NO: 20952 - DNA, 1163 bp, Artificial sequence
  DNA replication origin
acagcacatgtttcagagagcacagggttgggggtaaggtcatagatcaacagcatcccaaggcagaagaatttttcttagtacagaacaaaatgaaatctcccatgtctacttctttctacacagacacagcaacaatctgatttctctatcttttccccacctttcccccttttctattccacaaaaccgccatcgtcatcatggcccgttctcaatgagctgttgggtacacctcccagacggggtgatggccaggcagaggggctcctcacttcccagaaggggcggctgggcggaggcgccccccacctccctcccggagggggcggctggccgggcgggggctgacccccccacctccctcccggacggggcggctcgctgggcggggactggccccccaccttcctcctggacggggtggctgccaggcggagacgctcctcacttctcagacggggcggctgctgggcggaggggctcctcacttctcagacagggcggctgctgggcggaggggctcctcacttctcagactgggcggccgggcagagacactcctcacctcccagacggggtcgccactgggcagaggcgctcctcacatccttgacggggtggcagggcagaggcgctccccacatctcagacgatgggcggctgggcagagacgctcctcacttcttggacgggatggtggccgggaagaggcgctcctcacttcccagactgggcagccaggcagaggggctcctcaaatcccagacaatgggcggccaggcagagacgctcctcacttcccagacggggtggcggccgggcagaggctgtaatctcggcactttgggaggccaaggcaggcggctgggaggtggaggttgtagctagctgagatcacgccactgcactccagcctgggcaacattgagcactgagtgaacgagactccgtatacaatcccggcacctcgggaggctgaggctggtggatcactcgcggttaggagccggagaccaaaccggccaacacagcgaaaccccatctccaccaaaaaaatacgaaaaccagtcaggcgtggcgactcggcaggctgagtcaggagaatcaggcagggaggttgcagtgagccgagatggtggcagtacagtccagcttcggct

SEQ ID NO: 20953 - DNA, 885 bp, Artificial sequence
  DNA replication origin
tgaggagcgtctctgcccagccgcccatcgtctgagatgtggggagcgcctctgccctgccaccccgtcaaggatgtgaggagcgcctctgcccagtggcgaccccgtctgggaggtgaggagtgtctctgcccggccgcccagtctgagaagtgaggagcccctccgcccagcagccgccctgtctgagaagtgaggagcccctccgcccagcagccgccccgtctgagaagtgaggagcgtctccgcctggcagccaccccgtccaggaggaaggtggggggccagtccccgcccagcgagccgccccgtccgggagggaggtgggggggtcagcccccgcccggccagccgccccctccgggagggaggtggggggcgcctccgcccagccgccccttctgggaagtgaggagcccctctgcctggccatcaccccgtctgggaggtgtacccaacagctcattgagaacgggccatgatgacgatggcggttttgtggaatagaaaagggggaaaggtggggaaaagatagagaaatcagattgttgctgtgtctgtgtagaaagaagtagacatgggagatttcattttgttctgtactaagaaaaattcttctgccttgggatgctgttgatctatgaccttacccccaaccctgtgctctctgaaacatgtgctgtgtccactcagggttcaatggattaagggcggtgcaagatgtgctttgttaaacagatgcttgaaggcagcatgctcgttaagagtcatcaccactccctaatctcaagtacccagggacaaaaacactgcggaaggccgcagggtcctctgcctaggaaagccagagacctttgttcacttgtttatctgctgaccttccct

SEQ ID NO: 20954 - DNA, 1549 bp, Artificial sequence
  DNA replication origin
ttcttttccccacatttcccccttttctatttgacaaaaccgccatcgtcatcatggcccgttctcaatgagctgttggtacacctcccagacggggtggcggctgggcagaggggctcctcacttcccagacggggcggccaggcagaggcgccccccaacctcccagatggggcggcggccggacgggggctggcccccacctcccagacagggcggctgaccgggcgggggttgccccccacctccggacggggcggctggccgggcaggggctgccccccacctcccagatggggcagctgccgggcagagatgctcctcacttcccagacggggcagctgccaggcggaggggctcctcacttcccagatggggtggctgctgggccgaggggctcctcacttctcagacggggcggccggtcagagacgctcctcacctcccagatggggtggcggtggggcagagacactcctcagttcccagacggggtcgcagccgggcagaggcgctcttcacatctcagacggggcggcggggcagaggtgctccccacatcccagacgatgggcggccgggcagagatgctcctcacttcctagacgggatggtggccgggaagaggtgctcctcacttcccagactgggcagccgggcagaggggctcctcacatcccagatgatgggcggccaggcagagacactcctcacttcctagacggggtggcagccgggcagaggctgccatctcagcactttgggaggccaaggcaggcagctgggaggtggaggttgtagcgagccgagatcacgccactgcacaccagcctgggcagcattgagcactgagtgagcgagactctgtctacaatcctggcacctcgggaggccgaggctggcagatcactcccggtcaggagctggagaccagaccggccaacacggcgaaacccggtctccaccaaaaaatacaaaaaccagtcagacgtggcggcacatgcctgcaatcccaggcacttggcaggctgaggcaggagaatcaggcagggaggtggcagtgagtcgagatggtggcagtacagtccagcctcggctgggcatgagggagggggagggggagggagagggagagggcaatatcatatttctattccagtcaccttctagggtctcagatcacaggcccagctggagaaatttgttcatagtataaatttgctaaaaccccctcaaatgtaccctcagtatagcttggtaatcctctgtttctctgatcagtttattctccgtttccatgacttttcccacattgaaaaaatatgcacattagtggagccacgcagttcaaactcatgttgtttaagtgtcaactgtattattatgttactaaatctcctctctcagagaataaggcaatgtcttccaaatttattacaagcttactatagagaaacatttctgtttgttttggcattacaagtgtctgattctatccaagaccataagaatagtgggaataatggttagggcaactgcccggacctg

SEQ ID NO: 20955 - DNA, 1282 bp, Artificial sequence
  DNA replication origin
ggcggctggccgggtggggggctgacccccccacctccctcccggacggggcggctggccgggcagaggggctcctcacttcccagtaggggcagccaggcagaggtgcccctcacctcccggacggggcgactggccgggcggggggctgacccccccacctccctcccggacggggcggctggccgggcagaggggctcctcacttcccagtaggggcggtcgggcagaggtgccccccacctcccagacggggcggctggccgggcggggggctgaccccccacctccctcccggacggggcggctggccgggcagaggggctcctcacttcccagtaggggcggccgggcagaggcgcccctcacctcccagatggggcggctggccccgtcgcgggctgacccccccacctccctcccggacggggcggctggcctggcggtgggtgaccccctcctccttcctggacggggtggctgccgggcggtgacgctcctcacttctcaaacggggcagcttccgggcggaggggctcctcacttctcagatggggcggccaggcagagacgctcctcacctcccagacggggtcgcggccgggtagaggcgctcctcacatcccagacggggcggcggggcagagccgctccccacatctcagatgatgggcggccgggcagagaccctcctcacttcctagatgggatggcggccgggaagaggcactcctcacttcctagatgggatggtggctgggaagaggtgctcctcacttcctagatgggatggcggccgggcagagacgctcctcactttccagactgggcagccaggcagaggggctcctcacgtcccagatgatgggcggccaggcagatgctcctcacttcccagacggggtggcggccgggcagaggctgcaatcttggcactttgggaggccaaggcaggtggctgggaggtggaggttgtagcgagccgagatcacgccactgcactccagcctgggcaacattgagcactgagtgaaccagactccgtctgcaatcccggcacctcgggaggccgaggctggcggatcactcgcggttaggagctggagaccagcccggccaacacagcgaaaccctgtctccaccaaaaaaatacgaaaaccagtcaggcgtggcggcgcgtgcctgcaatcgcaggcactcagcaagctgaggcaggagaatcaggcagcgaggttgcagtgagccgagatggcagcagtacagtccagcttcggctcggtat

SEQ ID NO: 20956 - DNA, 2035 bp, Artificial sequence
  DNA replication origin
cctggctgcccctactgggaagtgaggagcccctctgcccggccagccgccccgtccgggagggaggtgggggggtcagccccccacccggccagccgccccgtccgggaggtggggggcacctctgcccggccacccctactgggaagtgaggagcccctctgcccggccagccgccccatccgggagggaggtgggggggtcagccccccgcccggccagccaccccgtccgggagggaggtgggggggtcagccccccgcccggccagccgccccgtccaggagggaggtgggggggtcagccccctgcccagccagccgccccatccgggaggtgaggggcacctctgcctggccgcccctactgggaagtgaggagcccctctgcccggccagccgcccggtccgcgagggaggtgggggggtcagcccccagcccagccagccgccccgtccgggaggtggggggcgcctctgcccggccgcccctactgggaggtgaggagcccctctgcccggccaccaccccatctgggaggtgtgcccggcagctcattgagaacgggccatgatgacaatggcggttttgtggagtagaaagtggggagaggtggggaaaagagtgagaaatcagacggttgccgtgtttgtgtagtaggaggtagacatgggagacttttcattttgttctgtactaagaaaaattcttctgccttgggatcctgttgatctgtgaccttacccccaaccctgtgctctctgaaacatgtgctgtgtccactcagggttaaatggattaagggcggtgcaagatgtgctttgttaaacagatgcttgaaggcagcatgctcgttaagagtcatcaccactccctaatctcaagtacccagggacacaaacactgcggaaggccgcggggtcctccgcctaggaaaaccagagacctttgttcacttgtttatctgctgaccttccctccactattgtcctgtgaccctgccaaatccccctctgtgagaaacacccaagaatgatcaataaaaaataaataaattaaaaaaaaaaagctacaagagtatgttataactcaatgcaaggaagctaaaaatcataataaaacattgcaagagctgacagacaaaatagacactacaagaatttcataatgtaaacacaagtattaataacaaaataaaccgagcagaggaaagaatcttagagcttgaagactggctttctgaaaaaagacaggcagacaagaatagagagaaaagaatgaaaaggaatgaacaaaacctccaagaaaataagggataatgtagagactggatctatgactgattgatgtacctgaaagatatggttggttctatgcagagaacagaaccaatctggaaaacatatatcatgatatcatccatgagaacttcctcaatatagtgagggagaccaacattcaaattcaggaaatgcagagaactccagtaaaatactctacaagaagatcatccacaagacacacaatcatcagattcttccaacaccaatatgaggagaaaaacatatattaaaggtagtgagagagaaaggccaagtcatgtacaaagggaagcccatcagactaacaacagacctctcagatgaaatacaacaagccagaagagactggaggacaatattcaatattcataaagaaaagaaatttcaaaccagaattttatatccagccaaactaagcttcataagtgaaggagaaacacgattctttttagacaagcaaatgctgagggaatttgttaccaccagacctgcctaacaagagctcctgaagaaggcactaaatatggacaagaaagaccattaccagccactacaaaaacacactgaagtacacaaaccagtgacactataaagcgaccacataaacaagttgacaaaataaccggctaacatgatgatgacaggatcaaatacacacatatcaatattaatcttaaatgtaaaagtgacaagctggataaggaaccaagacc

SEQ ID NO: 20957 - DNA, 1254 bp, Artificial sequence
  DNA replication origin
agaatctcattctagggacaggcagtaagcatgaaatgtaacaaataagtcagttgcagagggtgttagatgcatagactacaggaaagatagataaggggaagggaagcgggttactgggagagtgtgggtgttgggttgttcaggtaggcctcattgggaaggtggttgcagattagtgatctgaaggaggtgaggaagggacagaggaagctgtgggaacatctgagggaagagttccccagtcggagggaacattccaggcccaaaggtggaaagatgcctggagtgttggagaaaacatcatggaggttcccgtggttcagcagcagaaccagaggatggcagcagagccaggggcggggggcaccagagggccagcatcttcaggctgctggaaggacattggctttttttctgagtaagatgccagcagagaagtgatgggatcttgtgtttccaaaggatccctctggtggccatgctataaacagctgcagtgagcccagagtaggagaaagggaacagtcaggaggctgtttccatgattagatgagagatgcggtggctcaggccagcgtgggagtagaggggctgggggaaaatggtgggattctgaatgcattttgaaagtagaaccaacaggattgcccgagggattggctgtgaggtgtgagagaaagacagggtcaatgacgactccaaggttttgtcccgagcaactggaaggatggagttgccatcaactggaatcaggaaaactgagtagagaaggtttgggaagtgaaatctggagatcagacttggatgtatgaactatgagctattgagttgaccattggacatgctagactggtgtataggggagaagatttggctggagccatgtattctagaacaattgtcatagacaaggtgtttcaagttgccagactaaatgagatagacaaatgagtacagaaagaaaaccagagaaccaattattgagcctaagagattgggaaaaacagaactagcagaggagacagagaagagggcaaccagtgagggtggagcctggaagtcaagcaaagtccctccgagaagaaggatcaatcaccccattggggatttggagaagagcaggtgtttagggaagtgaggctgaaagtctaattggagcaggttcagagagaatatgagagaagaggattggactcactaaagtgtagacaattcttttaagaatttgtctgcaaagagggccagagagat

SEQ ID NO: 20958 - DNA, 1601 bp, Artificial sequence
  DNA replication origin
gaggggctcctcttttcccagtaggggcggccgggcagaggcgcccctcacctcccggacggggcggctggccgggcagaggggctcttcacttcccagtaggggccgccgggcagaggcgcccctcacctcccagacggggcggctggccgggcggggggctgacccccccacctccctcccggacggggcggctggccgggtggggggctgacccccccacctccctcccggacggggcggctggccgggcggggggctgacccccccacctccctcccggacggggcggctggctgggcgggggggctgaccctcccacctccctcccggacggggtggctggccgggctgaggggctcctcacttcccagtaggggcggccgggcagaggcgcccctcacctcccggacggggcggctggccgggcggggggctgacgccccccacctccctcccagacagggtggctgccgggcagagacgctcctcacttcccagatggggtggctgctgggcggagaggctcctcacttctcagacggggcagctgccgggcagaggggctcctcacttctcagacggggtggttgccaggcagagggtctcctcacttctcagacggggcggccgggcagagacgctcctcacctcccagacggggttgcggccgggcagaggtgctcctcacatcccagatggggcggcagggcagaggcgctccccacatctcagacgatgggcggccgggcagagacgctcctcacttcctagatgtgatggcggctgggaagaggcgctcctcacttcctagatgggatggcggctgggcggaaacactcctcactttccagactgggcagccaggcagaggggctcctcacatcccagacgatgggcagccaggcagagacactcctcacttcccagacggggtggcggccgggcagaggctgcaatcttggcactttgggaggccaaggcaggtggctgggaggtgtaggttgtagcgagccgagatcacgccactgcactccagcctgggcaccattgagcactgagtgaacgagactccgtctgcaatcccggcacctcgggaggccgaggctggcggatcactcgcagttaggggatggagacccgcccggccaacacagcgaaaccccgtctccaccaaaaccagtcaggcgtggcggcgcgtgcctgcaatcacaggcactcggcaggctgagtcaggagaatcaggcagggaggttgcggtgagccgagatggcagcagtacagtccagcttcggctcggcatcagagggagaccgtggaaagagagggagaccgtggggagaggcagagggagagggagagggagagctaaagcctatcaatagctaaatatgtcaaaaaaacattctggcctttgtttggtgagaattcatgtcacggtaggaggaaatctgaaagttaggaatcaaagtttgcatgcattttaagggtgtgctactgatatgcacagggagtgggtttgctaatgccatcccagccactgatgcagctggactgggtacttgggatgtttgttcatcccatatctgctgtctttgact

SEQ ID NO: 20959 - DNA, 946 bp, Artificial sequence
  DNA replication origin
accctgtctgggagggaggtggggggcgtcagccccccgcccggccagccgccccgtccgggaggtgaggggcgcctctgcccggccgcccctactgggaagtgaggagcccctcagcccggccagccaccccgtccgggagggaggtgggagggtcagcccccccgcccagccagccgccccgtccgggagggaggtgggggggtcagccccccgcccggccagccgccccgtccgggagggaggtgggggggtcagccccccacccggccagccgccccgtccgggagggaggtgggggggtcagccccccgcccggccagccgccccgtctgggaggtgaggggcgcctctgcccggcggcccctactgggaagtgaagagcccctctgcccggccagccgccccgtccgggaggtgaggggcgcctctgcccggccgcccctactgggaaaagaggagcccctctgcccggccaccaccccgtctgggaggtgtgcccaacagctcattgagaacgggccaggatgacaatggcggctttgtggaatagaaaggcgggaaaggtggggaaaaggttgagaaatcggatggttgccatgtctgtgtagaaagaagtagacatgggagacttttcattttgttctgcactaagaaaaattcttctgccttgggatcctgttgatctgtgaccttacccccaaccctgtgctctctgaaacatgtgctgtgtccactcagggttaaatggattaagggtggtgcaagatgtgctttgttaaacagatgcttgaaggcagcatgctccttaagagtcatcaccactccctaatctcaagtaatcagggacacaaacactgcggaaggccgcagggtcctctgcctaggaaaaccagagacctttgttcacttgtttatctgctgaccttccctccactattgtccc

SEQ ID NO: 20960 - DNA, 1461 bp, Artificial sequence
  DNA replication origin
tcagtctgctggggacagaggcagtggggtgtggaggtgctcagagcagcctttgggaaggtgtgggggaagctggattcccaactgtcagcctccaggcctgggatggacctaggatgctgagaaagggcatacactgctgagggagtcacctgccagtcaccagctcactgaggaaccagaagaatgtacagttcttggtttgaaggcacttggagaaggagaggaaggagggatgggagctgaatctcttcccgcccccatctctgccaggtcccaggccccctctgggcttctgtcccacacagacctgcctggaagccttcaaaggccgaggagccccggtcggggtgggggtccctgttctggagccatgggtttggagtgccagctccagcagaggcatctgagcagcggcctgaggtgctgtgtctgacatggttgttggccatggaaggcctcgggccgtcctgagctcagatcttggctgccggctgctggggcggctgcttctgcagcagggccagggtgtcccgcttctcaatggagcgcagctgcttcttctttgcccgcttgagcttggcggggtttcggatctgggggtggtatgaggggaggacattagtgcagctgcagcctcggtccaaattcccaggggagaggaaggccgccccacaggggcctgagatcgtagcatgagagtgggggtacatgaggcaggggtcgaggccctggtttgcacccccaagtggggcagaagggcagagggggaaaacgagacactcaccacttggacgacctctgccttccgctcattctccaggcggcgtttcaggttctcagcccggcgctgtttcttctcctggaacatgtgggagaaggggatttgagtcggggagcagaggcagccctggtctctcaggccccagaagagtgcgagcgggcagaattcccaggaggaaggggaaaggccctctctgccaggctccaggttggtgatgtgtgggtggagggctagcaatcctgtgccacggtctagtgccaggggcctgctgtggtggaagctcctgatagcatgttgagaggtgggtatgggacaggcaactgaggacaggggctgagacactgggggtgcccacctggagattcacgcacatgcagacagtgacccctcatgccaccctcatcaactgccaagggagaaaggggtgctggcccttcccccattcccaccctctccgacagtctccccctcttcccctggagtcctgctgctgcagaatgccaggctaggggtgagggctgggtccctgagattttcacaggtgtggggctgggcaggggctgcactgcacagaaaaggctctggagctatctgggctgggtttcaatctggatcctgttatttcctaaacaggagaccttagctaagtctgtgcctcagcttcttcatctttaaag

SEQ ID NO: 20961 - DNA, 1912 bp, Artificial sequence
  DNA replication origin
ccggcggccaggccgcttcgtgcgcctggtggcggccgtcgtggccgccttcgcgctctgctgggggccctaccacgtgttcagcctgctggaggcgcgggcgcacgcaaacccggggctgcggccgctcgtgtggcgcgggctgcccttcgtcaccagcctggccttcttcaacagcgtggccaacccggtgctctacgtgctcacctgccccgacatgctgcgcaagctgcggcgctcgctgcgcacggtgctggagagcgtgctggtggacgacagcgagctgggtggcgcgggaagcagccgccgccgccgcacctcctccaccgcccgctcggcctcccctttagctctctgcagccgcccggaggaaccgcggggccccgcgcgtctcctcggctggctgctgggcagctgcgcagcgtccccgcagacgggccccctgaaccgggcgctgagcagcacctcgagttagaacccggcccacgtagggcggcactcacacgcgaaagtatcaccagggtgccgcggttcaattcgatatccggactcctgccgcagtgatcaaagtccgaggggcgggacccaggcacctgcattttaaagcgccccgggagactctgaatctttttcagaaacagtgagttaaagcagtgcttctcaaaccttgatgtgcctgtgaatcacctaggggtcttgttaagtgcagtctgatccaggaggccggggccgggtactgagagtctgcacttaacaagctcccaggccgagaagccagtgcggcaggttcacaggcgaggcctggagtaacacaaagtgaaactcataatagacttcccactctagggcagtggagtcggaagggcacacggggtgcgtctccccggagttcagttttaccagatgatgggggaggggggaaggagttttatgttaaaccatccatgtatttttggagaagagagaggaaaggtttgagaagcactgttccagcctgccctcttcatttagccaatgcttactgcgctagacgcttcatcccacaatcttaaggggcagcttctattagccagtctttacagctgagcacattctggctcagggaggttaagtgacttgcccagtttcagggctaacgaccacagggtctgcactctaaccctaggcatcacatgctcaatgactctctggtgagcgaggacattctctgacctactcgagggacttaagatgctaccttgtgacccagcactgcccaaagtgcttccaaggcagaagcagcaggggatggcgtggtcaagcactcgggaaacctggggctaatcaaatccaatgggggaaatgactaaaagtcttcggtcgttagaagttgaatgggcacagcaactctaagactacagcacacgtcatttcttagctaagcggaccagcctccctgtcggcctggtgttctgtgggatccctctgggcactggtaatcccaagatctgtgcagccccgcctccaggccacatggggctgggcagctaccatttcccttttgcggatgggaggggtaacttgcacctctgacctatcacttccactgcaccccgtctcattcctccacctgccgtggacttggggtcagagactgctgtgtttgagctctgcagcccagggaccgaaaagttggtgtcaatgaattttgcttggtggatgaaatgtcagtggaagaagcagatgagaaactcttgagatcttggtcctgtgttttttctgccaccaaaggccagggtcactgaaggcctggcccacagcaggtgctgagcaaagggaacagtgaggtgcccagctagctgcagagccaccctgtgttgacacctcgcccctgctccctcccatcccttccccctttactcatagcacttcc

SEQ ID NO: 20962 - DNA, 1966 bp, Artificial sequence
  DNA replication origin
acgaagggcagcccgcgccacacgagcggccgcagccccgggtttgcgtgcgcccgcgcctccagcaggctgaacacgtggtagggcccccagcagagcgcgaaggcggccacgacggccgccaccaggcgcacgaagcggcctggccgccggcggccgcggtgctgcaaccgcaggctcacggccgcgtggctcgaggcgatgatcgccagcggcaccaggaaggccagcaggaacttgctgacggccagggccacctgccgcgagttgcacgtggcatcgcggtcaggccccgggttcaggagcagcacattgtagtagcacataatgcgcccgtccagccgcgagatggtgtcccggaacacgaaatagggcaccgtgttgagcaccgctagtgcccaaagcaccaggcagactttgtgcgccgcggccacggtgcggtggttctgcgcccacaccggccgcaccacctgcaggcagcggtccaggctgatggcgctgagcaggaagccgctggcgaacatgttgagaaagaagatggaggagtgcagtttgcagaaggtggtgcccagctcccacgagtggcccacggccaagaagtaggtgaagaagggcagggaagcagaggccaacaggtcggacagcgccaggtgcagcacccaggtggtgaccacggtctggcgcatgcggcagcccaccacgaagaggatgactccattctccaccaggcccagcagcgaggccagcccgtgcagcagcacggccgcgtggtcgatgtagcggatgctggtgttgctgtggctctggagacggctcatctgctccaggatggggcagagtggcttcagtgtggcgttggccgacatcgtggggctctgcagtggagggaaggaggcgcctaagttggaagtgcagaggccaccggggaaccaagagagaggcccggagtgggaccctgcccaggagatgccaatgtgacccacgaatatattgggcggtgggggtggggggaataatatcccagcattgctgtgcttgggcaagtcatttaaccttcccgagcctttttctgcctctgaaacttggatgtcagtcataacatcacctagctcatagagttattgggagaattaagtgagtttaatacataaaagcatttagaacatggcctggcacagagcaagcactttatcagtgtcattgtgatgattatggagcaaatggtctaagatcacacagagaaaaaggaacaaggtcaggccacacaggactcctttttcccatccccagagcactggcgggtgaaggaggccccacaattagggcaagaggattctgctggcctgggcgatggagatgctgccccttcccacagcatccacagcgcccccagatgttgcctctctacagatcctccatgcagctccccgcactcagtggtggctggttagatgtgccgaccataaacagtggaaccagcccctcctctgatggttggagaggaaataagataagagccaggagagctggggaggaggaactcccacatggggctctggaggcccagtggggccaaaagatctctcccttctcaggagcagccacagcagctctctccgccccaggaaacccacccctgttcattcacttactccatcatgcactcatccaacaaataagacgtgcatgcttacatcctcattgaaagcccgaaagaccatctgatgtgaggctggtcaagaccagtgagggctgaggaaattccatgaggctccatgcaggaggtaggaggcaagtagcaggggacagggactcagggtgtcctgggcaccaatgacactccaggtactatggtaggtccttcacataggtgctgtctttctggctctagaaaaatggtgctagtactccatcctattttacagatgagaaaactgagcctcaagtggttaaataactggcccag

SEQ ID NO: 20963 - DNA, 1050 bp, Artificial sequence
  DNA replication origin
ccagggcctctcccttcctgtcgttcaatggacgtggtggtggctgttccacacccattttgttgcagttcctgtgagacaggagaggctgagccaagggaactgtgaaggggatgggcaggagggcttgtgcagggttttgtaagcagtgatctagtttcattaaaaaaagaaaacaataaccataaccacctccccgtgtctgtctgcaccaggagcacctgggactgggaaggtcaaggggagggagcacacactgggacactggcttccgggaagcccatcttcctttcctttcacagctcttaccctttttttttttttttaattgcacagcagaaataaaaacaaatctgcagatgaaatttgccatgtccctgcggttcttgaccttgtgtctaaaggcctcaagtcactagtcctgccacttgccttgtagacttggtttcctacacaagcctggaagggagggagacctgcagggaagattagctggatcttgctggtggggaggtctgagcatctccatcagggttctttagttgtaggctttctagcctgtcctcagctggcataagtcaaaaaggagatttttttattgactctggcgattgaaaagctgtggtaggactggtttcgggacaaagatctgataatgaatgtgccttatagggaattcctgtagggtcacgtgactgctttagattgcaggtcaggaaaggcctctgaagtggtggtgatgaagctgaagctggaatgagagggacctgagaggggaggagtgttggcaggcagagagcaggttctagggctggactgagcgagatatatggaggaacaggaaggaggtcatggtggcaaagtcgggggaaccatggtgtacagtctggggtgattgacagtcccctgacaagggccatcccagtggaaggtcggggctggctgcctccctggagtggggtaagaggatatgaggtgaggaagtgtgggagtcagtgattatagacaaaaaatagtgctgagaaggggagctgagaaatggggtgttac

SEQ ID NO: 20964 - DNA, 1537 bp, Artificial sequence
  DNA replication origin
gagggcaagaactctccgaccttcagggcgctgcggggcgaccccgctcagggttcagtccgagaacccaaaggttggtggctcccgggcatcactcgctcccactcggccgggcccggccgcccctcgccccggccctcccctcccgctgacctctcacgacgtccagggcgagggccaccaggaggcagagccaggggccgtagggcccccgaggggccgctgttgtgcgaccggccatccgcgcgcacatccttcccacagaaggcggggacgaggcgggcggctcaggtggccccagtcccgcacggcatctcccgcacccgctccgcgccgtccccacctggcccgctgggtcccggccgccgccgccgccgccgccgcccgccccgcggctgcaattcccagacaatggagcgggagcagtggggtgggagggagcgaatcgcagcacatgggctgccccctccgccccgccgggtcctagtgccctacggatccccaatccctgcgcgctcaggcgaccgaggtcgggaagagggccacgtccctggaagcaacagaggacggccgcctctgccaggagggactcggtgagttctgtgtggctccctcacggaagcttctgatcagggaagaaaaagccactttctctgcctcacccacccccacaagcagctcacttgtgaaggcatctgacacctgagtcagaaccagaattcagggacacatgggacgggagctgcagggacaggaaaggagggagggggtcaaacggggccagatgccaaccacctgagcctgccctgacagagctaggccaccgccgtggaggaagggctctaggtgcaggcagctctagtctcttgaccagctccacctgggcagcgtcctgcagcgcttaggagggttgagggttgcccaacactcccgagggaaggccagcctcaagggtcctgacccagtgttgcctaccaggcagtttggggagaggcccagagcaggggccccagctgcacactctcatgccctgggcagcttacaaagaaaaaattatgtctgaggccctccgcaaaattggtccagcctgtgggccgactggaaaccttggcacaggaaagtcctcaggtgggtggtgaaggggagggcaggcaagtcttctccaggctgcccacccacctcagcacactgcagggaaggggtgacccctctgcccagcaagcacacgcatttccagcagtgccagtcgttcctacgttttgtaatgggggcatgctttcctaattccttgtgctcctggagggaagggtacctggtaccagcctgccttttcagctctcccctctgccagcttcacactgcccccacagggagaaattgggaggcggagctgcactacagaaatgggtttagcagtagaggagacatggaagcaatccagacttggagtaaatacattttattcagaacaagataataaaatagcgtgcactttatttaaaaccaaccaagcactgataaaaaatatatatcactg

SEQ ID NO: 20965 - DNA, 1295 bp, Artificial sequence
  DNA replication origin
cgggagatgccgtgcgggactggggccacctgagccgcccgcctcgtccccgccttctgtgggaaggatgtgcgcgcggatggccggtcgcacaacagcggcccctcgggggccctacggcccctggctctgcctcctggtggccctcgccctggacgtcgtgagaggtcagcgggaggggagggccggggcgaggggcggccgggcccggccgagtgggagcgagtgatgcccgggagccaccaacctttgggttctcggactgaaccctgagcggggtcgccccgcagcgccctgaaggtcggagagttcttgccctcgggaacctgcccccagccactcgcccctaaggcttccttcaccttgcacgacccggcaactccttcctgacccggggcagcccggcgcaggggcttccccgtcccgcaccttctgcgagggacccctcagcccgggcatcgaacccggcggccccggtcccgggcgcactagcgtcatccccactccctcactgtggtctgtagcgctgcaccctcctagcctccttccgccgccaccaacccacccccctcgggagtggaaagcagcccctttgcctgggacctgcaacagacgcaagccctccctcccccttcccccagggctccctgaccttggcgtctccagggatggccgcatccttgccttccagaacctttgagaggattcctgtcactgcgggaaagggcagcaacttccctgtgcttcggggtgggggtcggactcccttggcctgggctagctgggctgtggctgcaaggcaaaggatgccacagaagacagagggacagtgaaacattctctgccctccccaccgagagagccgagcgctgggtgatgggagtccgtgggagtcaggctaagagcatcttgtaattatggaggcaatggagtaggaggcgaacctgaagccagtggctgcccccagagagcagtggtcacttgttacgcttggggcagggggcagggagagcctgtcagtcatatgctccttggtggggagggccaggaaggaggttgaaaccaattcccccacccccacccacagtccagctgtggggctgagagggagctagctgtggggttgctttcagccacctgctccccatcccgagggacgccatgggagtcctaatagagagaggaggaaaaccttgtcaaatccattatgcagcagcaataatgcctgctccctccagacagcactccacagtttacacagccctgtcctgtccacagtgccacctaatgctcct

SEQ ID NO: 20966 - DNA, 1236 bp, Artificial sequence
  DNA replication origin
ttggggagccccctccgagggtgttcatttcctgagctctgtgtcatcttaggctctgagggtacgaccagcatagacagaccgcagcttcaaggggctgacattctcgggggaggagcgtggaaaggatggacaggcaacattaaccagtactgacgtagattaggaagtggagggtgctacgggagaagtgaggcagggaaggaggagagggatgcggaagtcagcaatttcacagaaagcgatcattggctgggcggcccagggtggaggtgggcagaaggaactgcaagcaacagggcagtttttctgaccccgacttgggcccatggctgtgtcccctgcgccctctccgtcccagtgtgactcgccaaggcctgccagcttcctcaggcctccactcacccttcagcagggccaggtaccctccagccgcggacctgctcgagggtggtgtcggtgagctcgatacgcagcggtagcaggggggcccacacggtcagccgcagcgaggcgcggagccggcgccaccagaagtccactcgcaccccccgggcgccccggctctccttgccagccacgaacacggcatcacaggcctcagacacctatggaagggcagagggcaggtgggcgggctaagccactaaagacaggtgtgaggctgggccgggtgggtggctcatgcctgtagtcccagcactctgagaggccgaggtgggtggatcgcttgagtccaggagtttgagaccagcctgggcaacatggcaaaactccctctctacaaaaaatacaataaatcagccgggtgtggtggcacatgcctgtagtcctagctactggggaggctgaggtgggaggatcccttgagcctgggtagctgagactgcagtgagccggactgtaccattgcactccagcctggggacagagtgagactctgtttcaaaataaatagattaaaaaaaaaaaaaaggcatgggccagaagagagcagccctgacctcaggccgtaggacgggctcccactgagttcagctctgtgtgtcactggaatgcatgttgcagcaggattgttggttaagcccctgttctttgtttaagattttactgtaggggccattccttgaggttccctggggctcagtcaggggaactggccattgcataccagtcttcctcctggcagagcaggggtgtgaacccaaaactttggctccttattcatgctggcct

SEQ ID NO: 20967 - DNA, 1011 bp, Artificial sequence
  DNA replication origin
tccccagctgcttacctcaatggaggtgacaccgggctcccggcccaccacgacacggccaccctccagagaggctacacgcgagtccagcacgcgggcgtgtggcgccacgaggtgggacacgtctagcagccagtcggggccaagcaggtgcgtgaggcggcggccgccgtccagcgggtgggccgcgaagggggcgaggaagcgcacaccggcccgctggtactgcaggtggcagccacgggcgcgccgctcggcctcatccgacgcctctgcagcgggttccgcaggcctgcagggcggggaggccgggactggccgtcagcgctgagcggccccagcctgcccagggcccagctgctggagacccgcagctcgtccccggcggctcctaatcaccagcagctcctgtttctcaaacgcagacatccgcccctcttggggtcaggcccttccacctgcaggcgagccgccccagcccactcccgactggcgctgtgcctcgatcaccgctcttgctcccaagtggaccgcaggggagacgctctcttacggggaccctgggggcgctcactctctgaagggcctggaagctagattccagaggcgtgggccacctctccctgggttttggggagccccctccgagggtgttcatttcctgagctctgtgtcatcttaggctctgagggtacgaccagcatagacagaccgcagcttcaaggggctgacattctcgggggaggagcgtggaaaggatggacaggcaacattaaccagtactgacgtagattaggaagtggagggtgctacgggagaagtgaggcagggaaggaggagagggatgcggaagtcagcaatttcacagaaagcgatcattggctgggcggcccagggtggaggtgggcagaaggaactgcaagcaacagggcagtttttctgaccccgacttgggcccatggctgtgtcccctgcgccctctccgtcccagtgtgactcgccaaggcctgc

SEQ ID NO: 20968 - DNA, 1729 bp, Artificial sequence
  DNA replication origin
gacgaagaccacaccattgaccaagaagatgaagatggccacgcagaagactcccagcagggcgtacatgcccagctctagctcagtgacatgctgaggggcagggaccatctcctcctcctcttcctcctcctcctccctggcttcggtctcctccttcctggcctcctcctctgcccgctcaaacttgcccctcacacctgtgttgcccccgacactgcctgccacctgccgtttaccacccatggtggcttctgtggctggtgggctccaagcagggctggatgggagagcaggggctggagtggaggcagggggcagccccagccaggcggtgccagaggccagaggcacacggtggcggccccggcggcagggctcgggcgggtgcagagccacatgcagcggcagcccctcggcgcctgccccactcaccaccaccccgagctgggcaccctgctcctcagctggcaggatggcaccaggctcctcggctgagacggacagtcccaggtcacggcggtcgtagagctcagctggggccacagtgtgatcagagaaggacagccatagggagagggccacctcctgtggggcacacagacacaggcagagacatgcgagggcacgcacgcatgcacagagaaaccactcccacagagataggccacatggaggagagaccagagagaaaacagagacacaggcagatagacaaaacacagggagagaggggacgcgtgtcaatcacctgtctgccactcagccctagggtctgagttattgggagggtcctcagttagagccatctaaccaacctcccactgccatactccagccactgcttgatcacctccagctgcagagagctcactacctcacagagtcagtcctcactctgaaaaccctaaggggtcgaggtaccagggtcccttcctcccattcccctctaccatgagcccccatctggagatgttgacctcatccccctgaccccccaactgtcacctgctttggggcgggaagggctgactgtgcccagcacgtagctgtgacctccccggggtgggcagtgccccggctcaaggtcagcgagatgcccatcactggctgcaccctcagctccagcactgagaccttgtcgtccgtcacagccagcgcctgctcccccaggatggagtcagacagtggggaacgcacctgagggtggaaaggagctggaggtggggggccttccatacagacagcccccacccagagggaaccgggtgctcccagcaccctcacgggctgccctccggaggtgggggaggtcttcgccacggacagcccccacccagagggaaccgggtactcccagcaggctcatgggctactatccctctactctttgcaccccggtgcatacctggaccccaatcccacacctagggggcagttcccttttccctcaagacccggtccccacactacccacacctcagcccttcatagctagagggcttccccccttatgcggccaccccattctgagcctatccccaatcccactgcactcagacctagaccgcacaactcccccacacactctgggctcctggcacactcttcactcccacccacgaacattttgggggcccctccacccttctcagggggtctactctcctggtccccagctgcttacctcaatggaggtgacaccgggctcccggcccaccacgacacg

SEQ ID NO: 20969 - DNA, 1629 bp, Artificial sequence
  DNA replication origin
tggggagagagaggaggtaaagatggtgctgtcactgaaatgatagacctggcaggaaggggaggaggggagacagagctattggggcagcgcatggagtaccccggtgcaggggttcagccaggaggcaggtgagcagggcagaggggaaggcggcattgatgcatgggtgctgtcattgccactgagtggacaggcatccaggggaagcctggagggtggcttggtgggggcagggtcaggggcagcaagcaggggcctgggcctgttctctgcgcctgcaccagcccctgagatcgtctctgctccccctctgcaggcctggagtttgcctactcagaggccccgcgctccatgcagggcgccatcatgggcatcttcttctgcctgtcgggggtgggctcactgttgggctccagcctagtggcactgctgtccttgcccgggggctggctgcactgccccaaggactttggtgagtatggggcctccccaggagtgggacatggatggagggaggcttggaaaggaggtggcaactgctaaagtgctttgactctggggagaagcaagtagagggctagacttgggagaatggggttctagcccgggcttggccagtcacccacagcgtggcctccctccttgggcctttctttccccaagtgttgaacttagtggacctccaaggctcctttctgcttctggaactctgccatctctggctgaagggttacctttctcatggtgtttatatttcacgcccccttctgaatagctgaagaggaattgtagacacccctggagatcttcaggaagtcaaacattagtgggtatctgtccagtgtcttcagatcccaccactgcccacatggcctcagttgccagccccagggctaggacacggcaggcacagggcgcaagacagaggatccctgtcctgacccaaatctaacccctcctttccccagggaacatcaacaattgccggatggacctctacttcttcctgctggctggcattcaggccgtcacggctctcctatttgtctggatcgctggacgctatgagagggcgtcccagggcccagcctcccacagccgtttcagcagggacaggggctgaacaggccctattccagcccccttgcttcactctaccggacagacggcagcagtcccagctctggtttccttctcggtttattctgttagaatgaaatggttcccataaataaggggcatgagcccttcctcacgaccatggtccatgacaaggggcagggcagagggggcctggatgggagtccttgtgggggaccaggcaggggacttggatcaacaagcaccagacgagtggcgggggcaggcgagaggctcagtgggacctccaccctcgttgccccagctggtggctgaccaggtggctgtggagggtcaggagctgccccggatcctctccatgtagttgcgaagctcctcagggtccttcagccccatgtcctcacacacccagcggatgtcctcctcgcctgccacaaggatggactgcacagcaggggcccctacaggctcctcaggtgactgggctggaggggctggcgcaaatgtcacaaactctactcgctt

SEQ ID NO: 20970 - DNA, 2138 bp, Artificial sequence
  DNA replication origin
cgaagcaggtggatcatgaggtcaggagtttgagactagcctgaccaacatggtgaaatcccatctctactgaaaatacaaaaattagccaggcgtgatggcacgcgcttgtaatcccagctactcagaaggctgaggcaggagaattgcttgaactcaggaagtggaggttgcagtgagccgagattgtgccactgcatggcagcctgggcgacagagtgagacttcgtctcaaaacaaacatacaaacaaacaacaacaacaaaaaatccctcgcttttttgctggtatctatagtgctttttttgctggtatctatagcttttgtgagactcagtttatttagctttagctttcctgatattattattcttacaaattttgccttgggacactctttccattcattgattcaggcaatacttattgagcacctactatttgccaagcactgggaagccattgagaataaaacagtgaagagttagaaaaggtctctgatctgatggagggcctattctactggtgctaactgaacaagtaatatgtgctctgaagacattaaaacaagacaatgtgatgggggatgctgagaatccagtaggaaactacttagatgggaaaatcagggaaggtccctacaaaggagacatatatgctgaaacctcaataaagagaagcagccagccatgcaaggatatggagggagagcagttatggcagaggggtcagcaaagacaaaggccctgaggcagggaggagcttagcatggaaggggaacctgggaggccggctggctggacttgagtgaacatggggctgagatgagatcagaggagagcagaggccagatcccccgggctcctaggtcagggtggggctggtgcttaggagttctgaggctgactctgatttagtctgaggtcggtgtccctctcaatcccgactcacttgtggtcctctatggcccgcaggcttgttgaaagtgccccacttccttcctcacagcagcctctgtgcaatccgaattgcgctgtgaatttccctgccactcaggagcccggggcagggcttcacccctagttcagttaccaggaaccaatctttctccaccttcctgccctagccccactgggtctgtctctgcatctgtgaaatggctgagtgtgaccaaatgatgcaggtagcctttccacttctttctacccgtggcgcctcgggtggaggcgtggagtttgattggaagagggtaaagcaaaagtggaatcctggcgagaaatgaaactgaaagaaaaaattcctcctggaattttttggctctaaggaggccagcagcgggggtttggggtaggaggcagaggtagagaaggagggaggtttttagaaagctgaccgggcaggagccctgtgacccaggctttcacttctcctaaacacccagtagcgccatgtgatgcaggcaggggactgcggatagggcctgtgaaaggggaagcgaggggagcccagagtttctcaagaagccgagagagggacagaggctgagcctggggggagggctgcaggggactgagaggggagtgtaggcagtgggggtgagggggacagggaggaggtggagaagacggcaaggggcagcagggtgactggggcagagggagcccccaccccacgcccagggcaggccaggagtcataaggagaggggacaacaggaaggggcgacaaacggggaggggaaagggaggcggaggggcagcgaagtgaagcagggagggtcgcagtgtgaacaagagtgcgaggaagggtcaaggtggagggaggagaggggagagttagggagaaacagctgcaggagaggcgcggggaggaagccttaggggtgggggaagggagaggggagttgagaattagggaggaggtggtagagtccgggtagtgagcggagggacaggaagggtagggcaagaaagggagaggggacaggagggaagggtgggccaaagcggtgagaaaggagggccagccagttgggtgggggagagggccgaggcccgggggcaggagtgcagggctctgaggcggggagaggagaggagagaagagccgcggggggcccagcccggagccaggatgccc

SEQ ID NO: 20971 - DNA, 1160 bp, Artificial sequence
  DNA replication origin
aggcgctcccagggacaacagacggaggcagagggaagcccaggttcccaccctccattttgtaggctcctgcagcccgaacgccttctgcctgaaaatggcggctgagagaggccaggaggcaggatgcagggctgaggaggaagctccggggctgggtctctggtccctgggagatgctgagagatagggagatggccctgtcataggaatgtggtcccctgttttcccttgtatggaagggtgcccctgggtctccaccgtgtgctagggggtgggggcacactcaaaagtccggccaataagtgtccaggccacccccaatctccatcaggaccctgagctgggctgaggtctccgggaggtgccagcagatgccagggtggcgggggggggggttctgtgcatggggctggggacagcagatgcccgggtggggggcggtctgtgcatggggctggggaccagggtcatgtggggacacaggctgtaagagtgacgaggggccttggggctaggggcttcttgggggtcccatctgaggacctcacttctgacttggagtcatgtactgagccctgtggcagggagaaggcagaaatgaagtcactgtgtcctcggagtcagatgcaaagccaagcgtgactctgttcattttacagaaggacagactgaagcccaagagcttaagtaacgccgccagtggctgacagagctgggagcagagtcacttctggtcactggggtttggagggaggatgtttatctgcacttcagtaccctttttgctagggtgttcacctctttcaggaggggtgcctgggagcaggcgggcgcggggagacagagctgaggaagccccccaggcctggaggaggcccgttccccactccatttggtgtgctctcgttttgcctccctccctccttcaaccaaactaaaggatgcacagttgccaaatggattcagctccttggagaaatatgttgctttgccgggatgggattctagaagtatgacaatgtctgagctggaagaaaccccagcgagctgccagccatctcctgtttgtcagaggaggaaagcgaggtgcgaagtggggaacgacatgccccagggtcttggagcagggctgagaagcccagtctgcagggactctt

SEQ ID NO: 20972 - DNA, 1760 bp, Artificial sequence
  DNA replication origin
tggtaggcggtgggggtggaggtctggagggcgaggcttgcgtccagggtctggagccaggggcagtggctgaaggcctggggagtggggcaggtgggggcccgtgtagggggtgcgctcgtacctgcacaggtgacacgggcccgcctcccgtcgctgcggcacgcgtgctccaccacctcgcagagccgccactcggcgccgctgcacaggagggcgggcgccccggccagagtggcattagctgctacgctggtgttcccggctgcaggcgggggcggcagctcaggggtcggcggggcgagctgagaggcggcctccgccccgccgcagcccagtgctcggcacacggcctcggcggcgcggctgtcccagagcgccccgcacgcgggctcccaggacgcctcgagccgcacctccaccgtcccgctgcagctgctgctcccgtttgtcagacggaccggaagccgctcccctggaagtgtcagaccagagagctgagaccggtggggcctgggcagagggttgcccaggctctgccactgactctgtgcgtgaactttgacaacgccctgcctggctaggggtctcagctttccagtctgcaaaatggagccgggctggctcatccctgagcccaccttgaggcctgaccctgtggttctccttagagtcagccgaaggtggggcttgggagtgactctagaggttaagatgggtgacagacaactaggggtccagccccctagaaaccctcctcacttgctcctgtctccaggggcacccgtttgtgaaagaaaggcagagttgtgagttcaggggccctggtccagtgggcgcatgcttcccctgaaggcccctctgctcctctgagggtactgtcctagaggctgtcacagtgactagggaaccttggaggattgtgaagcggctggccatggggttgatgatgggctgcttcagctgatggtggtcctcacttccccagaaccccttctatgggaaccacctgccccttttagcccaggattgtacccccagtgctagcatgcatctttgcatacagtaggtccttaataaacgtctgctgagtaaatcaaggaccctgcctcccccaccaagaactctagcctgttctcaacaaatccccttaaaatgctccaggcatacctgcccacctgtatgtgacttatcagtgtcctctcaaaaatggtagttctacgacctcaaagtgaattgatagtggaacttcaggtgatgggtcaggaagaagtgttgtctgaagtcagggagcctccctggtatcctaaatgtccatttcccttctttattaccctgggggaccacctacagaaagctgatcatggacccccagagggaatgtttgctcacctggctcccagagctcactctctgcactgctggtgttgagctggtcaggtggggctggagatggatgacctgaaatgaaccagcagcagcatggtgggtgagtgagctcaggcctggagaccacagagacaccctgatgagcagggggcacttcctggagcctgtggtggctacatgaggcctttggaaaagacgtggtcctcaactttgggtgcattggcctcccttcaaggtagggaaagttctcaaacattggcatttcaggatcctccgctttacctattcattgcacacacagcttcagaaatcggagtagaacagggaggaaaggcagtgggcactggggccagacacacaaagtggcttcg

SEQ ID NO: 20973 - DNA, 1154 bp, Artificial sequence
  DNA replication origin
tgcctttcttgggggcatttaccactttctctcctgaattatgtttgtctcagtctcatctcccctcctgaactgtgacatctcaagggcagggaccacctctccggcactaactccaggcttggcgcccagtaggcctatggtgagtgttggtagtgaccgggcttcagtgactccgcccactgacctgagcacaccgcgcccgcgtcctctttgtggccgcagtagtgctgtcctggcagccccgggcagtcccacaggtaagcttcggcccccgagcagttcacctggtcccggtggataggcccgcggccgggcgtgaagtgcaagccgggcagggcctggactgcccagccgcagcccagttgcctgcacaccacgtgggcgtcctccaggtcccaagtgtcatcgcacactgatccccactcgccatgctccagcatctccacgcggccggcgcaggcgccgccaccgtccaccaggcgcagcgcgcggttctctaggggtgggagggggttgtggatgctggggcacccgaccaggaagggagggttggggtgatggttggactggccggagagttgtgagcgtgttgtggacccagtgagagggctgtagcccggtaggcaagactgggaatccccccaggactgcagatgggttaggtagagccgcaggctggtgggagggaccagagacctggtgggcggggcctggagggcaggtttgggagcctgggagccacagcgcttagggaccctgtgaacctggcatgtttatgtatatggcgaaaggggaggagagacccagagcgggcggggacagggaagcggcgggcccagtaagtggggttagagaccgggttagctttgggaacccaggggtgggactaggaaccaagtgtgggggtggagtctggaggccagatccaaggaaacgctcagatctggaaatgactcgaggtcgtcctccggtgtgggaacccggtgcgtttgcactggtaggcggtgggggtggaggtctggagggcgaggcttgcgtccagggtctggagccaggggcagtggctgaaggcctggggagtggggcaggtgggggcccgtgtagggggtgcgctcgtacctgcacaggtgacacgggcccgcctcccgtcg

SEQ ID NO: 20974 - DNA, 677 bp, Artificial sequence
  DNA replication origin
ggagttctgccctgaggggggcactgaggggccagaagaaagggggagagctttgctgtcaagcctgtggttccagagggaggtcactgatcctgattcattcacttattcaataacttactaggtgcctgctatgcacgaggcactgtccttggtgttgggagacatggcaagaacaaaacagaccccaaactttcctgccctcatgctccttacagtctaacctggggcaactgacaatgaacaaaataaataagtaaaaatatattgtgtgtccagtggcaataaatgctacggaagagactaaaacaggagaagagaagggggaagggggagggaggggtggcgatttaaatagggctgtccaggaaggctccacccaaggcgaggaagggagttgagggctctccaggggaagagccttccagcccaggaccagcaaaggccctgaggctgtccagtgtgtccgatggccagcgtgacccaagtggtgtgagcaggtagagcagtaggctgtgaggtgggagacgtcatgggtgccttttacatgggatcactccacatccagcagggagaacacccggaagggaatgagggcaggaagcaggaaggcaggtgaggaggcagagaggacggtggccaggatcagggcggtcgcagtggagggggtgggaggt

SEQ ID NO: 20975 - DNA, 1351 bp, Artificial sequence
  DNA replication origin
agccttgggtaaaactgggaactccttccttgcactggagcgagcccgggtgttcgcaggacacctgggaggggtactcacccagcatccccagcaggtacaaggtggccagcggttgcagagaccccatgggcatggtttctggccttctcttgcctcagcctgggcagctgggcaccgcaggtgagggtgtctggccgggtatctcgctctcagagagggagagggcggggtggcgtgctcagggaggggtgggacggggagcaggcagtgtggggcctgcgtcacccatgtttgaagttgaactgtcaacttcctcctggcaaaaccacctgcccctgtttgaatggcagccctggcctctgccagcttcctgcccaaggtacccagggctggggcagtgctctcggccacccccacacaggacaaggccatgcatcctggagggacagggctgcagggggtggggaccctgagcgggggttacggaggctgaaggcctggctgcagctgagggctgggctgaggacaggcgtccctgaggcaggggtctgggtggggagaggcgggaaatgggcagcatgatgccagttcttgttgcagactccagtgaaagccaaaaccaaaccctccattccccctttgtgagggatgaggttggaagtttgagctgactttccacaggtggtgttttgctagcaagtacaagagatggctgcgccatgaatgctgggcttgtgccagtgtgtgtgtgtgtgtgtgtgtgtgtgtgtgtgtgtgtgtgtagagagagagagatctccatgttgacttgtgtgatctctgtgttgtgtgtgtcatctctgtgttgtgtgatctccatgttgaggtgtatgtgtgagctccatgttgagtgtgtgtgatctccatgttgatgtgtgtgtgaactccatgttgatgtgtgtgtaatctccatgttgacgtgtgtgatttctgtgttgtgtgtgatctccatgttgatgtgtgtgattgtgatcgccatgttgatgtgtgtgtgatctccatgttgatgtgtgtgtgtgatctccatgttgatatgtgtgtgtgatttccatgttgtgtgtttgtgatttccatgttgatgtgtgtgtatgatctccatgttgacttgtgtgatctctgtgttgtgtgtgtgatctccatgttggggttgatgtgtgtgtaatccccatttgatatatgtgtgtgtgatctccatgtttgtgtgtgtgaatgtgatctccatgttgatgtgtgtgaatgtgatctccatgttgacgtgtgtgtgtgatctccatgttgatgtgtgtgtgtgatctccatgttgatgtgt

SEQ ID NO: 20976 - DNA, 1138 bp, Artificial sequence
  DNA replication origin
tcagaagctgtcccagtgccacgaactttgggagagaaattcctactgcaagaaggtgtttgtcacatgtgagttggccacagcccacagtgggtggaagcagttactactttacctctaggacccggtcagggtgcatgtctctaaagggaagccctggggagctagacagagagtcccagagacccagaaaggatggagacagggaaattggaaggctagggagcaagagtactcagacagcaatgggcatgaacaataataggagacagggcaagcaacaggcagatcactgtcaggcagctgatgagtcatagaacttctccttctaccttctacttttgcaaggtggaagccagaaaatcaaatggtagatagcacatatttgctacatgaatggtaactaaacgggaagtaaaagagagaaatggatggatggatggatggatggattggtgggtgggtgggtgggtgggtggatggatggatggatggatggatggatggatggatggatcggtgggtgggtggatggatgatggatggatggatggatggatggatggatggatggatggatggatcagtgggtgggtggatggatggatggttggatggatggatggatgagtggactgatggatgggtgagtggatggatggatggatggatggacagaagggcggatggacagatggatggatggatcaagaatagaggccccgctggctattggtatgcaatcatatattggtttctgatggtatatgatggcaaggtgatcactaataactggcaaatggtagaaaattaaatagcttataacaagtgtggcaaatgatagctagatgatcaactgttagatgacaaatggtgggtgggtgagtgggtagcagggaatcctagagatagatggagggatagccaaatagatcattgccttccgtgcatgctggtgaatttctcagatgagcaaggatgacggcggaagccaggcagccagcagcttccctcccacagtttttctccccccaggactgggactgacctaactcttcctccttccccaggccaggatccaaaccccgcaggcctggccgcaggcacggtggcaagcatcatcctggccctggtgctc

SEQ ID NO: 20977 - DNA, 1103 bp, Artificial sequence
  DNA replication origin
ctcagccatcagcccatcaagaagcctccgccctccctggtgtggggacgtctgttggccacagtcacatgtcagacaagcaccgtggagatcagaggcttcaagcagccacaggctccgtctgtggtcagcagagagcctcgactctgcctccatggcctctgtccagggcctgagggaggctcctgcctccggggacacttactgttttggttcattcccgttgggccaatccactggcgctgcttcttctggcggactgggcaagagacaagaaaggcacatcagagtggtgggggcaggtatgggtgggggcaggcaggggtggggatggggctgggcctgggagggagatggtggcggcaggtgcagctgagggcagggctgctgggctctgccccctggagtctctcgtaggcctcagtttcctaacttgctcgggaagggaattgcagccatcctgtgccgaaggagcaggccgaggatggtgtagaggtgcccggctccccaggagaaaagaccacaggcgtttagaactagacctgggcaggcactaggacctaacactgtcctgctgggccctctgttcccaatctctcccctctcacttctttgtctgaataatttcctcttaagttctgcaaggcaaggagaacaaccccccgcgttcacaaggtgtgcgattgcccatttggtagatgaagaaactgagggtcagagagaggaagtgtcccaatcagcatcttgggcagtggtaagtggtggggctaggcctgggatgtgtgtctcctaccatcagaggctgtactgaacaccctctgggcctgccacagccttgggaatggccacaccttctctctgacctggagtgggtctcagctgggctccagagatggacaaatcagcaattgcaattttgtttactttgtgtttctgttacttggggcagaaaatggctaatgggcaggagaggggaaggctgggtggtgaagcagaggtgtcctgcgtgcccagctctctggaggcatgacccctcctccggaggactctagtgcagcccctccagtctctgcacgtgggaacggagccactcagggccgtga

SEQ ID NO: 20978 - DNA, 1695 bp, Artificial sequence
  DNA replication origin
ggcgctcccgtggttgtggcccgggcggccgcgagcgtgtgtgtgtggcacgatgtcgtggtaactcagaggcgcgcgaggcggggcggccaacggggtcgcggggcgagcacgcgcgccactggggcgccggacgttgcaagggggtcacatccggtagggggcgggcctggcggaccccggaagtgtgggcgcggctgcggtttaacccgcggtggcggcggcgacggcggccctggcaggtgagcggagactggggagggtcccggctctgccgcaggcgggcggggcagaggacgacggtgggggcggcgccggccgtggctcccggagcgcccccgcctgcccgcctcatcctggcagaggccggtgattgggcacgaggggcgcgtgactctcgccgggggccggcgcccctgcccctcgcggtgggagggagggagggagagcgcgaggcgccgccccggctccccggcgggtcgcacctccagttccgccccaccactcaccgccaccctcctttctgcgtctctgcaggccctcgtcccatatgtgagcatcttgcggtcacaattctgatgacattagagccaattagcccattgtatagatggggaagctgaggcctaagagtagggtccgacttgccagagggcacgcgggagacgagtggcagaggggaggttggagggactttgctctgtgacttactggcttgtgccctttctccagggcattgagagatgggagtttcagctttggctttgttcaggactcagacttggacctcccagcatcactgaacatttcttaccccgggaccctctgggcgcaaagggcactgatgtatacatacccattatatgcctggttcctcttcatttcctcctcagccgatgaggcgatttcccactttacggatgggagaaggagttaactggaggtgttttgtgagttactggcagagtggactctacaacctggggttttagtcgctgagctgaggcagtgctttcccagctacaccttgtctgggctcacttaccctgggaatgtcagtcttcagctccagaaacttcccactcatttcccttcgctccagcggtacctcagttctcttgctgcctaaggccttttccaccctctttattggctccaggagtcccatttcctactaatgcaccaagatgctgccaccagactctcagttctgtgacttttggccttagagctggaggtggtggtgaccgaggaactggggaaagaaagactcttactttgttgtccaaagctgcaaccctgcagacacctgaactctgtagttccgggtgggatcggggactgttgcaatgaaaatactggacgctaaactgagtctttgttctttgcggtcatagtgcccagaaaagccttttacctagattatcttggaaatgtggttccgtgcctttgtaatttccattaagtagaacattttcattgtagactttctgagcagtttctggccgctgttttgcaggtagcaatagctgtgatttgttgcttggcttcatatgctgggcactgttctagggctttctgaacataccgaattttgcgaacatgtccaaataggtgatgatcccgttttacagatgaagtgagttgcggagatgttagataacctggctagtgtcacacagccagtaagtggcc

SEQ ID NO: 20979 - DNA, 2603 bp, Artificial sequence
  DNA replication origin
tctctgaccggccgccatcccatctaggaagtgaggagagcctcttcccggccgccatcccatctaggaagtgaggagcgtctctgcccggccacccatcgtctgagatgtggggagcgcctctgctccaccgccccgtctgggatgtgaggaccgcctctgcccggccgcgaccccgtctgggaggtgaggagcgtctctgcctggccgccccgtctgagaagtgaggagaccctccgcccggcagccgcccagtctgagaagtgaggagcccctccgcccggcagccaccctgtctgggagggaagtgggggtcagcccccgccaggccagccgccccgtctgggagggaggtgggggggtcagccccccgcccggccagccgccccgtccgggaggtgaggggtgcctctgcccggccgcccctactgggaagtgaggagcccctctgcccggccaccaccccgtctgggaggtgtacccaacagctcattgagaacgggccatgatgacaatggcggttttgtggaatagaaaagggggaaaggtggggaaaagattgagaaatcggatggttgctgtgtctgtgtagaaagaagtagacatgggagacttttcattttgttctgtactaagaaaaattcttctgccttgggatcctgttcatctatgaccttacccccaaccctgtgctctctgaaacacgtgctgtgtccactcagggttaaatggattaagggcggtgcaagatgtgctttgttaaacagatgcttgaaggcagcatgctcgttaagagtcattgccactccctaatctcaagtacccagggacacaaacactgcggaaggccgcagggtcctctgcctaggaaaaccagagacctttgttcacttgtttatctgctgaccttccctccactattgtcctatgaccctgccaaatccccctctgcgagaaacacccaagaatggtcaataaaaaaaaaaaaaaaaaaagtgagaaaccagccagagagatctgactcccaactctagagataaaaagataaagtaactcttcactggcaatcatctgaagaccaaactagagattctacatgccacatagcaaaacttcctttaaaaactgctcttccggccgggcacagtggctcacacctgtaatcctagcattttgggaggctgaggtgggcagatcttgaggtcaggagattgagaccatcctggctaacacggtgaaatcccatctgtactaaaaatattaaaaattagccaggcgtggtggtacgcgcctatagtcccagcactggggaggctgaggcaggagaactgcttgaacccgggaggcggaggtagcagtgagccgagatcgtgccactgtattccagcctgggtgacagagcgagactctgtctcaaaaacaaacaaaaaacccccaaaacaacaacaaaactgctcttccaacccagttcccaaatctctcgcaatacctcagcttctcaaatgtctcattacctcgaactcttaacttccttgtcttgtcttccttacttgtttacgttacctgtccgtccattcaaccagtatgacaaggtccagggctgagcagctgagcaaacaagcaagcaaagaagcaaaatgaaaccctcactttttagaagggggtagagaggcaatgcaatgtatatacttcaacgtagtgtcatattttttgttcctgatcagggtcatttgaaggattgagttatcttgggctagagatactttgttttctctccaatctcaaccaaaaatgtgacatccttgaggctggagagggtatctgttcatctgtgtatccgcaggtcttagcagtgtgggtattcagtgaatgcatgtggaatgaacaaaggaatgaagtgaatgtgagaaacagagtaaggtacccccttctgtaactggggttgtttgtgtttataacttcttaaaaattttgcattaatcagggccactccacttatgaatgaaattgggtgtaattgaggtatagaacgtgggaacataggtgtatgtgtgataagagaccaggactggaggaggggctagagccaagggaagttgcaaaaggcccaaagtcgaaaatagcaggaaccaaatagaaagagcaccctttttcccaatgccacttccctcccatgacttgaatttcctgcaattttctcttcctccctccttcgtcctaattctctatctttggttattcaggagggccagcaccctgtggccccagaagataatgtggcaacgacttaggacacggagagagagcgtaggcagcagtgtgtcatttcccctcaacacccttggtagaatcatcgtgtctgtcacattcacaagttcttcttcttcttttttttttttttttttagcgttagcagtttccagcatctgcataaaatgatgtataaaatagagtctctgcctgtccttagagaagttactatctagggggagtgaaaggtcaactacagaaaagtgtagagaatgctaagaaagggctgaagggtggggtgtttgaataacatacaaggggggaagttacccagtcttaggatataggggctt

SEQ ID NO: 20980 - DNA, 1101 bp, Artificial sequence
  DNA replication origin
aagtctcccatgtctacttctttctacacagacacagcaaccatccgatttctcaatcttttccccacctttcccccttttctattccacaaaaccgccattgtcatcatggcccgttctcaatgagctgttgggtacacctcccagacggggtggtggccgggcagaggggctcctcacttcccagtaggggcggccgggcagaggcacccctcacctcccggacggggcggctggccgggcggggggctgacccccccacctccctcccagacggggcggctggcctggcgggggctgacccccacttccctcccagacagggtggctgccgggcggaggggctcctcacttctcagactgggcggctgccgggcggagggtctcctcacttctcagacggggcggccaggcagagacgctcctcacctcccagacggggtcgcggccgggcagaggcggtcctcacatcccagacggggcggtggagcagaggcgctccccacatctcagacgatgggtggccgggcagagacgctcctcacttcctagatgggatggcggccgggaagaggctctcctcacttcctagatgggatggcggccggtcagagacgctcctcactttccagactgggcagccaggcagaggggctcctcacatcccagacgatgggcggccaggcagagatgctcctcacttcccagacggggtggcggccgggcagaggctgcaatctcggcactttgggaggccaaggcaggcggctgggaggtggaggttgtagcgagccgagatcacgccactgcactccagcctgggcaccattgagcactgagtgaacgagactccgtctgcaatcccggcacctcgggaggccgaggctggcggatcactcgcgtttaggagctggagaccagcccggccaacacagtgaaaccccgtctccaccaaaaaaatacgaaaaccagtcaggcgtggcggcgcgcgcctgcaatcgcaggcactcggcaggctgaggcaggagaatcaggcagggaggttgcagtgagccgagatggcagcagtacagtccagcttcggctcggcatcagagggag

SEQ ID NO: 20981 - DNA, 648 bp, Artificial sequence
  DNA replication origin
cagcttcacacctcaccttttcacaggtcaccttcccgtcctagaagcacaagcaggagttagagccaccacaaggccccagaccaaggaagctccggggacccctagtacccacctcgcaccagcactgggaacacccaggctctgtccagcgactccttgattcatgcatggctcccaggtgccagcagggagagggccctgctgccagtcggggggactcagggcccctgggtgaggaaggggtccccatcacctccccctgaaggagtgaggggggtctgaggttccccagcagggaggcagtaggcactggggtggccagcagggtggacagcagccacacaggggcagaaggggaggatgtgggtagtcgtggggtgggagatggcaggcgggtggtcctgactccggctgggggccctggagccccagaaggagggctatgtcctggggacagggcaggccggccggcctcaggaagcaacagaagcatcttggacgggtgttgccggggttgcaggatggcagatggggccagcacggctttcgggaaagctgaaacagaagcacggaggtctcttggggtggacagcagagacaggaggcagggtttagggagacctgggctcggctccaccaccacaa

SEQ ID NO: 20982 - DNA, 891 bp, Artificial sequence
  DNA replication origin
ttctactaaaaacacaaaaactagctgggcatggtgacacacacctgtagggtcagctactcgggaggctgaggtgggagaatggcttgagcctgtgaggcagaggttgcagcgagccaagttggcgccactgcccttcagcctaagtgacagagccagaccgtctcaaaacaaaaaaaaaaaaaagagagagagaaagattcttcctcagacacacactgggcttcctctctcccttcacccagatctctgcccatggcaccttctcagagaggccttccttgtccacccttaccttgctttattctccacaacatttacttcctgtgacattagattttaatttattaattcattgtctcccctacaactccctgatgacaagggtttcttatctatttaccccagcacgtacaggagtgcctggcatgtagtaggtgctcaataaatggctgttgagggaaaggttgagaagggcaatggcataggtgacatctcttgggtgggtgtggggtcatgaatgagctgcccaaaactggaggcagtaggggtctgttcaagcaggaatgaggtccagaaagggcaggaagccagatgcatccaactggtgctgggtgctgagtaaggcgtgaccatacagccataaacaaactactgcccccaccttcaaggaaagtagggcagaccaggagctaggtgataacagcatagagtgacaaatgccacagtgggacagactgtggagccctgaggagggtcagggggggttcctggaagggcagcatctaggctgaggtgagagagaaaactttgggaggccaaggcaggcagataacttgaggtcaggagtttgagaccagcctggccaacatggcaaaaccctgtctccac

SEQ ID NO: 20983 - DNA, 1344 bp, Artificial sequence
  DNA replication origin
actaaaaaaaaaatacaggccgggcgcggtggctcacgcttgtaatcccagcactttgggaggccaaggcgggcggatcacccgaggtcaggagtttgagaccagcctgaccaacatggagaaaccccgactctactaaaaatgcaaaattagccgggcatggtggcgcatgcctgtaatcccagctacttgggagggtgaggtaggagaattgcttgaacctgggaggcggaggttgcggtgagctgagatcacgccactgcactccagcctgggcaacaagagcaaaactccatctcaaaaaaaaaaaaaaaaaaaaaaaaaattagccaggtgtggtggcatgtgcctgttgtcccagctgctcgagaggctgaggcatgagaatcgcttgaacccagaaggcagaggctgcagtgagccgagatcgcaccactgcactccagcctgggtgacagaataagattctgtctcaaaaaaaaaaaaaaaaaaagtagggcagccagcaaaagaagaggaagggagagggtgttctagcaggggaaacagcacaactgcaggcctggagggggacagagaggacaactgcaaccagctccagtcatggactggacagagggtgatgaaatccagcctggtttgagcttccaaccccaccgcaacagaaaagggacaagaaaccccttcccaatggtgttccaccaatgttcagagcggagggaagatgattctgcgaggcaggcactttgtaaagcacccactctgcgctgggcactggggacatgggacaaggcaaacttagcgtgttcttggggagaaaaatctgtgccaaaatgtgacaagtattccggaaagggaagctcagggtgcaatggcagcacacaaaagtctgaggaaagctgtccctggggcctttttccctctctgaggtcatcacagaagaaagggggggccctcctgctggcgggagctggcagtgaagtctcatccacccccttgctggagtgattatggcagcagcctgagaaggaggggaccgggcgaatgagcggagccttgggactctcagaaacggacaggcagtgccaccaaggcggcagataaaagggtgcccagggaggctgatggagtcgaactctcaggtgggcagggaccgagcacccgccagagcgccctaaggagcctcctagggctggtgacagagggacaggtggtgggagcctgtggaacgccggggagtcggggcaggttctgagcaggaactggcggtggctgtggaacacacgtgtgagctacaagcctggccgggccgcccccgctgcgcgccccccggaggacgtggcc

SEQ ID NO: 20984 - DNA, 974 bp, Artificial sequence
  DNA replication origin
ggcacaagttgctgactctttgtgccgtccccgagctgtgcccgcgctgatagcaccccagaggaagccccgacacgcggctgcctgcggctcctgagcgcccctccgcgcctctcgactgcacgccggtagcgctctcccgggcgggggagcggggaggagctccgggcgcttacctctcggccgcgaagtgcccgggcggcttcctcccggtgtagcctcgggctggtgcccccggcagcaggagcgcgacacaggcggcccgaaggagcagtccggcccacatgaccggcggcggcgggtcccccgggctgggctcggctcctgcgccgcgcgcgggagagggggctgccggccctcgcccctcctcctggcgccgtggggagcgaaccagcgatccccgaaatggcacgcagagctgagcaggggggcttgggacgccgagaggaggggccgagggccgcgaggggacgcggcggacgattgtggggagggtctctggcacctcgaagcgaaacacacaaaggcaacgccgcccgcctgctgatgcctctccgagaggcgcggagcccggggcgggggcaaagatcagggacccctgggggcggggtttcgccctcggcccacaccccctgccccggtttgggagtcggcttcctgcgaagcgctgactgaaggcgtcagaccgaggccccgggaggaaacagacttcgggaacaaggctagcaccagaggctgcgcgccccgggcatggcccctgtcggtgggacccgagacgccttgttgtgacgaggtgggaaccgtggaaattcgaacccacgacgccaggtcgctgtgccgctgagcagttctaggcctgcccccagcctgccagaaggtctgcaccctaacgccggagtgcgttgatctgtgggtccaaccgctccctggcctggggccctagccacttttgaagccccgggctcctctgggca

SEQ ID NO: 20985 - DNA, 955 bp, Artificial sequence
  DNA replication origin
tctccgagaggcgcggagcccggggcgggggcaaagatcagggacccctgggggcggggtttcgccctcggcccacaccccctgccccggtttgggagtcggcttcctgcgaagcgctgactgaaggcgtcagaccgaggccccgggaggaaacagacttcgggaacaaggctagcaccagaggctgcgcgccccgggcatggcccctgtcggtgggacccgagacgccttgttgtgacgaggtgggaaccgtggaaattcgaacccacgacgccaggtcgctgtgccgctgagcagttctaggcctgcccccagcctgccagaaggtctgcaccctaacgccggagtgcgttgatctgtgggtccaaccgctccctggcctggggccctagccacttttgaagccccgggctcctctgggcacccagggggcagatggccggcctcccgactgctggtggcaagaccaggaagcagctggcgccgttggcagtggagaggcagcagcagatctggaaggctcctctttgccccttctgcagctgccccaggccgtggtcagagactggggggctgcctagggatttaggcaaagaaggggtgcggaaatcaaaatcatcccgctgggagaaagctgaaaggataactgattttaccttctgctccatgcagtaatctttcccttagccacccacaattagtcaagattttgcttaaatacttccaggggtaagaaactcactatctgttaagaagcggcccaatccagttttgaaccacatttgttttaaagtgtcttcacttcccagttgaacaatccctgttcctttggccttcctgctacctctgcctttactgaggtgcttaacattggtggccacaaatggacatggcgtaccagcggtggcctggactcgtgcctccttcctgcagacaccatacttttactaatgca

SEQ ID NO: 20986 - DNA, 1797 bp, Artificial sequence
  DNA replication origin
aggcggtgcctccgggggcggggcctccttcggttggcggcctcgggcttcgggagtcctccaagaggccaggtgaggccgtcccgtgatgccccgcgccccggccgctctggcctgcaacgtgtctctggggcggaggcagcggcagtggagttcgctgcgcgctgttgggggccacctgtcttttcgcttgtgtccctctttctagtgtcgcgctcgagtcccgacgggccgctccaagcctcgacatgtcgtacaactacgtggtaacggcccagaagcccaccgccgtgaacggctgcgtgaccggtgaggctgccggggccggagaccccggcgagtgagggagttggggggagccgcggcctagggaggcccgccgccccgggggcggccgggcaggagtgggcccggcgaatggaaggcgctggcggccgaggaacctcccccagcaccgcgacctcgaaagagtcgtccctgtacgcgctttttgggggttggaagccgctctcgagggtcccctttcgtcctggggaggtcattcggcctcgagaacagggcgggcccagtgagacagaggagtgtgagttggttgtgcggtgtcgtttgggcccggagattggctttctgtggccaggaaaaggggaggtggtaatgacgactttggggtcaagattttcctgtggggaagtctggggggcccaggaggtggagggatgtgaggaatgcccgcattatcccacagagggagaggagccctcttcaggctaacccctttgcctggggctgttgtttacatgagggccctgctggagaagagggtttggtttgcctggcccagtgctgggtttgccttgttgacgatgcgcttggattgttaaggacaccgatgttcagaacccgggaagagtcatcttaacccacattctcagctgaatatgcagaccccaagcttgcatgtttatatacaccctaatcatgattccaaaacaaaactgttgttcagagttggaggtagctgagtgtggatggaggtattggtagactgccaggagggcagggggtgtggacaaaacagtgttttcatataaagctctgggacttcttcatttgacttggtctgtcagataaaagttttgtgagactttagatgaagactggaagaagtgaacactttctccggcattctcaattagagcctgccactgtaactgtaatagagtaaaattggaggggcaagaggcatgagaagggattacgcagtcattgtcatttggaggacacacggctcttaggtccagtccagttttcttagtctgattagggaagtagctttgttgaatgcatgaactgagactctttgaggtgccggatttggcaagaaggggagtagctggagggagttggagaagtatgtgaagtaaatgagaattctggaggtatttagacataagtgataggattattttgaagggatgggaggcccttcccctgagttcaaaagttagagggtctgttctttcaggacactttacttcggccgaagacttaaacctgttgattgccaaaaacacgagattagagatctatgtggtcaccgccgaggggcttcggcccgtcaaagaggtgggcatgtatgggaagattgcggtcatggagcttttcaggcccaaggtaagtgttgcagttgggacaagcagtggagggggaactgttggtcgtaggttgttttatgttatttttgtttgtttatttattttctttgagacgggggtctcacagtgttgcccaggatgt

SEQ ID NO: 20987 - DNA, 807 bp, Artificial sequence
  DNA replication origin
gagaccctataagaagagcagggcagggaagaagggcagggcagggaagaagggcagggcagggcaggggggaagggaagagggaagggaagggaagggaagagggaagggaaaagggaagggaagagaaggggagggaagggaaaagggaagggaagagaaggggagggaagggaagaggggagggaagggaagggaagggaagggaagggaagagagccaagaagaggagagaggagagggaagaggggaaggaaggggaggggaggggaggggagggaagggaagggaagggaagggtagggaagggaagggaagggaaggggagaaggaaaggagagaggagaggagaaagacaaatcatggactgagtagaaatatttccaaacacatgtgcaaaggactggtatgtaagatatacacagaacaaccacagctggacgcagtggctcgcacctgtgatcccagcactttgggagacagaggcaggcagactgcttgagctctaggggtttgagaccagtctgggcaacatggcaaaacctggtgatatggtttgaatttgtgtccccacccaaatctcctgttgaattgtaatccccagtgttggaggaagtgattggatcatgggggtggatttcccccttgctattcttgtgatagtgagttctcatgagatctggttgtttaaaggtatgtagcacctcctccttcactggccatgtaagacgtgcctgcttccccttcactttctgccctgatggtaagtttcctgaggcctcccaagccatgcttcctgtacagctt

SEQ ID NO: 20988 - DNA, 1772 bp, Artificial sequence
  DNA replication origin
gctgggcagccgccgcaaccgccgcccgctcagctccagctgctggtcgccgctgcgcagctgctcctctgcgtccgacggcagctcatccggcgtggactcggcgatgcccatggtcacgggccccggccggggccgccgccactgccaccgccaggcatcgccccgccccggccgccccccagccgccccgacggtgccggagccgcgccggcccccgggccccccgccccggccttcccccgcgccgggaggggggccgtgcggggccgggaggaggcacccacttggggcaccgccgccgcgcgccgcgctccaccgcccgccctcgggcctcccccgttgcctccgccggaggccgactggctagggttcgcgctgactcgcagcttagcgacccgtcgccctggcaaccccgacgcgcgtgcggctgccaatgaggcggagggagggcggggcggggcggggccaaggcgccaccctagtggggtcccagcgccggagcccgccccctacctgcccatccagcccaccgcggagcaagcacaagccgagagattccccgccccggccaagcctggcactgagacccgacgcccgacgctgtttggtgtgcggttgtgtgcgccccagagccgcgggtccaagaaggcgaaggaaacgctggcggtggatcaaagactctggactagaggctcacaaggaggggctgaggggcgcggtcactgcgagccattcacgtccagcggcgtgcggccggcctacctgctgggatcacttcagtgtagtaactcgaaacagtgttactgtccggcccttttcacatctgctggttttaccgggccccagggcttggctccgccccgcctaattgccctacagcttcctcattgctacactcacacccctctctcctgccaggatccctccaccgacgctcaaagtctgtgtgtggctgcggtggacagaggactgggacacgtgaacgcctttgagccaccaatcatggccactctcattccatgactcttcttccttcgcctgctaccaccagcagcagttcccccctgccttctccccccacctcccatccggagccctcctgcgggagctcctggcagaaaagcactggctgtcactggcttcgagcccacgtgtgcccagcactatgctgaaagcattgcgttgagtccttggcacagcctatgaggtagacaccctcatcaccccgattttaaagatggagaaactgagggtcaaagagacatgacttgagctgggtcagtctgagctgagtgaagtgcccaaggtcacccagctgatgagcagctggattcgaagccaggtagtgtgactccagagcctgtgttcctaaccataaaccataccgatagatggaaacaaggttcactccacctccagcaatgaattttctcacaacagagcctctgattctctggacaaagctacaaagacagcactataatcccacatgaaagatgagagaagtggcctcgcggggattaggcaccctgcttacggtcacacaatgcatagaggttgcagcccgggagccaaattttcgggctccaagcctcctgcctcctgccttctcttgaacccggctggtgtgacccatgtaactggctgagtggactgacttcaggagagcacgctgccctttggcccacccccattgccatccccactgcaggggaagggggatggaagacagcccaagggcagagagcagttgccaatgcaacgggagg

SEQ ID NO: 20989 - DNA, 2063 bp, Artificial sequence
  DNA replication origin
gtattttccctatgctgtgatacaagtggcaggtcaagaggagagtccccagtcagctgcagctcctaccccacctgagtgatcttctctcaaattactttctccaagtttccagacccctgaaaggcccactggccctgatggaaccccaacagggggaactctgggagggacaaggtctacagcagccaggccccagaccctcttcctccttgggaaggtggcagtctccaatcttccccacccaccacctctttctgtccgttcaaggccttcactctcatttgcaagctgacagccccagacccatgcccagcctcctccttagccagggcccagcccagtgtgccagcagagctgctgggcagggcctgaccttctggccccatatgcccctgttgccatggtgatgaagatctggcaggatcttctccggggagatgggcctccaggcttgggttttacaactttcttcctttctttaaatcgttaatttattattttcctgaacaacaaggggagaaagaaatgccaaaactgagcaaaaagagactaagaaggagagagacagaaagaggaaaatagagcgagagagacggagggaggcgagtctagagtcatggagggggtggaggggcagtgccagtgaaagagtagggaaccatcggcccagctcgagggtgactcaaaaacatacaaaatcttctgcagaattaagctgcgggattccgcaagacaggagagcagcctcgagggacaaaagccacttctgacgacagcacttgttccccagacagacagcacaccacagttggcagggtcggtctgacatggagcggggagcacgtggggcgggggcagtgccagagggagcccagggtccccacagcagtgggttccggtgctcccagggattataaataaacaggcacatgggaaatgcacattctttctccaagaaatataatttacgtttacagccagttgttttttcttctctctaaagaaaacattaccatgtggggccgctgccccaacagtgtccctgagtgtccttggccctggctccctcgtcccgttattgcttggatgaggaagatctggctctgggaattgcagagcaaggcccctctcctcaccccctcggggctgtccctggtgacggagtggaggtacagagtgccagtcccatgccagccaccctggctgtgcccatttaagggaaaggagagtgcaggccgtgggagaggcgctgagcagcctcccagagcagagagcccctctctgcggtgcaggaggccctggaggcacggtggcttcttttcaaacttgacagctggaaggctcaggctatggggtggggagtggagggggagctctctcttcccagcaaggttccaggcacatgctgggaggctgggagaagagaacagaatagggtgggggtgaccccctgccttctgtgccccataccaatctcagggggccgaggagggaggtatgtacgatcagccctgatggaggggtgagggcagcttcggtgttggggcccccatctatttcccacttctgtcccgggcaccagccccactccaagcccctgctcctgggccaggccctcctcgcaagggcagtcctgccccacacaggcacgcagtccatcccagaggtagcggctcctgtcctagaaagggtgggcctaggagacccaaaccccagaaagagggagggtgttgggtgccctgcatccagactcagggagacgtgacaattctgtggccctcagagaccctggttccaggaggaagctggtgcctctgttatcagtggctccatcggggactggacccagcccagacttcttggtctgacaattgcccacagatcagccagggtatagtcagtcctcttactacctaggagtgtctgaagatgagccccagccctgcctgtgcccggcaactcgccaaaagtagccgttccattgacctaagtagggacccaccagtcccgcaggcctaaccagccaaagcttcctagagcccctcctctcagagtggctg

SEQ ID NO: 20990 - DNA, 1681 bp, Artificial sequence
  DNA replication origin
gctgtcattagtgagctcaggtctcctccctctgtctgatctgtttccctgtacctcctcccctgctgctctcacctgaggactctaggttggggcaaagtcctggcaatgagtcccccgggccatcctgaggcactcagggccttacccttttgctttgtcaaacgtggcacccgcagccatgactgcttgccagctgagcaggcgctcccccagggaatgggaatgggctctgtccctggccctgctactcacttgctctccaccctcagaagccagtcccttctggaaagtttgagtttggctaaattgggtgctgatgctacagagcacgattgagggtctctgtctccatgtgagtagggagggagctaactgccagggaaaactgggtgtcacggctcccctcggtgatggagatagcactgtattaggagtcctagcattcccccacccacaacttcctgtgattcccacttggcctctggggagtagggggcaggggagactggaagggacgcttgtaacaatgggacgggatggatgggctgcctctgcggttccccacatcgtcctggggcagtcagaggtgggcaggccatgggggaatagggcagggaagttctgcaagagtcatgtttgtaccagggattcaggggcagaggccaagggcgctggtggtcagagcaagaagcttccttcctactgtgggaaccaagtggagggaaaggcagaggaggcggcagggcaagaaacagggttggggggggtgtgggcgcgagtgactcacccgtaagcggtgtgaggactcccaacccagtgctcactgtgtcacagaagagctgcttggtccctggctggcagtcaggtctgtgagtggaatggaatggctgagaactgcgcctgttcttgaggcccccgcccccaccagcctccaggcaagcagccctgctggccagtgtggcagcagagacccaggcctggagccttttctaaccttgtgaatgccattcctcacccccttcccacccaccctcatgggactcaggaaagtgggagaacaggttcttggagctgggggccctacccagaagtccctccctgcctcccatgccaccacactggcttactcagccatctgtcccaaagcttccccaagacacctggcgatcttgttctgaagatgaacgtttattagcacacctgggcgtgccacatggaacatgtatgcagacagggatccctgcccagggggctcacaatctacacaagacacgacacatacacgcaggacacagacacggggagcggggcgtcttcacgggaaacagatggtctggggagccacgagctggggcatcggcgtgctcaaggcttgtccttctggttgtctttgcgtgggagggagaggagcgcaggacgtaacccaggacagccttccagaaagcagcagtatccagggggggactcacaggagaaagaaaacaccagagggcggtggtcccaggtacagggaggggtgggggagcatctcagagcaggcatggacgaagacagacccagagaagcaaaaatggaggaaggcaaaaagtccagggaagggcccgagccagtggcaagggactgccccctgtgctgggcctgagctgtctctgacttcaggctcagttttccagggctg

SEQ ID NO: 20991 - DNA, 998 bp, Artificial sequence
  DNA replication origin
gacaacctggccctgcctctacaacacggaaacgcccactccacccagcgacacgcgggcgcccctcccagagggccatggcacacatggacatgtggacacgcacgcaccacatacacacacacacacacacgagaggacacgtgctcacacgggcaggcagggggaaggaaaggagcccgaaacagctggagaggtaaagtcaggttagaaacagagtggaagagcagggagagtgtgagattgactgctgaagatatgagaacgttagagttatttggccacgctgcagcgtcggcacagctgccaagcagcctgggaaagatagtcagcgccactgaagctgtcggaggtcacaggacagagagacagaggtgagaggcacagagagaggcagagggagaggccgaggggcccatcaccggcccagggcagccctgtgaggagcagatgggagaaaggagacagaaggagagagaggccaagaaagttagtcagagacgggcgaaggctgccgggtggacgaggggacagggaggagcgtgcggccaacaggagaggcagagaggaggcgggggacacacaccgtgacagaggaacatggtggcttcagagtagggagagcaatgggggtggcctggtccccgccttgccctgtcccccacttggggtgggggtgggccgcggtggaaaccatttggatcccaaagagcagtggtgaaacgatggcagacagcatgagggggtggacacgagcagagtggctgagggtggaatgggcgcagcagggcgtggagccagggcctccctccctcccgggagcgcagtctgaagtgtggtgccgaggcccaggagctgaaggatcccagatgggggacttcagggacaccaagaatcgtggggacagaggcagtgactggccctcccatctcccgctgcttgttggacacactcccacgctgcttggaacctggaatggccactcctcctcccgggac

SEQ ID NO: 20992 - DNA, 1002 bp, Artificial sequence
  DNA replication origin
gccccggctgctggacgaggtggtggtgccttcagcggatgctggagcggaaggacaagccccctccccagccggtgccctcacgcactgccacctcggtggtgtccctggggtctgaggccacttgcggccatcctgggaccattctggatcaggcctgctctctggcatgcttgccccggcccggagcaagcgcagccttttctgccccatcttcctgcttggctcctctctgctgcccctccatctttcatctctgtccccaccccaactggaaatccctgtttctctggtggttggtgggcgggggggatgtaagggaaggggcgccagcccgttctccctcatccccaccccctcaacctccctcttgcctggaggtcctgttgggctgcttggctgatggaagaggagcccatggtgggagggtctggggcatgggagaggcctggtgaccagaaataaccagaaggctctcccctgagcccgggcaccaggagggagctggggagggcccggagcggtgcaggcagccgtcctgagcaagggtgaggcctggctttgttgggctccttttcactgcggctggcctcgggaccctgtggagactgggcatagcctgtgtggccacagcacaggccaagcagaaggctggtcacttaaactgccacagcctcagctatcaggaattcagggaagcatctcctactgtctccgtctcagggagggggtggggcgctgctcatgggcaaggggtagggtgggaggtcccagggttcaggcggcatcccacagctggggccagtggatgcctgaccttaggttgggttgaccacacctgtggtttccaggatgaattagcctttgggaatcatgggaggagggcttgtcaccttgattgggtctgcttcccatcagaccaaaggcctgcaagggagcatggggcctggcagcccagacatctgccttccagctctggttctgccagagcctcattctgca

SEQ ID NO: 20993 - DNA, 1424 bp, Artificial sequence
  DNA replication origin
ccgaggtggcagtgcgtgagggcaccggctggggagggggcttgtccttccgctccagcatccgctgaaggcaccaccacctcgtccagcagccggggccggtcgaggcaggcggcctctccgcgcctccttctctgccgccgccgccgcaggccctcgcctgtgctcgtacctcttgtccccctgagcgttctggttctgctgggttcctgggttttgcaggtcagggatattggcaaagtcatcctgttccgaaagccctaagaccaaggatagcaccaccatccggccttccctgcccggggagggcagcccacaggccagggtgaaacgaggaggccccgtgggcgggggcaggggggaaggagagagagggagagagagagagagagagagagagagagagagagagagagaaagagagagagagagacagagacaaagagagagaagaaaaaagtgtaagaaactggccctgcaggaaagaaaacaaacttcagcagtgtcaacagttgcaggatagagtggggagagtggaggcagggagggaggggagttgactacggcctgagactccactggtctgagccaagagcaagattctccagagctaaactgcaaggggctgggcagaggcctgcagaggtggcctgtggctgggacagtcccaagggaacacgggggatagggtggggggaatggagcacaggccctgggaccccacagatttccaactgctaatgcatgcccagctggactcgctctgaccatctgggccactgggagaagagggaggggctccgtcactatcctgcaccggcaccgcgcaggctttgaaagtttcgaaatccagtgggcgctgcaccctgtccttatggaagcccttcatagacaacgctgtgtcatggtcaaccagatgtccttgaagccaggtagggtctaaggagctacctccccttggctcctggatatacaagcccatcagaggagaatgaaagtcctttgtggtatatggcaactcggccatagtggctgtctcctgtgtcctccttgctggagatccagggaatgagcaccaccgctgagtccaggtcaagggcctttcattggagaagaggtccagaaggcaccacaagccaaggcggcgagaaagtgcaggaacttggcaaggtctggagaagttttggcaggactgcagggagcctgtgcctgcagtgagagatcgtgctttgagggagcacagtcaaggctgaacggggagggggtaggcaagaaggcgagactctcttggagtggacatgtgggcagccgtatgaggccaggtgtgacacctttagtagggggcattctcagagaaccatcgggcaacttgccagggtctttgcgaggttacccgcatttgccagggggggagaagggagaat

SEQ ID NO: 20994 - DNA, 2343 bp, Artificial sequence
  DNA replication origin
gctggagatccagggaatgagcaccaccgctgagtccaggtcaagggcctttcattggagaagaggtccagaaggcaccacaagccaaggcggcgagaaagtgcaggaacttggcaaggtctggagaagttttggcaggactgcagggagcctgtgcctgcagtgagagatcgtgctttgagggagcacagtcaaggctgaacggggagggggtaggcaagaaggcgagactctcttggagtggacatgtgggcagccgtatgaggccaggtgtgacacctttagtagggggcattctcagagaaccatcgggcaacttgccagggtctttgcgaggttacccgcatttgccagggggggagaagggagaatcattggcgaccctgctgtccctgaagaccatcagagtccgcgagcgttttctgggtgctttgtggagcttctccagcgttgggcctctcatcagaacaaaaggagagggaggggttcttggacaggccaggcaggaaagctcgtctcaagaagggccaaagggaagacagtagggctgacggaatattctggaagggagaggatgctgggtcaggaagtctaccacttcaaccactgtgaagggaggcgaggtttacagaggaagagcttgctctaacttctcagagcagttgtcaaacagggaacaaacaggcgagaaatagcctctgaggtgaggggcgagggcacgagggtcttggaaaatgggacattacctctggggtctcagtgaacggagggagctaagtggctgctgtgcccctccctgtctttgcgtctttggtcctgggcacagttactccaggctgacccttgtgctgggatctaactttcgggaaacaactctataccctccctcaggacgaatcctccttttctttgttttctgcccaccggtactgtttcagagttggtaaaattccatttggctgctcgggagctagttgtgctgggggaaggcaaactcagtgaaaacaacatgttttttccccagttaatgcatttttcagatattcctttttctcttcttaaaaccagaacagctcctctgcataaattcccgattcgtcactctctccagctctgcaggacgcgagggttaggatgaggggcacgggctggagagtggagggagaggctggcaatgttaggggagtcacgaccatcaagcagagggctgctgccctccctgcaaggggtgggtgggatcatggggcgtcgggacaaccctcgccacctgcctctctactggagccaccagcgtttgggcaagtaaagagcctcagaaacagggcagctaaattgtaaagcaaggggcaaattacggcccacgagctaagagtggtttttacatttttagagggttgttttaaagaaaaaaagaatatgtgatgatcacatgcctcttgcaaagcctaaattattatctggacctttctaggaaaagttggccgacccttgaggtgagctctggaggttgccagcaactagggggacatgagacttgtcctggggcacagagcagggacagaggatgctgttgcatgcatgatgctggacgaatcccagttagttgagaaggcagcaggcagggaagagatggtacccgggttcctggcaggcccctggcccagtttaatggctgctggaacaggaagtagggtgacagctgtgataagacagtctgaggtggggaggagcaaggacgtgcaggggcccagcaggctctcagtcctgttcaagccacgcagacccaattccctcgactctccaagatccacgcctggatcacagcctctgtcccaaaacaaaccgccacctggaagaccggaggctcttctgggcatctcatcttgtgcaggcgtccagttagattcctgcaggtccttgagtggggtagagccccagagaatatggtgtcctgatttgccaaagagtcacaggcagcatgtcttgctggccatgggccactcgcacgggtatgggaagctggcatggcagggcctcttcgggtggggtgtctctcccagggcagtgctcccatctgcccgggaagccctggctgaggtctcagaggagagacaggatgctccgaggaacttgcttgccttcagaatccctatatcttgccaatgcttccctttcctcctccctttctcctcgcccaggcttagtgtgctggtctcctgctccgtgaaaagtgctcccagggaagacctgggcgatgggaacaatccccagggcctggaaggaagctcacgttagggcaaaggaggggggtgatgttggggatggcagcccagacctgtctta

SEQ ID NO: 20995 - DNA, 1289 bp, Artificial sequence
  DNA replication origin
tgccaaagagtcacaggcagcatgtcttgctggccatgggccactcgcacgggtatgggaagctggcatggcagggcctcttcgggtggggtgtctctcccagggcagtgctcccatctgcccgggaagccctggctgaggtctcagaggagagacaggatgctccgaggaacttgcttgccttcagaatccctatatcttgccaatgcttccctttcctcctccctttctcctcgcccaggcttagtgtgctggtctcctgctccgtgaaaagtgctcccagggaagacctgggcgatgggaacaatccccagggcctggaaggaagctcacgttagggcaaaggaggggggtgatgttggggatggcagcccagacctgtcttaggctctgagagtggggggcagatgtccagagagatgctggggagggggcttcctgggtggggcccctccagggagagcagggggtgggcgaatggctggtgggaatggttaaggttagacactgatggtgtgttgttacttcttagacctatatacttgaaagaaagctccaatttagaaacaaccttttctaaagctttggggcaacatctcagatttgtcctcaggggatgggtcattactggaggaaggagacttgggaagtcagggcgggagctggaggacaggtggctatagaaggtcagagagatgggggagggctggtggcagggacagggatagaggaagtgagagggagggagggaggggtgtgggccaagaaggctagcagagtcgggttacaggggagaagtaaattgcaggggaggaggcagggctggagatgagtaaaagggatgggttttggagcagaagggggaggagagaggtcgcaggagtgaaggaagactggccaagaggccaagagcagcctgggactagctggggagaagagatgtatctcagggcattgtccagtgtctccaccttttagggggaacttccctgagccctagagcactgaggggcaggggtcctcatagggaggtggctgagaattcttccgtggtggccttcaggcaggagccacaagaggctaaggagggggctgccaagtctgcttggcaccctgccaaggggatggagggccgggaggtacacacaaccagctgctcccaaggagatctggggggcaggaggctgggtcagggaggtgggggccggcccgctcaaggggaggacttacaggaaggatttcatgtccaagcctcggtttcgaatctgccccaccacgtggtcccagct

SEQ ID NO: 20996 - DNA, 746 bp, Artificial sequence
  DNA replication origin
aggggcaggggtcctcatagggaggtggctgagaattcttccgtggtggccttcaggcaggagccacaagaggctaaggagggggctgccaagtctgcttggcaccctgccaaggggatggagggccgggaggtacacacaaccagctgctcccaaggagatctggggggcaggaggctgggtcagggaggtgggggccggcccgctcaaggggaggacttacaggaaggatttcatgtccaagcctcggtttcgaatctgccccaccacgtggtcccagctgcctgggttggagcggctgcggccccctgccgcccggtacttggagccggccgaggtgccctgccgagcctggccccggccataggcccgggggttggggcctggtgccgaggccatgtgggcctgcagctggcccaggctctggctggtggtgggctggctgggctgccggccccgctggtgctggctcagcggctgttgcaggctctgctgccgcatcagggtgcggggtcgctggcatttcggctctcccgtggagctggggatagactcaagggtagtggccgtggacagggtggagtcctcgaaacttggggcaggtggaggagaggagagaaaggagaagcagatgaagggatcacagtggaagagaaagaagccgagggccaggactaggaggccccagtgcagggtgcgcgctgccggacctcgccaggcctccatcggagctgtcgccaccgccg

SEQ ID NO: 20997 - DNA, 1581 bp, Artificial sequence
  DNA replication origin
agctacgttttgctttcttctctttctttccctctctctttactatactctttctctccctctttcactctctctttttctttctctctctcagcccacaggggtagcctaactgttgtcttttggttcccagggtaggctcagagggtgagcaaagctgaggtctggttgcggtggtgaaggtggctcccaagggctctggggcctcctcccttgggcagcccaggggatacttggctgccccatggccctagaccagaggtcagcaaagttactcagtaaaaggccacttgggaaatatttaggctttataagccatatactctcttgcacaatgactcaaccctgccattgtggaatgaaagcagccagagtcactatgtaaactaatgccaatggcttggttccaataaaactttatttacagagacaagcagcaggctagatgtggcccacaggcaatggcttcccaacccctccccaagaccactggattgagaggtggagggaagggacagaggaggagaagattggaacccctgaagttccaagatgagaaatgattcacccaaagctgctcattcagcccagtctctggctccgctctggtgcctgggggcagcctggctctggccctgcctgtgggatatggtgaaatctccagccagcgcatgaagcagacaggttctccaggggaggccagggacttctgactccaaccactggcatggggagcttttaccaatacagcattttcaacacagcccaacctcattagatcctcatggcaattctgtgacagaggaagctcggggattattttattactcccatttcatagatgaagaaactgaggcccagagaggtggagtcacttttccagagtcccatatttagtaagtggcagaggtggggtttgaacccaggtctctctgaggctatactgcatctgaccagccatgtcctagttcctctctgtccttgccccacttcccagtgcatttcagagattactgatgggcctttgggagagcatccccttgcagatgcatcaaagacagtcaccctgttctctgttagaactgcggtgaagtgtcggatgaggggatactgggttccaccctgtgtgcactctttcttggtccagtcctctgactgggagatatttccaaggtcccaggagaggatgctggaccttggaaacaaagaaccctgaaaagagggcaaagatccacgccagaccctgaattctaaggctgtgctggccacagggtggaggtctgccgcttccttgcctctgtggacaaagtataagaactgatggcttccccggcctccccaggattactaggccagctctgcactggcctggatttcttcctgtctccaaaggatgccagtacttagaacacagaggcagactttcctggtgtcccccagcgaaatagcgggaggggccacagcagctccctctacccctcccactccaacatgacaggcagctgcagggcccaggggacctgccttcaccacgcagcctcagcagcactcgcagcccactcagaccggcagggaggtcgg

SEQ ID NO: 20998 - DNA, 2193 bp, Artificial sequence
  DNA replication origin
caccgctgcccggctcgctgggggcagccccgccgcttctcaaggcgtcctctccgggtggcggcaccggtgccggcttctcccccagccggccttcccgctccaccgccagccccgccgcggcggccactttggcgcccgacaggagggtgccactggaggcatgcacgaggcagccaggccagaggggcaccgggggtggcggtgggggagagagggcaggccatacgtgggggtcggggggtggaagaggaagaaaaacaataacagataaaaggaagaaagagacagtgagagaggaggaggagagagacagacggacatgagacagacagagagagagagagagacatcagcactgcaaatgggttaacagcggagcctgcagaggagagagggggaccgggcgggctgggggtcggagaacaacgcaccacgacaacggagggggggcccctccccaccgcctggggcaggggcggcgggggttgggggagggcagccacctccaactctatcccacaggacaacgaagggttaacgacggaggaagagcgggctgtccaggccaggaggccccaaggcagggagaaagagaaagccgtgttagtcagagttcatcaccaccaccaccaccatcaccgccaccaccgccacgaaccaccgaccaccgaccaccgaccaccgagcagccacggcagcacacagcggggaggaagaagcgaccacaaccgagggggcgggacccaaacgggcaaccccatcctgactgcacagaaggtggggtgggccccgggaccagctgggggggccaggtatggctgccgagggggctctcctgcaaggctggccctgggggaggggacgggagcgggcaggcaggtgggttggggcaggtggggttgctcgtctccatggtcggcctgcccatggggtggatgggtggggaagttgggggacaggagcgagaggagagagggagtgagcgggtccagaggtgggtgggggcaggaggagggaaggagggcgtgcgcggatactcggtacatatgatcaaaccaggtaaagtcactcacttgagggacagtcgtgggtcgccataaggggcgtagggtgaaatgtttagaataaactccttgggagggtaggagctccatttctgctgcactgtgctctcattgttattccaaaagtctctgtctagatcactggaggggcagagagagaggggagaaaacagggagatacaagaagaaacaagaactgcaagtcctgcgggggcagaagggaccaggaccccggggccgggcacacagtgggcggggcttcgtgggtcagctcctgcgggaggaagaaaggcaggcgggcaccgcagtctgtgcctggcacacgcacgcatacacgcacacgcacacatgtgcaaacataccaatgcacacacgcacgcactcgagggccgggaagccacacagaaaggaggcaagcggcaggcggcagactggagcctcgcacctgggaagctggtgggagagagaaaatgatgagaggagggggacagaggggagaagggttggggatgaggcctggggtgagcagggggagtgggagaaggagagtgctggtttctggctagatggagctgaaaggcagatcaggcccaggtgccaacttgctgggccctacctctcctggcctcagtttccctgcctgtcaaaggagaagactggctgtaactgctatactatcaactctctcactgcagaataaaagctctagtactggagaactcaaggttctctcctcttccaccttctccccactgaggccctcctggggcaggcccagccccttgcccatctttctcctcctcctcccactggcctgaggggctctctggcttcctctgctctctcttctactccatgaggctgggctgcagccttaacctaagactgggggatctcagctgagctggagaccatctctactccttgcaaatgtggcagctgggtcaccccactcccctgaaaggggagcattcctgggcctctgaccttgctgaggatgtcactaaggtaaccagggggcccctcggtcctttgttctggggcctgtgtagcgggaacctgtccttctctgggtgtgtccctggcctgcctgctggtgcagcccctccctgggtccctgtccctt

SEQ ID NO: 20999 - DNA, 943 bp, Artificial sequence
  DNA replication origin
ctgtccctcggggcagagggcctgaccactcagcagcttcgggggcaggctaggattgtgagtgcgggggctgcaggaccacacagaggcaggctggacggccgctgctgcctcactttgtcttagagagccctcatgggcactggtcccagcctggcacagcctgctgcccgccctccccctggttgggaatcctgtctcctcttgtgggccctttccaggactctgggccctgccacacgcacccctatccaggaaggttatgatcacctggcagaggcaggcccccagccctggcccgcggctgtaaacggcctgtcctggaggaggcacaggtgctgggctggccacgctcccccacgtgctccctcgccttcagaaagcccgggcctgcactctgcaagagcccctgggccctgccagcacttggctttgaagaccggagtctgggcaaccaacctagcttcaaagtctcccacagcctcctcctgagcctcccgccctcccctagcctcagcctggcccacgcctcctcttgccccaccccagacacatgcacacagcttctaccaaggccccaaacaggatcagtgcaagagatgaataaaatggggcagaagaggacctgggagggagccctcaggagcggggtggagggtgggggaggagtggagaagagaaggtggagaaataggaaagggaagggaacggaaggggaaagacacacaggggaaggcaggggagaccagcagcgggcaggggccagagggcagggggagggtggctgggccttcagagggaggaagagtggaggtagggagggatggggcgctcggcttctaggcagagccctttggctggcaggcttggtccaggccaggctgagatgtggggttaccacccctaccttgacctctgggctcagcaaagaggaaggggctgg

SEQ ID NO: 21000 - DNA, 881 bp, Artificial sequence
  DNA replication origin
ggcttggtccaggccaggctgagatgtggggttaccacccctaccttgacctctgggctcagcaaagaggaaggggctggggccactggccagtgggcacagaggcctcccccccagcaaaagcctccatttccagagcccaggtggcctgagtcccccgccaggtgggtgggggacttctcttggtgtctcccagtgacctcagcagagggctggccaaggtggtctgcagtgggagggcagactccttgaagagggctctacggcagaacaaggagacctgggtgaggcagagacagccagacacacagcggccggtggggttgacggggagggagggactgctccccagcgctctgctccccgagtggcccagacacaggtgtgtctgcctccccacttccaggtcatcctcaaacactggcaggatctgagaaaagaagctggggcccactagggaggggcctccccggcctagcagcaggggccccatgagaggggcttggaggtccagggaagccggcgggtggtgggcacagtgtgtgtgataggagggtgggatgagaaagcggcaaccagggttgaggtgggcgcagaaggtgctggcggtgagggcagcggaaacggaggccagggactccggagcactacgaggggcttgggcacaggcagaaaagacggggcccctgagtttttgggggtgtgtggagggtgtagagagcatggcatcggggtgtgggggaagtgaaagtgtgtggtcaggtctgtggggctgggggagagaaggggctcctcccacctgggctgcttgtgtggccccatcccaaactagcagcctggcacctacttgatagccttcttctcactgcgcccacgccctg

SEQ ID NO: 21001 - DNA, 1464 bp, Artificial sequence
  DNA replication origin
cacacacacgccctgcctcccgcataaagcaccgcaggcacacacgcgcagactgagaatagagcccccactctaagcaccgcgccccctcccctctgcccgctcccctccatgggcgtggctgagccggtggccaatgcggaggcgccgcccgccccacccccgcacatccatcctggctcttgggtttgtacaagcacaaacggctccttttcatttttaacgagggctggggaattaacgagcaggattagtccatcaataagtaaagagaccgtcaggagggacattcatcccctgagggcgccggtagggggagcggggctgagccgcccgccccgcatcgcgccgccccgcccagcccgcagcccacagctccccgagccgctgctccgcaagacctccactcccgtccccactcctgccgcccggcccagaagtgtggtgggactttgggggcagcagggggcgaggggggcgacggtgggcccgggggtgtccgaggtgctacgcctttggcggagtcaggtgaaggagggtcactagcaagcatcccccatctccccgggccgagaatggtgggagtgggagcagggcaccacctctgggaaccccattctcttcctgcgcagccaaaggggggccttaaggacaaggggggagcactgtggctgtgggcactgggtgggtagaggcttcatgccccactcctctggaggaagaaaaggggcagatacccctgggaaaaggttttggggtcttgtgagagacctgcgggaaagacctgagagtcccagaacccaacatgcctccttcaagaaaggcaaactgaggacttgggagcatgcggctccatcctgggtgttgaacttcaggcagctccgacccctggggaggagccatagtggaggccagctctgctccctgtgcgagtgtgtgtgcatgtgtgcaagtgtgtgcatgacccgatccccctctgcctgcagatgtgtggaaccgggctggctgccctgctttgttcctgggtcccctgtgtctgcgtctgtctcagaatttcaggaaaggtggtggaggaggctgggccatgtgcctctgtgtgtgagtgtcctcggaggctgggggagtggctgagcgtacctgcagcccggagcatcttgttgcagggccccttaggctgtcttgctgtctgtctggatttgaaggctagggaagaaggctgcatgagcaggcgctgatggcgaccttgtgtgtgtgttccatgtggagtctgtgctgaatgtgttgactttgagggtattggtgcactgtgtgtgtgtgtctgtgtgtgtgtgtctgtctgtctgtctgtgcgtgtccgttcacccctcagtggtgggatgtgcatcaactcatcagatccctgtgtgagtcaatgctggggtctgccccaccctcctggcctcctctgcatatgtgctgcagtgt

SEQ ID NO: 21002 - DNA, 1108 bp, Artificial sequence
  DNA replication origin
ctgctcccactcccaccattctcggcccggggagatgggggatgcttgctagtgaccctccttcacctgactccgccaaaggcgtagcacctcggacacccccgggcccaccgtcgcccccctcgccccctgctgcccccaaagtcccaccacacttctgggccgggcggcaggagtggggacgggagtggaggtcttgcggagcagcggctcggggagctgtgggctgcgggctgggcggggcggcgcgatgcggggcgggcggctcagccccgctccccctaccggcgccctcaggggatgaatgtccctcctgacggtctctttacttattgatggactaatcctgctcgttaattccccagccctcgttaaaaatgaaaaggagccgtttgtgcttgtacaaacccaagagccaggatggatgtgcgggggtggggcgggcggcgcctccgcattggccaccggctcagccacgcccatggaggggagcgggcagaggggagggggcgcggtgcttagagtgggggctctattctcagtctgcgcgtgtgtgcctgcggtgctttatgcgggaggcagggcgtgtgtgtgtgtgtgcgcgtgtgtgtagctgctcgcgtgcgaatgcctgtgagtcctaagtctgtccccgaatgtgtccctagatgcatggctttgggtatataaacagaagtatagggctgagacccgggtaaacgcagggtgtgcatgcatgcatgcgtatgcacgcggtctgaatttctatggaagtgcccctgactatgcggacaggtgagtcacctgtgtgcacccttgggaaaattcccaagcctgtaattgtgtgtgtgtgtggggagggggggcagtgtgcagggctaggcaccaccctccaaggggccctcaggagcctcaccagtttgcgctgacaccagtggcagaggccgcagaggacgacagtgacgctaaggctgacggtgatgatggcagagaccagcaggacgtcgcgcgagggcgcccctggggaggacaggtacaggtcacaccctcattggccagggcctgccaccctccctcagcccagagccctccagaaccaccaccctac

SEQ ID NO: 21003 - DNA, 1016 bp, Artificial sequence
  DNA replication origin
gggagaggtgtggagcctctgccctgggggaggcctttgtgttcatcttggcgggactggccctgccacagaggaaaggttggtgtttgtttaaacaagccttccccacccaccttggaggagggagcaggaagttttgcctgccccaggtctggccagctgggttgaggctgcactgtgacccaggcagccccaaagcggccaggatgcagtcagacaggctggagtgtgcgggtgtcgggcaacgccgcaagctctgagcgccagattgccccgggagcggtgagggggcggcgggggccggagaaccgtctgccgctgcttcgccgctggcccaggccgccgctggggaccgtctgtgcgcccgccggggtgcagtgcccgcgccagccaccaggaggcagtgcggcgggcccccgggagggaatggggcgtggtatttaccacgttcgcggggcggccctttttgtcctgagtcaggactggggtcttcagcatccgaggacctaactcgaggaaagggggctcttgaggtcactgggtgctgccatagcttcagctgagggttgatcagggaggcattggcagaggaaggcggaatcactatgcacagtctctcggatcctgctcgctgggagctgcgcaaagggcgacctggaagagggcgcagccccaggactgagttctgtttcagcaccaaggacaaggagccgcgtggccgacagctgtttcagcaccttggacagctctggggggcggggcgctcaatggctccatcctaatatttgccgtgtaaatgatacccctgaatatgatagaacggcatctcgtagagggaatcttagaccctgcattccagccaggaggcttaggaccagagagttgagtgagtagcctgaggtcacacaactggaagtgacagaacaggattcagatccgcagtggtctctctatccatttctcccgcccctggattcccactagttatctctgtcctgaaacctttctgggagctt

SEQ ID NO: 21004 - DNA, 999 bp, Artificial sequence
  DNA replication origin
gggatggccctgttctgattttgtaggagagcaaagtatggctccaaggaataaatggcttgccccaagtcacacagtgagctgtggaaccagaactcaggcaaagacggtgggacacccagtccagtgtactcttcccacttccccaaggctggggtgctggggacaagccaggcagggagtcctaggggctttcatctcctgaggggcttcctgaggccatgacctgggctgcttccccactcctactccccggggtccattggttggctcagctttaacttggagtctcggagtctcattctaaatgaatttttttttccaggcaattacctcctgctaattaggaggcagggctgccagtccctcggccctggactgacccttttctcaacccacagagggcaggggggttgtggaggtactgggtagcagctccagccacagaaactgcctgggtcagggttctgtcagggcaggggatgctgatggaggagcaaagagctccacagaactggaagaagggaggcagggatgctggggagggagggactctgaagtgggagagagcaaggggacaaaaagctggaaggagcctgaacatgtccatgcagagtaagtgagagagacctgggctctggggcagcagagggagccaggaggagccagaaaaacagggacacatcgcaggaagaaaggaggaatctcaggagccagagagacaggaaggggtaggaatctcccctctatggagagagaggaagtgagaaggtgccccagaaaacggtcaagattacagaaggggcagaggcagagagacagatactggaagactccaggaaagggaaggggagaggaaggacagggaggaaggaggaattgctgaaggaaaaccccagggagaagggggaggagagcgggggaggacggcttggagtggcagctcccagagccccaagaagggctttctctacgtcattgtccttgagcttcccccaa

SEQ ID NO: 21005 - DNA, 806 bp, Artificial sequence
  DNA replication origin
gtgaagtctgggagggggcagaagggaggctgcaggtctggtctagggaggctggacagagtgtggagctggagcctgggtgtgcatgggagggggctggtctgggttcttcactggactccgattatttcccacagtccttttcttcattcacaatagatcagggaaccaagggcctgggggcctgaggcccaagtagggagagaaccacacctgtcaggtaaggtcctcacagtagctgagcccttagggacctgcatagtaagtgggatgagggagggagtaccacagggatcttctggaaccagcatgaggcaaaggggagcaggagaggacagatttttttttttttaaggattgggccgcaggtgttcctgagagtgggatgagaggatcaggatataaaaggcactggcccctgggagaccagaggggaggggaggggtggcctgagttacacataaatcaatttgcatatctcagtaccaaccagtaccagccaaggggagatggggaggcagaaatgggggacacagagccctggcttggggagctgagtctagggagccttgggggagctggggggaagggaaatctgacctggaactatagagcctacaaaggtgggcagggatgccagagggcagaggccagaatgagatctttgactcctcaaggaccccagatgactaggctcaaaggcagactgtgccctctccagcctatgtctgaccccacccagcccaatgcccacaccggagaggagtcagcctcaggccagcccctttcccagtcacagctgccct

SEQ ID NO: 21006 - DNA, 1563 bp, Artificial sequence
  DNA replication origin
gcggcggcggcggagcagcgcgcggccgcgggcggctctgaggagcccggagggaaccggcgacgaggggaccatgtaccgggacccggaggcggccagcccaggtaagcgcggccccggcgggctggggcgccccgcaccggcgggcaggacagcggcagcgccggacgccgtctcggagccccagcctggggctgttgtccgcccggagccgcacgggctcccccaggggtcatcccagccccgggggcgcgggatcgagcggcagcggctcggaccccggtcccccgcagtctggacactgccaggctggatgtctgggaccggcttcgcagtgtccccacaaggacctctcccccacccctcaacagcccaaggacaacgtgtgtggcggagcgaggagccgctgcccctgtgggagccgggcagtgccctcagaggcacccgaggctccccagcaccggtgccccgggggtgccagcgctggcggaccccagggcgaggatcccggcagctcttggccaaggttgcgggcacaggggagcggagtggcatcgcagtgccaactgtgaattgagagggtgccagggggcaagtgggaatctggtgcggcagctgggcagggaggttctggggggtggggaactgcaggggcgttgatgggtgagacgggggtgcctgaagggaaagagagcaggggctcatgagaatgggggtgccaagagaatgttctcctaggtttggggagggggaagcaaacaaccccaaactctctcccgtcctggggtgggggagggccgaactcctttgccttctgcttcgcccgccaggggagtggcctgggagcccactgtctgcttggtatcctctaagccaaagccgaagaatcttcccgtcttcctcggaaattgctctgccatttcctccttggctcctgatgcctcctcacccagtgcccacctgtaggcaggtcccctgcagctcctgcccaggctccatccccgctcccacctggggtgctccacccagtcccagcacccccagtctgccagttctggcatcagggtctgtttctgggcttctctctgatgctaaaagcacgactccccagcccaggatgtgctcccaaacgaagagcctccaggctccctcctgccagcctcctgggggcggcggtgctgtagggaaggaagggctctaagaccctgcacagaaggagcctgcagccctgaggctcctgaaggcagtccagtgggtgctggctttgcccactgttgccctagccccacatttgctctttcccctctaggggcagcctcagcctgtccctgcctcctgaggaatcggctcccaccccccatcgattcttttcagtccagtcgatattgaggacgacccactgggcgccaggcactgccctcactcagcacttggatatgagggtgagagattcagtctccttctctggaaccttgcgcccttctctgaatgtcctctaggtgagggctgaaggggcattgcctgtggagagccctcccctcatctgtctggacctaggtcacc

SEQ ID NO: 21007 - DNA, 1770 bp, Artificial sequence
  DNA replication origin
gtgtgcccatctgttgtgggagggtgaggggtgccctatttgctctttttttttttgagaccgggctcactctgttgcccgggttggagggcagtggtgcaatcatggctcactgcagcctcaaactactgggtttaagccatcctcccgtcgcagcctcccgagtagctgagaccccaggggcgcaccactacactgggctaattttttttttctttgtagatatggggtctcaccatgttgctcaggctggtctcaactcctgggctcaagtgatcttcccgccccgtcatcccaaagtgctgggcttacaggtgtgagctaccatacccagcccctgtttactctttactagggtaatgagagaggcagctggggtgggtgggggaatgagccaaggttgcagaccttgcagtcccagcctgttggcttagctttctggggtttgccaggtcccaaagcagagtgtagataactcctgggttcttggctgtacttgggtgagtggggggaagacagctgtgaggtgtatggaataggatggcccttccccagagggtgagggctgagatttctggccactgaggaattgtggccttaacctacgatgccttttttccttccatttttatgtagaacattcattcccaggaaatctgctctccactggaacagtcttcatggaggtttgctgggggaacttccttatctttttctcaaccggaaaagctgtaggtggaggtgaatgtgtatgtgtgtatgtgtgtgtgtggtggttgttggggatagcctccatgtgatttcaaggggatggggtctgtttgtgtgtgtgtcggggagacttgagatagagggttgttcctggctgccttccacactgtgggcaggtggaggtgtggctgggcatgagtagtgcagtataaagccagcaaaagtggatttctcagggtggaaataataatccttgactctaggaagcctggctcacctgcaaactgcattctcagcacaggggagggcaggatgctgccacagacccagggattttgccctcttacctgacccatcagtgaagggtaggggcagcacctgtattgtggggagcgtcagtgtatgtgtctctttgtgtgggcagcatgtctgtgtgggtgtgtgtgtggggggcatcatgtctgtgtgtgtgtgtgtgtgtgtgtatgtaggtgattacgtgtgtaggtgtgtgcagggaggtctctgtgcctaccataccactaatggttcatttctgggtttttcttatccttaggagacaggtctcttctcctccctgccccagaatcaaatcatccaaattctgtagagaaatgagtgttcacctgatttagactgtgctgagccggcagagaggcagaggggaccaagagaggtccagggttggaaggagaaggagggatttccttcctaccctccgaagtgctagggtcaaggaatagaggggaggatcagaggaggagctgctgctatagagggatagccagaggctgaaaagtctattttcttctttcgtggggctgggttaggtgaggagggtcactaggccaaacctcctaccgagggcagggatcttagccctttcggctccacctgtgtgcgagcttgcagaaagaccggactggcggacccaggctcagcgctgccaaaaattccactcctggtttttgcacacaccagtccgtctgccccggaccgccgcggtgttgagtccggagctgacgccctcgagccgcc

SEQ ID NO: 21008 - DNA, 1161 bp, Artificial sequence
  DNA replication origin
aggaagtcaaaagtcatcctggggcagactccatctcaggctaacctgctccttctgcaggcatggggagccatcgaaggcccgggggctgagaagccagcagagcaattggatcttgtgtctcagaaaaccacagggaggccgggcgaggtggttcatgcctgtaatcccaacactttgggaggcccaagatgggcggatcatttgggctctagaccagcctggccaagatggcgaaactctgtatttactaaaaacacaaaaattagccaggcatgatggcaggcgcctgtaatcccagctactcaggctcaaggcacgagaatgtcttgagcctgggagatggaggttgcagtgagctgagatcctgccactgcactccagcctgagtgacagagcaagactctgtctcaaaaaaaaaaaaaaaaaaaaaaagaaaagaaagaaaagagaaaagaaaaccacgaggagggagggcactggatggaaaagactgggggaggcaagcgactgggcaggagccaggtgaggcggaggctgatcggcttgagtgtctgacttagggaggtggctcaggagtctgagaacagggtgtgagaggctgggaagagaaaagggtctgaaggatatggacagtaattaggtgtgggggaagagcagtgggaggatttggggaaccgatgtggagcttgagagagtgatggggccttagcagctgtggggtgaccccagggaggtgatgtttcctccacctggtggagaggcttcactaagtacacagctgcggagcttgggagggaggtcagggccccagagacagtgctgggaatggggatgaagcaaaagctgaggccgtgggcgtggatgaggtcacgaagagagtgggtgagaaagaagagggaagagaggacggagccttggggtacgcccaccgttgggaggggtgggagcaggaagagagcaggaaatgaagcagccacggagctgggggtccctcattcttcctcctttccagggcgcccggcctctgcgccccctcacctcccacgggccacatccagctgaggagcaggctctgttgcctgctcagcctccaggagagctccgaggactcgaaggcaggaaagctcaggggttgaaggtttgggttctagacctggt

SEQ ID NO: 21009 - DNA, 1157 bp, Artificial sequence
  DNA replication origin
cctactttccctcttttccttacctggcacatttcattggtggtgagtcctggtctttttccttcctggctccagtcctttccagcctcccctgcccctcattcatggccctagccccggtcctcccaacttgcatcgacctcctccttgggcctcctcctctgcctccaacctggctcccttcccgtccactctcctaagggcagcaaagcgcaagtgtgacgaggtttctctccagctcaaagcccttccatggatccttaactgctcttaggaaaaagctcagattccctgtctggcaggcagggcccttcctgacctaaccagagaggcaaagtcatctttgagagagttctgaggctgagaaaaagctcactaagggatgggggcgtggggagcatttcagggacagggaaatgtgatttcaaaggtggggagatatgatggaacctcccatctgggaaaaatcagaaagcagatatggcaggaggctggagtgagtgtccagggtgtattaggtacacctagtgtgttccaggctctgttctcatgctgaagatgcagcagtgaccaaaacaaacatccctgccctcaggagctggcatttagcagaggaaggtggcaatcagcaatgagcaaaagaaggaaatgttatagtgtgttagaaggtgatgagtgttgtggaaaaagaaaaggtggagagaagtgagggttatctgggggtggattgcaatgttgagacagggtggtgaggacaggcttcactgagaaggtggcatctgagcaaagacttgagggaggagagggatttagccctgcagttgtctggataacagtgtacgagggagagggaacagccagtgcaaaggctgtagggtgggataatgcctggtttgttggaggaaagcaagggggcttgtggggctggagcagagggaggatggaggtggtcaggagagtgtcaggggagaggcgaggacaggtcactgtgaaaacttagggagatgggaagcaactggagtgttttttgtaagaggaaggacatgagctggtttatattgtaaaaagatcactctgggtgtgtgtgtgtgtgtgtgtagggagtggggatagctgcagggagaccagtcaggggactgctgcactaatccgggcaa

SEQ ID NO: 21010 - DNA, 1258 bp, Artificial sequence
  DNA replication origin
cccctcctttaggtccctcgtgaccagttttagcgtgggagagggaaaaaaggaagtaggatcactggagaactggttcatttgtggggaggagagagacgggtcccacctcctcggggtgactgaactctgcttgagaagtcagagcatggctagagttcctggcgtgactgtgagaaagggccttggcacggtgtggtgcaggggtctacccggcactgccgtggggggagtccgtggccctcccatcctgatgaatgggaagggtaaatgcccatccttccccacgggcgacagagcccgtgggtaccctgggtaccccctcctccctaccacccccccaccccccacccctacccccgttcccagtgcccagcatcgtgcctggtctccaaaggggtttacttggtcaattttgaatttctggtaaatgaagaaaaccgcccctcctgttccccttcacgccctttcattcaccgtaagtcgcttacacctccctgggagcactgtgctgaactgggggagtggagcacagagaggagcagaaggcgggccctgacttcaaggagctcattctgctggggaggagacgcagatggagggggttttaacacagaagctaagccgagaggacagacagagcccttggaaaggaatttaagcctggggatgggagtccagtctgcaggtcgggatgactcagctgggtcccaaagatccagtaaagattcatcagagacaaaaaggggaagaacgttttctttcaggcaagagaagtgcctctaaaatgtttcctaggccctgttgccacccccaaaatcacagtgatcgcgcagttcagtagaagtgggagccataggtgaacaaggaggtgtgggtagtggggtgcccggcttgagcagaagcctcggtctgaaaattacgtggacatttgggttggaaatgagactgtgaggccaggactgccttttattgaagcagatggagccacttctggaaggagttctgtgttacctgtgattatttagaaagcaaactcacgtaggtaacaaggaaaatgaggagtgggcgcatatacccagtggggcacctcaggggattcaaggaggagttgaattcctcaaggctcaggaagggcagagatcaggggaggctttaagggacaactgtagcagtatcagtttagggatcttctttctagatcattgccattaatcagaatcaaaactgccagattggatgtctcttggttcaaagt

SEQ ID NO: 21011 - DNA, 1879 bp, Artificial sequence
  DNA replication origin
caccgcccccacgcgcagggccggcgcccgcggaagactcggctctccctggcctcgacgccgctcccctccctggcgccagggggcgctgcctccccacgaccgtcgccatggtcaccgctggcggcggagaggggtttacgtaaaggacgcagcgtcccccggggggcggaggcggccttcgcgccggcgccggcgccctgcggaagcggcgttagtgaatcggggccttggggagcccaggatggaggtggcggtcgcggcggcgggccgagccctgcggcgggcgggaggtaaggggggcctccggcgcggcgggccggtcctgggcgcgggcgcggtgcgagcggcgcggcgggctgggcagtgtccagggcgcgcggtggccggcccgacgggtcggcgggcggagttgcagctgccacgcgcgcccgtggcaggtgtgaggtctgtggagcccctggcaccagcgtggggatggtgacacgcgtggcacgggcgtgggcaacgtgggtccggcacaggcggcgtggttttcctggaacgggtctcagaagactcgcctccaccttggtgcggtggtggccacgcaggtgtgaggtggtgcagctgtctgcacaggtaggtgatgggcacggccttcggactggttatgggataggtggccagctcgtgccggcatggtggtgccgctagcatgggtgtgaggaagtgctgccattgcttgggtgttgggatggttctggccttgggcttgacatgatctggggtgatagcactgggggcttgaagaattggtgttctcagcatggctagagttcctggcatgactgtgagaaagggccttggcacggtgtggtgcggggggctacccggcactgccgcggggggagtccgtggccctcccatcctgatgaatgggaagggtaaatgcccatccttcctcacgggcgatgaaggggacactgcctctgtcatgggggtccagttttaatgcctgttgggtacactggactgaggagggcagaaggctgggagaaggttggtgtcctttataatgggcataaacaagagatgccaggagaagcttctaccacaagggccctgatggtaacccagatagagaccttccaggcactaccgttgtcctgggctaaggtagagagaaccattcatctagcttttcatctagctttgggaatgaagggaggggtggatgattttcagtggtgatcggtgtcccagaatatgtcctgagaagcaagcaggaccaagaggtaacccgggtcagcgagtgagggagtggtatggcgcaccatctatctgtagtcacggggtcctgccttctccctgggttgatgggttcactccagggtatctgggagttgcctctcttctttgatgctggggagcctttgggtccagaggattggatcgattggggtatgcttgaaagatgattctgcagccactgggaatctgctggggccaccgggactcccacccccaggcttaaattcctttccaagggctctgtctgtcctctctgcttagctcctatgttaaaacccctccatctgcgctgagattgtgtttgctctcaccagtcctttgggaagctttgggtgaaggtctcactcagcatcacctagtgccttactttacagagaagcaatttgcagctcctcctagagaagtcttacagtgtaggggaaatcttcagttctttgtggatctcttgggggagtgggatcagtggtagaagaatcacagggttgagcttgtgctggggaaggcacttatgagtccaaaaagatgatgttgagggtagggtggcaggtggtcgccaaattgccaaggtgggtgcttggagatgctg

SEQ ID NO: 21012 - DNA, 1053 bp, Artificial sequence
  DNA replication origin
cccagtcctggggttttggggtagcagggagcccagccaggttagcacccttgtcattgtgcacagatgctgatttcgagtaagttccagctgaggcagggggccagtcacttaggagtggacctcgagggcaagcagctccctggagctacaatatttcaactctggtccccagtcatattcccattttccttgtccatgtttctctaaaagttgctttcctcagctcctggcaattcctcagctgccccataaatcacagtgcctggctgctgtgctttaggggtgccggggagccaggcatctgtggccagaggatgctggaccagagctgacagcagcgggccagaaggctgcagctgaaggcacagcttgtcactggaagccactcctcccccagtccctctcctcgagaccagaggggaacctcagtgtttaatcacctgttggcccatcactctgtgatttcaatttctcaccggaatagctttacattacactccagtggactgggcaagtagcgctgggggaaatatcaatgagcatgtggtcagaggaagataaatcttttagaaccgcggagcccaggacattgcaggatgcggttacctccccagcggatagggctgaaaatggtttattttgattttctttttttgtttctgatactgacttgggctgggcgtggtctttctgggttggatgggaagcgtgagtgtgggtgtggacgtgggttgtgtgtgtgggcaggaaagacccaggaaactgccttatctgtgaggacctctttgctgctgaggaaggagtccagggagatgccgtggaggggattggtgtgaccacgggtaagggtgttttcatggggtgtttggcaggaacgcctaagtcctctagatggggatggggctgttattaccgcggggctgcccggggagtgcacgtgtgtaaagttgcttgtgcccataagtgtttctgtgggaagtgagggcggagggggtgtggagcgcctggtggtgtgggagcgcgcaggctcccgtgtctggctggcctggt

SEQ ID NO: 21013 - DNA, 1063 bp, Artificial sequence
  DNA replication origin
ggggagcctgggtgttcctctcaccctctgcgggaggggctgggcaccccgttccgtaggtgtcagcggaaccgtcaccagcggtgggcgccagtgccgggatttccctggctgactcaccctcggcctggctgtgcctcagcctaggcatgagttctctgtgaaggtgtctggatagtgacagcgattcccatggagtcctgggagcgggagagtgggggtggaggtgcccactaccctggctgcctgccttccactcccagtggacctgacgcccagccgtccgtccgtcaaggacaccacccccacttcccagcggggaggagcagtggggccggggcgctccctgaaagatccctccaggggccacatgcctcccctccccttcccctgtgggagaggcaggagaatagggaagccattgattccctccatccctcccagagtaagaggcatttcacagactgggcgacccggggttgggggtggggtggggtggggtggggagctgtgagaggcaggaagtggggtcagcacccggatccaaagaccccttggagaaaaggggaaaactgtagtcccttcccctagcaaggtttgcgtgaagcacatctttgggccatcccagcctccttggcagcgagcaggcagcggcaggcactgtcagtggggtggaggtgttgcaattaccgtgtgtagggggctgggggaggactgagcagacagaaatgtggagtgtgcggcttgtgagctggcctgtgggggcagtggcagcagagctgcgtggggtgggatgggaggtgtggatctgggtggtttgccccaagatcctcaccttcctatcgccaaggggagggaggtcacccatgacctccctgggatggcatagcaggggatggtagcctctggggactggcctgccagggctgagggcacagggcgacattcaggaccctggcatggttcggtcttggcaggcagacttctcagccccctacctgctcacctggccagtgagaaatgaagcggtttctgtgccccagtgccatggacagctccagtg

SEQ ID NO: 21014 - DNA, 783 bp, Artificial sequence
  DNA replication origin
agcagccatcagcagatccttggggtgtgcaggacctgtgcagagtcctgtagtgacatcaccccagtctgttctgaccacagccttgagagggatgttgttagccccattttacaagagaagaaactgaggtcccagaacagttcatctagccagaggggggggagagggttctccctgagctgtcagggaagacactggggtgggaacccagcctgacagtcaggaagggagggacgtttccccagaagggaagggtgtgagctcagagggggaaggagccactgtctcagcccttgtgactgggaggggagctgtgctgaggaggccatggggtgggactgaggtgctggagccaggcactgcagctggcacccagaggtgtggcgatgggtactgtgagaccctggccccggggactgttgagctggggtggggatgggcagcaaggagtcagcaggttaaccgtaacacagtgtgaccagggccatgctgggggaaggggtctagggttcccataagggagcagcctgtttcccaggaggagagtgggttgcatgagggctgtcagggagggcttcaaagaggaggtgacttttagctgacctagagagatgagttggatttcacccatcagaactggagtaagcaaagcatggacccttccagtgatgtgtttctggggagcagcatgtttggggtgtcgagaaagaaggatgtggcagtgtaagaaggtgctggagagcctctccagccagaggatttgtcagctgagggtgggct

SEQ ID NO: 21015 - DNA, 997 bp, Artificial sequence
  DNA replication origin
cacagtgggaaaggtctacccacttgcctgctcctattctctctcctggcgcagcccccaccttgctcacagctgtcttcgaggaattcccttggtgaaaccaagtgacaactgaggtgtgagctggccagggcctgaggggtgagccctccagggcacctacttttaaatggaccaccagtggggagagctgccctggggcacaccagggaagggctgacactggaggcaaagccagactatggagagagacgcctggagtcctgctcagggctggccttttgttccatttccagagcccgatgctggggaaacccctccatggaggccctgggccatcttctcccagcctccacccccagccccgagcggtgattgagccaaggccggccctgctctccactgcccctgccctggccactaccccctgcagcagcagaccctggcagaacctaccagcactgctctgcagggtggttgtggaccacgtggatgatgcggccgggcgggtagagtggagtgctggctgagagggctatagttaggtcgctggggtgggtccagagccgcgtgctggccagggtggtcacctctacctcctcaggcagctccgacttggggatgcatttggtggcccccacgatgatccgccactgcgcggggtggagtgggagagatggggacagagctaagtagcactggctggggggcaggggcagggggaccgagaaggggggctcagcaggtgagaggtgggcagtaagatggcaaaggggcaggggaagggcagtggccagagcattaaaggtcggtgcccacctgaagaggcagtggctgaggtgcacggtggccagacggccaataaggtgccaaggacagatgacatggaattgttgaatttcagggctggcaaggggctggaagcccagccaacccctcatctagtagatggggagacaggcctagtgaggggaagggacttattctggatcactcc

SEQ ID NO: 21016 - DNA, 784 bp, Artificial sequence
  DNA replication origin
taaaaatacaaaaattagctgggcacggtggcaggcgcctgtaatcccagctacttgggaggctgaggcaggataatcgcttgaacctgggaggtggaggttgcagtgagccaaggtcgcgccattgcactccggcctgggggaaaagagcgagacttcgtctcaaaaaaaaaaaaaaaaaaaaagagtgaatctgtgcttttgtggcccagggtttgtgggtctgtgtgcctcccctggctcatgtaggattcagggacagcaggctgtgggacagctggagcacagcaagagagccctagagcacagagggtgagtttgacccctcctgtgcacgtgtgcagagctgagcccagtgcatgcacaaaatgcatgtgcacacaagtctatgtgctctgaaccacactcaccctggggtggggctgggagtggccaaggctcacctgacgctgctgttgcggtggtctgcagtcggcagctccagggcaaggccagtgggcatgggcggccccgtggggagtggctgctgctggaagatgagctcaggagtcaggtccacctcggtagggctcaccatgaccttggctgcagagagcagagcggtcttccccttgttgtagttctccagcacctgaggacaggacagaggaggctgggggtggtggagggacatcaggccccatcgtggggccgatgtggagccagggcccaggcctctcaggccaagcaaagcctcatggagtcacttgggtcccactctcctcctcctgaggtcaccactccc

SEQ ID NO: 21017 - DNA, 954 bp, Artificial sequence
  DNA replication origin
caccccagggggccggccagcaggcaccagatctggggggtggccaggacgatgccggcctggaccacagatgagaatacatgtgtcggggggcactgctctccacctggcccctgggagagcagccagcaggcagtgatgggaggcagcttgcccatggcctgtcctggagcagggggtgccagaatgcccccatggagggcagtcaggctgagtgtggcccacccagcaggctgcccaggctcctccccactccacacccttccccatctttccccatctgtggggccagatcccagccaccttggctctgggggtcctaagctgaggtagggatgcggacccccagctcagcagcgatgcctgtgcctgaggctaaactgcccctgggggtctgtccttaaagctgcccggcagggggcaggcaccaggtgcccacagggccacctgctcctgcctgggcccggctggccacgcaactggggtgctagcgtgctgagatgaccagctcatcttgcttggcggggctggctccgtggccagtgggggtagaagtccggatcttgtcagccgccaggcattcctggctactgaggcccgtgggcgtcaggtccatgagctcacccgaggagctgagcgggaaggagggcgagagtgagatgcccgaggaggggtcggctgagccggcaaagagccgtgggggcttgggcaccaggttgggctcgaactgggcacggagcaggatctcttgctggctgggggacttggggccctcagcgtagtcactggtggggctctcgggcaccaccatgcagtagaggtcttggaaggagctgctcttgctgtccaggttgaagaggctgtcgatgaactcggcgaattccagcacctgaggactgggcgagtcccccaggcgcccattgtgcagcgccagctccccgcgggaggccggcc

SEQ ID NO: 21018 - DNA, 1339 bp, Artificial sequence
  DNA replication origin
atatttatagaataagctatattaatttgtctctcctttttacagcaatattagtttggatctttcatacattaagtacaaaaaaagtctggggagaatggcacgtaagagagtgcatgagggtctgtggggcccggctgctcgctactgattgcatatggagtcgcccaggcccctgggaggacaggcccgcgcacttgtgctgcaggtctggggatggagtgggggtcggtctgagccgaacggggctgaggggggtggctcagaccccccagtgtggtatggggtggaggagggagacgtgcagcaggcccatccttcaagggcgaggtgggtaggagccaggttaggggtgggctgcccctgggtgcccaggattgagcccaagcctgccccagccccaagcctgaaacatggtgtggctgcagccttgggggtggggggtctgtccctgatggctcgtcctggggtggacgacatgcccacattagaggtcccaggacccaccctggcagaggaggaattaaaaggccagacatcaagtctctccctgtgactggccacggtgcttgtcagatctttcatctgagagtctgtcttgttttctaaactctaagagccactgattttgtcttgcttctgtgctgggctgaagctctgtatgcctcagcagggccagggtgtccttgagtctggtgaaggcgggagttacagaggatgaggggaggcccagctccctctgtcagggtgggcaggggctcccaggacagccatccaggccagtcccagctgtgtggggagccgggggccagaattcaggcccccaggtaccagtgatcatgagagggaggtctcttggtcgggggagcctaggccacccagggaggctgcaggtggagccagaatgggagggaccatgccgctgcagaatgaaggcacgagcaggcggtcagccgtgcagtcagcgcctcggtacacaccagttttccaaaacgggtcacagcagcaggcgcgatgggaacagatggtgcctaaagctgagcttgtccctgcgaccctgcctcaaaggccccatcatgctcccctaccgttttcttggcaggctgggaggggcagcaggcaggcagggcaggtagggtgggcagccccagaggccccttccttaggaacggtgcacactcatgcacatgcatacgcgccaacactagcatgcacaccctcccaccccgcttctggggaaactccgggtcgctatctccctaactgcttcccaaacccagcaggggaggaagccctatggggacctcaggctaaaccgggactgctcccagccccaggc

SEQ ID NO: 21019 - DNA, 1337 bp, Artificial sequence
  DNA replication origin
tctggcctctgtttagtggcttgtcaaacagtggttgggtggggtaggtttttccagcttttacgtgctgccttgaagggtcccgagaggcttcaagttgagccactctgaagcgggatgattctctaggtctgggattccagaattatccgctcccaaggtttcagaggtccaggattctgtagatttttgtttgtttgtttgtttgtgtttggagacagggttttgctctgtcgcccaggctggagtgcagtggtgcaaacatggctcactgcagcctcactgcagcctcaacctcctgggctcaagcgattctccttcctcagcctccccagtagctgggatcacaggcatgtgccaccgtgcctagttaattttttaattttttgtagagacagggtcttgccatgttgcccaggctggtctcgaactcctggcctcaagcaatcctcctgcctcaacctcccaaagtgctgggattacaggtgtgagccactggagcctgactggattcggtagtttgaagatgccaccatacattcattcaacacatttattgagcacctactgtgtgccaggtcatgttcttggtgttgaagctatagcagtgaccgatacagaaaaatatcttgccctcgtagggcttccattctagagcaagaaggataataacagaaactaaataggaatcttttacatggtgagcaagaaaggcctaggtagggagaactgctttaggtaggctggttggggacatgacatttgagctgagaccaactgctacaaagaagtagccatgtggagacaagcattgtaaacagatggaatagcatgtgccaaggccctgtggcaggtgtaggccttgcatgtttgagcaatggcaaggaggtcttggtggctgttattcagtgagcaatggagagaggggaagagctgaggccagtggtagaggcggggcctgagaaaccagagcaagacattcagatattgttttgagtgcaaagggaaacttagttttgcaaaggaatgacatgatcggatgtatgtttcagaaagggtgatttgggagaactgaaggggatatcagtgagacgagaggctgtgcaagttgggcaggacagagatgtggaggcagtcagtcataagggtgaaggcaggggcacaaggacaaccgctttatcctggacttatatcgagttagaacctccaggtttcattataccagacagggccacggcaaaggagagttcggattcccggggcagccaggatttggctctgaactttaatgaccttgaaactcttaggcagggcggggagcggtggctcatgcctgt

SEQ ID NO: 21020 - DNA, 1082 bp, Artificial sequence
  DNA replication origin
agttcccggggagatcagccgggggttcccagcgccagagggtcgccgccgccagcccgcggtctctcaccttcgaagaagcgctgcagcgcctccgtctcgtccaccacctccatgtcccgcctgcccggcgcacactccagccgcggccccgctacagcccggcccgggggcgcggcatcgccggcgcggcccgcgcgacagtcccggctgggctccggctacggtcccgcccggtccgccgccgcgcttgccccccgcgcgtccctggcccggcccctgcccgccccacgcgccccgcccgccgcgcccagcgccccctgccggcccgcgccgcgcccagcccggccgcgggcaccacgctcccgactcctgcaggcggcgctcagcgctgggcagtcctaggcttgcggggcgcggggccgtcccgggtcgggggacgcgagaccgtcccaggcttgaggggcgcggggccttcccgggtcggggtgggggcgaagggccgcttggcctctgtggggtcgggactggaagggtgtgccctcgccgtcctcgccttcgtcttgcacgggacaagatgtcacgattccgaatccaaacctcagagacagcccccatccctctcgttagccacccacacaccccgctcagcaacaataacaacctgcatttagggaacgtgtgttatgtgccaggccacacaggcattatctcatgtactcctcacaggcaccttatcaaggagatgctgttgttacctgcattttacagatggggaaactgaggctcaatgcattaaggactgccaggaagccctgtcctgtggctgtgatgatggaaatgttccctgtgttgttcagtatggtagtcactggccacaagtgagcactggaaatgtgcctattgagactgaggaactgattttttcattttgtttaattgtaattaaacagttacgtgtggctgtggtattggacaatgcaggtctaaaagctccttttttttttgagatggagttcggctctgtcgcccaggctggagtgcaatggcgcgatctcagctcactgcaacatctgcctcct

SEQ ID NO: 21021 - DNA, 1940 bp, Artificial sequence
  DNA replication origin
ctgcatggctaagccgtggcgtcagcccccaccccccaacccatggtcaggagggagccagggagtccaggccagccaggcccacccctctgctctctgtcagggcccagcgtcctggggcaggcagtgtggaggtcaagggagcctggcctgcgggtcctctgggtacctagcaggctcaaggcactccagacagtaacccaagcaagcacgaatgtctggtcccctcttccctgaaggtctcaaaccgcgtcaggcccctcgagagctcctatggatcaacagtgtctggggagagccagagccccgggacagatgcagggctgcctaagaccctcagatggcccacctgatgcagagtcaaccattcaatctagtccaagcctgaactcttgggttctgggtctgtggggtgtccagaatcctggagtgggatgactgaggcttaggggtgcccctgcctgggctgctcagccagcaggtgtgaacaagggttcctgcctcccaagtcacagagggagagaaactgaggcaccggaagacctgcttctctcctccacaggactccacaggaatctggggcttgaaacttgggccttggttccctgccctgtagccctgataggttcacacatgaagggaaggttctcaatgcaccaaggagcaggatgtggccttagggactagagggagctcggggcaggggctgggctcgctgcattggtagacaggggcacaaaagggggccagagggtctggctagatgttccagggaggttctgagaagcggagtgggctgggaggcagtcagccagaacttcccctccccctcccactgcggtcccatccctccagaacccagcaccaggaggagtggtggccctgcaggaggggcaggggtcgtccaggaaaagacagggagttggttagatggaggagcagacctccaaaaccaatgtaggggtgggggcagaagaagatattatggggtgtatgtcaattccaccccagagggctcctttcggtcaagtgggggtgaggtcactctttgagggggcgaggtcagagaggcacagctccagggttggggggacatagtgctgaggagcctcagagggctggtgggatgcagttcacagcactagaagggtctcagagagcagaggtgaccggtggcagggatgtcagcttcaagaaggttccagccccaggagagcatgctagggaggggggtcccagccccaaacaggagagcagtcactaggcagcattgtggaaagcaggtggcagtctccaaggggatccaggctcgaaagtggtcctaccctcatggaagcacagtggggaggtcccagctcctagaagtcatgggggatggcgccaaccagaagggcacacagggggtcttggtctctaggcgggggtcacagattctgggaagcaggctggggtccagcctcaagaggtacggaaggtcctagaaggcacaccgggggtctgggccttgaatggggttgtatcccgcttggggttctggggaagcaaagtagagggtccccagactcgggaagtttgctgggggcgagagtgtcacaatttagggaaagttccgggtcctggaaggctcaaaggagtccggacctggaaggggacacagtcccaaggaagctgcgagttgaggagcggggagggggagcccaacttcagcggcggtgggtggtaaccgctgggggactcccagccccgggagcctgtcttggcgggctggtgccagcctgaaggagggtcccagccagaggaggcggaaacacagcgaggagccccagttcccggggagatcagccgggggttcccagcgccagagggtcgccgccgccagcccgcggtctctcaccttcgaagaagcgctgcagcgcctccgtctcgtccaccacctccat

SEQ ID NO: 21022 - DNA, 1465 bp, Artificial sequence
  DNA replication origin
gggagcgggaagttgtgcttttgagccgtggctgcgtcactcttgagtgctgtcacactcggggctggggctggggacacctgagctctcatcctggtccccacttggccttggtcatccctctggacagtgggtagcagtccctgtgctctcggctctgggctgggagactgggaaagggttttaccgaaggggctgcagcacagcgcgccccctcacctgacgtggtccccctccctgggcacacaccaagcataggtgctgggtcctgccctgtgccggtggtgggctgggggctaaggcgctttggacctcaggtgggaggccgggacagagcggccccctcgaggctggtacagccgggcccccgtgaccgcccggctaatcccctagagagaggcaaggcagcccagatcggcgggcacagggcctgcagagaggggacccaccgggcaggatgcactggcttccagcaggtaaccgggccatggtataagggggctttggactccagagccagggcaggcacgggacagggcagtgtctgagaatcctgccaggacctcagagttctggtgcaggctggaccactgagagtggggtgaccgtctgtgcctggcagggaacccccaaagagctcttgccctctttaagtcctttttcctcacctgcaagacaggagggggtggcagagaagaacctcagctctgaagaagctcactgcccagccctgggaaggagagacatgttagagtatgaatggccgagcctggaaggggtgcctgctggccctagattctaggggcacatgaggctcgagtgagcaaccagtgtcccccagaaagcaggtgggtgtgcagggagccttggaggatggagggaagtcgccttccagcaggtgctggaaagaccacttggagtttagtgggcctctgcccggcctctggagccccaccagggctggaggagggaggcctgggatttcgccccttctgaagctgatgggtggctggactggtgacttccttctctggcctcattcccctcccagggtaagtaagtgggttggaccagagcaggggcttccaatgtgattttttaaccatcaaacaaactcatagtctcctgataggacagatacagtggataatgggggctgggctcctcacagcccctgaagcaccaggatactggtttgaaagccacccttcccggctgtgggatgggtaaggggaggggaatggcgctggctgaggctcagagagaagggagttggccagagttagccagagtggacacctagcccccagctccctactctgccaccagtaccttggggttgagggggctacctgtcagggaccaacatctctgcctccagagggcaggaggaggtcccaggtagagactacctgatgatttggaagagaggactcccacctggacaggaatccgggggctgagc

SEQ ID NO: 21023 - DNA, 883 bp, Artificial sequence
  DNA replication origin
ggatcgcagcctgcctgggaaggggcagtgtctggttcctgttccaggcaggtaataaagggcctaattaatgaggagcagctgaggcacacagctcagcagggcaggggcaggacctggaggggccccaggtagccccggccctggccacagcatggcctggccgaggtccctcactggccacttggctcatccactccgtgaacatttcctgggtgcctgctgtgtgctgggatactatatcccagagagacagaacagggcagcgctcatagcccagtgcctgcccctgtaagctatgggcacatgcccatcctttctgagcctcagtttcctcatctataaaatgaagaaaaagaaaatcacctaccttgtaggttgggatgagaattcaatatgagccatgtaaagtgcatggcacagggctgggcacagagtggccactgggcgagtgagctgtgggtggtgggcgggtggtggacagacactcatcctgcccagcggggtgtgtgtaggcgggaaggtaaagaactgatgaggaattacaacgcccctgcccatcccttgctaaacagaatgggagagtcagagatggcctcttgggggaatttacatttaagacaaaacctaaagcctgaataggacctggctttctcaggcttagggaacagcatggaatggcatgtgtgaaggccttgatgtgggatggaggatggaaaggaggcaagggctgaccacggagaggaggggaggcaggggacctggggaaggagaaaaggctgtcgggggcaggcaggggaccatgtcaggccttggactgccagagggctccgggtgtctccccagcagtgggaagttgttgaagggtttgagaagggaagga

SEQ ID NO: 21024 - DNA, 652 bp, Artificial sequence
  DNA replication origin
gccctggcccccaggtggccaagagcagaaccaccgcgggagcaggctccccgcagtccggattggggtcaagagttctgtttatcttaccaaaaacatccctggaatgcctcctggggaacaaagggagctggggcctccccgctcaggctggggggctggcccctgagagcccagaagagggactgcctgccggagaggggaacactgggcaggcctgggctgggggtctccggagacgccttcctgaggcccagaggaggagcaggcctcagaggagatggggacggagggggacctttagatttgggttggattctcctggtccagcctgggggcaggaggtggctaggatgaggtgaaaggctgcccctccttgggcaggtttgtgcctccctgcccaggcctctagtaggtggctgaccaacggccctcccacctagggtaggtggggggcagcccccgggcttggctcaggacggggtggaagcaggagactctgccttggggaggacagtgcccaggagcctgagtgaggttggtctcagatgcccgctcccccatctctcctgcagagccccacctcctgcgcacgataacccctgagacactgtgccacgtgggagtgccctcccgcctggagcatccgccc

SEQ ID NO: 21025 - DNA, 920 bp, Artificial sequence
  DNA replication origin
tggggaggggaccagcatggagtctgcctggagaggagggatgggtgttgggaagggcatccaaggcaaagggagccacagggtggagggcgggggctgcgatggtaccacaagtggcagagctggagcggagggcagggcccccaaggcccccgtggtgcagcttggaagccggggctttgctgggaggacactgggggccttggaaggatagggagtgctgtggccccctgagtctcaagtggggcaggagttgggggtcccagctgctgtggacattccgacaaggaagggaggtaacccagaccaggggatggacaggaaagaggcgaggaccggaccaggtagagggatcttccagggcaatagcaaggccagatgcatgatgaggttggggaaagagggccctgacccagatttgcggctcaggtaaccaaggccctgcgccccattccctgagaggggagcccagggtgggaggcaagtgtgcagggagtttagtttgggacctggagctgaggcacctggtagagggcccaggagatgggtcttgactggggttgcagacttgggaatcacaggctggagcaggaaacggggcgagagggaggcagggaggcaaggaggcacagagtcagggtaaggtgcccaacgagagggaagcaggctgaggagtctaacgtttaaggggcaggcacagggcgaaagggaggcagggaggcaggttgatgagcccaacaagagggaggcaggcgcagggcgagggggaggcaggctgaggggcaggcacagggataaaaggcgggagggcggggtggcagtagcagtgggggagtttacacacacatacacacacacacgcacacagatgcttgcttttttttttttcttttttttttttgagatgaagtcccgctctg

SEQ ID NO: 21026 - DNA, 1005 bp, Artificial sequence
  DNA replication origin
ccggtcctcgcctctttcctgtccatcccctggtctgggttacctcccttccttgtcggaatgtccacagcagctgggacccccaactcctgccccacttgagactcagggggccacagcactccctatccttccaaggcccccagtgtcctcccagcaaagccccggcttccaagctgcaccacgggggccttgggggccctgccctccgctccagctctgccacttgtggtaccatcgcagcccccgccctccaccctgtggctccctttgccttggatgcccttcccaacacccatccctcctctccaggcagactccatgctggtcccctccccaggggcccctcccctaagacccattgggaggcaccacagcacaaccccagtagtggctgattttgagtctatgagctccctgtgggcatggctgggtctgtcggcttcggtgtgatgagtgagccaggcatggtaccttggcatggctctgccagtgcacgtggaggagtagaggagacgtgggtatggagaggatctggggagtgagtgggcctaggtgcaagtggatgggcttggaggctgctgtgaggtgtgtgggtatggacatgagggagggtggggctgtgagtgtgtgtgtgtgtctgtgtgtgagtgcatacatgcagaggtggggggagcgtgtgggtgtggaatgggggtgtgggtgtttggggagtgactgcatgcgtagctgtgcagaagttgggggagtggtatgctgtgaggggtgaggagggtgtgggtgtgaagtagggtgtgggggggtgtgaccatgcagaaggcatctgagcttgtgggaatcgcggctgagggctgggtgctgccctgtttcctggtgagctctagttgggccaggcctggctgagagggggcaggagggcaggaccagccgggtagccccatcctgaggtgccactggcttcactccccacagctggaggccctgaaccagtccattaacatcgag

SEQ ID NO: 21027 - DNA, 1637 bp, Artificial sequence
  DNA replication origin
ggtcgagtgcagacttggagaacttttctgtagctagaggtttgtaaaatgcaccaatccgtgctctttagctagctagaggtaaaatggaccaatcagcaccctgtaaaatggaccaatcagtgctctataaaatggacaaatcagcaggacatgggcagggacaaataagggaataaaagctgctcccggccgggcgcggtggctcacgcctgtaatcccagcactttgggaggccaaggcgggtggatcacgaggtcaggagatcgagaccatcctggctaacacagtgaaaccccgtctctactaaaaatacaaaaaattagccgggcgaggtagcgggcgcctgtagtcccagctactcgggaggctgaggcaggagaatggcgtgaaccccgggggagggcggagcctgcagtgagccgagatcgcgccactgcactccagcctgggcgacagggagactccgtctcaaaaaaaaaaaaaaaaaaaaaggctgctccccctcacaccccccaacgtccagcagcggcaacctgctcgggtacccttccacgctgtggaagctttgttctttgctcttcacaataaatcttgctgctgctcactctttgggtccacgccacctgtaagagctgtaacactcaccgcgaaggttcatggcttcattcttgacgtcagcgagaccacgagcccacctgaaggaaccaactcctgacacagaagcacaggccatctccctaggcccagctgccttttgagggtgctcccaggtgtccacagtttaagatcaccgagtatctgctctagttagaaggatgcatcaaggaatgggaagcattggctgaggggaaccactaagaaacacctgcctgggctggcctttcccctgggtgtgtccacagacagcttttgcccaagaatttcagtataggtgagaaacaggagagatgggtggggctgtgtcgggcgttggttccttccggcgggtatggtctcactgacttcaagaatggagccgtggaccttcccgctgttatagctcttaaaggaataacactctttgcagacccaaagaatgagcagcagcaaggtttagtgtgacgagcaaaagaacaatgcttccacagcctgtaagggaactggagcgggttgcagcagctggctggggtggccagcttttattgtcttagttgtccctgcccacgtcctgctgattggctcattttacaaacctctagctagctacagagcgccaattggtgcgtttttacagagcactgattggtgcattttacaaacctctagatacagaaaagttctctaggtccccattcgacccatcaactccagctggcttcacctctcagggctatgagacttccgtcccttcttgcgggtctttcaataagtccctttcctctcttagctagggttctccaaaaaccacgaagaggaagacttccctacgtccgaactggggcacttctgcgtttcttccctttccctccaccgttgttctgggtagggctccacatttccctaagcactctggccaccccctgccccaaggcagctactttgggttgtgcaaggtaaggtccatggcgataagattcacgttggcaggtccggca

SEQ ID NO: 21028 - DNA, 1557 bp, Artificial sequence
  DNA replication origin
cgcctttagggagcccgcgagggggcgcgtgttggcagcccagctgtgagttgcccaagacccaccgggggacgggatctcgctccccgcgccacgaggctcggccaatgggaacgcgcgctgcgaggcccgccggtctgccctgcggtgctgaaaacccggcgcgcaggcggctggctctgggcgcgcgccagcaaatccactcctggagcccgcggaccccgagcacgcgcctgacagcccctgctggcccggcgcgcggcgtcgccaggccagctatggcccccgacccggtggccgccgagaccgcggctcagggacctaccccgcgctacttcacctgggacgaggtggcccagcgctcagggtgcgaggagcggtggctagtgatcgaccgtaaggtgtacaacatcagcgagttcacccgccggcatccagggggctcccgggtcatcagccactacgccgggcaggatgccacggtgagcgcagccaggcgggggcacaggagagggcgggaccggaggctgagtgcaggggagacagagttacgcactccgagccaaacaccgactaattcggaggaaagcccggaggcgcctgatcatacctgttgcccggtgattgggtgtcctgcggatgcgggatgaaaaggcgggagagaggcctggagaagtggagtctggggagtggggatggaggccaacaacacgcacacacaaacaaagggtcccgcctccctgccgtgcattccatctgcagccccgagcctcaggtctctgggcggggacagaaccccgagctgggtaggctaggagggaggagagcaaggatgcaggccgcctggggagggagggggtcagtggccaggggagggagtcacatcctgtctcgatggctaggagaggcagcgcagccgcgtctggacctaggtgccggtctccactcgccagcaggagcggagagggagcaggaaaggagcccattctcgaggatggggctgaaacgggaagcttggggagaccgctgccttggggacccctgcgtcgtgtgaagactggaggacgcggaagggacagcgctggccggggagggcaagcggccgctggcgtacataagggattgggaatggcatacacttagcgaggacccccagagctgttctcgaatcgccggggaggccactgagccgcaggccagcgaggtcttcagctattccgcggagcggaccgctgtttacgctctggggcggtaggcccttcgcggggtcctgtcccttcttcccttggtctcactgcggggtcggcgcgcgccccagccccaggcctgctgcttccctttctagaccacagccctcagagctaaggccccggcgcctctctgctgggttggagtcctggggactcagtcctagggactcgaaagtcggggcgttcccttcaccgcgtttcccccttggcggccagaatggcgtcccctccccttgcatccccctctgatcccgtgccctgcagcgtgatgccctccactgtccctatccactaccctggcgtccca

SEQ ID NO: 21029 - DNA, 854 bp, Artificial sequence
  DNA replication origin
gtccctgagccgcggtctcggcggccaccgggtcgggggccatagctggcctggcgacgccgcgcgccgggccagcaggggctgtcaggcgcgtgctcggggtccgcgggctccaggagtggatttgctggcgcgcgcccagagccagccgcctgcgcgccgggttttcagcaccgcagggcagaccggcgggcctcgcagcgcgcgttcccattggccgagcctcgtggcgcggggagcgagatcccgtcccccggtgggtcttgggcaactcacagctgggctgccaacacgcgccccctcgcgggctccctaaaggcgtcgccgccggattcgacttcctgacgtcaggcgggcatcgcggcgttggctcccagggggcgccgcggtaggaacagcggttctagtgcaggccctgggtgcggggccgcgctgcaggagtgaatggactgaggggccagggctgcggggtggccgcaggaagggtgggcggggccggggttgaggtttttccgtgcacgaggctgcccgggcggtcgcggacatcatctttaggctgtggatgccttggccggggtctccagacgctgaccctccagggttggaaactactgcctgcttgccacgtcgtgccgccaattgtgctgcccgaagtagcagcctgagagcccttgaaagttgcagttatcttgtgaacagcatatttacggtctcttgggcttggtggtggttgggggagggctgttaatgctttaatttgttcaatgaaacatttaaaatgccccacaatttttataaccctgtttgcctctttttgtttttatttttattgtattttggaaaaattcactggg

SEQ ID NO: 21030 - DNA, 953 bp, Artificial sequence
  DNA replication origin
ccgtgcacgaggctgcccgggcggtcgcggacatcatctttaggctgtggatgccttggccggggtctccagacgctgaccctccagggttggaaactactgcctgcttgccacgtcgtgccgccaattgtgctgcccgaagtagcagcctgagagcccttgaaagttgcagttatcttgtgaacagcatatttacggtctcttgggcttggtggtggttgggggagggctgttaatgctttaatttgttcaatgaaacatttaaaatgccccacaatttttataaccctgtttgcctctttttgtttttatttttattgtattttggaaaaattcactgggatccttgagtgatgatcctagcgtctcctgacccttaggtgtttcacctgaaaagcctgggtcttcaagctgaggcatttctgttctagcctggaggcgcctaggagccctgggagactttttaagcagagagatttggcatttagatctctgggttttagaggagtgggaacgcacctaaaagtggggttgccagttacaaagctgttgcagtcctgaagagacccagagtttaggtccaaaattttatttattcaacaaacactttataaagcacttactgtgtgccaggcactgttcttagcgttttgcaaaccttaactcatttaattctcctaacaaccctatgaggttggaacaattaacctaatttacagtgaagaaactgagcccgggggaggttattttgtcacacagcttgtaagtggagggctgagatttgaccctggcctgtgctctgaactctcaggctctgccatatttctcattacactggtatttgggcacttcaaagggaaaggaaacataactgtcccaagcactgagctagattctgagcacgtaggagtcaggagagggtgatacagaatagactaggtgaaatatggcta

SEQ ID NO: 21031 - DNA, 1599 bp, Artificial sequence
  DNA replication origin
tcccgctatggacttttgcctccagtaaaaactccccgggagctcagggcctcgacacctcctctgcccgcccctccggctccccccgcctcgggttccacatcctcccgcgttccccgccgcccgagtttccacagcgatcagcagagcgcctgcaccaatccggtcgcgtcgccccgcctgccattggcccaggaggatctttcgaaggccagcgggctggagcggcgggtccccggctcccccgccctcccgcgtggagtcgagccctgctgcgaggcaggctacgtgtccgacctcctccctcccccactctccggccccgggcgccggaggagatcctagaggagatcccggtgggggcaacgaatgggctccgcgcgctccggggcgcgtgcgcgcacgcccggcgctctgggggtttgcacctgatgccgacacaaagccggcgcggccaccagggtgccagcaagcggccgggcgggtggaccggcgggctgcggggcactcaactccagggccggcttggctaggtgacgcccttccttggcgcgcggcagtcgagactccagtatcccacattgtccgcgccatccacattctggcgcctttctgcaacctccctagagacacaagccggccttggattagagggctttgaaccctctagtcagacaatcttagaaaagaattgcggaacctctgctctgctttcttggtctgggcgccatggctgcggtgagggggaagggaggggaaggcagaggaagggggcgatgaggaactggcgcggtccttgccctggtctcagtaagctcagtctctttgggaatcgtggaagcagacacatcattgggcagtgatgttgtgcagactccagcaaataaagactgccgtatcgaagggataggaggagggttaggtcttttaggcgtggggcaagagacaggcccctcagaccccagctggatggggcggcttagtgccgggcgtcctgggggaaatgggcctgactgcatccggagggctaacgggacacgtgggaagtaaggatgaacagagagggtggggtgcacgaggcttgggaatcactagaggagttatagggccctcagatttcaatgggatttacaggtgcctgtgtgctagcacaccctaatcattagattctcatcacaggctgagaggtaaacaggacgcatattattacatctcacttgaaaatggagagcctgagattgagagagatggtcaaacgggccctgcccaatctaaatttcacagcaatgcaggggtggtggggggatcactctgcccaactggtggggttgtacttgggggggcagatgggctccctttcctcacattcacacagtccccaacctctcccatcacatttcatgctggtgtcagccctgagcatccttcattcactccacagactgcagacataaagacagtaaggcctctctgtctttgagtgtgagcagacatcccaaacaaaagccttctgtacaaaataagaggatgaagcaagacctccagagagtatggtggccttgaggactgtcaaacgttgacggaaatggaaccaagaaa

SEQ ID NO: 21032 - DNA, 1302 bp, Artificial sequence
  DNA replication origin
aggccggcttgtgtctctagggaggttgcagaaaggcgccagaatgtggatggcgcggacaatgtgggatactggagtctcgactgccgcgcgccaaggaagggcgtcacctagccaagccggccctggagttgagtgccccgcagcccgccggtccacccgcccggccgcttgctggcaccctggtggccgcgccggctttgtgtcggcatcaggtgcaaacccccagagcgccgggcgtgcgcgcacgcgccccggagcgcgcggagcccattcgttgcccccaccgggatctcctctaggatctcctccggcgcccggggccggagagtgggggagggaggaggtcggacacgtagcctgcctcgcagcagggctcgactccacgcgggagggcgggggagccggggacccgccgctccagcccgctggccttcgaaagatcctcctgggccaatggcaggcggggcgacgcgaccggattggtgcaggcgctctgctgatcgctgtggaaactcgggcggcggggaacgcgggaggatgtggaacccgaggcggggggagccggaggggcgggcagaggaggtgtcgaggccctgagctcccggggagtttttactggaggcaaaagtccatagcgggagggctgagggaggggcggaggaaggggaccgcttgggggcactgggaagccagggatcctccgccaggaaggcagggacactcccgagcgcaggcgagaaggctgggggagggggcgcggtgggaggagtaggagaagacaaaagccgaaagcgaagagggcccgggctgcacacaccggctgggaggcagccgtctgtgcagcgagcagccggcgcggggaggccgcagtgcacggggcgtcacagtcggcaggcagcatggggaagggagggaaccagggcgagggggccgccgagcgcgaggtgtcggtgcccaccttcagctgggaggagattcagaagcataacctgcgcaccgacaggtggctggtcattgaccgcaaggtttacaacatcaccaaatggtccatccagcacccggggggccagcgggtcatcgggcactacgctggagaagatgcaacggtaagggtctgggggcgccccagccacccttctctgctgcaggcggagtcaggatccctggctccccgtgggccaaacagacctccggcgctgaatggagcttgggacgtcctgtagggaaggaaagtgcatctattgcactcgtaccccctccccaatcctcctcctcctctgggccgactggggtggagac

SEQ ID NO: 21033 - DNA, 1328 bp, Artificial sequence
  DNA replication origin
tagggaaggaaagtgcatctattgcactcgtaccccctccccaatcctcctcctcctctgggccgactggggtggagaccggatctgggacccggggaggcggcgctgcggtgaaagtcccagcggtggagaacagggcaagcatctaccgcgcgcgccgggacccacgcgtcctccccttcctcggggtttgtctggaggcagggactccccaagaggggcgctcgggccagacggctttggcgcccccagcggggaagatggccgcccctgcgcgccgctgaaaggagcgggagcgcaggcagccaggtgtgggactccgcgcttgtcccgcactctccatccagactgggtggcgagaaggaaagctcgtccccggccggagatcgctcctgctgggactcttgtctaagaagttcctcaatggccacctgggaaaaaccgcccagcagctcgggttcccacgctccagggattatctagactcaccccaagctcgagccggccttcttggggaccggcgtccgggattggtggaaggagaacggcctggggtttgcaaagcccaggtcgagtgaggccttgagccggtggatttagcagcactagactggcttggcaacaggtccgtctgcactcgaggttactctcgggcgttcaactcaatggctctctctttttaaatcctgccaagaacacccttccctcatcttgcactcctaaaggttgtgggcctctctggagccattgctgcccaccttacccccaccaaatgcgtggctcagtgattaccccgcaccagctacccgcaccggggaccccagtctgaaatcctggcatttatttaaggatgcagctggtatcccatggattcgaatgggccagaaggaaaagaacagaggcaaggagggaagaaagggcggcttttggtggtggtagtgaattggatgcagagaaaaaaggtctgatgggatacagaaattggggaaagtgaataggagagaggcagaaaggagggatgaacttgacgtagatcattccacctggaggtctaggatgcccaactgttggtgggcttttgctctctaagctgtgtaggcccgacccttaacttccccacctcttgcatctcatggagacaggcctaggggaaggccagaccaggccaccataacccaagctggacaatggacaggtggtgtgggccagcagggccagggcttatctaagattgggaaggtcagcgatactgaaattccctacagctttcagtcccatcctgttttacttgcttgtggacattgcttaagcccagtgggtttgtgatg

SEQ ID NO: 21034 - DNA, 976 bp, Artificial sequence
  DNA replication origin
agatggggagggctgggacgagacctcccagctccagtgccctcctgcagcctgcagggcccacgtcccctggggccaaatggccagggattggctggcactgcccagctgataacagagcctttggagaagggtcagattgctccagaatcttggacctcaggacaccctgaggaaaagctggagggtgggctgagcctccaggccagccggcccctccctgaacgtggccactgcctctgctgagtcacaagagacgagggactccccctttggtcccaaggtcacaggctcaagttggggaggcggtggaatggggcccgtgaaagcccagggtcagagcactctagtgatggggtggaggactcttccagggcccaaggtttgggctggctgtgcccgcgggcctggggccctggacatcttaagagaggcctcgggtacttaaccgagctgcaggagggagacccgagctttgtaacaaagcaggcctctctatgaaagggtggaccaatggcagccgtcagggagagtgaagccaggccgggagggtcaggggccctgcccgactaggacctgcccctatgaaccccaagagcatctgaagaaccaaagcgggggtgatgcctagtgaccaggctgcaaggggagactcacaggccagacccatggaccgctggtctcctcccatctttaggggcagagagtggaggtaggacagagccacccccggtggccacctctctgctccttggaagaaggggctaggaggcactgggagggccatggctgatggctgacggctgagggagggcaggtcccatgagggcagggtgctatgggggagatgtgaagagaaaaaggagaggagaaagggagaaagatccaacatggggtccgtgagcagtgcatacaccagcctctcggacacccctcagaacaaaagcccatcattcctctggccatcaccccacct

SEQ ID NO: 21035 - DNA, 1785 bp, Artificial sequence
  DNA replication origin
aggccccgcgcctggattggagcggacgcggggggtcagccagccttgggggccggggcctggccgggggcgggggggcaggcgaggcgaggcgggcgccgtccgcgcggttataaggcggggagttccctgcgccgcgagccgggaggcgcacgctcgctcgtacggcggccgcggcggcagggcggggccggagcagcgggcggcggcggaggcggcgcccgggagcgctcttcgcttccctcggggtcttgctcggacctcggccaccgcctgggatccccaggactcgtgcgtgcagcatgggcggcgtcggggagccgggaccgcgggagggacccgcgcagccgggggcgccgctgcccaccttctgctgggagcagatccgcgcgcacgaccagcccggcgacaagtggctggtcatcgagcgccgcgtctacgacatcagccgctgggcacagcggcacccagggggcagccgcctcatcggccaccacggcgctgaggacgccacggtaaggaagccataaggaagccacccaccggcgggtggagcctggagctcggtcgtgggcgtgatgtcccgctccacctgtggggccttagcatcctccctcccctcgctgacctttgacctccacgccgggacccagagttggggtggactagccagggccagatgtggggtagggagggcagttccctgcgtggaggacccgcagctgtccacggagcaggtctgcgggggaggagggggcctcagaggtgggtgtgtcatgctgcagagcctgccctgggtgaggggctgccctgttgctcccaggtccctgtttcagttctgggtccccatgctgggtgcttgctgagtgctaggggtagggcagggcagggtccccaggggccggtaaggacatgccattagaggctgggggctgggccggcctgaggtctgtggctttcccaagagcttctgtaaagggctcagggacagtgactcacctctccgggctagcagctgcacgtgggagggctttgccagccaggctgggtgggcctctcctggaagcacagtcaccccaggaacaggctggcccctggggaccccaacttcccaatcccagcccctgtctagacaggcagggatgtagcctggccccagggtactgtctggctggagtccagtggtggagcagcccgaccagccccttttccttagttacccacctgcataataggggttggggccacgatgccctgtccttgaccctccaaatttctaggttggccacactgggtatcaggaaggtcttcaagacccgaggacatgaatcctgaatgctggctttttgggcagcagcggaggttctgtccagtcccaggactgtcggcgtccctcttgacagggccacctgctctctgccgattgccatctccagcatgttggacaatcttcactggactctttgaggaagaaagcccctcttttccccttccaccccatgaagctgaggagtgagaataagaatcctcctgaaattctaaaaaaagaaaaaaaaaaaaaagagaacgccttgtccgtggctgttcaggcgccagacgctggcccgaggggacagcacagccgtgggatgaagcagcctgggggcagtatttgagcgtgcaggtgtttgcatgtctgggtgagtgtggtgtgtgtgcctgcctttctgccagggcgtggcgaggtgaggggcacggcttctccccaaaggccttgctgagccctggcctcccttcaaggagtct

SEQ ID NO: 21036 - DNA, 1455 bp, Artificial sequence
  DNA replication origin
tgctccggccccgccctgccgccgcggccgccgtacgagcgagcgtgcgcctcccggctcgcggcgcagggaactccccgccttataaccgcgcggacggcgcccgcctcgcctcgcctgcccccccgcccccggccaggccccggcccccaaggctggctgaccccccgcgtccgctccaatccaggcgcggggcctcggtctccattggccgccagggagggcggcgtcgaggcggcccgcccctcccgggaggacagcggccgccacccagccctgccccggggcaccgtcccgcccccttttcccgggctgccggcttccaggttcttgactccacccggagcgcggggcctggggacacaacacgcacctgttgggcgtcccgcagcgcctcgccacgccctcgggaaccggaggcggagtcccggtctgtgagcagcggggcctggggggcttccagccgcgcgtcctgcaacgtcaaatccagtgcgcccagaggggggacgctgtctcggggtgcctgtgaacagccttcaaaccatgggccccaatctctgcggggcccccaccgccgctgcagctctctcggagccctctgctgggggcgggtggcctcccctccgccctcggcgctgcagggctggggatgcccaggggtggccaagggggaggtaggggagcaggagggcactggcgcgtggaggcgggcgctgccatccatgggctgaggacacctgtgcttgttactgcttccccgcccctcttttttgttttgagacaggagtctcactctgtcgcccaggctgcagtgtagtggcatgatgtcggctcactgcagcctcaacatcctaagctcaggagatacccccacctcagtctcgggagtccccagctgggactacaggcgcgccccatcatacccggctaatttttggtgttattttatttttgtagaaatgggtcttgccatgttgcccaggctggtcttgaactcctggactcaagtgaccctcccgcctcccaaaatgctgggattacaggcatgagccactgcacccgggccccatccgctttttttaatttaaatacattcaagtccttttgaaagtgtaggtagctcccctaattgcttcggatttctttgtgataaatatacctgttcctaaaagttaagcgttcacagcagcaaggaattcaaatcaggctaaagttacttccagagcgctggtcgtcaatcttccatcagaaccacctgaaaggcttccatcagaaccacccaggagggttattcggtgggtctggtgtggaggcagagacttacatggccagttcacaggtgatgctgaccggctggttggggaaatgcacttagaaaaccctaagtatatttctctgatatgctaatattttgtcttggtctaaagaggaccagtatccccagaagggcagagg

SEQ ID NO: 21037 - DNA, 1001 bp, Artificial sequence
  DNA replication origin
ggtttcattccttcagatgcccaagccttggccagagccccagggtgcaggagtgagggcgcgtggccacccagcctgtaccaacaaagcctgcctttattaaatagagatcgcgttacattccatccaaagaaggaaatccggacgtggtgagggatgcgtccaggtgggagctccgaacgctggtcctgagtgggctctgatgggtgggagggcccaggtcctgcctgcccacccaggccccacatgccagggcgcgtgtctgcatggccacccacagctgaaaacaggcgtgggtgatctgaagccctgtctgtgttctactgtggcagaaagtgccccagtccttccagcggttttgggagcagggcctccaggagcacagggctgagacggggtgggagggaaggtgacaagggaggcctttatgaagggggagggaggaagggggaaaggaagggaggaagcgggggaggggtcttgactcatcttaacaaggctttggggcaattctgtgctatggaggccctgccagcccctcctagtagtccaatagggaggccaccgggaacaaggcacaggatggccacaagggggtgctgctggcccagggcttggcagctggggtggagggtaccctggagatccagccacccagaacagtccctttctgaagacaagccagcaacaaggcacctgcaggcagttctggggactggggagggggcgctggctgcctcaggtgtcccctcccaagggctgaggccccccgagtatggatccgagctccctggtctttggtgctttcttgaaatcctcctggtggtggcagaacccagtggggaagagaggggggtcttgccgtgaagtccaggcccgtctgtcccaggatggacgtgtggtgctggctcagtgctgcctccatggcctgtctgtccatccattctgcctctggctcagggctggctccaggcccccgtctccctgtgtgtcggcttgtt

SEQ ID NO: 21038 - DNA, 757 bp, Artificial sequence
  DNA replication origin
aaaacagatgacctcagtgagtggctggacctctctgaggctccactcttgagccttggaaactgctgagtgccgaccacacccgagggatctgtttgcactacactgacggccacccccacagcccgacgcagacaagcaggtacacgctgtcacatgccacagcggtggtccagacctgggaactacattagacaaggcacagatgcctccctggggtctcacaaggaccctgcgcagtgaggcggggaccacagcggccatccagggacctagcaggtgtcaacacccagcatgccttggccttggcctccaagaggacttgacccccaggatggagaggagatagctccttactcagagggtcgggccagactggttcaggagaagactcagcagcgagcaaaggttggtggaggagcggggagccaggccttgcagaatgggctgtggggggagggggtggagggaggccctgtccagcatggagtggagtgggagcaaaggctggaggtgggtgaccctgtgttcaggtgaccaggaggaggggccaccacctccagggccagggagagattcacaggggtggcccccttgtgcggggccgggagaggtttggggacaggagaaagaccagccggacggactcaggtacagagctcagcacccaggaagtttgtgaacgctttactaaaccacaaccctccccgctccccagcctcctagctgagtcttgcctccactaggggcaggtggg

SEQ ID NO: 21039 - DNA, 889 bp, Artificial sequence
  DNA replication origin
cctctgtactcactcctcctgtagacctcagccgatgactgacttgtgtggagatagaaaggacagtccccttgcctcagggtggaatcaactctgctaagagcccggtggatggggctgaagctgggctgtagctaaggccacatcctggctggactcccccgtcccttccctcattctcctgggagctgcacacaatctccaggtgaggctctgcctcttcggaacccagcctaagacagggtggaaggtagccggcggctgtgcccgcccgcaacagcccctactgaatgtccaacactcctggggagggacatcaagtgagaggggcacccgcaggctggggagtggagaagcttcggggaggggcgggacggtggtggcctggcaaagatagggaggtgcgagagagcggggcgaggtcgggggaccagcccgtcgtggcagggacaccgctgcacagggagggttgaggagaggctgcggcaggagggtggggcagggcagagctcaggacaggagcagggacagtggatgcccacagaggctcatgagcagggagtagcagggagggggctttccctctccagggagtgtgctagggagaaaacacttctccctgtggaccccacatgtcttggtctttcagggcagggaccacatcctaaaacttcagaccctcctcacctcatctcccacccccagcttcatccagtgcagcaggacacccaggccagggacttaaagtgctagaggtgacattgttgagcacgggaacatcttttgtggggcctgctgttgagccatggttgggcctggaaagcggtgatggagataagtggccactgaacaaggctcagtgggcacaaatccacagggtaggggctgc

SEQ ID NO: 21040 - DNA, 736 bp, Artificial sequence
  DNA replication origin
gaggcaacaaatgctctgataagtccgcagccaaggagctttttaaaccttcatttatttgggattctccccatttcttgggaattaggaaagcaagagagaaagatgatgggttagatgtgggtttttggaggagccctggctctgatgtggagaagaaagagagcgatgaggcagagagctggccagaaggagccaaggggatgcaggccaaaagtactgctgctgtgccctggcctggggacttggtgaccaagcagagggtgaggaggagagagccgagcagatgatggccagtgaagagcaggtttggggagtggggcccagatgggggttgctcagggcctgtggagacccttcatgtgggtggctgaagatgctgagcgacgtcatgcaggactggggggaggagagaagagggcatgggagaaggctcttagacggggttggttggcatgcggctgagaaccatgggggttagtggggtcagaaggcctgcatggatgaagcaggggagctgctggatgttgggaagcgggaggcagccagacctcaactctggcctagttgggggaggagtgcctggtctgagtccccagaagtagagggagaggcatatgcagagcctgcagagggtgggactttgtacacctggcatgagattaaccaagctctcttgcccagtaggggcaaaacaagggttctaggggtacagctcagcttagttcgaggtctg

SEQ ID NO: 21041 - DNA, 926 bp, Artificial sequence
  DNA replication origin
ctccacctggtttccagatgaggcccctgaggttcagagagggatggtgacctggccagaatgcacagcaaggaagtggcaggatgggaactgaatgcagagtacaggcatagcgtatcacgtggcctgtcacccagaggaaaggggatgaatggcggttttggagaagtgaggcaagaggcagatggggtttgaggaagtctgagacagcgcccaagtactggaggtgccacccaagaatgctgtacagccaggcaggacctgggctaagaggggacagcagaggggacacacagaaacaaagatgggaagggggaattgtgggaggaacaggggctggatgggggggcaggaaaaagcaataacaataattaagataattcaaaactaaggaaaaggtgaaagctgagaacagcggtacccatgctgggagtgaggaactgggagggggtctttcagggacaggaaagtgggtggctgaggcatctgggaagtggcacgtcccgtaggcagctgagggggaataggcaggatggggtgacgctgtcgagtggcactggtttcggggagcagctgcagcctgagcctggatgaggggctgtcagggaggacaagggcttgagagccagaaaggacgagagtgttggacaccagagccgaagagtgtctgggacccggggatgaaagagatcgtcatgagtctcactgaattgggccaggaaccaatgagctcaagtcaaggaggggacaaagggacaggtgggaaccaaggtgggcctgggccacaggggaaggggagccagagtagggagaagggcacaacagcatgtcctagtagagaccatggaggaggagtgggggagaaggtcaggaacagctggggatgggaagcagatcagaacacctaaagcaggtgagtcaggcca

SEQ ID NO: 21042 - DNA, 1167 bp, Artificial sequence
  DNA replication origin
gccgggtggggccaggccttgggagcgcgcgccggatcccagcgccgggccggcggaggggcggggccgggcacgtgtcctcgggccgctcccccctccgccacgtgacccgcccagggcagggtcggggctgggctgggggccgcgagcccaggcgtctgagacctactgaccggccgcgggcagggctgacaggcggtggggcggctcggcccctggcggagtcggcggcgggcggggacgcggcgctgggaggacgcggcggcgctgggaacggacgcctgggcgccccgaggcgccgggatgtggagcgggtaggtccgcgcgcgctcgcggtcccgcgctgggtctgggccgcggtcgcctcccgggacgggaggatttcgggggtccccgccgggtctgcgccgccacccggaggtgctgtgcgcccccgccctgcctgcaggcgagccgacttgcagccaggagactccgggggaggggtcgggggtgtctctcggggtgcagggtgcgaagggtgggcagccgaccgtcccggggtgacagcgtcaactcctcttagctcatcaggagcgcaagtgagaagagttggggtgtggggaagagtgtgcacgactctggggcatgcacctagaggaaggacccccagcccaccctcccaacctgtccctcaaccccttcgctggatgaactcttggaaagcagtgtagctgggaaagaggggctgggtctttgccagggtggctcccaagttgagggcagaacctccttgtggggctctggaagtacggaggctctcagaggtgtggagtgggaaccccccccgccccggccccgcagcctggagtggggtagcagagactctgggtcctggattagtggccccagtggctgtgtctgttcaggccactggttctcaggggcagttgcagttcctggcccatctgatgtgggacccctgccctgtatgtgcagaaaggttgtggtgtttttgtggagttgggcaaacacttcctcttccccgtggccgggaaagaccaggtcgtggaggaaatgtggccagaatgggggacaggttgtactcctgtgccccctgggccagatgagtggtcccaggagagggctactgcccagctacagctggggagtgagggaagccccccg

SEQ ID NO: 21043 - DNA, 1082 bp, Artificial sequence
  DNA replication origin
aagggatgctatggagaactgcctaggttgttcactgcacaaagtgctggccaagggagcaagcaaggcatagaatccagcctcgcctccactctccagattccataccttgctgtgcgctgtgcccagcggggaaagagcattgtctatttgtgccctggacgtggaggtcttagagaatacgtcccccatcctccatcctccaccaacgtggagccccaggagggcagaacctatgtctgtacagtttcctgctgggtccccagccccttgcatgccccatagtctatgctcagatggagtggctgaatgtatgaatgagtagaatgaatgaataaaatgtatcctcaaacgaagatctgactaacttgagcctgcggcctgagtcagtgggcctggaggggtagcactgggacctctggtagcacctagaaggggaagtacctcccaccacgctcccagtcctcccctagacagggaaggtgggagccatggtacctggcgggagagaagacgggttctgctcttactggtccagtcccaggctgaagttgagacgaatgatcaggactcagaatgggtgggacagaggaactgagggacaggtagaccagtcgtctgggattcagggaaggtttcacggaggatgtgggaccagacaggtgtgtgtatgtgtgtgtgtcggtgggggtggggtggggaatactatccagagggcagatggtgagtaaaggcagggatgggcagagcgtgttaagtggcaggaggctgagtgaggagagttggaccagaagtggaaactccttcgggataaaactcagagagtaggactcagaaaacttgtttcgggtttgtcccctccccttcccagcaggcaggatgttgcacagggacaggcactaagcagacagcctagggaaggagggccgggtgaggaggggggagggtgtctgctggccttaagtgacaatctgtgtgagaatcgaagagctgagagctcgggagccattgtaggttcttgagcaggggtggcccaaagtgggtggtgcggagggcgactggagaggaggagtcagctgggg

SEQ ID NO: 21044 - DNA, 1553 bp, Artificial sequence
  DNA replication origin
ctggcggatttctgggaccagcagggggacccccgggtgacagaacccttggggctctcgcgcctccatgcgaggctctgcctgcctctcgctcccgagcgccttccaggagggctgggggctaggcccgctcgcagcagaaagctggaggagccgaggcatcgccgggcgctgggccctgggctctggccgcagcctggcccctcgcccctcgccccccgcccctcctgcccaggcttctacgtgacgctggtcgtgacccgctggtggaaccagtacgagaacctgccgtggcccgaccgcctcatgagcctggtgtcgggcttcgtcgaaggcaaggacgagcaaggccggctgctgcggcgcacgctcatccgctacgccaacctgggcaacgtgctcatcctgcgcagcgtcagcaccgcagtctacaagcgcttccccagcgcccagcacctggtgcaagcaggtgggcggaccgggagcaacggggaggcaccgggcagagccaggggccgagatgggcgcggcaggaatggaagatgggtggagccaaagtcccccggactcgggggattgggtggagccaggagtggggtgtagtcaagatttgggggtccaattgggcgggacagagtcgggtgtctgaaggtggggcgaggccaggagcccaccctccgagagtaggagtctgaggcagggctaaggacccttgagggataatggaaagaagggtgacggcttgggaactggtgaggtactagggtctacttccctctgcccttgcccctcttgatctccggtttccactctggaggtatgggacattggtctctgacaccccctcagcctggcctgacctggtcctggttaataagacagacccaggctaggcgtggtggctgtcgcctgtaatcccagtgctttaggaggcaaaggtgggaagatcgcttgagcccagctgtttgagacgcccctgagcaacatagcgagacccccatctctacaaaaacattaaaaattagcagggcatggtggcgtgtgcctgcagtctgaggctgagtatcgggaggctgaggcaggaggatcacttgagcccagcagttccaggctgcagtgcgctaagatcgcaccgctgcactccaacctcggtgacagagccagaccctttctctggaaataaataaataccctgcccacatgctcagcccagaacagcacctagtaggtgctcagaaatttttttgttgttgaaagaaagaggatggcaaaggagtgctgaggttcctataggtcagcaggtgccggccatcccttctgcaggttctcccacccaccgccttcttcactccactctgcaggctttatgactccggcagaacacaagcagttggagaaactgagcctaccacacaacatgttctgggtgccctgggtgtggtttgccaacctgtcaatgaaggcgtggcttggaggtcgaatccgggaccctatcctgctccagagcctgctgaacgtgagcccactgtacagacagggctgccgcagagtgg

SEQ ID NO: 21045 - DNA, 907 bp, Artificial sequence
  DNA replication origin
cgccgagagtcgtcggggtttcctgcttcaacagtgcttggacggaacccggcgctcgttccccaccccggccggccgcccatagccagccctccgtcacctcttcaccgcaccctcggactgccccaaggcccccgccgccgctccagcgccgcgcagccaccgccgccgccgccgcctctccttagtcgccgccatgacgaccgcgtccacctcgcaggtgcgccagaactaccaccaggactcagaggccgccatcaaccgccagatcaacctggagctctacgcctcctacgtttacctgtccatggtgagcgcgggcgggcctaagcggtggcgggggccgggcgcggttcccggggcgcgcgctggggcgggccgggggtgtggccacccgcgggctctcccgcctccctgcgcccttctggaaaatggaggctgctcgaggtttccgaggacttctctggcgcagaaagtcggggcagctggttcttctcggctgtaccctgagaatgctccctcctaggccagggccgcctctgcacacccttcttttttaaggagaccttggtgtcctgaaatcctggggttgcaagactgccagcctgtgtgatcaatcctgcggttaggaaggtggagttttgctttcccatcttttcctctgcctccggcatttggccctaaatgccagcgttttttgcttaggtatccagctcccgtccgcctgtgtgtggcggagctgctgggtaacggtgtcgaatagcaaaccttgggggctggcgggaggtggcttatcttgtgggtagatccctctcgagcagccgtatccacctctcggctctgcttatctctaagtcccacttgctttgaagcatatctctaggaatcgccccttctgcagtcaccg

SEQ ID NO: 21046 - DNA, 1906 bp, Artificial sequence
  DNA replication origin
cggcggcggcggtggctgcgcggcgctggagcggcggcgggggccttggggcagtccgagggtgcggtgaagaggtgacggagggctggctatgggcggccggccggggtggggaacgagcgccgggttccgtccaagcactgttgaagcaggaaaccccgacgactctcggcgaagaacgtctggccctgcgggtcgcttgtggtctcttatagccgcgtcggcgtcaggcccgccccggccaatcagcgccgcccgccccgagcccgctccttccggtgggcgcgggaccccgcccctgctgtgggggaggggcggccgctggaggccctcgcgcgctctggcggagctcgggagcggggaccggtagccgactgcctctgggacagcggtggcgtctctgtgcccgtttagtggagttggagggaagctgcgaggaggcgcaggaagtccacctcagaaccccccccccggtctaggggcgcccgggcgttggaaccggcgggggaagggtgcgggggcgcatggggtgatcctgattcggctcccattttcccgaacgggcaccctgaggctcctggcccggggcatggtgttagaaatcatagctgcggagaagcccttgtgacaccttgctgcagattgggaagctgcagatgattgggaaggtggaaggtggagacgcggtccttaggtggtcgagcgcattttctcttcctcagagtccaggaaggagcgcgatggagaagtggggcgcacggcgggtttcgggtccgcccctgcccttccgactcctccgaccacgtctgcctttggctgaaagcaaatatggctccgtgtgcggtttctgcaacaaaggctgggcgggccgggtttccctagggatggggaccgcctccccggggagtcgtgggggtgagccaccggggcctccgagagaatcgctggtgtcgcttcgcacccaagggacacatctcgggttagaaaggagaaacgacgtggatctaaaggcgaagcccatgctgaggacttttcaaaatggcctcttatcggccccactcacaggagcttcaggcttcggtggccctgtaggacaaccctggggtgtcattggagagaagctgacggggttaatggcgggtgacaggtgaaagagaccccggaggggtggggccggtgtgtgtggctaagctgagtcccaggcacagggtggatgtgaatttatgggtggcagagctagagctaggccctgcccttacctaggtcctggcttcgaggtccactgttctgtcgcgtcttttgacgcatcggtggaagaactgaatttcaggatgctcacaaacctgcagctggaagctagacttccaaaccttagtttaaaaaagcaactctactgaaatactaaaataaattgccgacggaattagggtgatttcttgttcacggtttcatttaaaaatgcacctatgttatttacaggaaaaacgttttagtggtgctagagctacaagaataaggtaaacagaaggatgctgctagaccaggagtaccttacccagtctgggataggaggaggtcggggaagccctccctaagcaagacacgtgagctgagtttgaagaaaaagttaaaaggaaggtgaagtgcgggagagaaacagggaagggaatttggagcagagtgaacagcatatgcaaaggtgtggaaatgtggaaatgcatggcctgttaaagctgccttaagaaaatatgttgcctggggctgggcgcggtggctcatgcctgtaatcccagcattttgggaggccgaggcgggcggatcacttgaggtcggagttggagatcagcctggctaactaacatggctaaacccttctctactgaaaatacaaaaattagccgggcgt

SEQ ID NO: 21047 - DNA, 1315 bp, Artificial sequence
  DNA replication origin
tgagaaggtgggagcctgggctgtggaggcccaggcaattcaggacttgggccaagggttaggactggacccctcaggaaattgcagatttgtcactgtacccctgtacccatctcctgtctgccccatgggccctggagtccactcagctctgggtttccctggcagccctttgtgagtggggtctgacactcaggcaggaccggcttctggtgtcctctccctgggtggtgggaacaagccaggtgtgcaggggcaggtggggcctgtcacacacagttctgggctccactctgcaggattgaatgtgggtgctccaatgggcatgtgtgggtgggctctgcaggccaaggaggagcggctggcagaggagaaggccaagaaaaaggcggcggccaagaagatggaggaggtggaagcacgcaggaagcaggaagaggaggcacgtaggctcaggtggctgcagcaggtgcgagcacaggtgggcctcagggaggaggtgggcggggtgggcgctgtctcagcaccatggggccctactgggtgcaccccaccttgtggggttgacccagaccatcttgttgcttcatgctaagaaggaggtttcccagaagtctccagggcggggatggtgaccagaatctgcctctcctgtagcagcagtaatttgagggttaagtgcttgtacttggagccagactgcctatctcagctctgccatttattagctgtgtgactttctacaggctgcttgacctctctgcttccatgtcttcaagtagcagtgagggttaaatgtgttaatgtctgtaaaatgctcagtagtgtctgatgcctgctaagagttctatacaattgctgttatggtccaccccctgactgttctgcctataagagtaagggcccacctcttcccagccagtcttaggactctagagaaggcaaatccaccattaggggttatgtgactagtcaccaaggtcagttatttactgtgtgctaggccctgctgtgtgttgtgcgtatcaacccagcaaccccatgaagtgtaggaataactgcagtctccattttatagacgaggaaacaggccagagggtttaaatgcttgcccgttgtttcatagctagcgagtttggctccgaggttcctttctgctaaatctacagcagcagcagctgtcacaagatgccttttcaggctgctgctggtggttctggcagagccttgctcgggatgtcccacggcgccattcctgggttgtccgtggtggtggctgatatgaggggcacctgggcttcgggggagtagggct

SEQ ID NO: 21048 - DNA, 1026 bp, Artificial sequence
  DNA replication origin
tccgaggttcctttctgctaaatctacagcagcagcagctgtcacaagatgccttttcaggctgctgctggtggttctggcagagccttgctcgggatgtcccacggcgccattcctgggttgtccgtggtggtggctgatatgaggggcacctgggcttcgggggagtagggctgctgtcctgcctctctggcctgggcctggccgcagcacctgaccttgctctctgtttcaggaggaggaagagcggcggcaccaagagctgctgcagaagaagaaggaagaggagcaggagcggctgcggaaggcggccgaggctaagcggctggcagagcagcgggagcaggagcggcgggagcaggagcggcgcgagcaggagcggcgcgagcaggagcggcgggagcaggagcggcgcgagcaggagcgacagctggcagagcaggagcgtcggcgggagcaggagcggctccaggccgagaggtgagggacctgctggcccgcctgcctgccttccatgtgtgtggaagagagacggtgtgaaccttgcctggacacagccccacctgcatgtgacggtttgcaggtgctttccttggcaccaaacccagaggcccacctgaatacactgcccattggctatgggagatccaaggagtgataggtgggcttgcttagggcttggcttggttctgcctccagctgcatgtgctgacctcttaggtgtctttttgtaactgtcaggagtgtggtgctcagaggatgagctgatatttctcagcagggccaccatgggcattttgggcaggaaagatctttgtgttacattgcaggatgtttggcatccttggcccctgtccccactaaatgcatctcccctggtgaggacgataactcagattaccccctaccgatattttcagactgttcccctgccttgggaaccgtggacccaggagccctgggattttccagctgtgcagatgcagtggtctctgtacaatagacaagagttccatgtttagtttt

SEQ ID NO: 21049 - DNA, 933 bp, Artificial sequence
  DNA replication origin
ctgcaatcccggcacctcgggaggccgaggttggcggatcactcgcggttaggggctggagaccggcccggccaacacagcgaaaccctgtctccaccaaaaccagtcaggcgtggcggcgcgtgcctgcaatcgcaggcactcggcagactgaggcaggagaatcaggcagggaggatgcagtgagccgagatggcagcagtacagtccagcttcggctccgcatgagagggagaccgtggggagagggagagcgagagggagacggagagcgagagggagacggagacggagagcgagagggagagggagagggggagggggagggggagggggagggggagggagagggagagggctgaggtgtgtttttaaaaggatgttagcttttaattaagctgacttttaaccactgagctcctttaaaaatctctttataattctcattaccatatttcaactaggacaaattgcagctatttcagaactgccaagtattaagccagaaaaaaacttgatttaggaactaacccaggttgtaaactgctttttgggttttgagaactgtctgtgttgattgcttcaaaattggtagggcctggggacatagggaactaaccacacccttaattaagaaggtaaaccttggctgcacttagcacacaattaaagcaacttaccagattttaccttaacagtaacaatttgtaggagttactattatatcatgtaattgaaactactgaaaatagattttcatgcaaggtgtttaaaaacagtaaaatgtgttctctagtaaaagattacaagaaggcgtggaaatgtaaactgttgcctagggttaaagaatagtttttcttttttttgtttctttttttttttgagacggagtcttgctctgttgccaggctggagtgcagtggtgcaatctca

SEQ ID NO: 21050 - DNA, 1350 bp, Artificial sequence
  DNA replication origin
gggcggccgggcagaggcgcccctcacctcccagacggggcggctggccgggcggagggctgacccccccacctccctcccggacagggcggctggccgggcggggggctgacccccccacctccctcccggacggggcggctggccaggcggggggctgacccccccacctccctcccggacggggcggctggccgggtgggggggctgacccccccatctccctcccggacggggtggctggccgggctgaggggctcctcacttcccagtaggggcggccgggcagaggcgcccctcacctcccggacggggcggctggccgggcggggggctgacccccccacctccctcccggatggcacagctggccgggcgggggggctgaccccccacctccctcccggatggggcggctggccgggtggggggctgacccccccccacctccctcccggacggggtggctgctgggcggagatgctcctcacttcccagatggggtggctgccgggcggagaggctcctcacttctcagacggggcagctgccgggcggaggggctcctcacttctcagacggggtggttgccaggcagagggtctcctcacttctcagacggggcggccgggcagagacgctcctcacctcccagacggggtctcggccgggcagaggcgctcctcacatcccagatggggcggcggggcagaggcgctccccacatctcagacgatgggcggccgggcagagacgctcctcacttcctagatgtgatggcggctgggaagaggtgctcctcacttcctagatgggatggcagccgggcggagacgctcctcactttccagactgggcagccaggcagaggggctcctcacatcccagacgatgggcggccaggcagagacactcctcacttcccagacggggtggcggccgggcagaggctgcaatctcggcactttgggaggccaaggcaggcggctgggaggtgtaggttgtagtgagccgagatcacgccactgcactccagcatgggcaccattgagcactgagtgaacgagactccgtctgcaatcccggcacctcgggaggccgaggttggcggatcactcgcggttaggggctggagaccggcccggccaacacagcgaaaccctgtctccaccaaaaccagtcaggcgtggcggcgcgtgcctgcaatcgcaggcactcggcagactgaggcaggagaatcaggcagggaggatgcagtgagccgagatggcagcagtacagtccagcttcggctccgcatgagagggagaccgtggggagagggagagcgagagggagacggagagcgag

SEQ ID NO: 21051 - DNA, 959 bp, Artificial sequence
  DNA replication origin
tctgcccggccagccgccccgtccgggagggaggtgggggggtcggccccccgcccgaccagccgccccatccgggagggaggtgggggggtcagccccccgcccggccagccgccctgtccgggagggaggtgggggtgtcagccccacgcccagccagccgcctcgtccgggagggaggtgggggggtcagccccccgcccggccagccgccccgtccgggagggaggtggggggggtcagcccccctgcccggccagtggccccgtccgggaggtgaggggcgcctctgcccggccgcccctactgggaagtgaggagcccctctgcccggccagccgccccgtccgggagggaggtgggggtgtcagccccccgcccggccagccgccccgtccaggagggaggtggggggggtcagccccccccgcccggccagccgccccgtccgggaggtgaggggcgcctctgcccagccaccaccccgtctgggaggtgtgcccaacagctcattgagaacgggccaggatgacaatggcggccttgtggaatagaaaggcgggaaaggcggggaaaagattgagaaatcggatggttgccgtgtctgtgtagaaagaagtagacatgggagacttttcattttgttctgcactaagaaaaattcctctgtcttgggatcctgttgatctgtgaccttacccccaaccctgtgctctctgaaacatgtgctgtgtccactcagggttaaatggattaagggcggtgcaagatgtgctttgttaaacagatgcttgaaggcagcatgctcgttaagagtcatcaccaatccctaatctcaagtaatcagggacacaaacactgcggaaggccgcagggtcctctgcctaggaaaaccagagacctttgttcacttgtttatctgctgaccttccctccactattgtcccatgaccctgcca

SEQ ID NO: 21052 - DNA, 1143 bp, Artificial sequence
  DNA replication origin
ctctaagcctcagaggtcttatctgtaaattggggctgatggaggccaccagcctccacatcagaggggtgggctgtcacagcttgttaggtgacgggaagaatcaaagctcccagagggtgtggactggtgtggctgaggggctggtgtgggaagacactgttgtgggttgggcccaggggcttggggctgcctcaagggtctcacagttgaatggggaggcagatggacaaatctggccatagttcatgggaagtcccctaagaattgctcagaggaaaaaaaacacaacttctgggagagtgcagaaggctttctggaggaggtgtctttgggctgggtctggtgggggctgggatagacctcatgggaggaagtaaggtcagagctgggagaagccaggagcctctgtctggtgctttttcatcccacacacataagaaggccctactatgcaccacgcctggtgctagcactgggccactgtctagagggggagacagatgctcattgcaatggcgaccgtttccaggaaggagagattcaggggtgttggagggatcaccaggtgagggggtcggaggaggtggccctgagtgagctgtatcggtgtctgaagtggggaggaagagcgctgtgggcagagggaagagggtggagctcggtggtgggaggaagcggagcacgtggcacagaggcgctgagcactcccaaggctgcaaccccggggaagggccagaccatagctgtgagtgccaaagaggcattgaggtttcacttgggagtcgatgggacactacgaaaggcatgaaagcggggtcaaaggaggcagggctggggaggtgagggcagcggtcatgggaggaggaagtgcccccagggactggagaatggggtttgttggggggtcggagggagggggacacagccaggtgccagggccacagttcaattcagggtctttttgagctctgcgtgctgagctctcctggccagcagcaggcgggttaggattggggtggagtttgctttcattgttatttctgctttgtggccatggctgttgttatgtttgttaaatgaatgtgaatgatccctctgcctgggctcatggacttggatcccaccccacacgcacccacg

SEQ ID NO: 21053 - DNA, 716 bp, Artificial sequence
  DNA replication origin
acccgccttggcctctcaaattgctgggattacaggcatgagtcactgcacctagccctactttgtttcgtgaattttactactgcaggtacctcagataagtggagttatacagcatttgtctttttgtgtctggcttatttcactgtcacagtattttaagcaaagggccctggtagttctcatgtaggagtctggaccattctttgagaatttataggagaggatggtggcagggggtgggggctgtgctgtcctggcacagggtttgagggttgacttcatagggatggtgagggctggatgatgactcatcagtgagtgtgggctgagaggcgggaaggaggagatttgggtaagggtgacagtggggccttgggattggggtggtttctggcaggcattgctgagggctggggtgttgacaaaagcctaagaactcagagtggaaggacagtagaagaacagttgtgaggactggcccatgcagggagggtcagtgagccatgggtcagaggggaaggcaaggagctgataaaggaaggccagcagtggggagggtctgggtcaggtgggtgtctggctgtgcggtctacagagggtgagaggagtcgggtgagagccacagaggtcaatccaagtggaggccggggctgggcccactctaggtctagaggcaggtggtgtgacggcatgggaagtcagtgaaggcaagg

SEQ ID NO: 21054 - DNA, 1217 bp, Artificial sequence
  DNA replication origin
agattcttgcaaagcagctgaccttcctcctagcatctagggccgggctgcacaagtcagttcccatactgtggccgctctgaagagactgattgaagacatttagagggagcacagccacatgtcacacgaaagcggaaagaaacagggtggccaagggctcaagagagtgaagacaggtgagaggagaagaaggagcaaaaagagagggtccggaggcacatggaaggctcaggagtggggtcagcaggccggcatggccgggggagctcagggcacagatgggccggcgaggtactcaccagaaccacttcagagctgcaggagctgaagacttcacgggtccaggtctggccaggctcgggagagcggtcccccttgcggtgcagcttcaggcccaccgtgtggtgccccatggtgttcagcagctgggtcacctcacccgactgcaggttgtcaaagtagatggtggcacccacaatctggtcccctgagcagggaagagcaggaagcaggtaaggcccaaagagcctcagggaaaccgcacacagccaccacacactgggcactgaactgacttgaactcatgaccaccctgcaaggtgggcatggtaatacccattgtacagacacggaaactgaggcttagaaaggccaatttgtgggggccaggtgcagtggctcacacctgtaatctcagcactttgggagaccgaggcaggtggatcgcctgaggtcaggagttcgagaccagcctgaccaacatagaaaaaccccgtctctactaaaaatgcaaaattagtctggtgtggtggtgcatgcctgtaatcccagctaccctggaagctgaggcataagaatcgcttgaacccaggaggcggaggttgcagtgagctgagatagcgccattgcactccagcctgggcaacaagaacaaaactccatctaaaaaaaaaaaaaaaggccaactcatttgcccaaatctgcagagctagtgggtggtggagtcagatctgaggaccaggtgtccactaccccacacagctgcctcccctgaggaccacaagtgacagacacagagtggccaagggagggcagggcttgggtaccaaccaccctgatgccactgggaatgggccctcgacagccactcacccacttctgcctgctccctgcccttccctccaacacccccaccgaccccccaaccaccagca

SEQ ID NO: 21055 - DNA, 776 bp, Artificial sequence
  DNA replication origin
tggatcggtgtctacttaggatggtttctcccctcctcaggaaccacgtaggttgcatctgtcctgggcctcaaaagggacttctgccctgggactctgcctgaggccctggcagggaagccaactgcctgtctgcagggcagccctggttcctctggcacctgggggtctggcccaggaggcactttgtccttggggttttaggctcaaccctttgcaggtctggagctgttgcagccagctgcagtgactcactggggcgggagggtggggccgaggtgtgggcgagggtgagctggcccagctagctctttccccctcgctggctgctggcacagcaccaggatgctggggtgagcaaaggggccctgctccaggaggaggacaggggtgtctgggcgatctgaaggagtggcttcagttctgtctgagagatgaagtctggaatctgttttccttccctgcctctgcctggctgcttttctgcagggctggctcctgagcactggacagtgggagagaatgtgccatttaagccccagctttgctgtttcttgctgggaagggtcagagtgatttcctgtcgcagccttctctgcagccggaagggaggaggtgttttcgccagtttgcacctgagcccagaggctcagagtctttgctcaccttgtagccagcacctgtgttgacaaggagacacattgtccacaccgcgttgtcaaacaggaggatggctgtcgggggctggggtctgtgtttctctttcatccgtgttg

SEQ ID NO: 21056 - DNA, 977 bp, Artificial sequence
  DNA replication origin
gggaagcttccttctccagtccttagggacagcggggtcacccaccccccaccgcgtggatagtggcctgtgcagaatggggaggacaggggagcccccaagttaggggcacctctttgctctgagctgtgagctttggggtgagggagggtgggagaggagctagggagggtaagagtggagctaggagaggtcgcagggtttgggggctgtgggaatgtgggttagagggtgtctgagcccctctctaaagcctttgtccctaagaggttatgcacagggacactggtcagagaacagggacacatggggagccacataagtcatgcgggctgatatggaggcccacagcagcgattcaggggtcctggtccgggaactccttgaggagccaacccctcggagctgaggacttgtggcagccagacatggtccagggccaggggtgggacacagggacctgttgagggagaaggtccagcgtcagcccagggtacggagttggctgggggtccccggagtcatcttagccctcaggaagtcctggggaaaggtggcggtgctgccaggctggattcttttgctcgacttggaattggctggtgggtcctggcagagccggtcaccctgagcctgaggagctggtttgaggggttggggcaaagccgtgggggcggaggggtgtgtggggctctggggtgtggtcaccaccttctttagaacttgggaactgcctggagacagacagagagacagaccgggagagctagtcctactccttatgggaacagtgtggctctctcccccaccattcccgaggccccaaagtttctctccccggagctgggctggcaccgtgctgtgcacgcttaggtttgaggaagggtgatggccgctggggaggatttagaatgtgctgcttgggcggtggcagtggcagggatggagggccttctgacttctcttcgtcccccatc

SEQ ID NO: 21057 - DNA, 972 bp, Artificial sequence
  DNA replication origin
gctggaaccctgcgctccagcggtgcgcgccaggagagggggcccgaagcgaggtctcgcctagagttggaaaggcagcgtgcttagggtgtgtgcagagctgtgttatgtaaggctttcccatgcaaggggagggggtgtgtgtgtgcagtgtgcgagggcctgggccgtccctggcagggctggtcgccccccagcagtgcccaggccgggatgtgggggcgcagccccttggcggcgctgaccatgagggactccaggggcccaaacagggctggctgtgccccttgctgggaggggtgcggagggggcagatgggtgttctcagctgtagccgaggccccacaacaaggtggggaacggctctggcccctctgcacaatgaggccactgagggttgtgtgcgatgtgtgtgcttgccggtttcgcagggtgtggctcccgccgcggcgaccgtggcagtgaggtgctcccagggagcgtgcggtcgctgcagagtgccctgctctgtggaggggatttgtggaaaggcagtgtgggagcctcccaagtcagtcaggtccttagacctccggagtctccggaggaaaagggaccgagatatctacctctgtgtctccagcacagcgctgggcgctcagtaaatactggtttcgaacccgtcttcattagaatccaacctcggattgcagggctcctgctctctgcttgcccgtcccagcacagcctagtgcatggtaggtgttgggttgattttgtggaatacagtgaggggctgcagcagtgaagctgagagtgggggaaggcgtttaagggcccctgcacctatactggctgtaattcagggtagagatctcgctttcatcccctccccgtgagggaaatcccaggggcagggtgtggcactcacttcctttcagaagctgaatggggggaagcttccttctccagtccttagggacagcggggtca

SEQ ID NO: 21058 - DNA, 827 bp, Artificial sequence
  DNA replication origin
atggggcggtggctcgggggctgctccgttcgtatcccatgtttactggaggggaaatttccgagatcgccaccgcggcccccagcgcctccgcgcctccgcgaccccgcaccgtgcgccccctcggctgtccttccgcgctccctgcacctctgcccctaaccgcgtcccgagtcgtccaggccccaccctgttctgtaccaccagcccctcagcctcctccagctgccccgccctagccttgcctctccgcgttccccgctccagaaaaccttcctctcgggccgcggaacctggaagtttgcaatgcgcctcccagcgggatgggtggggagggggacaaaattagggagattcctatgctgaggtgggcgaggaggggggtgcgctgcggcggcccagtcctcgggaccgccccttcccctccggaggcggcgctttccccccgcccaactcccaaacccgtccgggcgggatggcccccgccccagagcctggcccggcgccagcagcctgaggaatgtggtggttggagccggtgactaattcaaaccagaactcagggaggagtggtgaggggcaaaggggaggaggaaggggctgtgtgtgggagttgggggcaggagccgggcttggcgtgggaggagggctaagctgcgctcgctggaaccctgcgctccagcggtgcgcgccaggagagggggcccgaagcgaggtctcgcctagagttggaaaggcagcgtgcttagggtgtgtgcagagctgtgttatgtaaggctttcccatgcaaggggagggggtgtgtgtgtgcagtgtgcgagggcctg

SEQ ID NO: 21059 - DNA, 1060 bp, Artificial sequence
  DNA replication origin
tgccaatgaagccacacagtgcacatgttggagagcaggtccaggtccgggacaggacagggggcagtggatgcggggagggggggaaagaatgtccccgcgtcccccagcggcccccctccccagcagcccactcccgggtccctccagggtctgccccgctcgccagtcccagccccgctccggccccgcccggccccgccctctccccacagctccgggcagacccgcccgcccgagccggagttacaagagccgcctccgcgcacgggggcccggccactcggagctgctctgccgcggggactgcaccgcccgccctgccagacccgcccggaacggggctcgtcgccgccagtagccgcagcaccgcagccttgggcctcgcgccggctatggccgtgccctggggctgagccctcaggtaggggcgccaggcgcaccgtggcgccatcggggtccggggcaccaagggcgggtcgcggggaggtgggttgcggtgctccggcagggcgcgttgttgggggtgtcactgtgaggattcaagcagtttggagcaagcggggccacccggggcggcgacgcgtcgctctctgggagcggagttctgcctctggagttggggcgcaagttggttaaagttggaaaatcgctccgaagtgctttgctccactctttatttctccggagggcggactgttggctccactgcaaggcagggcgccccgttccgggcctggtggcctctgtcccacctcctctccctgcatggggcggtggctcgggggctgctccgttcgtatcccatgtttactggaggggaaatttccgagatcgccaccgcggcccccagcgcctccgcgcctccgcgaccccgcaccgtgcgccccctcggctgtccttccgcgctccctgcacctctgcccctaaccgcgtcccgagtcgtccaggccccaccctgttctgtaccaccagcccctcagcctcctccagctgccccgccctagccttgcctctccgcgttccccgctccagaaaaccttcctctcgggccgcggaa

SEQ ID NO: 21060 - DNA, 920 bp, Artificial sequence
  DNA replication origin
tgcagcaaggagggcgctcctgccttggccaggtctccttagttccccagcctggggtctctctttccttagcatttgggaaggaggggaaactggcttggagcgggcagtgggtggccacctaggagggaggataaaaggactcatgagggagaagagaaagggagtgtggaggggagtgtgtagccagaaggcccccgcaccccatcattaaacgtttaataaaatctcgatgtagttagaagtggctgtgggaaatcgctgtaaattaggagactcagcgtcccgcaagtggggaggcgggggcggcgctcagagaaggaatgggaggcagaggaagcgctggggctctggctcctgggggcgggagtctggagaggaaggtgggcgtcgggtccgctgtccaacgcccggggtcctcacccccgtatgcccgcggcctgcgcagcaccgcggtgcgcgaggcactggtgaccccggctcctggggggtggaaatccaagccagttctgtgcggatatggacggaggggcccccagaaagagagaacgcgagaaatgggcgcggcagcacggagcttgggaaccaagcaaggaggctggggcctgggatctgaagtgtagttgcctaagctgagagaaaactcaaaggtccggagcaagctgacggtcgcggctgaatcacccagccaccttcagagcccccaggcccttcctgcaaaataagttgattcgcagttccagctgtgagggtgagcccagggagcctgcaggagtttcttgccaatgaagccacacagtgcacatgttggagagcaggtccaggtccgggacaggacagggggcagtggatgcggggagggggggaaagaatgtccccgcgtcccccagcggcccccctccccagcagcccactcccgg

SEQ ID NO: 21061 - DNA, 1417 bp, Artificial sequence
  DNA replication origin
aggcagcggaggtgccggctgcgcgggccccagtgagactccctcgaagcggcagcccaccgttcggggctttgcctcgagccgagccctgcccccgcgagcctcccggacccctttgtgcggccggaggcggcggcgggaacggccatggcggccaacatgtaccgggtgggaggtgagtaccgggcgcagggatacggggcccggggcgggagaggttggggtagggacctgaggggctcggcaccgggtggcgcgaggcgcagcgtatggggcagcgtggaccggagcgcggaccggaaccggaaccgggagacgaggagagagggtgcggggaaccgcgacgcggcagggctccgagactcccagagagaagctgcgggcagccccgacggcactttcggggctgcgtcaggggctccccggggcacggagtggccttcggaaccggttccgaaggagctgacagggtagggagggaacgcgaggggctggggcgacggctttgccaccgcgggggagccgcccggaggtttcctcttcccaggcgttattgtgcgcctcgattcgaaaaggtaggggccctgcgctagagcggacaattacttcgccgcgactggggtgcaactcatcgctgagttgtggggactgcaggggaacccctgcttcttgcctgttccttaaggctctcttttgagtaaaggatctaattttagaactaggtgcggtggggatgggggacatccttattttctcttagtctgtccactttcacatctcagcgccctttctacctgaatccttatctccttttgatccactcaggccaactttctctcctaccctggtgctctgcgtctcccatctcctctgatcttcgtggttctcccccctcccttcccttacagattacgtctattttgagaactcttccagcaatccttacctggttagacggattgaggagctcaacaaggtgagtggagcagaatccctctccctccctcccgcagtggtctcttctgaggtttctaacttctggtggaagagaggatcctatactaagtacccattcatattcgttcattcattcattggatgtattcaggaaaggctattgagaggttagcaggaactttactattctgtctcttgggggcaaaggaaagggatttggaagtctatccttgaatgtaagtctttactcatattttcttgggctttttaatttaggtccctctgaaacttactgttatttgtctctttgtgcatttctgttcccagatgatcaatttccactgctacgttgttttgtttttgtttttttcctccccttagactgcaaatggaaatgtggaggcaaaggttgtctgtcttttccggcgcagggacatttctagtagcctcaacagcctgg

SEQ ID NO: 21062 - DNA, 1063 bp, Artificial sequence
  DNA replication origin
ggccggccgctgtgctaggcgtctggccggacggctccgatgggaccgacatcaactccctgtgccgctcccacaacgagcgcgtggtggcggtggccgacgacttctgcaaagtgcatctcttccagtacccgtgcgctcgtgccaaggtgaggccgcggggatcgccggggtgggaccggtgggcccgagggctcagccgccaccgcaactcttccctccggcccaggcgccgagccgcatgtacgggggccacggcagccacgtgaccagcgtccgattcacgcacgacgactcgcacctcgtctcgctgggcggcaaggacgccagcatcttccagtggcgagtgctgggcgctgggggcgcggggccggcgcccgccacgccctctcgaaccccctccctgtcccccgcctcctccctcgacgtttgatcgctgcctggcgggaccgactggcccggcggcgtggccccgccccgccctgcccttccctggcccaatcccccacgactaggggccgactctttcctggactgacttcgagacattcccgatcgcgcattttcctggagggcgcgaacggcgcccctgcacacactgtttagacccgctggctgagccgggcagccccagcctaggccttgactcccgctgcctgctgaggggcaataaaccagaaccaaagtcgcctcccggtgcttttgtggggcgctgccgggcgcctccggggctctgtggggtggggacgaaggaaaagaggcgtgcggaaagggtaagggagcgtagaccatttatgcaaatgacaggcaaagccgcttgcaaataacctggcgaagcgctaaggcgcgcgagtctttggggcgcgaggaggagctgcagggctccagcgaggacagagttaagcccgactcctctcccgccctcggaaaagggggtggggccgagctgcgacggaaatagccgagcggttgcccgacaggagccgaacttcttccggaagtagccgatctgcggggtctcgctctccgacctgagccgagcagtgggccttgttctccggat

SEQ ID NO: 21063 - DNA, 1960 bp, Artificial sequence
  DNA replication origin
agtgcctttgtagtcggcccctggtctgtagtttcagattactttttcagacgacatcagaagcccctcagcctttatccacacttagctccttcccatttctcagcataagaatgcagtggtggccaggtgcggtggctcacgcctgtaatcctagcgctttgggagctgaggcgggtggatcacttgaggtcaggagttcaagaccagcctggccaacatggtgaaacctcgtctccactaaaaatacaaaaattagacgggcatggtggtacgcacctgtaattctagctactcaggaggctgaggcatgagaatcacttgaacccaggaggtggaggttgcgttgagatcttgccactgcactccagcctgggtgacagagtgagactctgtctcaaaacaacaacaacaacaacaacaaactaaaaaagaagaatgcagttgtgacctgtcttctacatcagagcctttctgtgtgtgtctctgagcttctcttatttgccatccccaagcctacccagggtggcctccctgggggtctccttacatcctgccttttcgtcttcctatctgcctccacttccctcccttccaggtggttggttttggacacagagaccagagagatcgtgtctgatgtcattgatggcaatgagcagctctcagtggtccggtacagcccaggtgggagccaccccaaccctggactcacatgcgtccctggcccttccctctctgagtgactgtatttgcagatgggttgtacctggccattggttcccatgacaacgtgatctacatctatagtgtttccagtgatggtgccaaatccagccgctttggccgctgtatggtgaggaagttggggtgtgtggtggggcatgataacagctgcgaaactcaggggtctgatgcatcaagggggctctggggatgggaaatggatgggatactttaaaactcttgacctttgctcccagggtcactccagcttcatcactcatcttgactggtccaaggatgggaatttcatcatgtccaattctggggactatgagattctttactgtgagtggcagtggagcaggacatggggagagggtaattggagtgggttttgtgtagggggggctgttagaggtgttgttagataaggaagtggagatggggttaaagtggagttggaattatatgtaggagaaatttcgtgatttggaaacaactagtttcacaccatgtcttgttgacttgagggagttcaaaaatgcgctaagaaaagattgtttgggaaaagtttctcagggcaagtgtggagcacttgacttatctagggaggaggaactcgtggaagctgttagaacttcagccagagctcaggacaggacgcacacagggtgggtttcacagggggaggaggtgatgctactacggtgaccagatcacatgccatcgccgggtttcatgccagtctttccagtctggctttccctggcatcttccctactgagggcagggtgagagctgagctgggcgggctccctctccccaggggacgtggctggaggctgcaagcagctgaagaatcgctatgagagccgagaccgggaatgggctacctacacctgtgtgctgggctttcacgtctacggtgagcaggggcgtggaaacctgctggaagggtgggggacaaggtggagcccagtttgggcttggaacgctgggcgtgtgtcgttgggtgagagtccagaaacctgaagatccagcccaggaggcccctcgggaccgggaaggcttgcctggaacgcggcagtgggtggccgcggctgccggagcgcctgaaatggtgtagctctgggccgtgggtggcggtgggtaggaggtcgggctgaggccggccgctgtgctaggcgtctggccggacggctccgatgggaccgacatcaactccctgtgccgc

SEQ ID NO: 21064 - DNA, 1562 bp, Artificial sequence
  DNA replication origin
aaagtcgagagcctgcgcctggggcggggtgggttgaggggaagcctcacccacctctctgtgctcccggaccgcactaacaggttggcggaggagattgccttcctggagagcttctgccgaggccgctctgagggggatgaggaggaggaagaatttcttcgcggcctggtgggggcatagtgaaggtcattccctccaactgtactctgcaatcctaccacccctcccagcttccgccacagggccacaggacacctacgtgtcagcacgctgtgggggctgcaagggcctgaggatccccggggggccaggggagccagcaccactgctgctgctgccccctccttcagattgggtcccgctaggctcttcgctggccccctgaggggctgggggtccattgctcaggccagggggtccaggggatgacttgagctccacctctgtctccgtctgggtgcctcggctcaccaaggaaggggtgcacgtgggtggcagtcctgggggggctgcaagactgctggagagatgttgaattaacctgaagccccagaggccccaaggaggaggaaaaatggggtgtgatgacatgcatacctgtcccccggaggagctggtgtgccagagccctgcagggaggaagggggcacctgcagccgcagcaggcgaagggcttctgccagggctgcctttaccagttccatctcctgctcctgcacccgaagccgctggctcagagactggagggcctcccgagcagggccgtcacctgggaaaagggcaagaggtactcagaatgtacccatcacctgaagaaagcgtagaggggattctgtctccccacaactttacatgtgtccggtaggactgcccctttcaggcagccccaggcttgaatgctcgtccagaggggaggagacggtggtaaaggatcaagggcctccttctggcagggcaggcgagaaacctggcaaagctcccttcctgctgccgtctcagcctccgcaaagactgggagtaccatggagtaccgggggggaaatatggagtactgccgaggaacgtgggagccacagagagaggcgccgcactggtgagggcagggaccgcagccctccccacgcgcccccagcaagctcaggtctccagcgaaagctgagtaactgagccgggggaacaccaggagagagaacggggtgcgggaatggagtcatactgaggacccagagtacaagaaaagagatccagagtgacaggagagagtgtgagtggtgagcagagtcacagtgaaggtctcagggggcagtggggatcagaaggaaaaagacctgaaataccacgagaagaggcccggagtaacgcagggggcagggaaacatcgaggggcccggagttacgtggggcgtagaatgacgctggggaagcccgaagtgacagcaagacccaagcaactagggagggcgaccggaggaactgtggaggatgctcggagcccctggggcggaggagcacgcggggacgcctccagacagccgtccagctctggcataacccgacga

SEQ ID NO: 21065 - DNA, 1875 bp, Artificial sequence
  DNA replication origin
tgaggttttcagacttgtccatccctccctcttcctcaccccaagctccaggcctctaggcctcagatagatcctccttgggaggtgcttctcctggtggggcctcctcaggtgctggcctgcaggcaacccctccctgtagccatgctgttttcagcatatctttcagcccactgggaaagagatagccctgggtctctcctcccgcatcaatgacccctccaagcccctccagtgctgtttgcaggtaccgcaggccaaggagcaccagagcctgtgggggaagcaaggggaaagagtcagggagagtcagcggttccaagaggcccagggttggaggcagggaggagtcccgggtgggaggaggtgtcagatgctttgctgactcacctgcagtaggaaggtgacagccagcatgctacccagtgtgcctgccaagtcctgcaagtgctccagcagcacctcatggcacccttgggcccagaggttttggttgggttgtcggggatcgaacagggggtgggcgtaggagtctgaaagacggttttgcaggcaaggccggggtgagtgggggttgcaacaggagaaagggaccccatcagtcaggtataggccttctacattgctctggatccggctgcaaagggagggacagaggggttaggatgtctggagatagaggcctgggggagggactgaagggcacaggtgttcagaagggaaaaagaatagtaaaacatttactgactgctgtactatgtgccagccaagcataattcacatcttcacaacaactctatcagataagtactattatttccattttacaggtgaaggaatgggcccagggtggtttggtaacatgccctgggtttcacagctaataaatggcagagctgtaaccagtctctcagccactatgttctacttattgcccctctgagcgaggtggggattcaaggcagcaggagggagcctgtccagggaggaggaggaggaggaagggagacgcaaatcactcactcagccacatcccggtcaccgggatccaggtaacggctgctgacccactggaccccaaaccaatccttgtacccgtggcgcccgcagcagtggtacctcagttgcagctcatccaccagccttttggcctgacagtgcccaggcacctctgtgtccttgtagtgagccaaggcagtcaccaggccctcctccagcgcctcatccagactcccaggcaaagccagggctagcccgaggccgacgaccaggagcccccccccaccagccgtgccagccaccagcagcgggcccaggacccctcgccagggagggtatagagctgcattcagacttgcccggctggctcctacacccactagtcctgtgcccagagccaccgcgcccgctgccagggcagcctggggcaggacagggaactgacaggagggagccaggaaggtgccaaggtgccttagctggaccaggaggtgcccactacagaggaggatgacgccaccagccagcgccagcagccaggagaggagccagagcccttgtgccaggcggatgcggggctgcaggggcagcaccaggggcaacaccggcgccatctcccatctctgcccaagggaatgcagaggtgtcagggatggaagctggctggggcaggatgctgagtcagcccggcccggcttgagctgggctaatgccaccctgaccccaataccctgagcatcctcccatcctcagccctaataacccgcccccctgtcagccccaatacaagatgccttggccttgccccttacgagaaactccgcccctaggccgagggcccgttttgtgaccccgcccctgcccctcgcggaagtg

SEQ ID NO: 21066 - DNA, 2060 bp, Artificial sequence
  DNA replication origin
cgcgcaggcagaagtgccacaccagggcggcacagcttagcagggccagggccgtgcccaccccgacggccgcgtggaccagagtgcgggggttgggcggcaccgcaaggcggctgcaaggcccgaaggcagggatgtcggccccctcgaggccctctcctccagcctggggcacgcggcttgccccggcctcgttagcggccactacgcaaacgacataaatgccccctggcttcagccccttcagttcggctctgcggaccgtagcgttcagcgggggccccttctgcgcagcctcgctgccgtcccaaagcagcagccagtagtggaggaccggggagaagggggcacaccagtggaccactgcgcggccctcttcggccgcaatgcgcacttctcccatgcgcggcgggtcgggcggctgggcggggctggagagtcctgggcacaggcaggccgccggcccgaccctctgtagctccttgcagggcacctgcaggtgtcggcagtggtcgtagtcgcaggggacagccggcaaaggcggccacgccgtctcagtctcatctgcctcctcttcttcaaagtcttgaggggccaagggctgagctctgggaaccaagaaggtcacggccaggagccacagaaggcagggagagcccagcatggagactggaagggaaggggtggatagataaagcctgttcagcccaaaagcctgccatgccctctgcctggacacaatctctggagacaggaaaatgcaactggggatcagaagaggaaagaagttggaatgaggcagacacactcatttgtcaaccaacttctgagtccaggctgtgtgcttggtttcagacaaaaaataaaacatgatctgacacatgagacagatgcatgatcagcatgtgttaagtattagaaacagttaatgaataaacaaagtgctgagggagagaagaggaggacatgatttacttagcccagggaagaacggtaggatatttactagctgccacccagagaaaagatctaagcaaaacaagtaacaaagccgggcccctaggctgatgcctataatcccaacactttggggaagtcaaggcaagaggattgcttgaggccaggattccaaaccagctggggcaacacagagagaccccatctctacaaaaattaaaaagtatttaaaaattattaaaaagttaaaaaacattaaaaatatactgcacatgcctgtggtccctgctactcaggaggatcacttgagcccaggagttcaaggctgcagtgaaccatgatcgccccacaacactccagcctgggtgacaagagtgagacctcaactcaacaaaaacatgtatccgtcagtgacacaggcaaaaacccagaaaggagacagagttgagaaaagagaacagaatggagaaatattgtaagcacagctgtattttttgaaaacaagagaaaaaaatagggacgctggaatcctccctccccacctgctatctgtgcaaatcctgtccaaggagtcctggcccctgcatgcctccctcctcctctctggcccatagcagctcctcaccagtgggtaggccttgatgcagcgggaatccaccagctgacgtctgtgggtgttaggctgagggatccccaagatctcaggctgtgctgtcaggttgtatcttcaacttcaatgccgtttggctggaagcttttataaccttcgactgtgatgtcaccacctagctcccctcctcctccccccacctccctggtgattgccaaaaaagagggctgctcccttcagagggactgagtcacggggccagggatggggaaagccacatgcaatggtttcagctggagcccaggatgcctgggttctggaaggggagtggaatgtggaaagcagccaggagcttagaatccgaaggctgaagtcatacaacgggatggggaggggaacatagaaggcggccacctggctgatattagaggaaaacagctgcgaacagcacgggcctgagccgcaaaatgctgttttggtaaaaatcctacca

SEQ ID NO: 21067 - DNA, 1653 bp, Artificial sequence
  DNA replication origin
ctcggtcgacggttcgcaggggaggaggcggcgggaggcggaggaggcggcggcggcgatggaggtgaagcggctgaaagtgaccgagctgcggtcggagctgcagcggcggggcctggactcgcgcggcctcaaggtggatctggcgcagcggctgcaggaggcgctggacgccgagatgctcgaggacgaggccggcggcggcggggccgggcccggcggggcctgcaaggcggagcctcggcctgtggccgcgtcgggcggcggcccgggcggggacgaggaggaggacgaagaggaggaggaggaggacgaggaggcgctgcttgaggacgaggacgaggagccaccccctgctcaagccttgggtcaggccgcgcagccgccgccggagcccccggaggcggcagccatggaggccgcggccgagccagatgcttccgagaagccggcggaggccacggccgggtcaggcggggtaaatggtggcgaagagcagggcctcggcaagagggaggaagacgaacccgaggagcggagcggggacgagacgccgggatccgaggtgccgggtgacaaggccgccgaggaacagggtgaggagctggcagccgagcccggctccaacctgccggctgcgcccctgatctagcaccccgccctgcaccgcagggtccgagtccttgttctcgcttgcctcaaagtgccatttgatggaactcctttcattctctacccacctttctgaggggttaggccgcctctcgtggccctactctttgcaggaggaaggttcctgcctaacttggttccttggtgatagtggatggcagtgagtgattttgcatgcgaactacttgtgagctacctgtggaacagtctcccacggtgcttgttatatttttcttagctgagaaagtgctaagcaattggggattacacggagaactaggcccacagttagagggtcaggtctttgggctacctgacctaactttttcgccgtaaaaatgttaagcaaaaatcgaagtccgtcaaagtccgttccattaaaagcatgttaccagagcttgagccacagagaatctgaaaatccaaccttgctcctctttgagctgtaagggagagcctctagtgtaacagtgtcgagtttaatagttaaccagtgaagagaaaaatcttaatctagttcatttagagttagttaacgttacttggctagggtttttatcttgcttggattatgattaaattttaattgtcccactgagtccgtggataggcatatttgtagatttgctgaacacctggtgctagtcttttacgtttcaggtccctcggttcctgaatggtaatgactgaggtgctgttgggtccgttgagtaaccttgtggaagaggtgtgttgtagaatcgccccagggagttagtgacctttctcctttcttttgaagtgattggatggttagaactgatccataacagtgtgtgtccgagtagggaggataagtcttactataaagtgggtggcctcagttcttttgttagtaatatttttaggccactatggagagtcatggtataatcggaacccattgtacaacaatcacatgcaacttgcagattgtttgtcctgtgtcccggagcaaaaatc

SEQ ID NO: 21068 - DNA, 1381 bp, Artificial sequence
  DNA replication origin
tctatctatctatctatctatctatctatctgttgagatggagtttcgctcttgttgcccaggctggagttcagtggcaagatctcgggccgcctcccaggttcaagcaattcagatagttgccgaccgggcgcggtggctcactcctgtaatcccaacactttgggaggccgaggtgggtggatcacctgaggttgggagtttgagaccagcctgaccaacatggagaaaccccatctctactaaaaatacaaaattagtcaggtgtggtggcacatgcctttaatcccagctactcgggaggatgaggcaggagaatcgcttgaacccgggaggcggaggttgcagtgagccgagatcgcgccactgcactccagcctgggcaacagagggagactccgcctcaaaaaaaaaagttgtcgtttgatggctggggggcgggggtgaggggcggggcttagtggttctcgcccacgacggcgaggcccaatcagacccgcggagctggtggagttccgccctcgcggaggaggtggtgttccgccctcctagtcgcagcaagcgcggaactggggttgcggcgtctaagtgtttccggtggattcccagggactgtcggaggtgtggactctgcctgcctacctggtctgggaagatgttctaccatgtgagcagggctcagggtggcggcaagggctgggtggaaaggaagagcaaggccaggcgccggcgcgagactccccttgtcgtccaataacctgccagcgcctggcctggtcgccatcccacttttctccgcagatctccctagagcacgaaatcctgctgcacccgcgctacttcggccccaacttgctcaacacggtgaagcagaagctcttcaccgaggtggaggggacctgcacagggaagtgagtgtcgagctcaccgcaccgccagatcgttcgatgcgcacacggggcgctatacctgcaacccctccccaactcctactcgtcctgccacccactctggggacccctctcctctctcaggcagccagttgcttcctgctttgggttcccagggcgccctctgcaatgctggacaataagacttccttctctcagctgagatgggtcattcattgactcctcaaacattttaaaaacccttggtgtgtgccaggacccgtgttgggctcagaacaaggtagaatgggaacaagatagaatgaggacagcccctgtggagctcacagtgtaatcattgttcctgtgtctgctctccctctgtcattctgctggttttctcttatcccctgtgcccagggaccacacaccatgggcctctatatatcttctgaatgaatgaccagaaaaagcagatcgagagtttgggg

SEQ ID NO: 21069 - DNA, 1294 bp, Artificial sequence
  DNA replication origin
cagtttctgcacgtagcgcgaggccgggctaggcccgtacggcgcggggaaggcagtctggaaaaggcgcccgcggcagcgcctcccagcctgccgcccggctatgatgaaacgaaagtgcggggcgccgcgcggggcgaaacggctcttctggaaaacgtcgcgggtgccggtcccggggccctgctgccggggtgccccgcgcgcccgatgcacgcgcggcaagggcctgctctcagaggcggcgggcccagaggccgacgcggggccgcctccgccgctgccccgggggctctcgtcgccgtgcgggctgactatggcgcttgccgtcagctgcggcatcttccgcaccgagtccggggctgccgccggctccttcttgtccccgggcggccgcggagccgtgggtgcaggctggccggtgccaaagcgtgtggccaagctgtcaccgaagaaggcgtagagctcccggtagatgtcggccagggtcaccgaaagagaagggtcctccggccccgcgccccctggcggcagcgggaggccggacccaaagctgggttctgcaccgcccccggaggacgactcttgaaagagaaggctgtcccatggcaggtcgtccaggcgccggcaccccctgccacctgggccacccctgttgggctctgctgcctgggccttcatcttcagcagtcgctctaccgccacctgtaagagccaaggactaagataggcaaaaaattcgaggaacctgggcccatcaaatattccaaagtaagcctgcttggctgctaagctcatgcagggaagggaggctggaaggggacggtactcaccagaatggctccatagactttgtgtccatctgctttgacctgggcattagatactgaataatcatccagcacagcctgcaagtttgtccagtaggtggacaggtgtgggtacaggactcgttctactgcctggaaggaagagaaggaatacagttagcatgtctttgatacttattccctctcaaggaccctttcccatgaaagacctacctttatctctgatcctagacagggctcaatcctcctaaattccctgattggcatattcaaccatatatttatttggaacctactgtatacctaagctaggcattgggaataaagataaggtacaaagggagacaataaaaaatatacccaatatcactgccctgtgtgctaaataatgctcattactgacaactccaaaatttagtttgcatactgctaccctatacaatcaggcaagtactggcttcact

SEQ ID NO: 21070 - DNA, 1065 bp, Artificial sequence
  DNA replication origin
cgtttcgccccgcgcggcgccccgcactttcgtttcatcatagccgggcggcaggctgggaggcgctgccgcgggcgccttttccagactgccttccccgcgccgtacgggcctagcccggcctcgcgctacgtgcagaaactgcccatgatcggccgtaccagccgccccgcccgccggtgggcgctctcggactactcgctgtacttgccgctctgagtcagtggccccttcgttccttgtaaataaatcccgcccccggaaatgacgtctccaccttcgtgggtcgcgccggataaggtgggctttgggcggggtgctgctgcagcggcgcttcctggtggtcagggcgccatggcgctgtcctggctgcagcgcgtcgagcttgcgctctttgctgccgccttcctgtgcggggccgtggcggccgcggcgatgactcggacccaggtgcggctgcggggcggggtcaggtaggcgggggagctggccggtctggacatggcgaggccactttcgctttccgaccgggcttgctgctgctcggagccggtggacctggtgaggcacggctggcgccggcctgtacctgaaatgcagcgaggctaatcgcgctttgtggctcctcctggccaggtcatacttcgaagttgtcccctcgccaaagggacgggtcagtagcgtcttaaagcactaggtggagtcgggtttcgtggctcctgctgcacagccttactgtggttccgaaacagaagtcagtgcagaacctgcgtccatccgttaaatcagaagccatttgtgctgagctttgtcgagaaataaagcatagtgtagtggagatgatcaagctgccacatgattgtagcacagtgtgttaaatgacaaaatgagagatggagaaaacgctgacgtaaaggtagaagccaataatttacatcgtttaccccagccaggtaatctggttaataaacatgggttcatttaatgcctataaagtaggcactagtgtgcctattttacaccatgagaaaacctcagagatccgccgggcgcggtgactcacgc

SEQ ID NO: 21071 - DNA, 601 bp, Artificial sequence
  DNA replication origin
cgcccctcgaacgacggccttaagtgtgcgcacgcgcagggggccgcgctttctccgggcggcggcaccgcccacagcctgggacgtcagcggcgcgcgacgtgctttgctgtataaatgcggtggcgcccggcgtagggacacttcggtcctgagcgcttgggagttaggttgtttgccggcgtagcggccagcgcctgagcccgcccttgatcttcgctgtggcatggcggacgaggggaagtcgtacagcggtaagtgctggtcttcgggtcgggaactggctatctggggcgcgggtgggcggcgccggcctaggcctcagcccccggggcgtgaggccgctaggggcccggcgtccgcggggagcggcgcgcggggggccgggcactcgaggtggacacccgagttgttgactcctggattcctgctggcatcctggtgttgggggacctgcggctcggagcggatggctcgggggtagggtgacgggattcctttgaactttgtgggtggttgatgcctgtcagttaggtttggcggcctgactcttcctttaatgtgagtgagtgccctgctcgtgggctgccctgatgcccta

SEQ ID NO: 21072 - DNA, 996 bp, Artificial sequence
  DNA replication origin
ggaagatgagaccacagacacacaaagagggcccagggagtgtgagagggggcttcccgagggtaggggtgagctcagaggcctcgtcgtcccctcaggcgccgaagatatcgacttgaactccccggaccatccgaatcacaagtcgaacgaaagccttctgattaccgtgctgtggcggcgactatccacgttcggtcgtcggggctcctcgcggccaagcaagaggcaaccagaccagattcggaagcaggagagtccgatccgagaaggcaaccaggaggagccggagaagggatgaccccagacctgctctcagtccgccccaacctccagagaataaaatttctaacgtatacctgcacgaccactctgggggactgggcgcggacaccaccgggcagctggttctttaaggctccttcccggaggcgggcccagccccctgagcgcctgctgtagtactctggggcggggtcacggtggcgccttagccaatgggagggcgggatcgctcttgcgtttgggtgtggggcgtgtctttcgggtcgctgggcttgaaacgcgtgggaccgccccctcgtcactgggggtggggttacgtgtaggtgacgtggccgcttccagtctttggtcgggtttcggcggcttcagtgctcggggaggaggcagtgacggccggtgagattggaagtggcggcggcggcaggcggcagaggggaggtaagattcgctttaagaggggatctggccgccgtgtcagctctggggcagtggttttacgggggcgacgactggcggggggaagggaatcaggggcgagcgggcaagtcctgccggcccggctccgggtgagcgaattccttgccgtccaatcaggaaagcctctgttgagagagacgtcggccttagctaatgagtggttgaagtcttccagaaggcggaccttgggcggggggtgggacttcctgtttcaaataaacacccagaggtttt

SEQ ID NO: 21073 - DNA, 1000 bp, Artificial sequence
  DNA replication origin
taagtcctgggctcaagcaatcctcctgccttggtctcccaaagtgctgagattacaggtgggagccaccgtgcccggcccccctgactcctaagctttcttcccactcaccaggatgagccccaagagcctcaagaacccaacaaggtgcccctagaagacacagagacagatgaactttgggcatccttggaggcagctgccaagcggaagctctcgggtttggagcagccccaaggagctctccaaacgagacggagaaagaagaagcggcctgggtccaccagcccctgacgcccctgtgcccactttgtaaataaactgctgaacacccaccatgaccctgagccttttgtgatgggagaaaggaatgaggggtagcttggggtgggggctgcctgagctggggcgacgggatatctgatgtcacaaaagccgggcctggaggcaggcaggctggcgtgggtggcacggagtccagggccacgcggggccatgggctgctgccaagacaaggactttgagatgtctgatgagcagtccaaggaggaagagtctgaggacggcagggaagatgagaccacagacacacaaagagggcccagggagtgtgagagggggcttcccgagggtaggggtgagctcagaggcctcgtcgtcccctcaggcgccgaagatatcgacttgaactccccggaccatccgaatcacaagtcgaacgaaagccttctgattaccgtgctgtggcggcgactatccacgttcggtcgtcggggctcctcgcggccaagcaagaggcaaccagaccagattcggaagcaggagagtccgatccgagaaggcaaccaggaggagccggagaagggatgaccccagacctgctctcagtccgccccaacctccagagaataaaatttctaacgtatacctgcacgaccactctgggggactgggcgcggacaccaccgggcagctggttctttaaggctccttcccggag

SEQ ID NO: 21074 - DNA, 880 bp, Artificial sequence
  DNA replication origin
cctggctaattttttatatttttagtagagatggggtttcaccatgttagccaggatggtctcgatcttctgaccccgtgatccacccacctcggcttcccaaagtgctgggattacaggcgtgaggcaccgcgccccgcctgtattagcgagtcttggtgaggtaatggacagaaactctgtgcttggtggtggtgcaagtttggctgagaggcagttaaaaaccagggaagggcggggcatcagggacaggggtggggccacgtggaggaaagggcactcacctggctcacgttgaggactgccctgaatcagccatccgatcaggaagccacctgcagcaggtggagaagctgagagagaaggccgttcagatccttgcattctcagctgaggcaggaccgggggaatgaggcctctagattgaccctggcaatagggtctcaggggcagcaccaaggccgagaggtggggggttggggggtgggtcagagccacgtttaggttctgaaggctgggctggtagattgggggttgtcaggccaaggctaggagatgggatcagggcaaggaagcggggtgggtctggagactgaatctagcacctgtccagtacctgtgtgttgggttagccttagcatggttgcccccttcccctgcagggccaggtgtgggtcatgccagccctcttcctcctctccttggggctgggacagtgcatgcctgtctctggatgtggctggagtcaggctcctaggaccagggcagggtctcattagcccagagcaggccttgggtgggcagatggacctgatgaatggttaactgttgcgctgggcagccacagcttgcatcccaccccactctggccactctgcag

SEQ ID NO: 21075 - DNA, 782 bp, Artificial sequence
  DNA replication origin
tcgctttgattagctttataacaagcggtcgttctgaaatactcgctcatgatggctaacagacaacacaatcgccaaatgtcttaagaaaaggagctttgagggtaaccgcccgctgggacctgaaggacaattgcggattgtccttcagccgcattcttggggctgacctgagtggggcacagctgaacgtctgagcgcaggcggctggtccttgggcccggtactggcggttcgcgaggcgggtttggggaggggtgggggaatcctagggaggcggagcgcgtactccccctcggcgcccgggctcaggcccatcccgcctctgcggcctcgccggcccccaggccttgcaggggactacgcccctggcgagttcccagtcggcgcggcccctggtcggcggagccgcggaagcttgggcactgggggcggctcggggaggaaccgcggaggggaaagcgccgcgggctgcaaacggcagaggcgcgcggggtggcgacagtggcgcgggcgcagtgagcgcgtccgagaacagaatgggacgaaacggggcgcttagaggcccgggaatctgtgggtcttttaggcggagaggggcgaaggaggttattcgttttggggaaggtcatggaaacagcaaaggctcagaggtggtgcctaaagtggctggagaagctgaacggtttggaacagaggcgtgacttggaggggtaaatggagaccagattaggaagccttgggaggcacaatcaggggttaaaatcttgaacaattcagag

SEQ ID NO: 21076 - DNA, 1257 bp, Artificial sequence
  DNA replication origin
ctggggaagggctttactgctgccaaaacaaatcagggcttttaacagggagcccaggccaaagctcatatctcactggccaccagctgaggttgccagtaccttgactgtggttttagacattcagcattgcagttaaaagcccctctctctccccacatggaaaccatctcctgtggtgccctgacatacagaggaggagctgggagggagtcctggccctgctcctttctcctccctcttccttgtctatttccttgccccattctacgccaggcccttcactgggtcctggaggtgcagggagggaggagcacacaggatcctgcctgcctggagctcacagcccagaggggcacagggaggcacagggaattgcagctcaacttgacccctgcagagagcagcagaggcccccggggacccaggtcctaggagtggggtggcgggtcagctgagccaggctggggccatcagggcagcttctcaggtgagggggtttgagggaggggaagaggaagagtggctgcagggaagtgatggaggcagggagaaccagatgtgcagagcagcagagaccagagccagggcagtagtgaggggctgggatgtcactcagtgggcctgtgggtgcagagcccagggagggagaggagggtgaggaagggccagtcaggaagggcctgggagctgcccacagggtgtgtcctgggccctgaggtcagaggacggtcatggccagatgtgcccttgggaaggccaccatgggttctgaggagttggatatggagtggcagggacaggaggcaggggctggtcagggggttgtgggggtcacagaggcaggcatggggctgcctgaaccaagtcagtggatgggatattgacaagcacaccaacaaggagaagcttccggagtccacattgattggttttagtgactggatattggcatgaggaagagggcaaaggagagcagaccccaggtctatgatgggacatcctgggatgagggaggaggaggctgtcacccactgaggacagggacagagagggtgaaaatggaaaaatcctccagtcatgaggctgctatgccctggggcaggacatggagaagtgggaaggaggtgaggaaggggaagaaggtggccaagacaggaaccagggtgaggggtgtgcagggaagaaccagctcggcctccttccagctgagtgttctcaggaaagccctgccacctctctgatcctcagtttccc

SEQ ID NO: 21077 - DNA, 1152 bp, Artificial sequence
  DNA replication origin
tttttgttcagtaacaggagacaaaaggtttttaaaaaaataccttagtaggccggcgcggtggctcacgcctgtaatcccagcacgctgggaggccgaggcgggtggatcacctgtcaggagttcaagaccagcctcgccaacatggcaaaaccccgtctctactataaaacacacacacacacacacacacacacacacacacacaccttagtaaataagtaaataatctagaatatgagaagagatccgaaaccaacagaaagaaacaaaaagcagagcggagcagggtcgggagctgagcgctggtggggtgggggcacggggtgcaataggaattagagagtcagggagactcccagagcagcgagctggaggcggcctcgcctggaggccggagatgagccttgcagatggctaacacctccggcagggggagcagccgagcaaaggccccagcggggcgcgtgtctgagcaacagcaaggaggccaacgaggccggagtaggcgtgcggggagggcagagggtgggaagcgggggtagaacggagggtccaagaaaagcagccggtccggaaggcaacgcagcacctgacagcgctacacctttgcctctgtcactggcaggggccactgccaagtttagaacccaggagactcaggatccaacttgggttttaaaagggtccctctggctgctccgttgagaagagatgagatgtagggtgcaaggaggaggcgggagcctgctaggaggcaactgcagagaggggggatctgggcatgagtagtaatggatgctggatctcctttgaagctgcagcccaccgactgtgctgatggaatgaggtggggtgtgaaggaaagaggagtcagatgactccaaggtgtctggacagagcaactgggaggcgggatggggctgtttagagacagagtaggctgggggagaaccaggcactcacgctgggcagcgggtatcccaacgagaggcggggacacagcgcacacatcagtatggagctaggggtcatggtttagaatgaggatcatccgtgttccttatgagatcagctcctcctgagagttggaggcaaaagcctggctgaaatgtgtttgagagaatggggacacagtggcatgtgcctgta

SEQ ID NO: 21078 - DNA, 827 bp, Artificial sequence
  DNA replication origin
accgactgtgctgatggaatgaggtggggtgtgaaggaaagaggagtcagatgactccaaggtgtctggacagagcaactgggaggcgggatggggctgtttagagacagagtaggctgggggagaaccaggcactcacgctgggcagcgggtatcccaacgagaggcggggacacagcgcacacatcagtatggagctaggggtcatggtttagaatgaggatcatccgtgttccttatgagatcagctcctcctgagagttggaggcaaaagcctggctgaaatgtgtttgagagaatggggacacagtggcatgtgcctgtagtcccagctactcaggaggctgaggctggaggatcacttgagccaagagttcaaggccagcctgggaaacatgtgagaccccatctctaaaatttaaaaaataataataataataataaagaaaagagagagaatgggagaagatgaactggaggtgatgtcaaagagagcacctgagcacctgagatttttgtttcggtcttgaaagatgagggaaacttgtatgtggtagagacataatttaaacccagatctaaggacatccaaatcctacacaccgtgctgcaatcatagaagctggtggggaggaagtagcctttatggagatgtacggagagaggcaagcaggagataaggaggaggcggaaggagagggcaggcagggcaggggcttccactgtggtgagtgggaatctcaaggtgcttttggggtttggtcagaagcagggttcttggggtggagcccaagcctggaattttttttaaagttcccaggtgggcc

SEQ ID NO: 21079 - DNA, 1378 bp, Artificial sequence
  DNA replication origin
agaggggcccccccaccacaaattcggaaaccgagtgaccccggcgagggacgcgcggtcccagccccgggacgaggaagggcggcggcgcgggcgggggttcttttcagaactacagcagggaaggcggcgggggtggccgcggggcgatccagggaaaatcggcgcctcacctgctcctcttgaggcagctgctgccactcgctgaggggacaacatggagcctccgccttcaaagcagaagcagcaggggtgcagaggagagggacgggtgcgggcgggaacgaaccgggccctggaagcgggaaacgggcggagcctgggctctagaaaaaactagccagaaggtggggcacgcggagccgcgacggagcgagcgcagcgcggtctgcgtggcccaacggacagcccgaggcgtggcgagcgcaggacgaggctaggcgaggcggggcgggaaagcgcacgcggcagaatcccgccaccgcctgccgcgtgtgcgcgaagcgagccgccgggtacctgttggcggggcgctgagtgctaccgtcctttgggaattgtagtcccgcgctcactgggtcccggccagcggtcctcatactgcgcactcatctggggcggggcttggcgtggttctccgacgactgaactacaactcccagcaggctgtgcgggaaggggcgggctggctcgggtcctcctgcgagctgcggccggcgcctaacgtgcagaccaggccccaggccgaggctttatcctggaaccaccagtgtgagagacagctttggtgtttaactaggcctgggaccacaggtgggcagaagagaggcctcaaccctggatggcatgaacgtcactgggtctttaatgattttgacttcataagggcaggtggccgtgacttcattaccacctttattatcatctccctatattcctgtccctggccatggctgatgcgcaccatcaccgctctgatagctaatgtaagaagtccaggccgggcgccgtgcctcacgcctgtaatcccagcactttgggaggccgaggcgggtggatcacctgaggtcgtgggcgttcgagaccagcctgaccaacatggagaatccccgtctctactaaaaatacgaaattagccaggcgtagtggcgcacgcttgtaatcccagctagtccagaggctgaacaggagaatcgcttgaacccaggaggcggaggttgcagtgagccgagatcgcaccattgcacaccagcgtaggcaacaggagcaaaactccatcaaaaaaaaaaaaaaaaaacttgcacgcacatcccagcattctctgctccttttccctgcattacttttctccaaaagacttcataccacttggccaggc

SEQ ID NO: 21080 - DNA, 935 bp, Artificial sequence
  DNA replication origin
cttgcgcctgcgccctgcgccgctgcgcgctttggcacccgcttggggccctttgtgcgcatgcgcgctcgcgctcccgccctctagctgcgctcggctgagtcagtcagtctgtcggagtctgtcctcggagcaggcggagtaaagggacttgagcgagccagttgccggattattctatttcccctccctctctcccgccccgtatctcttttcacccttctcccaccctcgctcgcgtagccatggcggagccgtcggcggccactcagtcccattccatctcctcgtcgtccttcggagccgagccgtccgcgcccggcggcggcgggagcccaggagcctgccccgccctggggacgaagagctgcagctcctcctgtgcgggtaaggcgcgcggggagcccccgccctgggaaagagggcgagcgggagcctgggggctggggggattaggaggcgaggcgggaggaggacgaattaccctcgactactgacggcttcagccccccggggacgagcgtttggaaaatgggcaaaggggaaggggaacgtaaggttgtgcaggcggtgaggaaatagcggggtgtgaggaaaacaggttgggggcggggagatagtccagtgggcgttaacgccaagactgggcaggtggggaaaaataccagctcgtgggataaaatggagagttgctcgatgcatatggtgaacctgggtgatttagtgaggattagagagattgaaaggatacgggcaggtgggtggtgggagaaacaatttgttactatttttgaggggatggtggtgaaagggttgcattgcaggtttgcagacaggtgttgacataatcaagcattcatgatagtcctccaaaatatttttggctgcccatgggaaggatgaggaagtttaatggaagcattgtagcctgtttt

SEQ ID NO: 21081 - DNA, 703 bp, Artificial sequence
  DNA replication origin
gggacgagcgtttggaaaatgggcaaaggggaaggggaacgtaaggttgtgcaggcggtgaggaaatagcggggtgtgaggaaaacaggttgggggcggggagatagtccagtgggcgttaacgccaagactgggcaggtggggaaaaataccagctcgtgggataaaatggagagttgctcgatgcatatggtgaacctgggtgatttagtgaggattagagagattgaaaggatacgggcaggtgggtggtgggagaaacaatttgttactatttttgaggggatggtggtgaaagggttgcattgcaggtttgcagacaggtgttgacataatcaagcattcatgatagtcctccaaaatatttttggctgcccatgggaaggatgaggaagtttaatggaagcattgtagcctgttttttttgtttgtttgttttgtttttactgttttcggctagactccatgaatgccggatttttctgaggctccgaggtagaaggaggcgtgatgagaatagctcagggaagatttgggagggagctgctaatggtccaagatggatccgtggctgcatctgcaacagcctgctcttccctggcgctgcgtgggggtggggacacgcaatcagtcgcttatattctagaaaatagagtcatgctaagctatcaacatgttttgatttcatgttttctgtgggcta

SEQ ID NO: 21082 - DNA, 1342 bp, Artificial sequence
  DNA replication origin
taattgggattctcggcctctcggaggccccggctgcggactggggcttccagcgggaggctgggccgcagggctcgggagccttcccggggtgggaaggcgcgttggaccgagggcggggctacgcgcccggggcccgggctggaccagctgcgcttacctccccggcaggctcagtgagaaccgtgcgcccggcggccccactctcctcccaggccgctgccacgccctccaggaaagctcttgtaaagggattagcacttttttcctttgctcctcttgccccgagggtctctgcttacccctaaaccaagtccgtgggagcccggggcacaggcggtcccggcagtcagccttcgattcccgccccatccccatccccctttgtccgcggtggatgcggcgtccgttctcaacccgcagggcctggggccgggcctcggcctcttttccccgtggcagccgcaggccctgtgtggcagggatggggccccgcgatctcccaggcaggtccgagagggatgtgtagattcattctcctgtggagaacaggtggccccgagatcaggcccttttttgctctttgtattttattttgaaactgtatttaatgcttttatatgaaagggggaggggcggggacagagctgacccagtcacccttatgtgcaaatgtcttatttattatgcgtgtatcagagataagctgtgaggtggtggagggaggacctgaaggaaggaggagcgagggcagaggcggggacgggaggaccccaactagctgtgctgatgttaatcccgctgggagactccgggccctactgtctgctcttcacaaagccaggctgctgcaggaacagttcccgcggtcctaaagccggggcggggaggctagtgggtggaacttgagggttgggtctggaggaagagatgcctgggcagcgtggtccagcccctgcctcggggtggaaaggcagagagcaaagaggaggcccctcttattccggacccccaggccagagcccaggagtgggaaagcagagggcaaagaggaggcccctcctctcatccctgacccccaggccagagcctaaggttcaagtgcctcaggcccagtccccttgacgcttcctgtttgggagttggattttataccacggattttatagcatttttatataattgaggattgtcagaattggaaagggccctggagatcactagtactaccctcctcaccttcacagataggtaaattggagcccaggaaccgagatgatcacacagccaggtagggacagtacaagaactagaatgaaaatcctagctcctgactcagtgt

SEQ ID NO: 21083 - DNA, 836 bp, Artificial sequence
  DNA replication origin
ccccttccccaacaggcgatgacctcgccccccaggacctgaccggaaagagccgggactcggcctccgctgctggagccccctcctctcaggatctcagccccccagacgtaaaggaagaggctggctgggtccctgagaggcccgggcccgcagaggaggaggaggagctggaggagggcgagggcgagagggcgggggtcccgggccggtcgccgcggggccgcgcccaccgccgccacccccaggagcgctggcggctggagtacctcatggagttggacggcggccggcgcggcctggtgtgcggggtgtgcgggggcgcgctggcctcgctcaagatgagcaccatcgagcgccacatccgccggcgccacccgggctccacgcgcctcggcgggcctgtccaggccctcatcgcccgggagtggagcgagaaggccgcccacctgctggccctggggccgccccgccccgagtccccccagggccccatcccccccggcactgccgcagcctccgacgaggggggaggggacgaggaggaggagccagaggaggaggaggaggagtggggtgagcggtggggccagagcaggcggagagggagagccgggcagttgctggggcagaagggactggaggatgggatagaagggcaaagatggggtgactggagatgagacgcggggcccagcccgctgccccccgccgtcgccaatgcggtcctttgtccctccttaggcgacgttccgctgtcccctggagctcccttggagcggcccgccgaagaagaggaggacgaagaggacggccaggagcctgggggactcgcc

SEQ ID NO: 21084 - DNA, 964 bp, Artificial sequence
  DNA replication origin
aggatttcaggagagaggaagagaagggcaaaggttaggcctggggcccaagtgagtgagaggcttgtgggagacctggctgtagtgggtatgctcccgtggggccagcgtctcagttccttccctccaaccctttcaggcaaagccccagctggtgggggctgccggcgccagcggcgagggggcccagtggcaccccgggctcggcgtctgcgcctctcagcctcccggagggccgggggcagcagggggctgggggcccggcgcctggagaggaggctgaaggagtccctgcagaactggttccgggccgagtgtctcatggactatgacccgcgggggaaccggctggtgtgcatggcctgtggccgggcactgcccagcctgcacctggacgacatccgtgcccacgtgctggaggtgcaccctggctccctggggctcagcggcccccagcgcagtgccctgctgcaggcctgggggggccagcccgaggcgctgtctgagctcacccagtccccaccaggtgcgaggcccatcccaggctgagaccccctcatactggggctctgaagtggggtctgtggccaaaactgggaggcagggacttagggctgagggctgaaggccaggagctggtgctccacacacatactttccccctgcccccagacagagacagactggggcctctagcttggggctggggtgaggagccaggatggacccctctgagtgggcaagggcaacccagccagcaggctgagcccctctccctcaccccttccccaacaggcgatgacctcgccccccaggacctgaccggaaagagccgggactcggcctccgctgctggagccccctcctctcaggatctcagccccccagacgtaaaggaagaggctggctgggtccctgagaggcccgggcccgcagaggaggaggaggagctggaggagggcga

SEQ ID NO: 21085 - DNA, 969 bp, Artificial sequence
  DNA replication origin
attcagaccactgtgaggcccgggcctcgaggcctggaaagagccgcatccctggccgtgaccaccggcgctactaccacgaccactggcggctggagtacctgatggacttcaaccctgcccggcacggcatggtgtgcatggtgtgcggcagctccctggccaccctcaagctcagcaccatcaagcgccacatccgccaaaagcacccctactccttgcattggagtccccgggagaaggaagtcatcagcaacagctgggatgcacacctggggctgggggcctgcggagaggccgagggcctgggggtccagggggctgaggaggaggaggaggaggaagaagaggaggaggaggagggggccggtgtcccagcttgcccgcccaagggcccaggtaatgcaaatgcagattctgtacaggcaggggcctgggtggccagtggggcacagtgggccagctgctctgccaaggagctggtgttcttgagcaaggcactgctcctcctctgggtggggtctgtttattgcccttattatacaaaggtgggggaaggacagtggggtgagagggtctccgatgtccatgacagcttgtacattctgtggtttttgaagtatcaaggagagaagttgggtgacaggcagtggaaaggcttggagcagggaggcctggctggggtgggtgagggaaggggagggtgctggagaggtgtggctgacggtgaaggccagggacagggctagattccagtctgggggaggtgtgggtggtgcttgaaatgctagcagaggagggtttagggagttaggatttcaggagagaggaagagaagggcaaaggttaggcctggggcccaagtgagtgagaggcttgtgggagacctggctgtagtgggtatgctcccgtggggccagcgtctcagttccttccctccaaccctttcaggcaaagccccagctggtg

SEQ ID NO: 21086 - DNA, 2669 bp, Artificial sequence
  DNA replication origin
gccacacctctccagcaccctccccttccctcacccaccccagccaggcctccctgctccaagcctttccactgcctgtcacccaacttctctccttgatacttcaaaaaccacagaatgtacaagctgtcatggacatcggagaccctctcaccccactgtccttcccccacctttgtataataagggcaataaacagaccccacccagaggaggagcagtgccttgctcaagaacaccagctccttggcagagcagctggcccactgtgccccactggccacccaggcccctgcctgtacagaatctgcatttgcattacctgggcccttgggcgggcaagctgggacaccggccccctcctcctcctcctcttcttcctcctcctcctcctcctcagccccctggacccccaggccctcggcctctccgcaggcccccagccccaggtgtgcatcccagctgttgctgatgacttccttctcccggggactccaatgcaaggagtaggggtgcttttggcggatgtggcgcttgatggtgctgagcttgagggtggccagggagctgccgcacaccatgcacaccatgccgtgccgggcagggttgaagtccatcaggtactccagccgccagtggtcgtggtagtagcgccggtggtcacggccagggatgcggctctttccaggcctcgaggcccgggcctcacagtggtctgaatatttcctgcctgaagatgctggtcccctggccctggaggagggcaggggggcactcccccaggaccccaaggcacccccttccagctgaagatcttgccctgaagaaggggaaagggagacagtttttcaatctctgatttccagggaaagaggcgagggctttgatggtgagccctgagaaagggagctgggggagggggtgttccggggcaggaaagggacggcaacagcaataaaagggatggtagaagtgggagccaaaacattagccctttacaaagggcaaggaccctttaagaggagatcaagaacaaaaggacgcagggcactgtggaaatagctctgactttttaaaaaataaggtgagggccaaggagccaaccagctctgtaaggtgccctttctggacaagagccgtagggagaaagccaggagagcagcaggccagggcggttccagctggagcagagcaggcagtggggccagacaaacaaagggggcatctgtctacagccagggctgcacacgggacccacccacctggggcccccgccaggagggccccacccacaggtcttctccctttttccagtaatgcttcaaatatagcttcctgagactcccattttggggatgggctaggcattgtcagttccccaaatctaggcccccacatgggagggatccccaagacaaagctgccaacatctccagggaaaggagtttctgagactgaaacttctccagattctggaggagccaatgaccctgtaaagggatggcaggagggccaccagagtgacaactaatgacactgcggcagggagtggccaccatccactgaagcccattaagtctttctggggctttatttgctgctctggcagggagccggccactgcccagcagtcagaagggcgggcactggagaggccccactaacccaatggtgttccctgtgccagacacccacccagagcagtcccctaccctccctacagttcccacccctcttgatttagaaaaatggtctcctgggcacacaggcaggttctggtcattctcccagtggagaatcacagggttgggaaaacaaaagacaggatcagaaagggctcctgtcacccttgtggaagtttttttgttttagtttttatttaagtagatccatagaatccactggcttcggagtcataggcctgggttcaagtcctggcttcactggtaacttgctctgtgacctttgataggtcatgtccgcactctgggcctgagcttctttgtctgcaacgacactggctagctggctggtctctaagcatccttccagcgctggatccaggctagtctaaggtggattggccctttaagagccgaaaaagggggaggagccgaggttctttaaaaacaaaaggggatggggcgtttctgggaggggagagaccgggaggggagcctggagattcgggcagagtctccctggcctggaggaaaccctcaagggtcttaaggcgtgaccctgcagccgggaaatgagtcaacagtctcctttgagagcgaacgaggaggactggttggttccgctagagctgacaaattagggcaaaaaaaaattctgaaaagaagggaagggagaatgcaccggccggaggggtgcctgcctttgtgggcgaacccatcgctttaaaaactgcccgcggtgggaaaagatggtgtgggcccccggggcgcaagcgatgcactttcctagggagaatgtgggagaaaagaaaaagggtgcatgtctctcacaaggccacgagacgagaggagcagcccgatttaaaacagcagagttcggagctgagctcagctccgctggggaaaagcccccgaaggggacccagggtctgggcggacttttgagagaaagcccgattagggagaccacctgggagtctgaaagag

SEQ ID NO: 21087 - DNA, 1038 bp, Artificial sequence
  DNA replication origin
gcgccccctcccgcgggagccgcccgggagcgctgagagctcgggcttctcatgggaggggcggacaagcgaggctcccccgagccagccaggggtgggggcggcggccgcagtgactcgggctggggagaggggcgcacagcagacccgcagagagccggctgcgccggggcccgaccctgcgggctggaggtggccccaggatggaagccgggaggagagggcgtgcgcggcggtgactcaggatcctgcccccgcaggcctgggggtgcctgacgaggcccttgacgcagccccagacccccggcccggccctaggaagcgaaaaatgctggccccgggcggggtgtcgggcacctggggaggcgcgttaccacggctcggaagcgctgggcggaccctggctgcgggtcccggggcgcccccggtcccccagctccggagaagcggagcgcagggacccggagaggcagccggggcgcagcagcctggggtcctcctgcgaggaccggcgggaggagcaggtgctcgctttgcctgaggttgggcgcccacaacaaaggcgattcctggagatccaaattacagggtgcgggaggcctgcagggtcttcttatctggaggcgggttttgttccctgcactggcgagttacccagctgtcgccgatggcagttcgtccgcttgtcaccacctactgtgtgcccgcatgctttcagacgctggacacacagcactgaaaaacatgggcaagaccgatactgcctgtgactttccttctcagaggcacccacagcctctgaaaaggaaaccgctccagcctttcgggagccatgggaattaaattacttggaacacaggaaacctgtccccgaagtgcttatgaggaggggacaagaactaagatttcttaagtgcctctgggctctgtcgccgcggagatgtcccgtctcttcctcagcccccatgttgacgtgcttgagactccaccttgggtaaactgagtctcctttcacagctctgctctcttcgcggcagg

SEQ ID NO: 21088 - DNA, 1300 bp, Artificial sequence
  DNA replication origin
gccaccaccatggcctcctcctcgtcctccccttcctcgcatttcagcgtcacctcgaagcagtcgagtgcggcgccctcggcctttagggccatggtgcggccgtgggcgatagcagtggccggaggactggcgcgcaggcttcggcgcgcagccggcaaccgcctcccgcctcctggccggaatagcgccgggcccgccgcccgccccgcgcagccccctccccgccgcccgcccgccgctcgccggccgggcctgcgaccggcgcgtccgggcctccccgagacctcggcgcgtcgggagcccgggcggggagggctcaatccggggcccctgccccccgccgctcccttttatggaggctcattgtcggcgcccgcccggccggccagccgcggacccgcccccgatgccgcgcggccaatcgcgcgtggccccgccccgggcacgcggccccgttagaaaccctggacccgggaggcggcgggaagggccgaggggacccggggccacccggtgcgcagaggcagaggggcccccaaaacccgcaacgcgggcccctcagtctgcgggccaagcccggggtttccctccattaagaagtcagttgggcgtttctgctggcgtggagagcgctaccaggtgcccccggattttgatcgggagtcgcttttgcctttccgtggacaagccttcctccgccagcagatgccccgggcaggaagagaagcggtgggtgagtggaaagggccttggtatggaaacgcagagaccgaattccttctcatctgccagctccgtggccgtgggcacattatctgttttcttagtccggctcatcgtttctttcaaaaaccattttggacccttctgggaaggcaaagaagagaagcagagtggactgtgagcggacataaaccaccctgatgggtatgatttccatttttggcacgggagtccggagattttgtgaccctctccaaggacacacagcaatcccttgagagccccaagaccagagtccagttgccatgacattgctgccctataaccacactctgggtgagcttttacttctgtgacatggaatgtgcatctccctcttctatagcaaccctcatgagatttcagctcagaaaatgcaaaatgtctgacactgaaaatccatcttcgaatgtcgttatatcagaccagacacagtagtattcagaatcgcgtagtaggatgggggtgtgagaagaggtgtgaactagtctatatggattgcagtcaattttttaatttttttttttttgagaca

SEQ ID NO: 21089 - DNA, 1524 bp, Artificial sequence
  DNA replication origin
ccgcaccatggccctaaaggccgagggcgccgcactcgactgcttcgaggtgacgctgaaatgcgaggaaggggaggacgaggaggaggccatggtggtggccgtaattccgcggcccgagccgatgctcagaggtgaggatggaggggattccacttccgcgtcacggtgcggggccggggctggggccgtccctccccagtcggggtccgggacccgggcaccttctcacccccttcagccttggggcccaggtttccctctcggatctgggtccagggcgcgctcttgcacctcccccaccatggtttagaagctcaggcctcctcgatttccccctcccttcccctttcccccgcccagggtctggagacttcgatccacgccccgcacgctccggatcttccggtgcccaagcgccccctctcccgggcccagcaccagaggccggatccccagaggcgctgggtggttgcggccgccgtctcacagcctgggaaggggaggcaagcacaacggccgggctgtgttctagtccgaggggcggcgaagcctctaggccggaggctacaggcgggcgccgctgccgacctccaggagaattttaagggctctccgagcataacgcttccctgcccaccaccccgcttcattcccattcccgggccttccacttgcaggagccacaggtgtcaagttctggagagaagggatgaatgggactgcatacaacagctagtttggaaaagcagtgcagtgctagaacgagattagctttgggaggggatgggaggaacaatctcagaacactcgctctcccctcccccttcaccgatttctagtcctcaggagcttgcaaaccgtaagaaaacaaagagccatctttgtgggagacttaatatgcatgaaaatgcaaatatatttccattctcccaccccgcttttcttaggcgggatagtacccaaaagaggttgagagcagcaatgccattcattgaacttcagccgaacagaatgatgtctgcctgcactgcctgtcatcctttttggaactggaagggttataaaattcatgagggaaataaaggtcacctcccttctcggagcatttagtccaaaagataggttgttttcctacttctgctaatatttgttgagtgttcattgggcattgtcagaggctgtctcagttaatcctctcaaccctgcaagggtggccttatccccactgttagggcaggaatagacaggtgaattcattcaaccaatattcactggacgtctactttaggctgtttaggctagtgtttttaggctgggaagtagtagtaaacagagcaaccgaaaccctgctcttgaagaacatatatataccaatggctaaagacagagaaataggttcatgtatagtatgttgggtggcaataaatggttcagagatcactaaagcaggaaaaggagaaagaggaggaatgggtatttaattgaatatatcgagtggttcagaaagggttttctaataag

SEQ ID NO: 21090 - DNA, 935 bp, Artificial sequence
  DNA replication origin
ggaggcccgggggaggcgtgggctctggccgcagtgctctgaggaaatccgcatcagtgaggatggagcagggcctgggcgcagggcgcctgcagctcctgaggctttttcactcacagttccatcccgtcctcccttccagagcccccatcgccagactcgcccacggagactttcgcagcaccagccgaggtccgacacttcactgacggcagcttccccgccggcttcgtcttgcagctcttctcccacacccagctcaggggcccagacagcaaggactcacccaaagacagggaagtggcagaaggaggccttccccgggcggagagcccctctccaggtgagccctcctgagagggaagcacagtagggacctcgcaggcagcgctcctgggccaggcctcagagaggctgctctatggcagagcccacagtaggggtgggtggggtgggtggggtgggtggtgctcaggtttcctggtacacggggccggggcaggggatctgaatgatgaggaaggctggcctgaaagctgagcttttctttttctgtttgtttgttttttgagacggaatcttgctctgttgcccaggctggcatgtagtagcacaagcccggctcactacaacctctgcctcccaggttcaagcaattctcctgcctcaccctccctagtagctgggattacaggcgtgcgccaccatacccggctaatttttgtatttttagtagagacagggttttcccatgttggccaggttggtctcaaactcttgacctcaggtgatccaactgccttggcctcgcaaagtacaccacgcctggcctatttttttattttttattttttgagacaagagtcttgctctgtcgcccaggctggagtgcagtggcgcgatctcggttcagtgcatcctctgcttcccaggtt

SEQ ID NO: 21091 - DNA, 773 bp, Artificial sequence
  DNA replication origin
acgtgttccaggtactatgggtgaggacagcttggcgctggggaaatcagcccaggatactccctgtccttggtaacgcagtgtaaggggaagtgaggaatggactgcagttgccatacagacttcctgttagtcaagggctctccaaagctgagaaggacctccgagttcatgaatccaatggcttcactttactgatggggaaaatgaggcccagaggaggaaagaaaagaaactttaaatgccttatcttgcagaggcattttaaaaggtaactggaattcagaaatgtcattttgaatgtcaacgcaggagcaaaggcaaaggaaagaggagcctaaactcagtgatgttatgtgatttttccaagatcacgcagcattggcacttggcagagctggggctgaaatgcagggccctggacgctcccgcatccggtgcagaggacgctgccctgggcctgcctggggccttgccgagccctgcggactagatgcgggaatgcacggatgaatccacagaagccaagatagacggtggcagacaggcaatagactgatgctgcatttgacaggtatattgataggctagatgataaaaagaagatgaattttatgagctgaccgacagatggacagaaatgcagacaggaagctgctatagaaccagaggatgccaatcacagggacggctaacaatcttgttttgtatttagtcaaatcacaagcacagacaggtgacccacgcttcctgttcaaggtttgaaaatgccc

SEQ ID NO: 21092 - DNA, 2093 bp, Artificial sequence
  DNA replication origin
attcccagtaaggagagagaaacagccggtaggcaagggagagaaagactgcgagacacagaacatgctcctctgtctccaaagacccctgtcccatgcagaaccagctgccaaacccagtgatgaaatggaaatcaaccatccctccctctcaacccctatttcacccccagaagcaaataatccacaagtaataaaagggtcaaccctgcagagaaaaactctgcctagaacttctctttagttcctaactgcccaggtgacagagggccagggggtaacaaaatagaaaaacacagtaaaagaaaggaggtaagatttttcaaagaagaatgttcacatgcaagagaatacaacaactgctctaccgggctacaaagaaagaagggagtaagagggaaacataaaggatggaaggaggggaaagaaggcaaaaagcacagcagccccggggcagaagcacttctttttcaagtcaagtttttttggcctagtaaagttctccaccaagaaaggtatgacaggcaggggactctgcacagagcagtcagcaaaggacgctagagatggtgaaagaaaggggaggtgtggaaagtggacgtctctgggatcaaaagtgagatgacacagaaaggctaagacttgggtgaaaaacatagcagtgactgccaggatgagggggaccgtgtagagtcgtgaggctgaggtgtagctcaagaaactagcatgcaaaacacctggacttcctgggcattacagagacttagccaataggaacagaatggatccaagcacggtgtggggatacacaggacatgaagaaggcaggagactaatgcggagatgaaaggcaacgctgattaaaaggcacagtaaggaagatggggtgagggtggagaaacaggaaggcaacaagcaagaaagaaaatactctaagtgccaggcacgggagtgaagacacagaaagtcatcatggtttgtgttccagcgtacgaagacagaaaggcaaaaactgtgatgcagcgaggtctgggaaaggactgagcaacaggttgtgttaatacggtggggccaagtgtctttgggttgggagaaagagcccagtagaaggctggtagaacactcacagagagaaacaagaggcccagggacctaaaagccaaacccgaggggaagagaacaagagggatccaaagactctgaagggagtgatgattggaaccccaaacgcaacctgtgggaaaactatgcgcatgacagctgtggggaaacacggaagcgacaaatgccagcgccaggatccagggagctcctggagcaaagaagggaaagtgatgagcaaagagtaggcgaaggatttggaaaggtgatgagggtggagctggtgggttgcaagcaagagggagagcacaatttggaaaacgaagaagcagggtagaaaaagctgggggaactgcaaggggccagggatcgagagcgcagtccagggcaaggaccctgagggtgataacccagagactggcagaaccggtgcgggcggaggggaagcgaggcaggagagacgaagggagaggtggacaacgatctgtggcaaatcgcggggtgctgctattcgaggagcgggagggtggctgctttaagcgtgggtggaggaagaccagaaaggcccctgagagaaaaagggaagagaaagggaagctggggaggtgacacggaagagcgcaggagggcggtgaggggagacgggggttggcagaaagacaagtgtgcagcttggagtcaggacgaggtgggtcccaggtcaggactcggaagcgggatgtgcggagccggagccaggagccggatgacagggcagccgaggcttgcaggatggcagcaggggcacgaggagagcagaagagggaggaggctccgcaaggtgcaaagggcccagccagagaattcggggagccctcggggctccttacctgctccgtgtccctctcgttcagcgtgggtaggggggtccgagcgctggacatggcgccggtatctcgggggagggaaccgagaagcttggaggaagggagggaagggaaggcgcggagccc

SEQ ID NO: 21093 - DNA, 1271 bp, Artificial sequence
  DNA replication origin
gttgaggccagggaagatgcacccaacctaagaaaactgaaggtagtaagttagcaacaagagaatggagcttaggaactaaagaacctggctttcgggaaaaaagggatattgtactctaagagattcaaagaagaaactccccaaaccacccagccagctcttctgaagagcaggggtatttagaagtgctttccatttcccaagctattagagaacagggtggccttggacagacctggcagacatctagctgggtcaccatcacccctaaggagactggtctccagtaacagcagaatgagtgcacacacctgccacagagtgccagcccgggacagtaacgtgctccagagttcacatactcatgcgccccggaatctcctccagatcactgctgacatgcagagcagggaggtggactgagtcccgctctgagctggtcactccagtttgcctggcagggtgggggtgggggtgggggtgggggcagggagaagtgggggagaggaggaggaggaggaagggagattatgattctttattttcaagccctgcccctaaaaccagggagggaagcggcggggttcccgttgcaggagctccaatctctgggcactacagagccaaccagctgcataagaattttggagaacgtgcacatcaaacaagctgggaaaaggaggggaaaccaaccacggtagaagcgggttggtcccctgccaagaactctgaatggtactcctatcagaactagaacatagcaggaggtgggcaggtttatggcctctgggaaaaggcaggtttatggcctctgggaaagcagtaaagactggacaagcatggaaacaaaactcactccctggcaggagacgacagcctatggagtcagaagtgaaatgctgtcccagtaaacctttcccagtaggataatcacattctaaccttaggtcaattttcatgtgctttgccggctgtgacctggaccctgcagtgtggaacacggtcacttctacaaccctgtaagttaaggtctgcactccaagcacttgtgagggaagagggactctcattggctgtgttgtgcaatctagtctgtggccaagggcaaagcagaagccacagatgacaggccctcccacagggagaggaaagctcctccctttccagaacacagcccaaggctgccacagagaggtgctgtttagtgacagaaatatttgtcaggagtggccggaggaatggccactacatacttcctctttctcacc

SEQ ID NO: 21094 - DNA, 952 bp, Artificial sequence
  DNA replication origin
ggcaatggggaccaacccttgaggattgagtccctgtgatgccgactatccccggggtccctaaggaaaccctggaaggttcagaacaaaaaggtttccctttggagccttaggacagcttcctgcatacctgttctgagagggagaactggaaaagaggggcattaatgctcttttttgttccctccacttcctggccgcaggggacagacccatttcttgtggctaagatgacaagaacacagcaggacccccaagtgggaagaagaaattgttggggcaagggggtagggtgggctgagggcagcaggtgcaccagctgccccagcacacttgcctgggccgcggcacctcacagttactctccgtggggggcagcccagaggccttgttggggtgcacggaggccgacatggatttctggtgctggcggggccgggccgcagagactgcggcagaagcagaagccgtggaggcccgggaccctggcatggttaggctaggaaacaaaagcagcggagaggcccgtgttaggggtgagtgagggcgggaggcctggattaggaagcaagggcaggggaagggccagagctggggagctctggcagggtagaagtcaggcctgggcagcagcgggatgcaagtcagaactgaggaatgcggggctgagaagtggaggtgagtgaggtcgggaagcagcgaggtgggtcagtgcctgggaagaggaatcagaaatgaaggagagcagacaaggggccgctgcctccaggctgcactggcctcctaagaattttaagaacaggagagtttcttctacagaaagagtggggtgttgctgaggggaaactttcataaactcagaagagatagagccaggaatgcaacaccaagaaatgcggccggtgaaggctggggagctctggtctcatggggatggctggagtcgccctct

SEQ ID NO: 21095 - DNA, 1409 bp, Artificial sequence
  DNA replication origin
ttgaggcagcagccagtcatgcagtcaacagctgggtgggaggaggaggggatagggaaagcctgaagaccctgtctggacgttcctccatcagctgtggcaccaatgtgcctgccaggcatcccagtcccaatgcagggcctgagcagacagccttggggaacaagcactcttaacctggcccttggtcttcagcttggtatttggtccccgaggcctgcagagaggatgagcataaggccaggggtgaaagagccaggaaggggactgtgaagggagacccctgagtaagggtgcagagatctcctgttgttttgctacggcttggggtagaatggccgttgccctagaatgtcccagctccccgcactttggaagagacaggccatatctggagaaaacagcctagaggagaagaggcttgatttatccagatgctgctggtggcaggggtgctggggcaggggtgcgggtgggtggggctagttctgcaggagctgccaggagggggtgctgtgctccatttgtgagacaaaagctcctaaggtctgggggagccagactgaaaccttggggccccagggtccccgtagtgtctccaaagtcctgcgatcccataggccacggggaagaggtcacatagctctgaagttcaggaaacccaggagacaacaaacaagataccatcccagatgcacttgtaaccctggagcttcctcatagcgcatgcacatgacaagggaaagggcaggaaaggatcccaacacttgtgaccaaaacctggggtgagagggagtgggggtggggtggggtgggtgagaggagacaatcttaaagggaggcttccctgagacagtctccccttacttgaggacaggcgttaactgtgggcccaaggaaggccctcatttttaaagccatttgccctgagtgggccaatgtggcctcttagccctgcctgtttgtactgggggcacggagggcaggccttgtgctgatgcccaatcagaggcagtcttcatccctttaagatggcagagagaggagggccacacagacttggttaagcagatggaggagagtaagagccagaaaaggggagttagtgatggaggcaggacacaggacacagacacacacacacacacacacacacagcgggctcaacgcctaccttctggcaaacctgaaagacagatttctaaaaaaacaaacaaaaaaaagacaaaataaaaaaagaaataaaaaaaaaaccaacaagacggtatgtggataagcaggtgggggaggtggctttacaggttcaagggtcatcccattttcggaagagccgctcagcgagactagagtcccaggctttcagacctgcccacactctctgcaggcctcacacttgcattctggggctc

SEQ ID NO: 21096 - DNA, 2331 bp, Artificial sequence
  DNA replication origin
ggtgcccgatatccgcttaaatcgaaccccgttgagagagagccgcggcagtttgcacacctccatctcccactgcacgaagtcctcgtggcccggcgtgccgtgcatgcacagcagcatgtacttctcatgcagctcgctctggcagctgttcgcgtccagcaccttgcggatctcccgcatcatctcgttgggctccatggagctcgtggtcttcatactccacgtgaagcggagggagcggggcttggcctcccgaaattcttccttttctttgtcgttgccgccactgcccaccacgtgaggtctgtggagagggcagaggcgggcgtcacgggggggctgaggcaccccaccccaggagagccaccctggcagacagcccctgagcccagagaggagagcgggagggagcaggagcagccaggcgtggcccctggcctgcgggggcggagggtggcagtcctccaacccccatctctcaggacagcgaaggggaggagaagccagccttggggtaggcggggtggggtcagggaagacaccagtgccctcaacagcacgagcacagactctctctccagaaagaagcctccgagcacagggaggtgggatagtccaggggtaggaatctgtagccccaaccacccgacccagaactccgacttccagaatataccagacctgaggagaagggcccgtaactcctgcaattgggtttgggaaggggaaactctctgaggaaagggaggccccagagggtagggacagggcagaaccacgggaggaagagccaagtggcagaaggaagagaggagcaggaggctgtggcaagcccggtggcccgggcagggccagtgctggctccagccctctcacctgagcgtctccactcggtctttgctttcaggttcattcaggttcctcaaaaaacagagcgagggagagtttagtgctgggatctctcgctccttccgccgccacagacccagatgagagtgggtctggggaggtgccaccagtgggtgggcaggacccaagcccagggccctctgcccatcacctggcaagccaacagggctctgcagcacctcacactggcggctcaaccattcctttccagcagggagcccagcacatggggcttgtccctccccacattcccagatctgtgccggggagaaggagcctctgctctgggggaggagggggagtggctgtgcacgcacttcactgagcacactgagcacacggcccggcacgaggctgctcccccacagccagggctcacgcgctgttctgggggttgcaggtgtgagtgcgtttttggagccacacgctagggtctcaggactgcagtccttttggaggaaaggggctgcaatgctttgaatctctgtaggaggaggggccgtggctacgcaagggcctgtcaggagactcaaagtgccaaggcctgggtctgcatggtaggcacctggggatggcttcctgctgctgagtggaaaaggcggcctcctccgacctttcccaactcccctacctgctggcctgccaggccatctgctcatacgcagggaggatgagggtggggtggggcagggcagggcagacaccttggttgggtgggtggggaagaggtctggccccgctgagcggcttctccagctcctggctggaagatgggtgtctggagctaggaaactggggattgcagaggaggaaggatatgagaggaaggaggaagagcagcagcacatagaaataaacaggaagacacaaccaacacaggggtgcacacaagcgcactgcgagcagggagcccggctgtgcgaggaaggcaccctccctgctctctccagaccccctgtggggcagccccctgctggggccccttgaggcagcagccagtcatgcagtcaacagctgggtgggaggaggaggggatagggaaagcctgaagaccctgtctggacgttcctccatcagctgtggcaccaatgtgcctgccaggcatcccagtcccaatgcagggcctgagcagacagccttggggaacaagcactcttaacctggcccttggtcttcagcttggtatttggtccccgaggcctgcagagaggatgagcataaggccaggggtgaaagagccaggaaggggactgtgaagggagacccctgagtaagggtgcagagatctcctgttgttttgctacggcttggggtagaatggccgttgccctagaatgtcccagctccccgcactttggaagagacaggccatatctggagaaaacagcctagaggagaagaggcttgatttatccagat

SEQ ID NO: 21097 - DNA, 1376 bp, Artificial sequence
  DNA replication origin
cacattcacccctgcccagagattcccccttctcctctcccctactggaggcaaaggaaggggagggtggatgggggggcagggctccccctcggtactgcggttgcacagagtatttcgcctaaaccaagaaattttttattaccaaaaagaaaaaagaaaaaaaaaatcccagcggccacctttcctccctgccccattgggacagtcgagactggatctgtggggtttcccgggagggtggctcagggctggaacactctcaggcaagagtggtggagctcccgtcaggccctccgccaggcccactgtgggcttctcccctctcctccctccttcccctccaagcaaaccaccagaggtggccttcccctgacctcaggcccctgggctggaggcctgggcggtggggcagggggcgggggtgctgcgcagccctgcagtgggtggggctgggggctgctccggggctgctgaggctggagggccggcacaaggctccgcctccctccacactgtaccctctgcccctcctccccagagctgggcatttccttccacaagctgctgtggggacgtgtgttccctcaaagtctgtgccatcttctcccacccctcccgggtagaaggaggggctgaccccagggctgggagaggggaggggactggagggcagactggcttctcggtccccagggggccgcttgggctgttggtctccagagcagggccactgggcactctgtgatgggggagcctttgtctgaaagcacagccccctcgcccttcctctccccatggcttccccttcattggcattaatctgggcaccagctctctccatagcagtgacttccctcaccactctcatctctcagccttgccttttcttcctgacactgtcgccccctcctctcaggagacactgccgagggccacctggcagaaggctgagttaggcagcagggccgggagcgtctgccctccacagggtgggggacagataggctaagcgactcccagcttgctaccctcagtggccagtgtgggcgtgggcggtttggggcgcttggctggtggtggccactgcatcccttaatttatttctctgctgtttctgttcttgagaaattgggggtgggagtcctacacagaggctgcccctaccctcacctgagttgtacatttttttgtgatgggttttattttttattattttattttattttttttttttttgatttatgatgactccacccctcttcatcacccccgctcccaggccaggctcagcgattaagccgagcccttgcgtcctaggaaggggccttgccaacctcagccctcctgccccacactcctactgcggctcagac

SEQ ID NO: 21098 - DNA, 1541 bp, Artificial sequence
  DNA replication origin
cagcacacccaactgccctctccccactccacgctaaggtcactaccccggacacacaaagggcaggacccagaggccaagccccagcagactaggacacagccattccagtaccggccaggaagcgaaagtgccctcaggccagctcaaaggcccctgagcccggccatggccccaggagacaggcccagctgccaggaacacatgcagaacccaaagggcggggctgggctgtccgaaactctggtcttacaaagaccccgccagagccctagtcccttctgtcctcagtgacaccagagatgcctggggatggccagcaaaggggtcctggagcccgtggttggtggaggacgtcagggctcagagtgagggtgctgggggctccagaggggttccaatcagggtgggtgggggctgagggccagggcgggcgctgtggcggggggcagccagagcggggcggatgagaggcggtgggggctggttgggggccagccggggctggaggaagcggccctgctgcagtgggggtggctgtcggagcagagtgggagccgtgggcaaaggtggcctcagcagcgggggtggctgggacagcgaggtgggaggtggagggggtggtggcgcagggggcactgatcggggcacggacgtggagaccgatgtaatctggacctgaggggagaggaaagagtgagaagccaggctcttcccgccctcagcccagtctaaggaccaaggcggcgcctcacctcgcctcgcctctcctctctgaggggtttctctcacccccttctcacctcatcatcttcctctagggctggggctggcaatggagcccctctcctagcctcctccatggggactggggctccaggggccccatcctgctcagcctcccattcctgcagcacctcctccagattgaagcggcgccggtagctcacaaagaaagtcttcacctgggtcagagtcttgttcccaatcacctctgcaatagccccaaagtctttgccatacctacggatggctgcaagggtcaaaagggcagcagcgtcaataccccttcgaactagttacttccctgacccttcccctctgcccccccactccttggagggtggggagatagattcctggggtcctctcttctcaccacagtttaacccaccttgaacagccaaaagctgctcatctgtggtccagcgggagttgaacttggtgttggcctggaaagcaaggaacaacatatcctttagactcaaaaccatgcaaatggaagccctgctccccaagcagtactctttctgctctgcctccagagagaaacccccctttgcaccctaacttaaagagcagccatacctccggggggcgtagtggatcaataccgccctccagggcttggcgcaggctgctgttcgtctgcttcatgctctgtacctgggaaggccaggaagtggaggaatatcagactcccatctcaggcaggccactatgcccctcacaggaccctacttctgcacagacaccagcac

SEQ ID NO: 21099 - DNA, 1188 bp, Artificial sequence
  DNA replication origin
gttcaagagactctcctgtctcagcctcccgagtagctgggattacaggtgtgtgccaccacgcccagctaatttttgtatttttagtagagacaggtttcactatgttggccaggatggtcttgaactgtgtacctcaggtgatccgccggcctcagtcccccggaatgcctggattacaggcgtgagccagcgcacccagcctgcagaccagtttttaagagaaggcccaaaaagaacaccacattactcagagtcccagaggatggggctcggcccctgaaccatctcgcttacacctcagctccccctagacttcagttcccaggtgccgaatgccacctttgcatagcccgttcatttcccagggccccacctggcgcttgagggagatgagctgagagtcaagacctcggagcgtgaggttggcaaggtccgggcttcctgacactgccgtgaggccttcagggctcaggtacatgcccttgggtgggcgacgccgggttcgcaagggatggtggcggtactgagacacctggacctcctttttcccagggcctgggcgtgcattcaggggccgagagggtagaggctgccagtgaaaggagaggcaggtaggtggtgcagagccagagagaggcaagaggacaggcaggcagggcccagaggctctgggagctcacctctctcttgggatctgcaggatcgggctctccctcactcacgcctcctcgaccctcttcgagctcatcactgctgacacaggggccagggagggaatgaggcagctgccaggagctctacctacccccatgcccagtgcttgctcctgcccccacctgtcttctttgtccttgcggccccccagccgccgggcctgtctgtccatcacactagttcggctgcgggtcttcttccaagagtagtagtatttcaccaggctgggaatcaacttgtcaggcagctggaggaggcaacgccagaagctggggaccactcaagactctgggccccaggtaagctcttcagaaaggaggggcagaggagcgccggggagtgggggtggaagggctttaccatctgctggatccgctggaagcatttgccatggaagccaaaggcctgttcaaacagcaccttgtcctctactgtccactcgtcagggaatggggtgaagttggccaggtc

SEQ ID NO: 21100 - DNA, 2460 bp, Artificial sequence
  DNA replication origin
ccaccagggtcctgatcccaccccctggaggtctggccccggccccctggccccgccccccgggccctccctcccaccccagggccagatgttcagctggcggaggcatcggctgggggaggggtgctgaggccgcagccggcactacttccctgccagcagcttcattgtgtgcgcgaggagcgagcggcggcggagagcgggcgagcaagcggcatcccgagcgcggcggggagagcgagcgcgccggggagggtgcgaggcggcacccgcggctgcgctccgcccgcctcccggcaactctgcccagcgccgcgcgccgtgcgcgccgtcccgccgccgtcgccgccgccgccgccgccggtgccccggccggctgccgtcgcgggcaggggtctgcttaggacacgggtccccgcccggggactggggcatccccggcgcagctgagaggcgcagagcccggggggcgcagattgcgctccagcgcccagccgctgaacggcgtgggcaggtgggcggtggggttccagggcgccccgaggacagggggccccgacttcaggggaaccccaaccctgaggggcgtacatagtaatcacgccccagccgcaccggaccttgcgctcatcccttgcgtcccccacttctgcacaaacttttctgacgccctggctcgtgggggtcgtggagagcgctggggctaccaggtgggctcccaccccgccggaccctagccacgctgacctcctgcctctcctaacctcagtggcgacctctccaggccgggccgggctcggcactcggagcgagtgcggcaaccactgtcgctctccgaaggctcctgcgccccccggggcagctgggcggggtaatgccctcagtgatggagaagccgagcgcgggctctgggatcctgtcccgtagccgggccaagacggtgcccaacggcggacagccccactcggaggatgacagcagcgaggaggagcactcgcacggtgagcccggtggcctagggttaaaggcgcgccggcctggggggagcggagtggggcgggagggggaagagttgcagaccacgagcctgttacactgatggctcctgcctctcctggattggagcctctgcgttgcttctcccacaaacccaggctgccggcacagccaatctggaacctgggcccctagctgctgtggaggcgtcctgccggcccctgccctgccctcaccccctcagggaccgaggcatccctcccttgcatagagtgggtccctcataccttgccaccttgcaggggactgaggtctggctggagcagggactggagagacacctccacacagagctgtgaggctcctgtggtgggaaggagccttgggttccttgcagggctgtggtccaggtctaggggctgccctccaaccccgctcccctcccccggaacaaagcaccctgcttggcctgggctctaaaactgtccccttgtccaccctccagccccaatggccatggctggacagggtcttttcctcttccagtcccttctgtggctgcaggtaactggggtacaatgagggaaaagtgagcctcctggaaggtgggggccctgggtggtcaggaaggagaactccaggccggccacctcccccgcccgccacatcctccctcccgcccgccctccctggagtcctgactgcctccccctggctccacagacagcatgatccgcgttggaaccaattaccaggccgtaattccggagtgcaagcctggtgagccgcaggacaggctgtgaagtggggtgggggtggaggcccggggcttggcctgcagccccacctggggcgcccttgattggctcccctggaagggcaggctggcaggggtgggtggccccccagcatggtttgctttcctgccctgccttcctgtctgggtctctgcccctccttcccttctgggcctcaacctccctggctccactcctctgctgccctctggccatgggtctaggcttgtgccaccaggctgatctgagtgtcttccctcctgctcctcggcctttcagagagccccgcacgctacagcaacaaggagctgaaggggatgctggtgtggtcacccaaccactgtgtgtcagatgccaagcgtgagtggggcacagccctgggaggtgggggcttgggttcatcccagctccaagctagctcttctcagaagggggctggaagctgaggtgttcgtgggtccaacccttgccctggggctcgtgttcagggacctggccgttgtggggtggtccctttctggacaggcctgggttaggagctataacccccttcaccaagaccctgcccctgctgcccctgcagttgacaagtacattgcgatggccaaggagaagcatggctacaacattgagcaggtgagccttggcccccagggacttgggaatg

SEQ ID NO: 21101 - DNA, 1005 bp, Artificial sequence
  DNA replication origin
accctggggcttggtgcccaatccatgatttaagaggaggataaaggccccgtagccctggcccgaggtgtggcgggcaacgtggccgctggctgggtggccccatgtggctcgacggcgcagcagccgggtggggtcgagcctggctttccctggctgtccgcaggagtccccgggaacaagcggccccagccgggtcgtggcccgaccgcaacaccccggccactcggccgcaggcagcgggtgggggcagggatccctggctgggccctaggctgcttctaaatttaggaatctgattacagagtggaccaggaagggaagggagaggagggcgcgagtgcgggctcggctcagtctgggcacagcggggtgtgcctgggtggaggtgtgtccaggagactggggctccgggtgggaggggcggcgggcgggggcttcagcttgtgtgcgctgcagcacgtgccccgggcggcggggacgggcacgggcgcagctcgcaggctcggagccgccgccggtgtgtgcgctggctctttgtgtgcctggcagggtggctgggtctggctttgaaagtctctgcccaccccctcccccatctccgtctgtgccgctctacccgcttccctgtctgtcactctgcccgtgcttgtccggggggagggggatgctgcttccagctggggtgacagtgaacccagtggggaggagacccagctcctctctcccctgcagcccagaccttcccctacacctcccactccccatccctcagcccttgctaccactgtttaggggtgcatactgcagcagttaaagggaattggggcgacccttggggacccacagatccaccagaagccagcctctggctgggtagctcttggaggaattcattccttgcctgtccagcctcccatccgttctggcccccaagggcgcataaggggggtcccccctgcggaagggggggcggggagttccttggcaggaagggaaatggaa

SEQ ID NO: 21102 - DNA, 1346 bp, Artificial sequence
  DNA replication origin
gccctcgaaaagaaggcgctgtcgcttccagtggaagggtgagcccgagctcatcggcgaaaatggcggggagggcattcccgggagccctccggctcgcgccaagctcggaggtagctcgggtaggtgagggccccgggttctcggccgcgctgcccagcttccttggccccttccgctgcctcaggctgcaggagaggaggggctggtccccgggctgcctctccttccctcccctcccacacccccatgttcctggccacgtggcacctctgtgccccaggcctgggggaggacgatttctgacctggggacaagtggagccagggaaaggtgggtgggatctgggataaccgcggagcccggatccggtggcgcagccccgccccgcagccccggggcggcagggagggggtgctgtctctttaagagccttcatgctgctgggagcagatggccaggccggccggggccccttgtcctttgtgtggcttcgcacaaaagagggggccagctggggagggggcggctgtagcaggtgggaggggtggggccttgcccctcccccttctaaccctgcacccttgcccctccatgagggggttcttcactaggaatgcgccttccctctggaccccgtggcccccacagtcgcccccaaactcctaggacacacttcctgtgtcgtggcccacctcctaggcagaagcctcattgcatcagggcctagggactctcccaacccccgccccaaggaataaacctcccctccctgtccccacctccagagcagagtcttcctttggcccagagtgcctggctctagatagaaatgaagagaatgaggttcttaggaggcggggaagagggatgctgggccggagggaatccagtggctggggatccctgctagagagactgggggtacctggggcagccctggagtagggaggcaagaaataagcaggatgctgagcctgggggtgcaggtttgagtctgggaaggaggcaagggggatgggggactcaactgaggccctgcctaatagggggcgggggcaagatggaagacagcaccgtaggagaggctggtgtgcagcaatggttgcctgccaggcaggaggggacagaaatgagagtctctccaaagggtggaggtgctggggacagggatggcgccctgccacttaggaggggtcggcctgggaagactctcagtcttgaatcagacctccttagctcagaccagcccctggtccattcattctcctttgtccagacctccccaccctggggcttggtgcccaatccatgatttaagaggaggataaaggccccgtagccct

SEQ ID NO: 21103 - DNA, 812 bp, Artificial sequence
  DNA replication origin
tgccacacacacagctcagagacacaagtctatatgatgcctgtggtggtttccttgcctgtctctggctgggctgtgtccccatgagggcaggggctctgtttgctgctgtgctttcggggcctggcatacagtaggcactcagtgtttgctgaatgaataagtgtcggaagccctttgccttcaccgggcttctctgcgctctgcctgctgggtttcttgcttcctccttcctcaaggtgaggccgaggggacaaaggttgaacagggatgctgggagggaaaaggagggtgaccttgggcaagccatccggcctccccttgccgctccctcctcccgcaggcgggggcagctccagccaatcccaagcccgccagccctgccagacagactgggactgtcccgagctccggcccagcgagcctggccgctgtggtgtgttgcctgggaccctggccaggccatcagtggccacagccaaggggctaaacttggggagggagagaggcagcgggagggccccggggttggggagggagtgtggtgggatccgagccaaaacctggctgagcaattagggggctggggggaggtgcttccatcgactgggggcctggcgggaggtgaccctggggaaatggaggaggtgggctagagtggaaggaccatggcagctccctctggggcccccaccctctcagtcctgcccagacaggaattcggttcctccctcccctgccgcccactggggccctgggcaggctgtgtggcccagggtgctgccctccccttttctgggccctgtcagtga

SEQ ID NO: 21104 - DNA, 1492 bp, Artificial sequence
  DNA replication origin
gaggtattagcatcccaattacagaggtgaggaaattcaaacacataaaggccaactcactggcacactattataccaccagcagcgaagacggggctggaagtgaggtacctcgggctccaaagtcagggttcccttaaggtgatggaaattccatgtaaatactaatataggcctgtgtggtggctcacgcctgtaatcccagcactttgggaggcctaggcgggtgaatcacgaggtcaggagttcgagaccagcctggccaacgtggtgaaaccctgtctctactaaaaatacaaaaatgagccgggcatagtagcgggcgcctgtaatcccagctgctggggaggctgaggcaggagaaccgcttgaacccagaagaaggaggatgcagtgagccgagatcgcgccattgcactccagcttcggcgacaagagcaaaactccatatcaaaaaaaaaaaaaaaaaaaaaaaaaaagaatacagccaatactaggaaaagcgttatctttttaggagggtgactgatactgctgtaattgagacttagtaaggtgaacgcacagaaacttgcaaataacttctgccctaccctatatcccgggaaagtaaactaaaatgcacctccaggctgccggcacggaacaagtggtcaatatccatccgcggctgggccgccgcccccgcctccccgcatcttccccgcacacctgcacagccctccccttgcaaaaaacacctgcactaccaaaacccctaacaacccaagcggtcgtaagaaccatttcattgcaaccaggaggcgtcgaaggcaggagtctatgggaaaggaaggctgtgtttatcaggagcagcaggaacctggtggagaggtttcgaaagagtgtaggggaaccggcttcgctgagactcgagtaacgggaagggcagtggactgggattcgggaggcccaaggtggggtctgacgcccccgacaatatgaccttggctaggcgccttctttcctctgggcctcaattccctccaagccagggttgacctcggatgtgaaaagcgacgaagctggtgacagccaggtgatgagtgaccctgggggagcgggaagctaaccccagggtccccgcgggggacggtggtggggaggccagtaacgggtccgcgaagcaggaaggggcgggcgtgacgctgggggcgccgagggggtggggccccggaccaggggctctccagaggattcccgggctaggcctagcgtagggacccttagaatgggggagtcgggtcatgtgggggtcaggggtcacgtgaggctggagggggtcggggtcacgtgagaggggggtttaagaacaaagggggcgagggtagcgaggagcgcccctggacctcccatctcctctctctgcctcactcacccccatagcggcggcgacaacgctcagcttcttcttcacacacttgccggcagggaggcggcaacggcggtggct

SEQ ID NO: 21105 - DNA, 1558 bp, Artificial sequence
  DNA replication origin
gtagtgcggcgctgtttaaagatggcggcggaggaacctcagcagcagaagcaggagccgctgggcagcgactccgaaggtacagatccaaggagggatgtccggcccgggctagtgggggcgatgccgggccagctgctcccgaggagggaggggaggcagggccgctggctctggggtcgaggtgcgcgaggggtcccttcctccacctccgctgcctcccctccccctcacaatggaaggagccaccgccgcgacccccggccgggagggagcacgggcgaggcgggccaaggcccgcggcccttctccatcgtgtgcgcccggggcggggcctgggtcgctccgccctctgcccaacccctcggctcctggctccaggggccccgagccctctcgcccctgtccttgcagtcaggcagagaggcctacgccagggccgagccccccggcctgctccagcggcggcccgcgccgtgagggcctcgagtttcgctgggctacggagcacaaaggtccgggcgggccattcgggatgtcgtaggcggccctgggatgtgaggggcctgcgggatctgtccctgaggcctgcgactttttctggtagagccgcctcttctggccttgcagcccctttccgcctgcctagacattgttagtctccttaggagatgggcctttcaaaaatggtcccactctgtcttttcccgcctatgagttgggccctggggaccgcgtaggtcattgggtggcagggacagttcttttgcagagtagtgcgaaaagggtaggtaggtcgacgcccagccaagaatttgggatggcgagccccaaaagggttgacctttaaagtcattcagcccacgcacctcattctcaccgaacacttgagggaacgagaagtgggaaaacggccccggaagggacttgttcaagatgacattaagagagagccaggactaaaattcaggtgtcctagctcctcaccgatagctgctcacagtggggtccatagggtggacctgcccagctggctgataatcctagagcacgtactggtatgcctctaagaaaggcgagggtactcgccccattttacagttgaggaaaggtctctgccatgtggtagccaaggagaggtattgtgctgaagagctcagcctggaattagacaaacctgggtttgaccgcaggtcttttgctagttgtgaccttgagcagattgcttcacctgtctgcagttgttttgttaattgtaaaatgggcaccattaacaatatccacgaccgcaagaggatgaaggcggtgatggagtaaagtgcaggctcataggaagctctcctccaggccaggactctgcttcctcgtcctactttctgcaagagaccacgcctggccccagaacattcccaggctgctgggaagtgatgttaacgggaggaagggggtgtcagagctgaaagagcgcaccttagggataccacggtgcacctctgccccttcattttaaagatgaggaaatgaaagcccagaaggggaagggactttgccaagatga

SEQ ID NO: 21106 - DNA, 838 bp, Artificial sequence
  DNA replication origin
gagagtgttgccctgtcacccaggctggagtgcactggagtgcaatggcaccatctcagctcactgcaacctccacctcccgggttcaagcaattctcctgcctcagcctcctgagtagctgggattacagatgctcgccaccatgcctggctaatttttgtatttttagtagaggtggggtttcaccatattggctaggctggtcttgaactcctgacctcaaatgatccacccactttggcctcccaaagtgctgggattacagatgcccaccaccatgcctggctaatttttgtatttttagtagaggcggggtttcaccatattggctaggctggtcttgaactcctgacctcaaatgatccacccactttggcctcccaaagtgctgggattacaggcctgggccatcacgccaagccgaccctggccattctcttgctggggtgagaataaactccagagggtgaaggggaggcagggacactgccaggagacttgtgcagtaaaatctgctggaggcgggcagcgggtggtagaggtgaggagtaagaagcagttggataccagacatattgaagggatggatatggtgatggagtcggcagcgactggaaggctttgggtgctgtgggtgactgaggtggggcagcctcggggaggagcagttgttcggaggttgatctcagctgcactcagtggaaatgcctgttggacagttcagaggaggtgtggtgaggctggtagataggaggatcgtaattggagttgagagttgagattcacacttggggctatttaaatccttgagactttggctaggggcaatggctcatg

SEQ ID NO: 21107 - DNA, 1579 bp, Artificial sequence
  DNA replication origin
caggatgcaccaccatgtgcagctcacttgcttatttttcaagatggagttttgctctgttgcccaggctggagtgcgatggcgcaatctcggctcactgcaacctctgcttcccgggttcaagcgattctcctgcttcagcctcccgagtagctgggattacaggcatgcaccaccatgccgagctaattttatattttcagtagagatggagtttcgccatgttggtcatgctggtctcgaactcccgacctcaggtgatccaaccacctcagcctcccaaagtgctgcgattacaagcgtgagccatcgcgcccagccacttattttttttagagagacgggggtctcactgtgttgcccaggctggtctcgaactcctaggcttaagcgtcctcccaccttggcctcccaaaatgttgggattataggtgtgagccatggcgcccagcttggaatgatgtgcttgagcctgagggtgggggtgggctagtgtggagtggagaggcagcttaggtggcagctggaacagatcctctgaggattgtgggaggaggccaaaggcagatgtgctggtgggggctgaggaaaaaagacaaggtcatcagctgggggtaggagcaagatgggtaggggagaggggagggtgcccaggccaggggagtgaagtgtgcttgccaggtgaagtgtgcgtggtgggtgggcacctgtaatcccagctacttgggaggctgaggcaggggaatcgtttgaacccgggaggtgtaggttgcagtgagccgagatcgcgccactgcactccagcctgggcaacaagagcaaaactctgtctcaaaaaaacaagtagaggagggaggctgtttctagccccaggagggctgcgggcaaggcttagaggtgggggaactcttctcagtgtggcgggagcggggctgagctgggctgtgcagagggccccagccacctggttgaggcgtggaggccagcactccaccctggccctgacttgcttgccctgaagttctcttgggctgaaagactggaggaaacgcattgctcaaggacattcactcacctgttgttgtacagtcctgtaggccccgcagaactttagtgacccatgcaactagtttgtccttaagtgcccagcttcctgccgtcttttgggaggactctgggcagtgggccgctcccattgccacattcagcagcctgtttcagggacccagggtggcaggtggctgctgggagctcagttgccacctttggagtgtgacctttgctgggggacatttccttggccagcccccgttctggcctgatgttaacctgtcggggtggggctgtctccgcaggacctccacaaaaagtactcgtacatccgcaagaccaggcctgacggcaactgtttctatcgggctttcggattctcccacttggaggcactgctggatgacagcaaggagttgcagcggtgagaagggtgggcactgggcaccgaggcaggtgggtgtctacctcctccccgggcgagtaggatgtgtctcgagtagggtgtctccctccttcccgggcgatg

SEQ ID NO: 21108 - DNA, 2510 bp, Artificial sequence
  DNA replication origin
agcacaaggacaaggtgagtcctgggcccgggcgagggtggggtccgcatcccggccagagtgaccagcccccatcatcgcccagggagtcagggtgcagagcgcagggccaggcccgccccttccttccctgtttctcctgcgcaagggcgcctggcggtggcgagatgggggtgatggcacacagccgtgagcctccgtgaagggcgcagggccaggcaggtgaaagcctgcaccagggcaggcagtcacaggatcctggggccaggcgtggcagctcggcccaggctgagcagcccctggcgcaggtggaccggctgatcatctgcgtgttcctcgagaaggacgaggacatctaccggagccggctcccccactacttccccgtgggtacgtgccccgcgccgccccacggcccgcccctgccccggtccaccctgggggcgggctctcactgtcctctgccttccagcctgaggctcccgcagcccaccctgaccgggactggtaagcagggcctcgccccgtgcggcggccccggccctagactaacccgcccactaacccccgctcacccccaagcagggcgggaaaccacggggcagcctgggaggtcggggacgcccatagacacctctgactctgctctgccctcagacccgccttcgggaccccgctcccagctctgagaggtcgccaaagcctgcagcctggcctgggcctggccaccccttctttccctccgcgccccgcccccgaggagcctaataaagatctcgttgtggcagctcctactgtctgagctctgactggggggaaggaaggcggcccaggtgttggatggagcccctggccagatgctttcactgaaaggggctggcaagagctctcggtgagccaggcgggcagaggcacaggcggacggcagaggcggcagcagcagttcacatttattgagggcctgcccccaaggagctcacagcctgggggctgagaccccgaatgtgcagggggcggggaagaaaagaggtgaaggcaaaaaggcaggcaatgcagagacaccgtggcccaagcagagggggtgcaaggcaggcacaggcagggggcctggggcggatggggaggtggagaaccggcagccctgcctagacctgaggactgtagaccccacacgtttgaaggctgccctcccccaccaggatggcactgcccgggcaccctgtgggaggcccagctcctccacctgccctgagccgggtccagcctcacaaaggcccctccacccaggactcccaaccatgcagactcccggtggagggcaggaagctggggtctggggcccagccgggacgtggaggtggggcctatgagggagcagatgaagtgtgggtggccctgggaccctgggcaagtccctaaggaacttccaggatcccatagaagcccctgagccagctaagaagggaaggaagcagaacccaacgaagcaggaggggcctccaagaggcctggcccctcaaacctgctcctgttggggaagctcaggagtagataggtgaaaagcagggggacccacctggggggagggggcagcagacagagcagccaggcgggcagcagagcagggacacgcacacacggctcaccaccagcaccccctttaataaaacatgggggggggtcatgtgacaggaagaagggggtgaaataggaccatttacaaccacagaaaaacctctgtacatgtctagcgcctggcagaggggggcagcagggcagcagcgggctggagccagccctatttgtagaggatatcgtagtgtccaggccggtagagaaggtagaccttgggctcggagccctcagggaagatgtgcggattggtggtgccgccctcgccgcggtccatgtactccacctggatggacacgctgagggcctgggccagcgcaatgatgtggatgtggtcgctctccttgcacatgggctccacctcctgtggcacaggtgccggtcaggccctggtctccgcaccccgccccaggccctgtgggcccactgcactcccccggccgagagtaaaggggagggggacggcacctgctggcagaactccttgacagtccgtccaccctcgatgaagtgctcgaagaacttgctctcgcgctgcaggtagcccgaggtgagcagccgcaggtagaccacaaggtagtcggaggtgctctggtcattgaaggaggccagcaggtcggcgacagaggtctgcttctccacctgctcaatcaggtccatgaactgcagccacggagggagaaagggcaagatgacggggaggagatgggtggtcctcaccaggtgaacccctcccccatggcccagcccaagacaggcaccagggctcaccgtgttgtggaaatcctcaattgtgaattcagtgaagccctgggacaccaggtcttccttgctcttggcagacacagccttgaacctgggggtgggatggaaaggcg

SEQ ID NO: 21109 - DNA, 1532 bp, Artificial sequence
  DNA replication origin
ggggcagcggccgcggccggaggccacggggttggggcgcggctccgcatgggtcctcgcatcgccgaggggcttctcgggactgagggtgctcaccccggggccgcagccttgccaggccagctcagtcgcgcccgcccttcccgcagtggacggctgcattcatcgggccgccggccccctgcttaccgacgagtgccggaccctgcagagctgtaagactggcaaggccaagatcaccggcggctatcggctcccggccaagtgtgagtccccgacgcgcccccagctgtggggcgcagacagggcgcccgtgtgtcactgggacatcaggggtgcggcccccacaggagtgctggggaactcctcagggggcccttcttaaccttaagggccaagacccggcccccaccccgcacaccccaggaagcacatgggggagaccgtgcgtggaggctgaggatggagctggggggcaacgccttcgcgcccacactcgcgctcgggtctcagccgggcccatacagatgtggggagggggcgcggggctctgtgcgcgtgcggattcgggctcgagggggcccacaggggtgggggccttcgcggaggaggctcagcgcttggggggaaaggtgtttcctgcccccttctgcccaggccggcagggggaagcgagggagctgaggaccgcgtagacccccgccggtctgaccccgtcgccccccgtagacgtcatccacacagtggggcccatcgcctacggggagcccagcgccagtcaggctgccgagctccgcagctgctacctgagcagtctggacctgctgctggagcaccggctccgctcggtggtgagggacggcccgcgggggagggcgggaggcggggcgcagtgacaatgttccaaccccctctcacccctccccgcccaggcgttcccctgcatctccaccggcgtgtttggtgagtctggaagaaaggcaaggaccaggagtgggcggtggacccagacgccgggaggggccggggcggacaggggagtgggcggggccagagcctaggactcactcccgccccacccgcctcaggctacccctgtgaggcggccgccgagatcgtgctggccacgctgcgagagtggctggagcagcacaaggacaaggtgagtcctgggcccgggcgagggtggggtccgcatcccggccagagtgaccagcccccatcatcgcccagggagtcagggtgcagagcgcagggccaggcccgccccttccttccctgtttctcctgcgcaagggcgcctggcggtggcgagatgggggtgatggcacacagccgtgagcctccgtgaagggcgcagggccaggcaggtgaaagcctgcaccagggcaggcagtcacaggatcctggggccaggcgtggcagctcggcccaggctgagcagcccctggcgcaggtggaccggctgatcatctgcgtgttcctcgagaaggacgaggacatctaccggagccggctcccccactacttcc

SEQ ID NO: 21110 - DNA, 1835 bp, Artificial sequence
  DNA replication origin
gactgagctggcctggcaaggctgcggccccggggtgagcaccctcagtcccgagaagcccctcggcgatgcgaggacccatgcggagccgcgccccaaccccgtggcctccggccgcggccgctgcccccacccccgcccggaatgtttcacatctggggaaaccgaggcgcagagcgggacggccctgggcctggcgggaagtcgcgcaaggaggccggcagggggcgcacccggcccaccctgtcccttccaggccgcgccgccagggcccaggcagggcggctccgggaggcgggggccgccgggacaggaaccgccgcccgagccggggtgacggggaagcttcctccccgacgcccctccctagccctgtcccgggcgcgctgcagggcccgcgaccagtcgctgcctccgcccgggcctcagcgtcggtgcgatcccaaggcccacctccccaggcggcgccccatcacggggcggcggcaaaccctaggacccattttgcggatgaggaaaccgaggccaccttgttacagggtgatcagatctgtagctggagtctgggtcttccagccgcgcggggaggtgagcccgacgcccgggcccgagtctcctggcgcgcaaaccccagctggttaatgaaccgcctcgttagcgcatccagcttaattacggccccgcatgggcttgtttatccgagggcggctgcagggcctcgcgagcgaccctggggacccgggcgcagataaacaaccggggcgcagcgggaggcatggaggaaacgctccagcagcccaacctcgccagggcaccgcgcaggagaggcgcggcctcaggcaggcctgggtccagcccgggctcacccctcatcggctgtgagatcctgccccttcccctctctggcgtccaccctcttatctggaataccgggacagcgaccctcccacagaggaaaacgccgcgtgctggccgggaggacagggcccatctttggcagctctgatcgcccacgccaggagctcctcaggcaccagctgcctggtgctcacaggcgggcatcaagagaggaccatcattccccattttacagatggacaaaccaaggccaccttctccttcatcacctcagtctcggcacagttccagggatgccaggtagctcacacccctttcttttgctgtttgatctcgtgccctgggggcacaattaaacctcattctgcaactttactcagagctggcaccaggcaatttcccagagcgtcccagggatgggtgggcagagaggttaggggaacgctgagaacggctcaggcctggatcccttccacctgctcctctcctctgcagggagaaaggcagctgtagcccagggcgaggctgagatggagcaagaaggcagggcccagagcgggcgtccaggctggagctcccagtgctgggaagtgagtgttccgaatggggtgccgtggctgggctgtggagctgggcaacgtgagttcacatcctggctctgccagccacagatgtgtgacccctcacatatcatttaacctctctgggtctcagttgctccatctggaaaatgggataatagcacccacctcagagctcattgggctgttggaaggattgagttaaactaactttgtaatgtgcttaaggcagtgcttggcaagaatggaggtcatgagtgtatcctgttattaacaacagtgtgacagtgtgggcatgttcgggtatgtgtacatcagtgtgatgggaggtgggtgcacacagggtgttcacagtgtgtgggggtgagcccagggatctgtctgagctggctctcc

SEQ ID NO: 21111 - DNA, 1389 bp, Artificial sequence
  DNA replication origin
tttgctctctgtgcctcagtttcttcttctataaacaggaaaaataataagacagcggctgtaaatcaccacgcaggtgcttacccaacaagaaggctgacaaaggccatggggggtgagtcataccagctacttaggaggcttaggcagggcaacatagcaagaccctgtctcaaaaaaacacaggctcacatctgtaatcccagcactttgggaggctgagacgggtggatcacttgaggtcaggagttcaagaccagcctgggcaacatggtgaaaccccatctctactaaaaatacaaaaaatcagctgggcatagtggtgcgcccctgtaagctcagctactcgggaggctgaggcataagaatcacttgaacccaggaggcagaggttgcagtgagccaagattgcaccactgcactccagcctggatgatatagtgagacagagggctgatatgaaggagccatatcagggggagtttaacggtagaggagggtggagggaagaaggggctgcagggaggaggcagaggggccttaggggccatcttctggccacaggtggaggaaggcttcatctttgacctgatggagaaacatctcaggggggtcccgccacccaagtgggctctgcctccccaggaaagaccccaggttttctgctgacttggggtgagggttgagctggagcctggaggtttgttttggtggctgagggccctggagaggagactaagggttggtcagctcctgtgaactgggaataccccacctccaccaggtagccccagggatcagggctgctggtcttttccagctgccttggggtggggtgggaagagggaagagggaaggaagggcatctcccctgaatgggaccccaggaagcttgagtctctaggacctagcttagccccaggtaagagccaggacagggcctggagggcagagctaaggggactctgggagtgtgtgtgggaggggtcctttgggcctatggctaaggagagcagggtgggggggttcccctctgcactctcaggggagagagcgagaaggctggtgtgtggacagggagggacacgcaggcaagaggggccaggctgcactctagcttgttggggtagcagtgggctgacagtgacctgtccctcatctctgctttaggggagcccctccctggggcccctgcagagccatcacctggcccaggccctgttctggaactgctgggggtgaggagggggcatctggcctgagccctctgccagcattgattccagctccctccacctcccttgcgcccccaggtcagccccaaaggcctggctgcaggccagtccacttccgcaggaaacattaaattcctgaaacactgagctccac

SEQ ID NO: 21112 - DNA, 1965 bp, Artificial sequence
  DNA replication origin
ggacccaagtcaaatgctccctctgctgggaagcctcctaccaaactgggtctccctgaaggcagagccaagccctgagtcccagcatttggcatagctccctcaactcagagagagctccagggaagaatgggtagtaagggagtagggggacttccccaggactcactgcattgccagcaccatctagttcggccccagggtgtggtgggtgggggtccaggcccagagtgaggcaggcacaggagtcctgtgccctccaggttaagtccctttagccccagcagcccctgggggctctcactgcattgggggtgcccgggagactcccttctctgctcccctgagactgcagccctcttctgctctaaatcaccgcacatttgccgtaaaaacagtgggctcgggccccaaagccctgcaggccagtcccagccccatcttctgagccccagttgcgccggcccctcctggcaggaactccacgccactacccacaccagggtgttggccggggtgttggctgggatgttggttgggttgttgcctggggtattggttggggtgttggttggggtgttggctgggttgttggttggggtgttggctggggtgttggctggggtgttgcccagggtgttggttggggtgttggttggggggttggctggggtgttggttggggggttggttggggtgttggttgaagtgttgcctggggtgttggttggtgtgttggctggggtgttggttggcatattggttggggtgttgcccagagtgttagctggggtgttggttggggtgctggctggcatgttggttggggtgttggctggcatgttggggtgttggagtgttggctggtatgttgtttggggtgttggttggggtgttggttggagtgttggttggagtgttggctgggatgttggctggggtgttgaccggggtgttggctggagtgttggttgagatgttggctgacatgttggggtgttggttggggtgctggctggcatgttggttggggtgttggctggggtgttggttggggtgttggttggtgtgttggttggggcgttggctggcatgttggttggcatgtgttggttgggatgttggctggcatgttgattggggtgttggctgccatgttgcttgaggtgttggctggggtgttggttggagtgttgtttggggtgttagttggggtgctggctggtgtgttggttggggtgttggctggcatgttggctggcatgttggttggggtgttggttggcatgttggttggggtgttggctggcatattggttggcacgagttggttggggtgtttgggatgttggctggcatgttggttggggtattggttggggtgttggcttgcatgttggctggagtgttggttggggtgtttgctggtgtattgtttggggtgttggctggcatgttggttggggtgttggccagggtgttggctggcatgttggttggggtgttggctggcatgttggttggcatgtgttggttggggtgttggttgggatgttggctggtgtgttggttgaggtgttggttgggatgttggctggcgtgttggctggcatgttggttggggtgttgaagtgttggctggggtgttggttggcatgttggttggggtgttggctggcatattggttggcacgagttggttggggtgttaggatgctggttggcatgttggttggggtatttgttggggtgttggctggcgtgttggctggggtgttggttggggtgttggttggggtgtttgctggtgtattgtttggggtgttggctggcatgctggttggggtgttggctggcatgttgttggggtgttggctggcatgttggttgggctgttggctaggatgctgattggggtgttggccagggtgttgcctgctgcccctctccattgagggactggca

SEQ ID NO: 21113 - DNA, 986 bp, Artificial sequence
  DNA replication origin
gcgagcaggcacagaggtgactttgaggcgggcacagcccacctgcatgtccctggaggccgcctccactccccctgcttgctgctctgggcctcaccctggcctcagctgcctggaggggccccagccaggagttgggggggtgggggctgctcccctaagtcacccagcgtcctggcctggccttcattctcctcttccccttgtgagccggatctcagccttctgttctctgacaagtgtgcagccagccccaccgtgtgccaggcgctgggacacggatggggcagccctgctggcacgtgcatcatctggctgggagaccatcaggaaagacagcacgagaatcaacttgcacaagaatccctgtgagtgccagaggccgagaaggaaatgcaagggagtggcagggggccggggggggggggggggggtgtgaggtggcggcgggcagtggatctggaggggtgggtggggcctgctgaaccctggagctggtgtgagcagcacagccaggcaggggtgggggacgaggagcaaaggccttgagacctcaggggctgaggagcagggaaggaggacagaagtgagggggctcaggcaagagcagcccctggggggccttgagagccttagtgagaaatgggagctgctggggggtttagacagaggagggatgaaccgcacagggaagggactgggggcacaggcagtggcaggaggggcctcctggctactgcagtgtccgggtgacccctgcctccgggatgcctctcagacttcccctggggatagcaagcctccttggtgctcccacaaagtgtgtccccagcatcctcctcaccctccccgagctcagatccccgccatcagcacagagcctggcacctccaaggggctccatgactgccaactgtcccagcatctgaccagctggcaggcctggccccacagggggcttaggggagcggagtttgttcttggaa

SEQ ID NO: 21114 - DNA, 1000 bp, Artificial sequence
  DNA replication origin
gcagcagctcagtcctcccatggaagtcagacagcccaattcagacccagctccccactccccagctgcatgaccttgggcaagtcactcagcctctgcgaacctctattttctcatctgtaaagtgggaaaaatcataggaccccctcaacgggctcttgtggggagggcgaaatgaaagaagccactggaaatacttggcccaatgcaaagcacggagaacttatttgataaatgtgtcatcagctattttttgtttcgttttaaagtctggaaggtccttcagggccatgggaatggggcgagccgagtctgcgccatgagcgagcagctgacttgcgtttctcttgtttttgtgttgcatgctcatggtattccatttggtggaatgaacatgaattttttacttaggaaaatagcaataagtggaaggtgcctggggacagggcttggagagggggtgttgagggggacctccatgttgccaggggtttaggggacagcttggggtgagactggccaggagcttgggtctccaggggcccaggcagccaggcagacagagcccaagaaacccaggcaggaagcagacaagagaggcccaggccagctggaaccgcagccacgccatttcaaacagtgaactgtgaggcttttatggggagaggcgtgggggtgggatgcctcgattagaccaggaagaggggctatagagtggagtggacgtgggcaaacaggcagggggcacctggaggtgtgtgggagtgaaggaggccgctctgaggtacaggggagtcggggaaaggagggcctggaatgggcccagtgggaaggaggagacccaggggaatctagtggggatgcccagctgggtaccaccccagcagctttgagcagctcccaggctcgtcagagaagacgtggtgaggggcttagccctggagcagcggggttcaaatccttctccctgacttaccaggagtgctgggaccttctgccc

SEQ ID NO: 21115 - DNA, 651 bp, Artificial sequence
  DNA replication origin
cccagttaaaaggccttctgccccattccccttatcagcctctttatttcctctggagcccacaccctgtgcccataatgacctcatcctctgatgtgtttgctggtttattaacagcatggcagcctgtggggagacgacctcatttgctttgtacattcctggatcccaaaggccggcatggcctggcacctaagagctcctcttatgactactcattcattcaacagacattgatgaggccaccgatgtcacagagggttagcagtggggaaggggctttgcagaggggagtgtggctgagaggagggcagagaggtgaccaggcccacggggccctccctgatccttctcccacagtcatggggtgtcatggcgggtgctggagctgggagcagcagggttggtcttgccctttagaaagaccccctttagagctggggaagggagcagattgaagaggtggtcctggaggcaggggctgcagggatggtggtggctgaggatgggttgagggagggctgggagaggcggcatgattgagcccatgggaccaaagagaagaccgtggagatgggactggatcaaggatgcgattggctcagaactggctcaatccagtcaatggaagagcacatggtctatgaagac

SEQ ID NO: 21116 - DNA, 842 bp, Artificial sequence
  DNA replication origin
tgccaggcctggctgctgggggcacctgtgcccggcaggtaagtggctttgagtgactacatccagccccagctctggagtacagctctgcctcccaggactcagggagggagaccctgggcttaggacactctttctccttacttccctgcccctggagcacctaggccagcaggcgagggcaggtgaggggtcccagaagatgccatctgtttccgcaaccccagctctgcagccccaggactctgggagagggaccctggactcagggcaccccacctcagactctcccatccccacctccccgccccagggcaccatctgtggccttagctttattggcatctgttgggggacagagacaacccaaggggaagggcgaggagctgcttgagttcccagtgaggtggggagtggccacctgctggggttggttgagccgggtgctgggatgtgggcgctgggcctcaagagcctttgcgctgtgggggaggctgaggccataaagcagctcacacgggcagaggaacgggaggggagatgagggggctgcagagcttggggcccctgaaacaggcatctggcggccggcagaagaggcacagtgacggggtggggggatccccagtagaggtctctgagacaccaatctcagagcctcctgcatcccctacctcgggcagtcacagggaccccgtcccctggctccctgatgtcttggggctgccaccctctctttggatcaggccctacctctcgctcccaatggcatccccttcctcactgtcccgggggtccagcccccatttgcttccacctgccacagactctgcaccatccag

SEQ ID NO: 21117 - DNA, 966 bp, Artificial sequence
  DNA replication origin
acagtctggtgcagagatgaatactaacaaaacacacatcactggacacaggtgcctgtgattctaagtcacgatactattgtacgtactccccaggaagcaaacacaacgccagagaaaaaatcagccacacccggatcttagagatgtggacatgttggccggtagatgaaaaacgcagtcatagaaatcataagcaatcaccaacgagctgagtgctacaaaacagaagtggaggagggagacagaagaaggtgacctaatcgggaaggtggggttagaagctgggcatggtggcggcacctgcaattccagctactcgggaggctgaggtgggagcatcgcttgagctcaggagttcgaatccagcctgggcaacatagtagatcctgtctcttaaaaaaaaaaaaggaaggtgggtgggtggtggggatgtgggggttagggaggcctttctgatgataggttggccaggctctgggctgatgaggaggagttggttaggactggagaggcggaagggtgcagagaagtaagacccttgtttcaaggcctgggggcaggagcatgctgaagggagggatgaggatgaggaggaggcaggcactggagcagggctggaggggtgctcttgtcctggctggcagcctccccggtgccagtggcctggtctgacctgccttgggcccctccctgctcccagcaccagtcctgggggttgctgacttcaccctacctggctttgtcccttctgtgcctgctccttggggcaccctctctgggactttcctcctgggctggaggtcttgctctctggctctccctgaagctctgcgccagggcccaccctcctggtcctagaccttgtgcttagaggggagaagccccagccctctgtgttgtgcataatggtgggaggggagcacagtggagttagaacttggatcagagaagctgctggagcct

SEQ ID NO: 21118 - DNA, 820 bp, Artificial sequence
  DNA replication origin
accgggcagccaaggtcaccctggccctgcccgaagcatccttacctctccagctgccatctaccctctctggagcccctaaatctgggtcctgctcgccatcctgcaactcaccagccatcggccctgggcaccatcccagccttgctgtgcctccatttccttatcttaacaaggccatctcagacctcccagggctagcgagagtccagtgaggtcccaggaggaaagtgcttcgtatacagtgaagtatacaaagtatacaatatgactcaccattattagactgtggtcaactaaagctgggccacccctggcttcacttgggcctgttctcagctgggggcaggggaaggaggtgacttgactcaagggaggaacagggtcttcctcactggggggtggggtctgtggtcatcatcagggacccttagccccaggctctgtgctgggcatccaggcatgaagccatcccagggcagtggtcaggggttggcaccaaggcaaggacaaattgcagatgttcagagggcacaaccctggcctcagccttccccacaggccccagcctgggtatcacctccaaggaggggtggactcctagctcggggccccagtgatgccccagtatactacgggatgttcacgcgaatgcatggatatgtaacctctggataggcgggctgtgcatgccacttcagggacaccaggccagcacacatcagaaagctccagcagtggccgggtgcagtagctcacgcctgtaatcccagcactttgggaggccgaggcaggtggatcacttgaggtcagccattcg

SEQ ID NO: 21119 - DNA, 1244 bp, Artificial sequence
  DNA replication origin
gcagagcacggtggcgggcccggagcggggggcgcgcggcggcgcatctgcccggctcgggcgcccggcggagccgcgggaggagtgcggggggtgcgtccagcggcggggtgcgtgtgcccgggcgggtgcgctcggcggcggggcggggaccagcggcggtgcccgcgcgagcggcggcggcgagcagggcgcggggaaccaggctgtgcggccgcctctcccctcgcggcggcggcggcgggggccgtgcgtgcaggcgcggagcggggagggagaggaggaggaggggagggggaggaggacgggggcgccgcgctgcgcactggccggcgggacccggcgcgggaggctgcgccgccgcgcggggattctggcccagccggggagaagcggcctccgcgcccccctcccccgccctcggctaaactggctgggggaagggcgggtgggggagccgacccctctggggagttgggggagggaggctcccaaagccaacctccaccgtggaggcgggggagaaaggggttctagctcacgcgccgcctccccagcaccctcctctccgcacccactcattcaaccatccctccagccatccattcattcattcattcattcatccgtccacccgtgcattcattcacaaacaggtacccaccgcctactctgcatgccaaagtaaccccttccttcctgcctggcgccccttccctgggcagaccctctcatccgccgcgtgctgtaaacacccgggcgctccccagcaatacccctcccacctattaagggggcagtgccagggtcccatgccagcgccccctcccatccccagctgactgtgaccttggccaagttgctgaacctctcccagcctcagtgtcctggattgtgaaatgggaccgttactacctagctccaaaggttactgtgagagatgaagaagaccttgaatgggagggtggctggcccagtgcctggcacctattagagactgggaagatgttcatgcctgtgggtggcatccgggtggggtgagggagtgtttagaccagacagcctcctcttagcctgaaagtccccgtgctcttggcattcgctgggacactaagtaagggactctcccatatacccagcctggcctgccctggtcagacctcatcaccttgtcagtggctgctctgagtcccaagcctgcccagagcccccaccagggccccagtgctcctgatccaccctca

SEQ ID NO: 21120 - DNA, 2048 bp, Artificial sequence
  DNA replication origin
ggagaaagttgtggaacagggacaccagggagctgccacagccttcccggtggccccgggaggtcttcgaggccctccagggtgggcagttttgagagaatacagcccagctggggtgtgccaggcccccgaggcccaagccagagctctgatgtgaataaatacagccaaggctggggacggaggtgaggggtgactgagaacagccctgcctcaccgcggcccctacgccctcgggttggatggaaaccagcccctccacatccccctccccaggtggctcaggagttaggaaggaggctgtctgtgggggggacccacgatgccactgtggagggaggtggctgaggcaccctgtctctgcccggcggccgcgggggaggcagccgccgcgctcaggggctccagattccagtttctggagttgaaagctactgcatctcttccgccagccccgggaggagaggcgcagacatcacctgtcagctggtgctgactccgtgggcgactgttcagggcttcctcagaaggtttaaaatggaaatggcctgagctgacagggcccgtgcctgggaggggacgctgcctagctgggccagcagtgagggggccctggtaggtgtgaggggcaggaagagctgagggctgtcacatatctggctgaagggtcggccatgggcacagggtgtgtgtgtgtgtgcgcacccagtcccatgttctttcccagacacagagactggatactcttcagtaaaaagcaccctgaccccagcatggaggctccgtagcccacacccccaaggcagctgtggcctgctggacttcacctagacctgggtctgtgcatccgcactctaccatttattggtccctccacctccctgtgcctcagtttcccttgttggtaaaatgggattgatagtgccacctcctgagcctgagccagggtgctgctttgtaagtgcatttgacgcatgttgttagtggtcctgctcctggactggaggattctcaagggctgagggtatctgcagggacttcagagggtcggggggtcggattttcccaccaccagccagtgtgctgtcactggacttcatcctcacgctggccctcagtggcagcgccctgtgtcccctcctccccatctccgaggcctcccatgaaagcccctgggaggtccgcccagctgtttctaaggaggtgatggggagggggtgctgccatcccactggtcacccactgccagaggtgtacagacttagctctgtagagattcatgcctggtggctgagcctgtgtcgcattcactgggtgaccctgggcctgcagcctcccctctgggaccggcttccttgcctgcgcaggggtttacagcagttgtcccacagagaggatgtctgggtgttctgcgtgtgggtgcagggaagggcagtgcacacatgagcaggtggcatctgtgcttgcttcgaagttagctgagaggactagggctccaggtggccttgaccctgcgggtgttgagggacggagaggtgggtgtagagcccagaggccagcacgggggcagctgtcaagtggctgctctggtgcagggggaggatgaggcctccaggatctagctgggcacagccacctctgcccagtcatggggctagcagccccctccccagccagccagacatccccagaatcagggctggacatggcctgatctcagagatggggcctgtatgggactgtgtgggtctggctgtgctggcccttctgctctagagtctggaaatgatatcaaccacctagtcatccctgttgattgtgttcctgggacactagaatgccatcacagggtcctaaggactttcggttcctggggagggtttctctacctggcctgctaaccttcggcaagtgacccgtcttcctcatctgtagggtggggtaacagcagtacctaccttggggaggcacccacgttgagaggatgcgtatgaggtttctagcagagttcatgcctagcaatgtggggcccttgcctagtctacacc

SEQ ID NO: 21121 - DNA, 1583 bp, Artificial sequence
  DNA replication origin
aacagcagtacctaccttggggaggcacccacgttgagaggatgcgtatgaggtttctagcagagttcatgcctagcaatgtggggcccttgcctagtctacacccctcgttcactgtgggccaagggctttcagcttcttcaggccttggggtggcagggaggactgaggtggccctcatcccctgcaggcaggggccatccactctggtacctggcccaaggggcagtgggaaatgccccagagcaagggggagctggagggcttttgctgaggccccttataggatggggtgcgtgaggcatgtgggtgagcgagcgtgggtggacaagaaggggcgtgggtgtggcgagggtgctaactgcctatagtggggtgggtggggactgccccgggggtagctttccctgctcactggcagaggagagcgccagcctctgggaggcccaggccccaggccctggctgctgcccccggtgtactgccttccaagtgtgtttgaggtcgggtggtagcggggggtccctcctcagaacctgtgttgttctgccggagacaaagttcaggctctggctggcccacgaggcagctgcattctgtcctctgccatgggacactcaccctgagagggccagggctgtggtgtggggcagactggatggccgggaggagacgggaaaaggacagcacccctgttttgccctcctccccccggacagcctgcctggagttctctggcagcagctggagacaccaagagggttccatggagcaggctgtgtttgtgcaggcctgtgtttgcctgtttaccatcgctcgaggcccccagagcactgccgctccccggggccagcggctctgcagatgatgtcagggtttgggggcctctccttgctttgtggaggttgtttgctggattcctgcagccctgggttttaaaatgacaacctgcagagctggtggctagtgagggtgggggagaggacagggaggaggatgggtgggagtttggggctgaagccatggaggataaatgggctggcccaccagtgctcctctggcacgcctggctccctggctcttctgttttcccttccctcactccttccctcctttcctgctcattcattcattcattcattcattcttgagataatcattgagcattagttattgccaggcacagtgctgggctctgggacaaaagtggggaacaaaagcagtgggtgtcttgccctcagggcgcttccagtcagatgtggtgtcagacattagtcagatctacctcttccccgtgaagccttggctctgaaggcgcaaagtggtgaggtcaagtaacagaggggcctgctgaggggtgggattgagggggacttcccagggaagggggtgcttaagacatgaagagtgagctggagccagggaagggcagggacagaaacaagggcctggaggacaggatggatggagagggctgcatggagacccccggcaggagggcagaggggctcaaggcacccggccagggctggggctggtgggctgtctccctgggtctctgtggcccatccatccccagctct

SEQ ID NO: 21122 - DNA, 1022 bp, Artificial sequence
  DNA replication origin
gccctcagggcgcttccagtcagatgtggtgtcagacattagtcagatctacctcttccccgtgaagccttggctctgaaggcgcaaagtggtgaggtcaagtaacagaggggcctgctgaggggtgggattgagggggacttcccagggaagggggtgcttaagacatgaagagtgagctggagccagggaagggcagggacagaaacaagggcctggaggacaggatggatggagagggctgcatggagacccccggcaggagggcagaggggctcaaggcacccggccagggctggggctggtgggctgtctccctgggtctctgtggcccatccatccccagctctctcaggattcctgggtctgcctcagggaccctctgcctgtccttgcagatgggcctctggaagagtgggcttcctaggcccgggatgccaggtccccttttcccgagagctgtgtgttcacctgcgtagacaggttgccccagcatctgatgggctgtgagacaaatgtgggcttgtttatgacgggggcggtagccctgggtggaccgagagctattagtgatgaaggagagtccgcagaaaccctccccagccctgaatgttcccggtgcagggaagtgggctggggtgcaggcagagggagaagggagtgaaggggctgtgtcctggagggccccggacccggctgtatggggctcagctagccactaggggacactgcctcccaggcagaccgcaggacccaggcatccgacgtccggccaggccccaggtgtggcaggctctgcttcaaggggtcaaagggcatcctcatgggcagacggggtctattgtctggctggcagggaggcagtggccgggctggttggggatggcttatacttaattaaaactgggattaaaactggggtcacggggcgctagtcctggccattcctgcccgcgtcactctccagaggcagctctgtggcagtatttttttcacgcccctttccctccttctgcctgaat

SEQ ID NO: 21123 - DNA, 1035 bp, Artificial sequence
  DNA replication origin
tgcttcaaggggtcaaagggcatcctcatgggcagacggggtctattgtctggctggcagggaggcagtggccgggctggttggggatggcttatacttaattaaaactgggattaaaactggggtcacggggcgctagtcctggccattcctgcccgcgtcactctccagaggcagctctgtggcagtatttttttcacgcccctttccctccttctgcctgaattaatcgttggcaccagattacaacagatttagcaaactgtaaaaaaaaaaaaaaaaaaaaaaaaaaaaaagcatgagcgagagaggaagagagaaaagaaaggagggaatgccttccgtgaggagccggcatttatctccagaagcaaattgctcttcttgaaccattcctgctgccccccacccctccaccccccgtgacgcctgggaaatgctgctcgggaaaatgtcctcaaaaatgctgccgggtgctggaaccaggaggggcttttcctgggggaggtcagccaggggctgaggaggagaggagagctcaggggagtgaggagggtgcccggggctgctctggagggtgtgttgggggacacctggctggttctgagtggtcgcagaggtggggcttcgtgtagggcagagcgagtgaacagatgaatgaatggaaaaaggggtgcagccaggaccgaatgaccgcctcgggagctggtgtggtggcagtggagggtccagcctgcccatcaggattcctagggacaaaatccgagggactgagctctctcaagcgacatagcatcttgggtcttggatccaattccacttctctctggtcagaccagagggggcctggctttggttcagggaatctggctgttagggggtgggtgtctggccctagggacatggcaagtcgcagagggtcacgggagtttcacctcaaggctgagggtgccccgcccagttaaagcacaggagtgagattcggtgggctgagagcccctgggctcctagcctgggctgggctgccccaccctg

SEQ ID NO: 21124 - DNA, 899 bp, Artificial sequence
  DNA replication origin
tcacgcctgtaatcccagcactttgggacgttgaggcaggcggattactcaaggtcaggagttcaaggccagcctgaccaacatggtgaaaccctgcttctattaaaaatacaaaattagctgggcatagaggcacacgcctgtagccccagctacttgggagggtacatgatcttgtcctctagcctgagcgacgagaacaaaactccgtctcaaaaagaaaaaaagaacgggccaatcaggagtgtgcatgaagctgacctgggctggagcacagcgcagggtcccagacaaaggccagcactgtctggggtccagggcaagggtaggacccagctccctcctgtccccttgggcagcctcgcaccccagcacaggggacactttgggaacccagggccagcctggctccaccctgcctttgtcacctctgtaagcctctgtttcctcatctgtgccccaccaggctctagtagcaactaagtttgctactagaaggttctgcaggaggtggcccctgtccctcttctggggcttcctcactttggatgagagggactggggacccagtgggagtcggctgctctggagaacagaggctcaggaggccagaggcagcacccatgctaagagaagccgggttcccatcctacccctgccgctcagaacctgtgtgacctgtgtgaccttggctgcctgtaactcagtttcctcatgtgtaaaaagggaataataacagtatcactgcccacttatggggattaaatgagatacagtactgtacgtgacatgtttagcacactgcaggtccacagtgagtgctcagtcatgttacccagtgtcactgctgttattgttttaagagatggggtctcgctatgttgcccaggctggtctca

SEQ ID NO: 21125 - DNA, 1016 bp, Artificial sequence
  DNA replication origin
aggccagtgggccagagaggcagctgtcgtgggggcagggcccctgcccggccctgcttctgggcccactgcctcccgccggccagggcaggctgcaggcctgagagccaggctgggcctcaggcgggcagggcctgccagcatccccactctgaagtggtggctcaggcccagcacacagggcactgggaaagctcctatccaccatcagggtcccaggaagttgctgcagggctggggctctgctttcctgcttccttccttttttttttttttttttgagacggagtttcactcttgtcacccaggctggagtgcaatggcacgatctcagctcactgcaacctctacctcccaggttcaagcgattctcctgcctcagcctcccgagttgctgggattacaggcacctgccaccatgcccagctaatttttgtatttttggtagagaaggggtttcaccacgttggccaggctggtctcgagctcctgacctgaggtgatccatctgcctcaggctcccaaagtgctgggattacaagcataagccaccgcgcccggccttccttccctctattaacctcagtttcctcatctgtaaaatggagcctctaagtacatctgggccactgtaaagattaaatgtgatcctctgtgaatgccaggcaggtgaggagggctcagggaatgccaagctggtcactcctccacctgctttacggctgctgggggtgaaacggaacaggacagggaccccatggcatggacctggctttatctcctccgattgctgggtgaccttggcccagtgactgaacctccctgagcctcaggtttcgccttcttaaaatgggctcacgctacccactcccagggctgttgtacaaagaaagccatttatctcgggccaggaaggcttgctgggaggagttgaggaatctgactggttccacagttcagcagcacctctctggggcaggggaggggaggggggcaccacaggtgggtggaggcag

SEQ ID NO: 21126 - DNA, 1415 bp, Artificial sequence
  DNA replication origin
tgtccagctgcccctaggtggcctgcacatttcagaagggtcagtgggaagagcactaaactcagtcaagctctgggcctcgtggtagctgtgagtcctggggagccactcatctctcggggtctcaggtccctcctcttgtggggatgggtcatcggccctccctgcatccccaggctggggtctagggagggagggatgggtggagggagaggtgggagtggcagggtgaagacggagcctgcacccggcttccctgtggggcataaggaccgagggcctggtttcccagcctccggagagatctcgagggaagagtaggccatcaccctcatcatcactttaccaggccatttcttattaatattaatagcattatttataatatggcatccaggcctgggctggctctgtgcgatcgctaggccaagagggctctgagagaggtttggcctcccccccggggccacagcgtcttggtctgggacacagcctttctagaacagagctgggggatggtggggtggatcacagctcagccaggccccagccctagcaagcagggagtctgcagagacgacttcacttgtgggtcccccacaggctggcgcccatttcacagatggagaaaccgatccccctcaggatgagaaggcaagacactgggctctggggtgtgcagcctgccccgcagatcactgagctgtctgtctgcacccccagcgtccacccccttcagcaggcacctccaaccctgaaccatcaggatgtctgtgcgggagtcagcaggtcctgcaggacaggaagccaatagaaccagctgagctcggagaccaagaccgcttggggaggctgaccttggaggtgtggcctggggaaggggcctcagtttcctcatacctcccccataaggttgtgaggatgaagcgagtcatgcgggtaatgctcagaactgggcccagcgcacaggaagtgctcagggggcctgctgacctccctgcccaggactggccgtgggcaccgctgtgaacagcacagcctttgggcatcggtaggaccctgttcaatccccaaggctttggggatcctgggccagtccctttttcgcttctctgtgcctcagtttcctactacacaatggggtgttaacaaacacagtggtctctgggggtccttccaagagtgggactatgaatggggtggctcagccctgaagtcccccagacctctcaggggctctgtcacttttcctccactgttccccactccagtgaatgtaatacctcacccacaaagtgcaggcaaaggccccaccccctgaaggacaaatatgtgatctgcctatcacccacactcagggcaggaggcagccggcaccccagtctgtctctctgagcatcagtttccttggctct

SEQ ID NO: 21127 - DNA, 1846 bp, Artificial sequence
  DNA replication origin
cgcaatgtaatctgcgacactgggctgcgctaggaacaattgcgaacccattacaggcctattttcctaatccatgacaccttactgcagcccccagcgactgtgtttctgggatagacggtggaatgctgtccacccacgaaatgactaatcctctctttctggggctggtagagaggtgggcatctgagcagggtaacctgctcctgccccgagggtgctctcggatgagcagttggggactactgtcggctctgctgtgctccttggtgcccatctcagcccccatccgaaggctgacgcttagaggaggcagcccaggcagggcttagtctggacagtcacctgcaggtgaggagggcttgggggggggtcctcccctgtatgccaggcctgacgagggggcacctgtagctgccacctgggtgggcgaagagcaggtcaggccttttcccaggcagctgcctcatgccttttggaaggggcagcagatgcccaggcctgggagatgccacgaggacactgaagagggggtggtggaggagccggcagctgccgggtgcagcgggcacggccctgtaattgggcagcctgttcccagataaggcccatgacactgaacagcttcccgctccacgccggctgcaaccgctcatttcctgctccctggccagcgatgccaattacctcgcctcctgcttgccagcggcagcttctagggtggccagacgattcctctgtcatcggccagggcctggatcctctctgacgggtgggagggcgtgaagagggcagccggcaagggggggtaggaccagtgataggggagcttccatcttcactctggcctgggccacacccaggcacagctggaggtgggggtgagtgacacatggacccaggctaccgtgggagggctccatttccccctctgcccctaccttcaaaacaggggctcactgtctactggatgggctgaggagtgcctgatgctctttggatggagtgaggatgggcacccaatttgcactgggggaaactgaggctcacatggaaatttgaccagtgctgaaaggacggaacagcccctggtccttctcttcctcttctgtgtttcccccagaggacagacttggggagcagtaggaggggcagcctgtctaaagggggcaaaggctggctccagattcctcttgccgagcggggaaaggggagaagcaggtgagaggtgccgccctgtgaagagggtcttgcgggtcctggctccactgaaggtggatgcgtgtagccaccgacatgggaggcgttgcgggcttatcccaagaggctcgcagcccagcaggctgccctgctccctgtagtgggggtgggaagagatgtccccccagggttggaggctggacagggaagcgtgggcccacctgttctgagagggcatcccatgcccttccacaggctgaccctgggtacccaggccccccaggccatccctgcctgcagggtacttccaccctcatctggggaacaggcatctcagaggctggaaggtgtgtgtgcctccgcaggggtctcggggtacctggactcttggatggatggtgggccagaaaagtccagccctgcagtggtgcagatggggaaactgaggcctaggcacagagaggggcaggtcactcagctactcccagctgaggcaaacgcaggccttcccctctgagtccgggtctattccctctcctgagtttctcagttaatcattttgggtcttccaagggtcctgaccccgagaggcccgcccctaggcgctgattggttgctactgatccaatagggtccagcccttgaa

SEQ ID NO: 21128 - DNA, 988 bp, Artificial sequence
  DNA replication origin
ggtcctgaccccgagaggcccgcccctaggcgctgattggttgctactgatccaatagggtccagcccttgaaggccgaggaggcgaggcgaggctggcaaccgcgacctcctgagcagctggggcgcttgggggatgttggggggccggggcaccctgtggtactgagggccgggaagggcggtgcgggacgtccaggggcccccctcccacacggcaggggggaatggcgaacaactccctaaggggcaactaacagaccaattaagctgccaataaaaaatttaatcaagtaataatgcaccttactttgtttaattagtgttctgtcaagtgaatgaatatttaaggcgcggacggcggtgccagcatctgcccagcgggcagagaggccaggcccacatttcaagcggcctgacagctccccacgcgggcgcccaggaggccccagagctccgggagcggcgggaggtcttcctccgcctgcaggccgatctgggcctcagtttcctcatctgtaaaatcgggggcaggagtccagcagaacaccagcctttctgccagacccagaaggcctcggattggttgtgtttccggatccctagagtcccaggcaggtgcgggaggcatgtgggacctggggcccctgtcggggctgcccgcgactccaggccctcacagatgcctggcggctccgaggtcggagctgtgtgtgctgtgaggggtacccagagcaggccccagcctggagatacgctgggcagtggcctcccatgcgcgcacagcctgaggattagaactggtgaaactgggttctcctccggacgccgtgacctggggcaaggtctgtctgcgcttctctttagttcattcgttcattcattcattcattcattcatcaacttcgaggctgagctctgtgccgagcccactgtattttcaccggaaaatgcgagactttcatttctacctctcgaatgcccagtct

SEQ ID NO: 21129 - DNA, 1842 bp, Artificial sequence
  DNA replication origin
tggggaatgaagggtcacactgagtgcagggctgggaaggactggcctaggaggcggggccggggtggaggtgcccctgctgagttctgcccctgctgtgtgagctgtgtgggcaggcacctgataaagccaggcaccccagacctgcccggcctggttttggggtgggcatctggggcctcagcctgggtcaggctgcgcggggcaggacgggcacactggaagccttcagcactctggcttccctgagaaaccttgctgcagagctggagactgaggcagggccacgtgcctttgctgctccatccccagcgcccaggacagtgcctgtacatggtggtgttcaggaaacagagaccgagcttgtacaagagtctcacagtcacctctgtttgggtgccagagtgcaggaggaggctgcgccagattggctgaaatctgtgatgcttcctgcagccctgtgtgaggcgagccttccgcctatgcccagttggttccagggtgtgggcagagggctaggcagacataagacctccaggtgtgggagggcctctgcatatgtctgagccagccacagacgcaggactccctctgggagacacccagggctcatcactcactcactgatagatgcatttactgagcacctactgtgtgccaagtactatgcaaggcacagggagtactccaagaagcaaaggggaggtggaaccctcatagtgtggcagaaccaggcccctgtgggtgctcagccagaggaatccctgtctggggaaatccaggaaggccttgcggaggagaggggcatttcagcacagctaagcagacatcccccaggcagagaaggggcaaaggcatgccaggcagaggctttggacaggacagaatctcaggacaggatttgtttgggaaagtaactaacagaagcaagtagaagggggcaggggggtgggggtggcatggtggtggcagaggcccaggaatttgagtccagcctgggcaacatagcaagactccgtctctacaaaaaaaaaaaaaaaaaaaaaagccagcgtggtggcacacgcctgtggtcccgctacttgggaggctgaggtgggaggatggcttgaaggatggcttgagcccaggaagttgaggctgcagtgagctgtgatcgtgccattgcactccagcttgggtgacagagtgagaccctatctcaaaaaaaaaaaaaaagtctcatttactcctctaaaaattaaaattggaccttgatagtatcatatcaaaagtgccctagctgcctaacttggagccagagaggcatgcagattcggaccccatccacagataacccaatgcagcaaatggggggtggtgctcagaaccctgaatggtgaacaagaccggtgatcacagtgcagagccggggaggagctgcctggggactgcggggtcagaggcaggggacttggaaagcccacgaagctgttgggcgcaggaggcaccccaaggtcctgggaggccggcctggggtctgggcgggccaagcccattcctcttgcctagcagagggccctcacctccaggctgcgggctgggggcggaggctcagcgtgaaggaagggcagacggctgcaaagtcggcgcgcggagcatccatctgccctgacagccagcaattacaccgcgtgatcgccagattactccaaatgcatttattacaggggttagaagcgggggacttatttactggcaaatccatactcattacaagactcagcctagcctagactgaaaacagctcaactgaaacaaataattaccaaagtccttccagcgcgaggctctcaggtggtt

SEQ ID NO: 21130 - DNA, 917 bp, Artificial sequence
  DNA replication origin
aacaggatgcagagtaggggcctctggcaggacattaaacggcaccgagatagaaggaggggggccctccctgagttctcctctcccctccctgccagccccccagcaggcagccaggcctggacccaccatccagcaaaggctgacagaacagaggctgccaactaaaacctgggcacccggtggccaagaggctagagtttcacaaggacctcattcattcattcattcattcattcattcatttgatgagtgcttccagagcccacctatgacgtgccaggcaaggcggcaggcaggagggccaccatggtgactgagacagactcagggtctttccctacactccagagcacaggctagttggaacaagccagaggcgggcaatgctggtgctagggacatgagcaggggtgaagaagcccagcagggcccagcacaggcacctgagccagactcggcggcctcggagagacttcccagaggagaacgggctacacgtgggcctggaggtgaggtagaagtggcccagggaacgggtgcaggacagagtttcaggaagcaggcctggggtcagagaggcccagagatgaagagcgggtagagtgttgagcgatcggagcagtgaggcggtgggtgggcaggatcgggcaggtggcgggcaagcgtcagctgcctcaacatgcaggaggccaggctttgttctgagggcggctggggccttggagggttttaagccaggtcctcacagatttgccatgtacgaagagttcacccactacctccgctccaaaacagaacatttactgaggctccagagagcctggcagggtgtgtgcttgtcctgagctacagaggacttaaaagatgaacaaggggccaggcgcggtggctcatgcctgtaatcccagcacttt

SEQ ID NO: 21131 - DNA, 1230 bp, Artificial sequence
  DNA replication origin
agggaagccatggaggggctgcctccccatgcccaggatggggtcaggccactgcaggaggcatcagcagccctggccccctccacacctggccccacagctaggggcaccacacgggcagggagagcccctccctccccacaaaggcttcctgtggctgtgcttgcccttcccctaccccagagccagaggctaaaggggaccagactggccagcagcttgtccttggggagtgggctccaagacccccagggtccctgagccagatggcagggagaaggtctggctcctggggctttgggccagagagagacccccatcctctggcagcctcctgtgccccccaggctcttcggctgacagccgtgcctcatccaggcctggcagcaccttcccctgcggttcagagctgtctccggtgtcaggtagaactgcggatccaggtgaaggcgcccacctcgggcccccggccgcgcgcagtggccctcctgctctgctccccgcacctctccctcgacccctgcaatcgaaggttgggagaagtgctggacaccgtcaccctcacacccctaactggttctccagggctccttctcctgcccccatcctgccccacccccacctgccactgcccccggaggaatccctcttcttttctgtcccaagctgattagtgagtggcactatcaggataggcagctctagataatgttcccagtgctgtctgttggcacctgggccactctggggtgggggttcacacggatgcccatttcccgccaagtccccacacttctgtgaacctccggggaaggccgaggctcactcaaccaggctgggagggctgctcagtgacacaggcccacaaaggatgggggagcatgcccatgggggtgctcccaggttctgagcccattatctgggctcccaggctagcagctgtcccagctgcagcttctctgccctcagctgggagagacagacacgtgagatcaggacccttggtgcaggctggagggggtagagacaaaagcccctctgcacatggaaccctatctattctgcctgggcttccctggcttcagtttatctgccaatcaaatgggaatgcggggctctgtaagagtaatcggcagtaaatatgtgcaagggagacaaccatcgttatcctaggacctcatgtttgtggagggctccaatctgtgccagcccttaccgtgcccagactct

SEQ ID NO: 21132 - DNA, 1764 bp, Artificial sequence
  DNA replication origin
cctcccctcccagtccctggcccgtctgcgttcagcagctgctctcagggggctgaacggctgcagaattacaatattaaatgcagctgcaccgaaacatggcctcaatccaattacgccaggaaacaagaggagccacttaggctaatctggttattccaccccggcctccccttgcagcatcggagggatacccgggaggggagctgtctgggtgggcagtggtgtgagcgcggccctgtgccccacagggtcccatggggggtggccacaggattgcctggccctctcctgaggtgatcatggctcctgcatccttgtcctacaaatatgtgctcttcaccgagctttgaggtgccccagcagcaaagggggagccaggctttgccctcagggagggcaccccaagctggggagacaggccacaaggaaacccaaaagacgggtgactgcagggggggaggcctctctgagcagggggtgtgggggcaggggccagcttgaggacacatagctggccgtggagactgtctcggcagaggggacagcgagaactcagagtgggagtttggcaggttccaggacatatctttatgccagtgcggttaagggtggtgaatggcggagacagaggtctgtagactccgacaaggaacatggatttgttctgaggggagggtggtgatgggactgggttcccaggggcttgctgagccgctgtgcggacagaccgggggcggtggggaggcgctgctgtctcctggcaagagatggtgcagtggggggcggtggacgggagggagggaggtggttggattcattggatttggaaaggacttgctgacgactgtgtgtgggatgagggaagagggtgtgtagggagccccacggccccttcctgctctggcatgtggcttgaggggtcacaggggctcccacctgtgctgtgtgcagctggcgctgcagatgcctctgggaatgagacagacaggggtctgccctctgggaggttacggttaaaggggagacagatttggagcaagggatgataggagggaagggggtcgttggggatgggggggtgtgcgaagacagtgggtgttgaagccaagatccaagaaatgagcagccgggcacgcaggggcaggaatggggcagggatgagaactgtgccttaagcagtcaccagcaaatgcaaaggcttggaggtgagagagaccgcagccgccacgggcacagagaggagtccagggtcctgggcgtggggtgggagatgggctagacggaggcagagttgggcctagaggcccctcactcaaagcctgtgggagcagagacccctggaggaggtgtggttggggaaaggaaggactggggattgggttcagggagagagtggggcgcacgctcagagaaatgtggagtggaggtaaggagggagaagaaggcacttccatctggaggtacagctgggtctggggaccacttggaccccaggaaggagccacagggagccagcaacagctccagagtgagggagtaccaagacagaagcttgtcttcagtcgtaaatgagggaggcagggttgtatcacaggaagggacaaactgacctgagatcaggcctcagctgtgttattcacttgagaccttgaacaagttgctttccctctctgagcctggaattttatttaattttgagatggagtctcactctgtcgcccaggctggagtgcaatggcaccatccctgttcactgcaacc

SEQ ID NO: 21133 - DNA, 1136 bp, Artificial sequence
  DNA replication origin
cgcctggagctctgactcccacggccaccaccgttaggcaccgagccttgtttcaccccctgggaccagctcttggccccagcctggccctcagtccctcagccctgccctcaagcccctcacctgcctgcccctcaccttaggacgcccccacttcaggctccctcccagccatcaatcactccagccatgctcctggcccccgtcctgccttccacggtccccccggatcatcctccacccagcgtctctgctggctgctcagagcaggaggcaagattttctccaccccccaggctcagccatcctctgctaagcaggggcccagtgctgccgagagcaccaatatttaagggatgtttcgcgcctgctcctggctctggcctgctcctggctctggcctccctcccgggaggctccaggcgcagccacaggagggcctggggagatgggcacagccccatctgttctcgccacggcccctctgccccagcccaggacgctgcagctcacacacttttcaacctgtcacgggatccggcgcccgctctgtaaatggctgctttattgacacagctgtggggatggcatgtccatttagaacacagcaggtagaacgcggcactcgagagccgggagtccagagggctgcaggatgctgccaagctccagccccaccaccgagcagccactggaaccacggcctcagtcttcatgtctgtgaattggggagaacggacccggacctctctccggcagctccaggaggcagtggaggagggctgtcaggctcggctctggacctggagttgggatgctgtgtggccaacccccaagcaggaacaggcttcagccacacgccctcacctgcatggttcaagcagaaaagcatgtatggggcgccgactgaataccagagtctacacccagagtggtccccttcctcaccttgctccctgtctttggcctgtgccttcagccgctctgataatacccatgatatgtgtggtttgcgatggggtcgggggggtgttacactgatgttcactgaaccccacgtaccaggcagggcttgtcctgagcccttgctggcactctgccaatccctgtatgagggtcacagctgggacaggtcc

SEQ ID NO: 21134 - DNA, 1412 bp, Artificial sequence
  DNA replication origin
tgcttgggggttggccacacagcatcccaactccaggtccagagccgagcctgacagccctcctccactgcctcctggagctgccggagagaggtccgggtccgttctccccaattcacagacatgaagactgaggccgtggttccagtggctgctcggtggtggggctggagcttggcagcatcctgcagccctctggactcccggctctcgagtgccgcgttctacctgctgtgttctaaatggacatgccatccccacagctgtgtcaataaagcagccatttacagagcgggcgccggatcccgtgacaggttgaaaagtgtgtgagctgcagcgtcctgggctggggcagaggggccgtggcgagaacagatggggctgtgcccatctccccaggccctcctgtggctgcgcctggagcctcccgggagggaggccagagccaggagcaggccagagccaggagcaggcgcgaaacatcccttaaatattggtgctctcggcagcactgggcccctgcttagcagaggatggctgagcctggggggtggagaaaatcttgcctcctgctctgagcagccagcagagacgctgggtggaggatgatccggggggaccgtggaaggcaggacgggggccaggagcatggctggagtgattgatggctgggagggagcctgaagtgggggcgtcctaaggtgaggggcaggcaggtgaggggcttgagggcagggctgagggactgagggccaggctggggccaagagctggtcccagggggtgaaacaaggctcggtgcctaacggtggtggccgtgggagtcagagctccaggcggaagtagggttcagattcaggtgaagcttaggggtccctgggctgaagacggaacctctgagtgcaggcaccaggtgggagggtggggacccccagcctggagccccagacccctgtcctgctccaccctgcaggcccctgggtctcacacaaggaatgtggagcatcctcctgagaggactcagaggggattcctgggccttggcatttgggacccctgaaagtcacctgctcccatttcccctgtttccctcagctcagacatcaccacgacccacagggcaccagacaccgaggtaggcagggctgtgcctgctccagcccagggccccctgcctctctgccctcatctgtccctgccctgacctctctctgccttccttcctcgtcacagcagctgccgtgtgccattggcacctcctgtgtgccaagtgctggcttagtctcccctggcgttttctcatatcccattaacaacccacccagtgggtatcatcatccccatttcacaggtgaggaaactgaggctcaggggggcaaagtgactccacaggccaaagatgaatgagtaaa

SEQ ID NO: 21135 - DNA, 1396 bp, Artificial sequence
  DNA replication origin
ttatctgcatcatctcttattcctcctgcatccctgctggggatgctgttattccccgacttgcccagctgaggaaactgaggcctgagaagttaaggttgctgggagaagcaggcccccaatggacaacactgaacttcctcctgggacagcctgcaaggttgcccctgggcctgtctgtgggtgaccgtcccacttcccaaggcaggtaggcccagcctccccacagccatgtggggcagaggaacaaggctgtcgctgtgctggcccacgctgcggcctggggtggacccgggcgggcggcaggggacgtacttagtggaagatttatgagctgggttaaaatttaatttgggtggacaatcccagccagctaagccggccgccccagacacatggcctggtcccggcagccccgtggttgggcctggcctccctgccagtctcccccgccctccgtccccggaaggcaggcagcccgccgcccccagagaaatattagcacgaattcgatttggggtgggagcagcgggcgctgaggcttgtttgcacttcagttcaaaattgaacaggacagaatcagctctggccaggaaccacctccgtggtgcccagggacagcgctgctctccaaggagccccgctaagccttccagctccccacctgtccactcgggcgtgctcctccaagctgccctctgccctcaagccccatcctctgcccagaacccccaatcctccctggtgccccactgcatgggcttgaaacctactgatatgttgggggatctgtgcaatgactgaacctctctgagcctcagtttctttatctgtaaaatggggataataggacccattgttatagtaaggcagagttagaactgtgtctgcatgtggcctccccatagacggaaacccttgttgtgggagggcagcaccaaggctggctggagggagcagggggactgcagagcccccacacacgcagctctccctgtgagtcctgtggtcttgcgcccctcccgggccggggcattacctctttggaccttggggctacggttcttggttgcccagtctgggctggcgggtgagggagaatgctggggtcaccaaggcacgaggtgtggcctagggctgagccgaagcagcacgggcacgtggacagccctgctccctcctgactggccctgcccaacctgcccatcactctttgaccccactgccatgcgctgggtcccttctaggcgctgtcctaagtgggtactgtccacccattttacagagaaggaaagtgaggctcagagaggcaaagaaactgcctcaggcctgcagcagcgatgacccaagcccaggccccgtgaccccaaggctcactgtcctcccaccctcgctg

SEQ ID NO: 21136 - DNA, 1715 bp, Artificial sequence
  DNA replication origin
agcccccaggagagtggtctgtggaccccacagtgcagagaagccagccctgggcaggcgtccagcctccggtcattcagacgtgcacagcgtgctctgtgtactgggtggacagggtgagggaccacaaggaccaggccaagcatgcagcatcatgagatcatcacaggagagtgaatatgaggacaaggacccgtggctgcatgtcctgcagggtggctggggccgcgggcaaggccagccttgcaggctgcagcgagtgaagctgcaggatgctggtaccagctgcgcccatttcttggggactgcgtgcttgcctccaagcccagagctccagcaaggggtggcaactgtggagaggtgtggccaactggaccctgcccagtctggttcccagagaacctggctttcttgggaggcagacgcaccccggagtctcctcgggctggggacaaccggcctgtggtcagggctacagccgtggcaggggtggcaggggtggcagggttggggtgaggtctgggtggcggaccctgttcccacatccgaagtgacaggagcaggttgatttccctgcacagagggcatggaactggggcaggggcccaggagagcagtgggggcgctgcacaggtgcacttctgccagatccaagaatcggagacctcactgaaccgtgccgtcatttattttaatgcctctgtggcccacatttgggtccaggtgaaatatggccccatatcatttaccagtggggatgttaattgtgctttgctgtgggaggacaaacacatccagggggtgtcggtcactgtggcagctgttcagggtggccacgtggctgctgtgtaggtggaggccggggaggggtcatctccctgcgtcaaaaggcttctcttcataccccgccatcaaggagagaggcagtgacagctcctgccaggacagggaagggctagcgggctgcctgctacctcccctcccagctccatccccagccgccacccctagcaccgcctgtggaagtcacgggctagttggaggagcggatgagggctcacgtccagctccacagctgcttgggtgatctgggtgtgtctacatctctgtactgtgagcacgagaaccttccttcttcatgcccttctccccctctctgtcttccctgaacacatgatgtgagtccctggagcatgaataggagtctcagacagaagtggggctgcaggggccggaaaaagcaccccagtcgcagaaccgctgtgcaaaggcccggaggcaggaggaaggctggctttgtggctgtcctgagacaactcagcctggggcagggcggtcagctaggggacctcagggaagggcctggacttcctcctgagggcatggggagagcagagggacaggtttggactggagagtagaaagctgggggtggggagggaatgttccatcctctgagctcgggggtagtcacaagggcaccatatgcatatgtaagattcacaggtcttagaactgcacaccccaggctgtgcaggtgccggtatgcactttacgcctcctaaaaccacaattcaacaaaggaagcctccctctggccccgaatgcaagacctggggcagggtgggctctgagctaagcccctcctccccactccagccctgggggatcccactgttgagtcccggcttcccctgaatggctgtgtgtgcgca

SEQ ID NO: 21137 - DNA, 1292 bp, Artificial sequence
  DNA replication origin
ggcagcagtgggtcgataataatttacgaggcagcccctgaggtggaggaggaggaggaggccaaataaccacatttgcttccccgggccctccctcgaccggctctgcctgctcacaggtggctgggccaggaggctccgggatgaggcaggaagtggaggctgtggccagccatcgccgcaggaggggtcccagctggagcactgcgcagccccaggccttgtccccagccaccaacagaccacttctctgaggcggggacgtcccaagactaaaatgggggcaggggtggcagcgtctctccaccacatcccaagactaaaaggggggcggggtggcggcgtctctccaccaggcacttggggtttgtctctggggctctgcagaagcagagcccgagtcgggtccagccctgcactcccagggagccctgagggacgaagtaaagcaggagagggcagggggagggacagccagggtggtcacagtttggtctgccctgtagggggcactggcagaatctgcagcactgacctctgacctctgggtcagttggttactgactgctgactgtgcctaggagaagggggaggagggaggggagaaagaagacagaggaggaggagggaagagaagatgaggagggacatgggaggaggaggggagaagggagaggagaaggagggaagagagggtggggagggggcatgggaggaggatagaagagggatggggagggggcctaagactccagctcctggggcaagggaagtgggcagtggcagcctccgctgcagggtctgcagcccacggagtgtgggacagagttcatcctgcctcagaaggaggctgggatttggatttcatcactcacgtagctgatttcatcacgtttcattttctgtcaagtttcctgccgttacaatctcattcattcctctggggacatgaggatgccaggtagggaggttggggggcgggtggcaccaccgcagcttttgccccagggctgcactggtgccagggaggtggatgtgggggacgagcctacaggggtgaggctggggtggggttggggttggtgggttacaacagtagctgaggtgcatgcccagggagagctgggccagtccttcgggcgtttgcacagcacctcctggagtccttgccacagcctaggacgttgccgccaccatccccccatccgacagataaggagactgatgttcagaagacactcggcccaaggggcacagctgctgaagttgcacgaggggccccaactccccac

SEQ ID NO: 21138 - DNA, 1191 bp, Artificial sequence
  DNA replication origin
ttccacctgagaaaacagatattcaggagcctgcccagggtcccacagggggtctgctccagagcctggatgcaaactcactcctctctccactccgggtcctcaaggccacaccagccactccggtgtggccagggactaaaggttggctggaggctgcaagccgaactccctctgcagggtcacagggcacattagcatattaaaggatctgagaagtcctgcggcaaagatgccaattgaagtttgttcactccagcggttacccattgactttgtctttggtgacacgtgttaacctcccagcgttcatgtcttcttcaaaccatgcttggggagatgctgtgggtgttcatgcacccgtttactcaggcttttggtaaggggctgctgtgtgccatgcaggggcctggtgctggtgacatgcagtggtgaggataggcctgtccctgccctgtgcctccctggtacccagctggtggctggcacacagtggcacacgtgcctgcagcaagtgagggctgaatgagagtgggagtggacggggcagaggagccgggctgggccatgggaaggcacgtgtcatgaccacacgcggtctctgagcggccccatctcctcccatcgtggatgctgtgtcaagacctctggccacacccaacctcaacctctccagcggcacataggcccctgggaggccccaccagccctccataggcagggtcagagccctctgcccccaccccaggacccctgccaggcccagcacctctttccttcccttcaggctctgtgtctctggccttgacattctgatcacatcccctggcctgcctggaatactaattctccccatatgaaaccatccgtgtttaatttttttaagaggcagacagaaagacaagaacaggggagacgttagtgggtaggaattagagccctctttggagcctgagactgtgcagtgactccacccactcgggatgccacggcgaccctaacacgggccaagcttggaggccaggaaggacggtggccttttgaatacaccagagtgtgctatggtcctggcttgggtgggaggattgttttttgggaccctcaggagctgagatcacgtggggatagagggccggcagccccgctgtcctctaccacctgagagcccagagtgacgccactgccctcagt

SEQ ID NO: 21139 - DNA, 673 bp, Artificial sequence
  DNA replication origin
atccaggtcattctcgtataggtagatgacctgcacgttgaccttggtcttgaggtcctgggggatgccggcgttgttgatctggttgttctgcaggtagagggtggtggcatcatcagggatatctgcggggatggatgtgagtccccggtcgttgcagtagatgaagccgttgtcgcagcggcacaccgaggggcaggtggtgctgtcgatgacctccgtcaggaaggcgatgagcccgtagcagaggaacagccagtcccgcaggtccatggtggccgtggtcatcacaacggtggccgtgacagtggcagtgggcgtggtggtggcagtggcggtggggtgtgccaccaccatggtggatggctgggggcgtccggccccacctggcctggagcctgaatacctgcaaggagcacaggacaggggcagtgagagggaggcggcgacagcgaccccaggagtgaatcgtgcattccctcccacctgccagcctgtaccaaggggtgaccgaagtccggtcctgcggggtgaggtcaagctggaggagtggcctttgtgccaggtttatgccgcaggtgattgctcccgccgaggtcggactctaacaacatctggctaatgttaaatcttatcaggagccaagaggctgcgcattaatgagacccgtgct

SEQ ID NO: 21140 - DNA, 1124 bp, Artificial sequence
  DNA replication origin
ctgaactgtcgccgtaaatcgctttatctgtcacttcagattttaatgtgtttgctgaggcttgccggccaccacgacagcagaaacctctccgcagtgggcaggggagatggccgggccagcgacgagtccagggctggctgtacagcagactttgcagctggaacctgttagcaacatgggcctggccctgggctccctcctcctcggggaagccaagcgcaggtggggccgggctccctcctcctcggggaagccaagagcaggtggggccgggccactttccggtgccctggccactctggatgtgctcagtgctctcagaggcccgagaggcaggcaggattgttaccccattttcggggatcagataacaagccccacctcggcaggtgactgagccagaattcgaactcaggcactttcatccatgcaacatacatagatgatacggctgctgtgcaccacgccgtggggtgggcctgggctgcaaaggacacagtctctaattccggataaggggtaacacatgtgaatggaaaaggaaccatggtgcatgagaggcaggagtctggcctacaggggagggaagcagtggggaaggctgcctggaggagagggtgcttgggttggacggggtgctaagtcagaagtcggggcaagagcattctgtggggagagagcacagacagggaggggcgaggtggacgggacactgtgggaaggctctgaggggtctggagtgagccacggccggggcctgagttgggggggcttggtcagatcacttgggctgctaggtggaaaaatgggggcagggagcataagataataaggacagggagacccagagcttggggtgggaggtgtctccctctaggtctaggctgcattcataccgtgtgcagttaatctctcttgcactatatcagtctcattgtgctaatggtgaaatggaggctcagagatgtgaaacaacttgctaaaggtcacacagctaaatggtagtagagctgggatgggaggtttgccgagctccagagcccccaggaaattgtgtgtgtgtgtgtgtgtgtgtgtgtgtgtgtgtgtgtgtgtgtgtgtatgtgtgtgtcggggttggg

SEQ ID NO: 21141 - DNA, 1796 bp, Artificial sequence
  DNA replication origin
gcatgcacctgtaatcccagctacttgggaggctgaggtaggagaatcacttgaacccaggaggctgaggcaggaggattgcttgaacctgggaggtcaaggctgcagtgagccatgattgtgttactgccttccagcctgggcaacagagtgagactccatctcaaaaaaaaaaaaagaaagaaagaaaatcagactctgaggctgcaggcggtggctcactcttgtaatcccagcactttgagaggctgaggcaggaagattgcttgagcccaggagtttgagaccaacttgagcaacacagtggcaccctatctctaccaaaaaaaaaattaaaaaagattagtagggtgtggtggtgcatgcctgtagtccagctacttgggaggctgaagtgggaggactgcttgagcctgggaggtcgaggctgcagtgagctgtgactgtgccattgcactgcagcctgggcaacagagtgagatgctgtctcaaaaaacaaataaaaataagaaaatcagattctgtttccctactgatctcctggcatttgaaattcaggactggtttccactcttacattattgggctatgagatgtgattgggatgtgtgtgatggtgtgtgtgtgaggtcaggagtttggcctgtgtgtgtgatgtgtgcggtgcgtgtgtttgtgatgtagcatgtttgtgtctgtgcttgtgtgatgcgtggggtgtgtgtgatagagtgtgtgtgtgaggtcaggagtttggcctatgtgtgtggggtgtgcgtatgcatttgtatgatgtgtgtgatgcgtgtgtgtgcgtgatgtgtgtgtgtctgtgcttgtgtgatgcatggggtgtgggtgatggagggtgtgtgtggtgtgatgtgtgtttgtatgggatgtggtgggagtgaggtgggaggttgggcagaagcatagaagtggggatgcctggctggcgggtggcagggcttgaagttgcagggacggaacaaacccccacaccctcaggcacagtgcaggcctccctgggccctgtccccgtgggctgccagctgaggccacttgcttgggtagcacccgggagagtctcaggttcctgccatctgtgtcggccacggctcctgcccacaggagcatggcgcatccgtcttaatgaaattgggctgccatgtgcaggagataagccagggagcccccgcaggccccctcttctggaggaggaggttctcagagccggtgcctgcctctccagccttgcctatgacctcagtcctgtgtctggggagagcgccggtctcagggtatccactagggggtgctgtggctgccagggtgtttatgtctcctttttaccacgggggtgcagtgaccttgactaggccacctccctgcccttgagtttcctggtgcaccagacctgtgtgtgtggacttcttgttcctgacagatagcagagtcctgggcaggacatgtccgggcacaaagaaagatccccattcttggccaggcacggtggctcacgcctgttatcctagcactttgggaggccgaggcgggcggatcgcttgaggtcaggagtttgagagcagcctggccaacatggtgaaacctggtctctactaaaaatacaaaaattagccggacacagtggcatgcgcctgtagtcccagctagtcaggaggctgcggcagaagaattgcttgaacctgggaggtggaggttgcggtgagccgagattgtgccactgcactccatcctggttgctgggtgacagagcaagattccatctcaaa

SEQ ID NO: 21142 - DNA, 891 bp, Artificial sequence
  DNA replication origin
aactcgccctcaacctttggtcttggctcatttattcctcagcgtgcccctcaggcaccctcaggtgcccacacaccgtgccaggtggtgggaatctgatggcaaacacagcagatcccctatggaacctacaggtcaagatggccaagatcaagaaagggggccggcgccgtggctcacgcctgtaattccagcacttcgggaggctgacatgggtggattgcttgaggtcaggagttcaagtccagcctggccaacatggtgaaaccccatctctattaaaatacaaaaattagttgggtgtgctggcacacgcgtgtaatcccagctactagggaggctgaggcaggagaattgcttgaatccaggagtgcaggttgcagtgagccaagatcgtgccactgcactccagcctgggcgacagagtgagactccgtctcaaaaaaaaataaaagaataagtgtaaacaaaagcaaactatcccatatcctgcagagcacagcaggtacaaagggcctggggcaggaagcagcctggctgtttggggaactggtgtagtgggggaggcagcattgggagtgaggtgggagagaggccagaggaccggcgtttgaatgcagttttgaacagaggagggatggcacctgatttatgttcccaggatccatggctgccggtcaaggaacagatggggatgagatgcacacggagatcagctgggagttgggagcgtctgtgggatctagggagccatgaggaaggctcagtcctggagggtgagaggaaggcttggtttctagggtgtcacggggatcaatccaaaagaggatggaaagggagggacccctggtgcagggtctcgagtaaaaaagagggaagaatggagcaaca

SEQ ID NO: 21143 - DNA, 2168 bp, Artificial sequence
  DNA replication origin
cccgggcgggcgcgcacgtgtgtatacgagtgcgtgggcccatccggcggcccggactacaagttccagggtgcccagcggcgctcccgggttttctggccgcgcctcccgctggctccgagcaggtcgccgctggctggcagtcgccacccggtcccagagtaaataagggagagacactcccgagcgccgtaaatagagtccaagtgggcggagagccgtcccgcgccgcccgctcatgtctctacagagccgactgtccggccgcctggcacagctgcgcgcggcggggcagctgctcgtccccccgcgcccccggcccggacacttggcgggtgccacgaggacccgcagcagcacgtgcggtcccccggcgttcctgggcgtgttcggccgccgtgcgcggacctcggcgggagttggggcgtggggggcggcggcggtggggcggacagccggggtgcgcacttgggcccccctggccatggcggcgaaggtggacctgagcacctccaccgactggaaggaggcgaaatgtaagtgtaagcacgagggggcgcgagggagagggcggcctcacgtggagcttcccggctgggcggcccccaacgagcgagcagccccttccacccgagagacctggggaagttgaggccccatctgccctggaacggacccctcctccccattgacagccccccccgcccccgcgcgtgttcccagccccacagaacaattcactccagaccaggtccaagtgtccacgcagggggcagcgtgaggaaggcggccttccttaccccattggaatgggtcacagggcaccccagagattgtgcaggacctaccaacttccttccctgtgcaggagggaaactgaggccgagtgccacagctggcttccccaaggtcactcggagctggtggcaaagtggaggttatgatcccggactctccaaactttgcacagtgtggttcttaagtgttcgggaatggggctgagggaacagctccggggctggcgtcccacctggtggggcacgtaacctcacagagtgaccttcctgggctggcctgtcctgcctccaccccaccccaagcccgcactctgatgccttcctgggcacgtggtctggcgcccttttccccttctcgctggcctctggccacttgtgagcagtttgctcatgccaggaacagaggttagaggagcagggcagaggtggggtcttgtccctgtgacaactgatgacacccttcaagaatcacaccacttcctcttgctcctggagggggcatgagtctggggcctggggagagagagaacccaagctgccgctactgagccccaaatagccctgccgggcacccagctgcccctgcctttcagggcctgcctcctgggatcctgtgactcttcccggctggatcccctttcaaaagtgcagggaagtggctaattggctgggcctccgtggtggagtaggtgtggcctctgggctgggcaggcaggatgggggggtcctgcggtgttaggggtgaagagaagatggctttctcgggaccagaggtggaaatcaaaatgatttactcctgacatgaattgtgtggcctgcgccaggatctaaaagtgacggcagaaagcaccgactttagcccgtgagcagatggagaacttgtcaggcacttggcccttgccccagaacagcaggaggagtttggggctggcagagacccctggagggggagccactgtccccacagagacccctgctcccctgagcactctctcagaggacaacaacccaggagggtgggaaagagctacggagacaaggtgcccaggcacctgctcgagggctgccgctgtttttaggatccagcccccacagccccactccttggtgccaggaaagcaaccggaccttgtgatggggctggggttcctgggctgctgtgttgtcactggggtctcccttttgcttcgaggtgggatttccaatcatgcagcaaacttttattgaacgccccctaggtggtcaggctggggactcagacatgtgtcagataggcaagggccctgccctcatggagcttgtaatctggtgtgaggattacaaagcatctattgtaaagaatgtgttctagcagctgagacaaggcccggt

SEQ ID NO: 21144 - DNA, 980 bp, Artificial sequence
  DNA replication origin
atttacggcgctcgggagtgtctctcccttatttactctgggaccgggtggcgactgccagccagcggcgacctgctcggagccagcgggaggcgcggccagaaaacccgggagcgccgctgggcaccctggaacttgtagtccgggccgccggatgggcccacgcactcgtatacacacgtgcgcgcccgcccgggctcccagtgtcgcggatggagccccgcctgagcccttcgacttctcccgtggccgccaggcgcctcccctccgcgagacctcggccgcctctaactttctggttggctgagcgtcggcttccccggcacgggctgaagcccccgggccttccacgcagccccgggcccctctgccgctcggccccgcggcggagcaggcgcgccggccgctgcgtatcgagctgggagagcctggcgcggcttccgcagtgccgagcgttttgcagcctgggagacccgggcttctctccccgcgggtcagcagggcaccgcctccacaccccagcctgccctcctagggacaggtgcgacgaacgggtaaatccggtttggggacttctccccagagcctctgccttctaacagccccggggccaaggctcagctggagcagaatctaggacagctggggaggagagtcgagggtggaaatagtggaatttggaggcaggaaacttaggcttcaagtggcgttcaagggtggaaggattggggtgatgtttttgtgtgtgtctgtgtgtttttttttttttttcttttcttttttaaacaaaaaccggccgggcgcggtggctcacgcctgtaatcccagcactttggtaggccgagttgggtggatcacgaggtcaggagttcgaggcctgcctggccaacatggcgaaaccccgtctctactaaaaatacaaaaattatgcaggcgtggtggtgcatgcctgttaattacagctactcgggaggctgagg

SEQ ID NO: 21145 - DNA, 902 bp, Artificial sequence
  DNA replication origin
gggagggaggtgggggtgtcagccccacgccaggccagccgcctcgtccgggagggaggtgggggggtcagccccccgcccggccagccgccccgtccgggagggaggtggggggggtcagcccccctgcccggccagtggccccgtccgggaggtgaggggcgcctctgcccggccgcccctactgggaagtgaggagcccctctgcccggccagccgccccgtccgggagggaggtgggggggggtcagcccccctgcccggccagccgccccgtccaggaggtgaggggcgcctctgcctggccgcccctactgggaagtgaggagcccctctgcccggccagccgccccgtccgggagggaggtgggggtgtcagccccccgcccggccagccgccccgtccaggagggaggtggggggggtcagcccccccgcccggccagccgccccgtccgggaggtgaggggcgcctctgcccagccaccaccccgtctgggaggtgtgcccaacagctcattgagaacgggccaggatgacaatggcggccttgtggaatagaaaggcgggaaaggcggggaaaagattgagaaatcggatggttgccgtgtctgtgtagaaagaagtagacatgggagacttttcattttgttctgcactaagaaaaattcctctgtcttgggatcctgttgatctgtgaccttacccccaaccctgtgctctctgaaacatgtgctgtgtccactcagggttaaatggattaagggcggtgcaagatgtgctttgttaaacagatgcttgaaggcagcatgctcgttaagagtcatcaccaatccctaatctcaagtaatcagggacacaaacactgcggaaggccgcagggtcctctgcctaggaaaacc

SEQ ID NO: 21146 - DNA, 2339 bp, Artificial sequence
  DNA replication origin
agacggggcggctggccgggcggggggctgacccccccacctccctcccggacggggcggctggccaggcggggggctgacccccccacctccctcccggacggggcggctggccgggtgggggggctgacccccccatctccctcccggacggggtggctggccgggctgaggggctcctcacttcccagtaggggcggccgggcagaggcgcccctcacctcccggacggggcggctggccgggcggggggctgacccccccacctccctcccggacggggtggctggccgggctgaggggctcctcacttcccagtaggggcggccgggcagaggcgcccctcacctcccggatggcacggctggccgggcgggggggctgaccccccacctccctcccggatggggcggctggccgggtggggggctgaccccccccacctccctcccggacggggtggctgctgggcggagatgctcctcacttcccagatggggtggctgccgggcggagaggctcctcacttctcagacggggcagctgccgggcggaggggctcctcacttctcagacggggtggttgccaggcagagggtctcctcacttctcagacggggcggccgggcagagacgctcctcacctcccagacggggtctcggccgggcagaggcgctcctcacatcccagatggggtggcggggcagaggcgctccccacatctcagacgatgggcggccgggcagagacgctcctcacttcctagatgtgatggcggctgggaagaggtgctcctcacttcctagatgggatggcggccgggcggagacgctcctcactttccagactgggcagccaggcagaggggctcctcacatcccagacgatgggcggccaggcagagacgctcctcacttcccagacggggtggcggccgggcagaggctgcaatctcggcattttgggaggccaaggcaggcggctgggaggtgtaggttgtagtgagccgagatcacgccactgcactccagcctgggcaccattgagcactgagtgaacgagactccgtctgcaatcccggcacctcgggaggccgaggttggcggatcactcgcggttaggggctggagaccggcccggccaacacagcgaaaccctgtctccaccaaaaccagtcaggcgtggcggcgcgtgcctgcaatcgcaggcactcggcagactgaggcaggagaatcaggcagggaggatgcagtgagccgagatggcagcagtacagtccagcttcggctccgcatgagagggagaccgtggggagagggagagcgagagggagacggagagcgagagggagacggagtttttttttttttttttttttttaagagattgggtctcactgtgttgccaaggctggtctcaaactcctgggctcaagcaatcttcctgcttcagccttccaaggtgttagggttacaggcatgagccactgtgcccagccaagcaactcttatatactaataaacttataaatctggcaaatcagttatcttaaatattcaatcctgtttccaaacttagatcctcttagactgtcacagttatctactgctttgtaatgagtcactgaaaatgtactggcttaacataacaacagttctaagtcagcagtttgggctgagctaagctagccggttcatctgctggtgtcactgggtcactcttgtacctgcagctatagtcatctgacaacccaactggggttgggggtccaaggtggtctcactcacatgactgatggttggtgctggctgtcagctgaggccccttggctctgctccacatggtctcacctttcaaggtggcagagccagccagaggagcagatacaccaccacagcagggctgaagttgcagtgacattcaggaccacagtacagttagggttttcctgctactggtctgagatttaagaccagagcaggacccaggagaattctaccatatctaaagggatccccagatccactcctctcccctgggacttaatgataaagtctgatgcatcactgtttcctgagagtcttaagtggcagccctcccccatttttaccctgccatctttctactttttatagcctcatttgggtagataagcgtccgtccctccagctctcaggtcctcctgtcgtcttctctgatgacaattttgcattccaccctcatccaggttgtactactgtcttcatatctcactttattacttgcctatgtttcattttactatccgtttcattggccatattgtacagtcattatgttgagaggtatataagggaag

SEQ ID NO: 21147 - DNA, 1068 bp, Artificial sequence
  DNA replication origin
cttcactcctttacatcggactcacgagggctgaggggcagctccctttcgttaagtgcttcccgcgtgctcaacaccgcacgaattcccctcggccctacaggaccaaacgaccggcgcgctgagaaagggtgtgcggttccactgaggacgcccaagcgggacagccgggcccgccgcggtgagatccccggcctgtccagcccaagcccaagcgccctcgcggtcacgtggcatttccggaacattcagaacctaacagccaggaggcaggagggccgggccgaggccggagcgctggacaacgcgggtagctggcgctcgagggacaggcagctcccaccggctaggacccccatcccgatgcgcgggcgaagggctggggccctgtgccgctggcgatcccggggaccgcctggaactcgcggcactcgggagcgagagggaaagcaacccagaggccccgcagccgccggcgacacagctacagaccccgactgcagccggtactcccatatatcaggggcggggcgaaacccggccttttgaagggcagcgatttaaaccaatcagcgcaaagagttggcaaccctccgcccaattggaatcgctctcattctgaaggcggttccgacatggagtccggcagcccaatgggagaggtggaaatttccagaacgatcagaaccaatgggcgcggccagcgcggctacgattggcagtgcaaaagaccaatccgtgtcgcagaagttcgctcctccctccattcgtggagcctgagatgggtgggtttatagaggagcgcccaatcctgaggtgcgggggaggcagggttgagggaattactccccgctgtccaatgagaaggaagtggagatgatgggctggacctcaagccaatagtagagcagcacagacattccccctagaagaactcgaccagtgagcaggcgaggaaggggcgggagccggggtcccggtagcttctagtaggttccagaaggcggcgcgtgcggttgggaacgcggagcggacggattcgattcaacggggttccggaccgcgctg

SEQ ID NO: 21148 - DNA, 1382 bp, Artificial sequence
  DNA replication origin
gaccagtgagcaggcgaggaaggggcgggagccggggtcccggtagcttctagtaggttccagaaggcggcgcgtgcggttgggaacgcggagcggacggattcgattcaacggggttccggaccgcgctgcgctatggagcaggtgaagggggaggggcgggctgaggccccgagcctgctcggggaccggcggtggccaggccgcggtaggggggcggggcgggcgccggatccaggagaccggagctcggcgctggggccggacggggcggcggcggggaggtgagggccgcgggcggcgggcgggagcgggatctttagcgaggccggccgcggggagcgcccatcgccccctggttgggcgaggagggcccggcggaggccacagcttgggtgagtccggccggcggcgggaagaggggtcgcgaccgggccctgaaggcgtcccgagggggcggctgcgggccatgttggggagggtgcgggccgcagggggcggggtggaggtgggccgggggccggggtccgcacccgcgaggtagccctccgggagatctcagacggccgacggagaaaccgctcgggacttagccacgaggaacttggacggatccagggagcggggacggggatacactgggagtagccgaggatcttagcagcctgggatgcagttggggcaaatgttactcttctacatctgagaaggtcagggtgggagagcgttgagcgggggtctgaggagcgacagaccgactctacctgatgcgggaaagggaagggtgccgcaaaagtccttgggacgaattccatctctgacagtgttttacaaatgtattgcggcccctccccctctttttgtatgcttgtgtgtgtgattgtcgagtgaccgaggaccaacacttccgaaaggtgggtctgaaagatgggtttctgacgacccgggggtggttgtagacaatttacagagatcaaccgctggaagttatgggcctctactgagcatttgaggggccgagtttgaagcggttgctgcttcctttcagtgacttggttatgtcctcagtagcttgcggttatgaaaggcctagaggttttgttcgatttgaagctgtcattgagctgtaatgattcatcggaagaaaaaggacaaaacaacctccaagaaacctctaccaacctccgagaaatcatcctcccgctcgggagtactactgtcttcgctccgggcccataacacttgggggtgacaattctgaaactatacctggtatctggttcttacttcagggccataaaactaagatcgcccacactctccccttaaataagacatctcgatggactagtgactaccatcctttttttggtgtgagctac

SEQ ID NO: 21149 - DNA, 1286 bp, Artificial sequence
  DNA replication origin
ctagccccctctgtcgcagacctcctgagggtatccgcagcgcttctccacccccctgaccactccttgggcagtaaaacgtgccatcttccccgcaggagccccgagtcccgcagggtatccaggacgcccgggcatccctaccatccagaggtcttgggttcaggcgccccaaatgcccatgtcccccaaacccaggggtctgcctccgacccggggcgcgcggggacccctttccagggcccggaagctccagcctccagcgggcgctcaccagccgccgggtccctcaggctccgccccttccccgaagcggaagtgcccgccccctttccacgcggcttttcattggcgggtccgccgcggtcgaggatcctggaggtttgtccccgccgccccgacgcttccgcccggtccgtcggcacgtcggccctgcctcccggaccaccctgcggggcgcaccagcgatctggggtgcggggctcggcctccctgcgctcctggctgaccgtgtgaccttgggcaagtctggcctgctgggccttagtttccctctctgcagcagggacttgggggtggtgaacttaatgagccgtatactcccacccagcgctcacttcctgaggctttgtgactttctgggagggatggggacgtggaaggggccttaaagcagtcccccctcgtcactgccccccacaggtcttaaccatgaacttctctggaggagggaggcaggaagcagcagggtccaggggtagaagggctcccagaccccgagaacaggtgcgcgcctcctccccaccccctcccaccagtccaggctccctgggagttgctggggggcggagctgaagggtcctactattcctggagaccactggcactcctttctctctgggctctctctgcagtgggtcattgagggttcaggatgggcagtagggcagggtcaccatggagactaggggccaccgctgggttctttcaggaccgagacgtgcagctgtccaaggctctgtcctatgccctgcgccatggggccttgaagctggggcttcccatgggagctggtaagtaggggccttggaggctggggcttgagcccagagagaaacgtgagcctgtctgcgactcctccctgatggctgcctccaccgctccctgaggaaggcacagagtgcacttcctccccatgcacagaggagagcaaggcctagagcccctgtcatgtccacagcagactgaggagagttcttgtctgggccaggcctggtgaccgcccc

SEQ ID NO: 21150 - DNA, 1641 bp, Artificial sequence
  DNA replication origin
gtgacgaggggggactgctttaaggccccttccacgtccccatccctcccagaaagtcacaaagcctcaggaagtgagcgctgggtgggagtatacggctcattaagttcaccacccccaagtccctgctgcagagagggaaactaaggcccagcaggccagacttgcccaaggtcacacggtcagccaggagcgcagggaggccgagccccgcaccccagatcgctggtgcgccccgcagggtggtccgggaggcagggccgacgtgccgacggaccgggcggaagcgtcggggcggcggggacaaacctccaggatcctcgaccgcggcggacccgccaatgaaaagccgcgtggaaagggggcgggcacttccgcttcggggaaggggcggagcctgagggacccggcggctggtgagcgcccgctggaggctggagcttccgggccctggaaaggggtccccgcgcgccccgggtcggaggcagacccctgggtttgggggacatgggcatttggggcgcctgaacccaagacctctggatggtagggatgcccgggcgtcctggataccctgcgggactcggggctcctgcggggaagatggcacgttttactgcccaaggagtggtcaggggggtggagaagcgctgcggataccctcaggaggtctgcgacagagggggctagctgcgcagcccaggagtggtagtggcccccctggatgacaggcctggccgtatcctcccccagagctgccccgttcagaccatggatcctgaggtgaccttgctgctgcagtgccctggcgggggcctgccccaggagcagatacaggccgagctgagccccgcccatgaccgtcgcccactgccaggtggggacgaggccatcactgccatctgggagacccggctaaaggcccaaccctggctcttcgacgcccccaagttccgcctgcactcagccaccctggcgcctattggctctcgggggccacagctgctcctgcgcctgggccttacttcctaccgagacttcctgggcaccaactggtccagctcagctgcctggctgcgacagcagggtgccaccgactggggtgacacgcaggcctatctggcggacccactgggggtgggcgctgcactagccacagccgatgacttccttgtcttcctgcgccgctcccggcaggtggctgaggcccctgggctggtggacgtacctggtgggcaccctgagcctcaggtgagattccaggctgggcacaaagacccagacagctcaagggagctgcagctctccaccctcccaatcctcccagctttggtttcctcattccttaaagggaaaattggcctggtatttctctggaagtttgctcagggcagtccacctgcctccccactgacccctgccccagtcctgtgagaaactagaaaacacgggaggaaagattgggcacaggaagaagatgccctactccacccctgccccctgtgtatctcctttgaagctggacctctggttgtctgtcagggaaaggacaccagactcaggatcactaactctcttacactgtgccacatcagaccctcaaggccagcaggtataggcttgctggtcctgagatggggc

SEQ ID NO: 21151 - DNA, 854 bp, Artificial sequence
  DNA replication origin
agctttcttctccaagtccaaagaggtacccgtacccctgaggtggggagggggagcaggaactttgagccagtgggggtgtgcttcaaattcccaggagtagaccagcatctctggcgggtgccacattttttcagccctcatagggagtggcaggtgctcaatggtaggggaaaggctgtgggcaggagccaggggtcctgtctgatgggctgggcttggttttcttgacctgcctgcctgctcttgagaaacctggaccagggcatatggtgaatgcagggggctggcaggtggggagggcttgaacacaggaggaagcaggagtccatgctctctggccttctgaggagtgggcaggcctgagtgagggtcactgaccaggcagggcctctgggtatgactggagccctggtgggtggatgtcatcagcatgggtcctggggagggacaggcaaagggagataaggggagtcctgccccaccccagctgcacccagaccgggaccctgggaacccaagcctgcacagccgctttgtggagctgagcgaggcataccgtgtgctcagccgtgagcagagccgccgcagctatgatgaccagctccgctcaggtagtcccccaaagtctccacgaaccacagtccatgacaagtctgcccaccaaacacacaggtacagtaatcctgccctcagcttgccccacccccaggtctcttgggtagtctcatttccacaatgtcccttcctctgcctcccagcagctcctggacaccccccaacgcacagtactggtcccagtttcacagcgtgaggccacaggggccccagttgaggcagcagcaacacaaaca

SEQ ID NO: 21152 - DNA, 1245 bp, Artificial sequence
  DNA replication origin
gcgggcccgggcgcggcgggcgggggccgggcgcggggggcgactcctccgcggccccctcccgagccctgggtgcaggcagcgcagcgcagcgcagcggaggcggccggaggagccgggcgggcgggcggccggtggcggcgggcagcggcggcggggacggcgggggcggcggggggctgggcccgggctggcgggcaggcggctcatgtgacccagacacgcgctccccaccggcccgtggggcgggggcggggcggcggggtgggggggcgaggccgtcggcggggcccgcctcctccacacaccccctcccgcctcccgccgcggcaggggaaaggggacgcaccgcccaggaggctgggctccccagtcgccgccgccactacccggagggcggggcgctgccccttggcgaggccggggccgggggcgtcgggccttaaggagggagccggacacgagctctgcgaatcactttattgcgcgcgtttcggggagcgggccgtccagggaaggaagcaaagcgggaacgcactgcaggccccatccaggtgagcccctcaggggccggcgccccggggcacgatctcggggccttgggttggctcggatggtggcggctgccgctgccctagccgttgtcgctcctgctgaaggatgcctctgttggccctggaggagagggcacctgggtggttgggatagggatcccgaagtgtggttcctggacagggagcagggagcagaatagagcagggacagacctggcccgtgcccgggcttcgttgtagaaggctgtgatgatccgatccttttcatccatgaagttaaggtgcatctgcttcaccttcctgcaatgggtcacaattaaccctgggaatccaattcctgctgtccctgaagtcctgcccccttccaccccactctaggggcctcacagctttttacccttacacagggttaggaacctcagtctaacccttcctgtgatagatagggagggctcagagtggccctggcttgtctagggtccaatggcatccgaagtccctggtcactttgaggtgtgacagcagctgtggacatgggggtgctcctcccagaagactagaaagggtatgcgtctaactccatcactgaactaggcaggctgctagcagtgggcactggcctttaggtatctgctatagaaaatcggctttgtggccaggcgcggtagctctcacctgtaatcccagtact

SEQ ID NO: 21153 - DNA, 1734 bp, Artificial sequence
  DNA replication origin
gcgcccggcccccgcccgccgcgcccgggcccgcgccatggggctctggctgtcgccgccccccgcgccgccgggctagggcgatgcgggcgcccccggcgggcggccccggcgggcaccatgagccctctgctccgccgcctgctgctcgccgcactcctgcagctggcccccgcccaggtacgtgcggcccgacagcgcgcccgcccgcccgccgtgccctctctcaaggttggcggaagtgaggaggcgacccgcggcctcggccgaggggatctgcggggtccggccttggacgcgggcgtctcgggggcccggcgcgtgcatcccctgggaggtgcccctccccgctggcccgccagccccagtctggggccactcctccgccccaccccgtcccctgggcaccgccgggggcggggctccctcggtgcctgcaggacctgcttcggtgggcactgtgcgcgctcctgatctgcatgcagcccccaaacatgctcggctccgcggcctggagatttggcgcggccaccagagcacctgttgcgttttgggccagggcaggtcccgggtggccaggagaggacaggtaaagctagagcagtggccgcaggaacagagcaatctggaaagatgtcagagaggtggtgaagcctactgatgcaagggcaaagccccagggacggtgacagggccacaccctcctaaagtgtaccttgggtacaggtcttttctctcccacaggcccctgtctcccagcctgatgcccctggccaccagaggaaaggtaatacttacaaaaactcggcactagccagcactaagagggtttgtcatgggccctgattccaggtgtccatcatcttgtgtaactcccctagaagattcaaactattattctacccatttcacagaggaggaaattgaggcagtggggttactgggatctggataaacagggcaggggaagacaggttgtgagggcagagtggggagggctagtggagggtggctgtgacttggggactggggaggacagatgctgggagcagctgcaggaaaaccagtgaggacttaacccctaccggtctgctcccagtggtgtcatggatagatgtgtatactcgcgctacctgccagccccgggaggtggtggtgcccttgactgtggagctcatgggcaccgtggccaaacagctggtgcccagctgcgtgactgtgcagcgctgtggtggctgctgccctgacgatggcctggagtgtgtgcccactgggcagcaccaagtccggatgcaggtactgggcaggtggggcaacgggcaggggatgcaggtactgggcaggtggggcagcgggcagggtggatgctggctggctctggggctggggcagcctggagactgatgcacaggagacagggttggggggagggctggtggccagcctcccggctgttgggtgagcttttctcccttcagtcttagagcatcccctttctctctctccctcactgtcccccctgttcttctcctgagcacagatcctcatgatccggtacccgagcagtcagctgggggagatgtccctggaagaacacagccagtgtgaatgcaggtgccagccaggcccaacttctgagctcgcagaggccaggcttggggggtgctgggtatggtggtccacagaactggggaccaggttcctaagagtagaaccaaggggccgggcgtggta

SEQ ID NO: 21154 - DNA, 882 bp, Artificial sequence
  DNA replication origin
tggggggagggctggtggccagcctcccggctgttgggtgagcttttctcccttcagtcttagagcatcccctttctctctctccctcactgtcccccctgttcttctcctgagcacagatcctcatgatccggtacccgagcagtcagctgggggagatgtccctggaagaacacagccagtgtgaatgcaggtgccagccaggcccaacttctgagctcgcagaggccaggcttggggggtgctgggtatggtggtccacagaactggggaccaggttcctaagagtagaaccaaggggccgggcgtggtagctcacgcctgtaatcccagcactttgggaggccgaggcgggcggatcatgaggtcaggagatcgagaccatcctggctaacatggtaaaaacctgtctctactaaaaaaatacaaaaaattagccgggcgtggtggcgggcacctgtagtcccagctactccggaggctgaggcaggagaatggcatgaacctgggaggcgtagcttgcagtgagccaagatcgtgccactgcattccagcctgggcgacagagcaagactctgccacaaaaaaaaaaaaaaaaaaaaaaaaaaaagagtagagccaagggtaggccttggatctggggcaacaaagtaggatgcttgggccgggggtagtggctcacacctataatcccagcactttgggaggcccaggcaggcagatcacctgaggtaaggcgtttgagaccagcctggccaacatggtgaaaccccatctctactaaaaaaaaatacaaaaattagccgcgcatggtggcaggtgcctgtaatcccagctacttgggaggctgagacaagagaatagcttgaacctgggaggcgg

SEQ ID NO: 21155 - DNA, 1010 bp, Artificial sequence
  DNA replication origin
aagcccgtaggtaagggcagatgtctaccacaggggcttctgggaaggcccgaactgcaagctggaaaagctgtgtcctacatttctactccgggcagatgtcacctcctccaagagatctctgacctctgaaagacgaggccaggtacccctcaccacagcccttgacatcctctgctggcattgtccctcctgtatctgactcctgagttagaatgttggacttgcttatacagctccaggtgccagcagctgtttggtaaatatttgttcaacacattcaacagtttccccttccctggccctcctcctactggcaggctcaccctggacctgctccaggacagggccttggtgccttcccaaacaaacaccaccccacagacgcctcacctgcaggtgtctgggttgagctctaagccccgcccttggcaacggaggaagctgcggcgtcggcagcggcagcggcaggtccgggggtcagggcgctggtggtgctgggtgcagcgtgggcagaggggcctggggctggagtgggatgggtgatgtcagctggggagggtgctccgggggcagagtcccagcccggaacagaacggggctggggacggtggtggggagtggcagccctagggaggagaagcgacatgtctggggtgggaaggaagagtcttccctagagctggggtcggggcagagaacacaggcttggggagcagaggaaaagggaaagtgggggacgggtgggaggagaaagaggagcaacagcttctggactcacttgtactccccatacccctactcagctggagtccaaaagactcacctgtctggcttcacagcactgtccttttttttaggtctgaaaagtaagatagacagacacagacaaacaagaggaagatcaggaaatcccagcatcctactctctctctctctctctctctctctctctctctctctttgagactgtgtttccctcttcttgcccaggctggagtgcagtggcg

SEQ ID NO: 21156 - DNA, 801 bp, Artificial sequence
  DNA replication origin
aagtgagtccagaagctgttgctcctctttctcctcccacccgtcccccactttcccttttcctctgctccccaagcctgtgttctctgccccgaccccagctctagggaagactcttccttcccaccccagacatgtcgcttctcctccctagggctgccactccccaccaccgtccccagccccgttctgttccgggctgggactctgcccccggagcaccctccccagctgacatcacccatcccactccagccccaggcccctctgcccacgctgcacccagcaccaccagcgccctgacccccggacctgccgctgccgctgccgacgccgcagcttcctccgttgccaagggcggggcttagagctcaacccagacacctgcaggtgaggcgtctgtggggtggtgtttgtttgggaaggcaccaaggccctgtcctggagcaggtccagggtgagcctgccagtaggaggagggccagggaaggggaaactgttgaatgtgttgaacaaatatttaccaaacagctgctggcacctggagctgtataagcaagtccaacattctaactcaggagtcagatacaggagggacaatgccagcagaggatgtcaagggctgtggtgaggggtacctggcctcgtctttcagaggtcagagatctcttggaggaggtgacatctgcccggagtagaaatgtaggacacagcttttccagcttgcagttcgggccttcccagaagcccctgtggtagacatctgcccttacctacgggcttcaagaggccaggggacat

SEQ ID NO: 21157 - DNA, 1099 bp, Artificial sequence
  DNA replication origin
aagcacacagccgaccgggagttcaaacgtgagtgtcactgtgaagcccaggctccacagcgactgagggccgtgggccatgatgaggcccgggaaaacaggagtgctgtgggagaggctgggggcgacttgaaatggcgcctcaagaccccctccgggaacccacgcccgcctgaccttactatcacctcggccggaagtgtctccggccttttcggaagtcactttcacctaaccttacagactaccgctccgccggaagtgacgcagggcagcggcgtcgcgggggcggggctcgggaaagacccgtgccagcgggcgtgtggccgcgggtttcgcacggtccaataagggagggcggcgtggcccggcctggtagcgacgaggacgcgcctgcgcagaggcggcagcaccaccggggttgactccgggggcgcggcgaggaggtgagcgggggccacagcccgggctggggggagccggggtgcaagagggcaggctggatcaggccgggcagaagcggaccgggctccgagtgtcaacgagagctaggtgacgaggaaattgggggtgggggccggagctgtccggagatgccgcagggggagggttctcacgccgcacggggcggagtcctgggactcggggcgggacgtggaaccgggacgggtgggacctccgagctggtgccagtggaaggcggagcccggcggcggggggcggagctaggagggtcgggggacggagcctggctcttgaaggaggagctggaggaggtgaaaggcggagcctcggggtcggaagcagagggggacggagcggaggcgctgggggcggggcttcagccggtgagtggcgtggctacggctccggaaaaggggtctagttctgtcgaaggcggggctgcaggcccgggggcggtaccgcgtcctccgaagggcggtgccaaggagccaagtgaggagcctggcccgagtaatggccccgggcgtcctcgcgggggtggtctccgtggtggccgggcttggggacgccgtaggccgagaactccaccgggagaggtggtgtgggtggagcgggctcggcggccagcagacac

SEQ ID NO: 21158 - DNA, 1644 bp, Artificial sequence
  DNA replication origin
ggctcttgaaggaggagctggaggaggtgaaaggcggagcctcggggtcggaagcagagggggacggagcggaggcgctgggggcggggcttcagccggtgagtggcgtggctacggctccggaaaaggggtctagttctgtcgaaggcggggctgcaggcccgggggcggtaccgcgtcctccgaagggcggtgccaaggagccaagtgaggagcctggcccgagtaatggccccgggcgtcctcgcgggggtggtctccgtggtggccgggcttggggacgccgtaggccgagaactccaccgggagaggtggtgtgggtggagcgggctcggcggccagcagacacagggccagtctgggtgccccggagacccccaagggctcagagttggggcggcgccccgggcggaagcacagggccaggctggggggtatctcccgaggacccgggctcctcggagccacccagtggggatgtgtgggtgcctcggggccggccccctgcagcggccgcagaggtgttggtgtgctggaccgggggcagctgggtgtggcgtgagtggggccgcccagtcggggcaactgcagtgcagccagatagggtctggactttgcgtaaagggacaggcgggaactgaagagcggaggtggggactgggagggagggaaggtatgggggtgagcaaaggggcgggtccctggctgctgtggcctcccctgaccccctccccccgctgctggggtcctcggccaagcccccttctcactggactggtaagtgtggccccggagcccgggggagagggcggtgacccgggacaaaggggatcccccggggcaaggaagatacagtggcggtggaaccctcctgttacctacccgtgttccatactctccctgccctcccccacgttcagtcggtcggtcggggtctgtgcccacagagacatgaggctgagctggttccgggtcctgacagtactgtccatctgcctgagcgccgtggccacggccacgggggccgagggcaaaaggaagctgcagatcggggtcaagaagcgggtggaccactgtcccatcaaatcgcgcaaaggggatgtcctgcacatgcactacacggtgagtgggttgggcgggccttttgggagtgggtggggcttccgaggaccagagagtgcttgggagtctggttctccataagccaggtaggtgaccttgggcaagtcccctctcgcctctaagccagtttccatggttctgccttgcccttgcctactgcccaggtgggcaccagcaggcagtgacagtgtactgtgagctgcccaaggctctgtcctcttaaagaactatgaccagctgggcgcagtggctcacccctgtaatcccagcactttgggaggccgaggcgggtggatcacctgaggtcaggaatttgagaccagtttggcctcatgatgaaactttctctgctaaaaatacaaaattagccaggcgtggtggcgggcgcctataatcccagctacttgggaggctgaggtggaagaattgcttgaacccgggaggcagaggctgcagggaggcgagatcacgccgctgcactccagccatggcaacagagactccatctcaaaaaacaaaaag

SEQ ID NO: 21159 - DNA, 1830 bp, Artificial sequence
  DNA replication origin
gcctactgcccaggtgggcaccagcaggcagtgacagtgtactgtgagctgcccaaggctctgtcctcttaaagaactatgaccagctgggcgcagtggctcacccctgtaatcccagcactttgggaggccgaggcgggtggatcacctgaggtcaggaatttgagaccagtttggcctcatgatgaaactttctctgctaaaaatacaaaattagccaggcgtggtggcgggcgcctataatcccagctacttgggaggctgaggtggaagaattgcttgaacccgggaggcagaggctgcagggaggcgagatcacgccgctgcactccagccatggcaacagagactccatctcaaaaaacaaaaaggactgaccaccagggctgtgggtgggcgtgggggggcagcttgatggggaaagcagctgagggagggggtgtcaggggtggtcccctcttcctcactggccttctcatggttccacaggggaagctggaagatgggacagagtttgacagcagcctgccccagaaccagccctttgtcttctcccttggcacaggccaggtcatcaagggctgggaccaggggctgctggggtgagtcatgggggaatgggcttgggagtgggggcgtgcatggccaccgcccaggaggtaagctgtgggaggcaagccccagggatacaagacaagggccctgggtgctgccatgggctgagcatgtgtcttcctgcaggatgtgtgagggggaaaagcgcaagctggtgatcccatccgagctaggtaagaggcccctcctgagggtgcagagcgagtttggggtgtgtgactgggaagggtgaaagctgcttcagcttttcattggtcttcaccgtatccattcattacaatacatgcctcctccaagtttggctgtgtctagcagtgagtacagggcaagatcattgaagcactcagctgtagtggccccactctgcccttgccaggcctttggcacccccttcccatctccattacccttctccatttctggccttcttgctgagaggggcggaacactctccctttgcccacactggaagggagcttggccatcactgactgtttctttgtgcatcttcaacagggtatggagagcggggagctcccccaaagattccaggtagtaaaccttttgatacctcccatcacctgcagccagcccacctccctgtggccctggttggcattttgactccccttctcccctacaggtggtgcaaccctggtgttcgaggtggagctgctcaaaatagagcgacgaactgagctgtaaccagactggggaggggcagggggagaggcccccatcagggaccagactgttccaaaaaaaaaacaaaaaacaaaaacaaacaaaaaaacacttaaaagcccaaggagtaagcctgtgtgtgtttgtgggccctgagagactcagagacctcagctccagcataccccaccaccttctcctttcccgactgtggagccttgggggtctaggctcaatgacatggtggcccttgcccagagagaaaggagtgttcctgcctgccaacagcaatactgctccccccacccccacagctccccagccactttcaactcctggtctgggagccagcactgggctatcgtcatggctacgtggcccttaggaaggcctgtggtcacctggggagaagctgagctggcagaagtcaaagagcagtgtgcccccctaaaagagaccagccgagcctgttagctgcaccaaaggcgtatcctagctttattaaagggcccgcgccgcagagtcaatata

SEQ ID NO: 21160 - DNA, 2381 bp, Artificial sequence
  DNA replication origin
gctccagcataccccaccaccttctcctttcccgactgtggagccttgggggtctaggctcaatgacatggtggcccttgcccagagagaaaggagtgttcctgcctgccaacagcaatactgctccccccacccccacagctccccagccactttcaactcctggtctgggagccagcactgggctatcgtcatggctacgtggcccttaggaaggcctgtggtcacctggggagaagctgagctggcagaagtcaaagagcagtgtgcccccctaaaagagaccagccgagcctgttagctgcaccaaaggcgtatcctagctttattaaagggcccgcgccgcagagtcaatataaaaacacaaaaagtcccatcagtttaataacaataaaaaaccccaaaagtggaaaactgagggggcaggggaagagacccctgggccaggggcacgaggagccctgctcatggcaccaggcctggccgcagggtcccccggtattgctgttgctacgaggttggggggcagcgattgtcctgtgggagccaccgttctcctgggtcggggaccgtcacttcttctggggtgtgctcagcttctgcatgccccggatcttgtccagcaggccagaaatgaaggcctggatggggtgggagggtaaacattaaggagaccagaccccaagatgacaggagccgggctcccctcaccctgccacccccgccagccccccaggaaatctcttacctctgtgggtttgtaacagtcaaccagcagctcctagcagaggatgggggaggaaggataagtgagtcctcaggagtgggggcctggagctcgcctatacccacttccaagagactggggccaccctgaggcacaggagatgccacaacaacctcacagctaggcattggccccattctgttgaggcaggagctggggcttgagggcctggctccacagcctcactttcccggggcagtgcctcaggcaacccatcgccccccagccccctcaccttgaccctggcagcccgggcatcgtcactctccatgtccaggagctcatccacgtcaatctccagttctgggatctcctcttcctggggtgggggtgggggaggagggagagacataagcctgagttggagagagggtgtgagaggggctctgggttgaggcccctgcctacctcggaggaacccagccctctgcccagcagacagaacagcagctgctctggggaggaaaacagatcaggcccgtgccaaggcaaactgcccaaagcggggtgggggggggagcttcctgtccctgccagtgggcacggggggtgacagacaaggccagacagccagggttggggaccttgggctgggaacccagcagatgtgtctccccaacatccgggccccccatctcaccagagcaccggtgggtgcagctgtcccagcttatcatacccccctcccctcccccaaacacctgtcacagctccccgggagtgaggaggaagtgaaggctgaggggtcactgggaaggacccaggcctggcaaagaggaaacaaagagcccatgctttggtgagggaggggatgcccaccaccctgccacaccctccccaggaagcccctatcctgtttgtagtcagctgcattccagggctgggctagggtaggcaggcagcaccgggcaaacccactcctccaccctgccccccggggcctgagtcaccgtctgaacaaccagggagtcatgggggtggagaagcagagcccagaaagcgggctagcctgcacgcacgccaagatggagctccaggctagcccacagaacagcccagccgcagccgtcctaccagaccagcaccttgtaaccacagtctaacccagcgggcaccaggcggtgagacctcctgccgctgccagcccaggatagcccccttgcctcttgcccaaggctcaggctaccccttgaggcgtctggaggacactaggcttgacctggggagtggcatgatggggggcagggtccgaggcaacggagaaggcagaagtgacttaggtcaggcaagaaagagtatatattgggggcgggagtgcagaggggaggggagcgcgcggggaagcaaagcgccctttgactccagtgacaggcgagctcacagtggagctgccaggcggaccggcgcgagaccgattttggggtgtcggcgcggggtgggaacacacctggcagtcgtagaggcgcgtgagctgctccaggatccactcctctaggttgaggcgcttccgtagctccttgcggtcatacttgacggtgaccttcccttggcgcctcactgggccctcatcgtccgccccgcccgggccctctcc

SEQ ID NO: 21161 - DNA, 994 bp, Artificial sequence
  DNA replication origin
gatccactcctctaggttgaggcgcttccgtagctccttgcggtcatacttgacggtgaccttcccttggcgcctcactgggccctcatcgtccgccccgcccgggccctctcctgcggccccgggggggctctgaaagtagacgcgtggtcctgggccgccactgcccggcccgggggccggggccgccaacgccgcgccccccgcggtgccgctgtccgccatggcggccgccggggccacgtgcgagcgtcgggcccctccctgcgccaccgcctccgggacgcccgccggctggctcgggttagctcgccggctccgctccgcgcggctccgcggcgagggcggcggcgggggcgcccgggggcagctgcagcatgcggagcccccgggcttggcctggccgcgccccgccccctccccgccgatccgcccgccctttgtcccccgcggccgccgcccgagctgcagccgccgaagcgctttctctgtctcgctcttcctccgccccccgaccacacccccttaaagggccagcccctctacaggcccctctcccctactccgcccccgggcaggggtaggggagggtctattcggcagggggtggcctagctgtccgtactccccaaacgcaaccttccagtcccaaacccaggcgttctaagcgctcaggacgacgatttgcgctcacgccaggaccctagtcttcattggacccttcctcattctgtcctcattgaggccatctgagaataggggctatctgagaatgcaggggagtggacatcgtgtgcagacagggagtctggtgaggagacgctgcggtccccgatgtccaggtcctccagccctcggccagcgaggagcgaacgggctcctccgcacggaccgacacgtggactgggctcctgggaaaggaagagtggagaaggcgggcaggagctgtccgggtccctagactctccgagtagcaggtcccacgcccccagcg

SEQ ID NO: 21162 - DNA, 4089 bp, Artificial sequence
  DNA replication origin
agacgatcggggacttaagtttccggggcgccgccagactgggatgagggtggcgccacgggcaggcgaggctggggtgggggtccccagcgtctggtcgagcttgactgaaagagtcccgggatttgggcggagcaggggcccgcgcgcttacctcgtcccatttgatgaacttactcccgcgccgcagggtctccaccacggtgggcggctccaactgcagcgcgtggacgccgggctgggcgcccgccatggcccggccaggggcgggtcggggacccacggagccctgacggggaccgacggcgccgctgctcccaccgcgcggcccgctccggccccgcggcgtcagtgcccgcccgcccgccagtctgtcccggaccgaccagagcctcggcggggcccgggcggggcggggacggggcggggcctcccgggccccgccccctcccaccgcgtcggctccccctggcggccggggcggcgactgcagccggagcggggattggggcaggggcacgcggacgggtcgggggctttgctgcggggctcagcagaacctgattcttcaggcctgtggtggaaggagggcgctgggggccgaagtggctgttggggagcagctggagggactgggtgtagagggcgctgcttaaggcggtccgggatcagcccactgaggtttccgagcgactagggctgcagtaccagcggagggctagacttgggccggggggtcgctgcacagccctgtcgcccaccctcttctgccgcacttagctgaatgcaggaaaagcttcttccgcccccctctgccctggcttcgcctcacccactcttatgccgcgcggtcccccctccctgggagcacttagccggctaatggacctcccgccggcaggcacccctcccccgtccctagcccagggaggccgggcgcctgccacctcctttaaggacccaagcatcctggtcttcgagagtgagccctagaacagcccccttcttgttgctgcagactcccatgactggaacctgactgtgagcctcttggctgggaaccgcggggggaacgctgttgtctgcccagaggggtcagaagctttgtggatgtccccagacaggagggttgaggaggggctctgcagtgcctggcccacagcaggtgccctgaaatctgcgttccagagatgggagcggggaaggcgcatgggcaatgggatgggtgggggctgcagcccctcccgcagggcttagctggtggggggggttcctgcctgggggcccctgtgggagcccccccaatacagaggcagtaacagcagcaggtttaaagtagaactcatccagaggggccagccaagtcacctagaaacccagaaagagatgcagctggctctgggggaggaggggtcagcaaaggaggagctcccctgcaggcccctttgccccaggctctgagacctccacaaggagccctgcctggccctggccttcctccacaccccgccaagttctccatcaactctaacctggcggatctcctcgctctcagccctggccctgtggggtgtgattatgatctccacttgaggcccagagaggggaagggacttgcccaaggtcacacagcttcttaggaggatttcaaccctccgacttcctgaggcccaggagcctctagacctcattgggaaaacagaaccatgcaaggtggagcttggcctctgccctcacaggctggagttcaaatccggctcttgctagcagcctcttgctagtggcagaacctagtctctctaggtgcctcagtcaccttgtccagaacctaaaggttgttgtatacataagcaaatgggtgggagatgccaaattgacatgagtagctggaagctgtgggtataccagggagggaggaaagggcataggtcagctctggggcagtggaacctccagcttgtgccagggctagcaaagcctggagccaaggcctgagcttaggggatctgagctgtgggccctaggccttgtgcaagcgtactttagagaagcattgggcagcagctccttgtggaaaaaaacaggatgggcacctgtttcctgggcttaagcctctctcctcccccaaccctgtgtctctggaggccagggcagcccccattacagggctccttccttcccagacactttcttccatccttggtaatggtaatagggtatctcagcaggcagtaatggtgaaggcaggcagcctttccggactctacccttgattgaaggagcggtcttgacccacaggaccctccccagagcctctgcttcaaggatgcactctaatggaggggggctggggccctggaaggggtagggctggggaggccacagactgaggctagaaggaggaggagcagtggtacactccagtcccagtagggctcaggcaggagggccagggctgggcatgggcccccaaccacaggaggtcaggaccataagccccctgaagaggctctgagcaggtaagtgacttgcatacagcctctcagcccatggggcagagccaggatttgaacccagtatttctactccaaggctaaggttctgtggcccagcttccaagaaggtggcaggccagcatgcccacctgcaccaagtggtctcgggtggatagccatgggaactggacaggaatctgggtgtgcctgggcatggcgcggtggggggaagagggagagtcagaaagaatgcctgacctgtggacacggacatggctggagaccttcacaccaaccctgagggaggacagacagaaaggtcagggctcagggtcacagcatcttgggggcagagctagggctgggggtcttcatggcctgcaggccccacttccacagaagctgttgggcattaggggctgtttgagggtcttccccctttaatctgtgtgcaccctcaaggtacaaacaatgcttgggttcagagggagctggcctggcctggtggggtgtggtggggaatttggactggggtaaagtgatcctcctatcaggccaggcttagggcaggaggccaggccacggatagggctcccggtggagagggtggatcctacctaatccgcaagagcgagggtcagcccttcctcggcacccagactggctgaagggaggctgaggccggaggaggggcacgggaaggggaggggtcagctcactctacccttccctgaactgagccctgtgagcccattgccttcacaatgcccagcctctgtcttctcttggtctcttctctctgactatagggcaaaggaggagcccaacatcctgggttggagtttggatgcagccccagctgtgtgaccccggggccaatcccaatccatctctgaaccccacccgctgcagagggcttccccccacaacatccaaagagtgtctttgaggggctggagcagaaacattgcctctcagatccaagaccctgtttggggtggcacaaggtgagcctgccttccacagaaacatcccccgggagctgcgcagccttattgggtggtgtctacagggtagtgaggaggttgagtagagacttcgtgtcagggggtttgagccacacagcctgggttcaaagtctcgtctcccgttttatctagcagtgcgacttaattaacctctgtggtgtagtaattgaactttccacgaattttcctatttaatctttgttacagccttctgaggaaatgcaggcacagaggaagacattcattctttcaaaatcatttgttcaaccaatgcagcggcctactacgagtgtgacatagttctaggtgctggagttcagcgggagccaggtaatttgcctaatagcagtggatttgaagactgttcaagcctggtagcaccagcagaccaggtcggcgcaggcctcagccccgtggcactcacaatctagaagtgggagacagacaatacacgaatgaatgagaccatttaaagatgcagaaaataaaatagagggagggaatgggatgcgccgtcggcttattggaggtgggccagggctatgtgaaggaccgaggagccgcag

SEQ ID NO: 21163 - DNA, 1365 bp, Artificial sequence
  DNA replication origin
aacagaaggcccccaaaatttggggatgcatgggcctccccacttcagtgtgctgacacccagccccagcacttctccggattcccaaccctaccctgggcctgaggcccccgaatggtgtgcagagcggggagtctatgggtactgcccctagtgtttccctcccacctctccccaggggtctggacctcaaaggcagcccaggtcccctgctctcctgccccaagcctccgtcagcaccccccaccccacccccagggccctctccctgttcccacttccttatttgggtttatcacagtggaatgaaaagaagaaacttttcccttcaggccagcctggggggaggggtctcccccggcccctggggcccccaggcaccccacctcgcacacctgccgcttcaggccacgcccccatctcctccccccagctcccacgcctaccccggggccccacccagccggaaaagagcccagagtcttccaggcccgtggcctgactgggaaggagctgcgaggaagctcaggccggccgggtggaggccctagggaaggaagggcccagggggcagaagaggatgcacccaggatggggatgggcagccgaaggtggggacacaggcatttgggaagcaccaggggcaggacagggaaaggggggccaggatgtattggggttcaaggtcccaagcctaaggagtggggagcaaagttcccaggggtggaggaacttggggggcaaagtctccactagggggtgactgggtgctcccatctgaacagggagctgggctgggatccagaagcagggcgaaggggtgccaaccagaacagggggaaaaatgatgaatggacgaggactgttcaggcagggcaccggggagagtaggggcgccctggcacacacccagaatgaggatgcccccagccagcctggaagtcagggtcctgcagccggggagtctagtgctgggcaggggtctgggcaccaggccaggatcggggaacgagaattagtctggcagggagcggtgggaagaacgaatggaaaacggggggacggggtttattggggttcaaagtctctgcgccaaggagtggaggcaaattttccagagctgagggactgggagttggggggacaaagtcttcattacggagacgatcggggacttaagtttccggggcgccgccagactgggatgagggtggcgccacgggcaggcgaggctggggtgggggtccccagcgtctggtcgagcttgactgaaagagtcccgggatttgggcggagcaggggcccgcgcgcttacctcgtcccatttgatgaacttactcccgcgccgcagggtctccaccacgg

SEQ ID NO: 21164 - DNA, 1263 bp, Artificial sequence
  DNA replication origin
tggagactttgccccccaagttcctccacccctgggaactttgctccccactccttaggcttgggaccttgaaccccaatacatcctggcccccctttccctgtcctgcccctggtgcttcccaaatgcctgtgtccccaccttcggctgcccatccccatcctgggtgcatcctcttctgccccctgggcccttccttccctagggcctccacccggccggcctgagcttcctcgcagctccttcccagtcaggccacgggcctggaagactctgggctcttttccggctgggtggggccccggggtaggcgtgggagctggggggaggagatgggggcgtggcctgaagcggcaggtgtgcgaggtggggtgcctgggggccccaggggccgggggagacccctccccccaggctggcctgaagggaaaagtttcttcttttcattccactgtgataaacccaaataaggaagtgggaacagggagagggccctgggggtggggtggggggtgctgacggaggcttggggcaggagagcaggggacctgggctgcctttgaggtccagacccctggggagaggtgggagggaaacactaggggcagtacccatagactccccgctctgcacaccattcgggggcctcaggcccagggtagggttgggaatccggagaagtgctggggctgggtgtcagcacactgaagtggggaggcccatgcatccccaaattttgggggccttctgttcccagatgaacgcccatcttttgtaagcaaagcctgccatgggtggggctggtgcaatccccattctccagaagaggaaactgaggtctggaaagcagagagttatcccaggccccacaatggggtgtggctgaggccaggagccgggagcctggcagaagtctccgctccctgcttcccaggtcacaggacgctgcaaccacactgcctgcaagcaggtcctggctccagtgatctcgggcaggctacgaagtgtccctgtaactcagtgtcctcatctgtaaaatgggagtgacaacagcacatgcctcttaggctggttaggaggcctttgtgtgctcgaagatgctaggtgcatagaactgtacctggtgcgcagtaggggcggtgtgcgtatatgagatgtattgataataatagtattgtccaccagacactgagatgcattttgggggtggcacccaacatgaggtggggtccttttctgtctggaagaacctggaataggagg

SEQ ID NO: 21165 - DNA, 1193 bp, Artificial sequence
  DNA replication origin
actcagtgtcctcatctgtaaaatgggagtgacaacagcacatgcctcttaggctggttaggaggcctttgtgtgctcgaagatgctaggtgcatagaactgtacctggtgcgcagtaggggcggtgtgcgtatatgagatgtattgataataatagtattgtccaccagacactgagatgcattttgggggtggcacccaacatgaggtggggtccttttctgtctggaagaacctggaataggagggttctacctgtagccacttgttcactctggccctggccgagtctaagccctggaggacagcccctctggctgctggtcctgagtcacacagggtggccctggtagtgtgccagggaccgggcccttcttagaaaatggggctggcatgcacttccctgccccctgccagctgcacggctgtttgagggaggaagagctcactgcccagtcctgagagtagggcaagtccccttctagggggactgttcttctacgagatggggatgagctttgaggctgtgaggaccccggcagatgtggtaaggtggataatgggctttgaggcagaccacagggctatcgtgatgtcccaagggatgcagaagggcagtgggagtcagacttctcactttcatgccttaaacattctgcagtggggtggattggggggctgccactgtcacagagctctcagcacttctggggaaactgagcccaggatgggggctggggacctcttccagggggtgggtcagatttcacgggtggagaaggaagggcagggtgtcctggcaaagggaacatgagacaaagccctgggaaaggtcaggtagaatcctagggccagagggaggtgaggctgggaagaggctttgaggtaggtgtgacactaaatgtcacacctaggaccttggctttgttctgagggccacaggcagccacacaggacctgtggactggatgaggtttcgtcttagctcatgggcaggaactctggggtgcatgatgggagggccccaggggccaggcctgcaccacagccctcacttcctgacccctgctgccctgtgctgtcctcaggagacctccagtcggaacctggtgaccctgcgtgtggaccccaatggcttcttcttgtactggacgggccccaacatggtgagggtgggcgctggtgcagctcgc

SEQ ID NO: 21166 - DNA, 1090 bp, Artificial sequence
  DNA replication origin
tcaccagcagaactgtatgcttgtttccatgcctgatgactgaagagccctcctcccaccttcactcacacccacactgagccccaggaggcaggggtgatgtcagtcttgttgatggtcagacccagccccctgggaggtaaatagatgctacctccccgacctgcccaccctgtgggcctgacctcatctgtagttggctttttggggtctgtctgttcctcctcttcctcatcttcctcctcatcctcacggtcagcaggtccaagaacataggggcctcggttcaggccctcgtcacccagagacttctgaggctccaggctgggcttctcaagccctacctcctccccattgctcaggcctgggcagctgtcagagctgggagaccctgcagaggacagggccacagggtgaggggtcaggaccacacagctgcttaggaagtctggaggggtttttcccagtgtgtgccgaggtgactcagtggggaattcaaggggtactctcagggcagtgtggcttggggagaggccaagaggtcgaggtcagatggtattaacccagtatgggttgagaggggtcataggtcaaaggtaaaggtctgcagtgatattcagcagggaggcagatagggtggttcagtggggtgagaagtcaggaagtagcataccacagccctaatagcggggtaagggatgacatagagaggttacaggtcaggggtaagtcagagccatgtctaaggagggggcatagtgaggtgaacagtcaggggtgagaggtcagaggtcagctgaaatgataaccaactgggcaggtgaactcaatgcgggcttaggggtctgaggtcacacccagtgtgggatgtggtttactgaggtcagaggtcagccttcagagccatcaccgggttgtgggaaggctctgagaggtgagaggctgaggttgggagtcaggagttggggtgcagctgggtgagacgtgcacctgaggtcaggggtcagaggccccacaccagccgacaggtggtgaggagacaggccggttgtgggaacaggcgcacagcgaggcaggagggtgggctggg

SEQ ID NO: 21167 - DNA, 948 bp, Artificial sequence
  DNA replication origin
tgcaggggccaggctcaccttggggaagtcgaagggctcttcgtcccacacggggttgaacgagttcccctgagaggtccgggtgcggtacttgcgccgcgtatcaacagggaggccaaacatgtccacctccacgtagatgcccaccttcctgtcggacaggaactgccctgagatcacctgggggtgggccaaggagggtgaggcggatgctgagagtcctgcccccaggacacccctggcctgagccgcccgcaagccccaccttgacccgcaaggcattggccacgatgccatccacgatgacctcagtgaaggggtcgaaggacttgtccggccgccgcatgaactccggcttgagcaggtacccgctgcgcccgttgtactcaaaaacgcccgcgttgagctgcatcgccacatctggggtgccacgggcacgtcgagcaggggcagggatcaggcaggacggtgccatgtggggaatgggagatcatcaggtcagatggcatccaaggtccagggtcaggggcgggctcaaatggcatcagggtccggatccaggacagatcagacaggggaggggtctggtatcagccaagggcaggaggcggggtgagtcgggagctgggttcccctgggatctgggatgagacagggtcagaggtccattcaggcaagaccagcaggatcgtgggtcagaagtcagtaagactgagggtcggggtcaagatggagggggccagggctcaccgagggtctggaagttgagcgcaacaagctggcaccctacgttccagaagagctggggcatgtagttggaggagtccacgcgggtgcccttggggtagatgcggctgagctgctgcttgttgtatctgagattggtggtcaggggccacacaggtgccagggcccaccccatcagcctccacctccggcctcagccag

SEQ ID NO: 21168 - DNA, 1376 bp, Artificial sequence
  DNA replication origin
ggcccagcaacccaacgttgccttcctgaccacccaggataccactacgtctgcctgcggaacgaggccaaccaaccgctgtgcctgccggccctgctcatctacaccgaagcctcggactacattcctgacgaccaccagggtgagctgggggtgggcggggcctgcctggccagggagtgtgagggacaagggccacccccagggcctgggagtggccgagctggatggccccgactgagtagggaactgagtagggaacagatctgaggacaagctctggaattcctcattgagaccagaggtggcgggtgggggtggcctgggggctctgtctctgagaccttggccttctgcctccccccagactatgcggaggccctgatcaaccccattaagcacgtcagcctgatggaccagagggcccggcagctggccgccctcattggggagagtgaggtgagccggggcagggcagggctcaggctcactgtgacccagggggccgctggacatgactgctgtggccacatgaggagggggcttctggtctctctagcgcagtaggcttggcagccctgggattttgaggagatgaaaaccacccatttgcattcaggaggccttcaggtcacacctgggctggaattcctccagctccatgtaggcttggagtgggggtacaggggtctcagccacttcatcagggcagtgcgaagccacagaagctgttcagacgtggtgtcctgggagtcatgaggagggcagtggcttccgtggggaggggtcaggcacggaggttcacctgcgcttccagatccagtccccccagggcctgcggcaggcgggcggggagagatgactgcaattagggctgcctggagctgttagcggagaggctggtgcccactctgcggttgagtcctctgttgatttaatcaggagctcagcagcaaggaaaatgagcgactgtaggcaaggctgggggacacaggcaggggaggagaggaggcttggggctgggccaggcctttccagaacaatctgggagttactgagcacatgcagtgggctggcattatgttatcttccccacagcccatgtggaaaaggggtttagaaaggcttgatttatagctcttctcatgcagacagcctcctgttacagagcagtccagcagtggcttggactaagggaggctgacaggggtgctaggggacccaggaggtggtagaggacagaagggtctggagggaacagcatttctgaaaagagcattctcctttctccctataggctcaggctggccaagagacgtgccaggacacccagtctcagcagctggggtctcagccgtcctcaaaccccaccccca

SEQ ID NO: 21169 - DNA, 1749 bp, Artificial sequence
  DNA replication origin
gggctcctcttctgccagctgttgcaggacctgctgctgcccagccacaagacggtcatgccgctgcttctgggcctcctccagctacaggggtgggcaagggctcagctgaggggccctgagggaggggctagagcctcgaggctctggctgggtatagaagtcaggtgggcgaggccgggtgcagtggctcacatctataatcccagcactttgggaggccaaggcgggcggatcacctgaggtcaggagttcgagaacagcctggccaacatggtgaaaccccatctctactaaaaataaaaaaattagccaggcatggtggcggatgcctgtaatcccagctactcgggaggctgaggcaagagaattgcttgaacccaagaggttgcagtgagccaagatcgcgccactgcactccagcctgggcgacagagtgagactctgtctcaaagaaaaagaagtcaggtgggcgaaggctcccagggcaatgtatcagggttgtgagaggactgggcccaaggacgccaaagccagggacactggtacagacagttggctttgggtatgatgtgggtaccctggggctgttgggcacttgagaaaggccctagaagaaccttgagggcaacgtggcaccaggccaggcatggagatgggtgtctgatgagtgaaggaagggaggtggggtagggtggcccgggagcctgactcacccgacggatggagttgactgactcagtgatgtgccgacggttaatctccgtcagttccctgcacgggagcaacgcaggatggctcggggcccagacacctgccctgcctccccagtacccagatggcccccggtcccggtgcccttacgcctccttcttatgcttgtccctcatcttggcctccgagatgctgttatggcgctttctgtccaggatcttctgcagctccttcttctccctggagaagccggcaggggaagaggaggggtcagcggcagaagcacagactctgccctccttctggtactagaagtccccagcccttcccatagacaatcctcggctttcacctctcgttcatctctttcagcctcttgaactgagttgtgtttgcatcaaggacgacctccctgagccgctgcagagcctgtggacacagggagctgacaggtgatgccgggctgacgacgggtctatccagcaggctttccctggccactgcaggccccctacctgtctcaggtgttccagcctccgctgggcctctgcgtccacctgggcctcccgcagctccagcaggctctgcacctgtctgttctggaactcctgataccgctttgcctcgtcctccccctccttcgtgtcctccacatcagcggccccacctctgcgaggagaacccctctgggtgatgcctgggcccgtcacatggactgggatggggagggtgtgtaggggggcacatcctggcaagcgatggcagacaccatcccatggggccaggtctgttatgcaaaccaggaggcctgttagctccacccaagtgatgggagcctgtttgggcaacatgctcctcatggacttcaaaagagatgtcactccctgggggacacagggacgcctggtgtggaaagcctcctccatccttgcactgaaccctcctccctgggggtcaaggagcagctcttgccatctctccatgcccaccgacccccatgttcacatcagcacacccagcacacatagcacacag

SEQ ID NO: 21170 - DNA, 949 bp, Artificial sequence
  DNA replication origin
cagcgacagagacggaaggggtcgcggcggctcgcgggcctgggctgcgcggcccaggtccaagtccccagcacgcgcattgggaccgcagcgctgccggcagcccgatcccgcgctctgcaaaccgtgccgcggccccccagagagggtcactcgctcctatttgggtcagccctttccagcagctactgtgtggccggcccggggccagcgccgcccgggtacctcgcggggcgggagggagcggctgagccaggctggcagcagcgcggtcgctggaaactgaggcttcatgcggggacccggacagagcgggggctccgttccagaaagatttattggcgccccctataacccgggccggttcttggtgccgggcacagagatgcattgcgccacggccctgctcgcggaagctcccgagggcccggaatcggcagggcagtcagagagggcttcagggaggaggcagctagagctgcgaccggaaggtgaggtgagggtcatcccccccggcgcaaggaggagtggacccatggaaggacaggggagcagcagaggccaggcttctaggggctggaatgtcacacccagaagttagacattcagctggtatttgaggacctgggaactgacttggagtgtgtccctcagtggacaccagctagagtcaggaaggtgggagttggctgctgaggagcctagatacggaatacactggagtgagcagaactgggggatagggcagcgtcccacagaagaagtgaggaagtctggggccattgcattgaccctgagggaggagggccctactccggagcctgtttccctggcctccccaccccatctgtttgcctgaggctgcagcaaaaacaaagcaaagaagatactcaattggcaggagataagcccagataagaggccgccttcccctggaggagggatgcag

SEQ ID NO: 21171 - DNA, 1295 bp, Artificial sequence
  DNA replication origin
ggagcgggactttccgaccgggcacccagtccaggcggagcggtaacaatagcaacaataatcacatccgacggctgagcttcagttgtggctgtgccaagcgccttcgcccgcagtaatcactcccttcacaaagttttcactggctcccgggggagctgtcactatccccacttcactggggggaaactaaggcccagaggggctgaaggacttgttggcagaagtgggtctccaggttccaaatggggaccccagagaatccctctcctgctcccacacacgcccaaggtgtgaggcagcgaggatgtgagccccggggccgaaggagggaggaaaaaggatgcggacgaggagccttggatccggcgggggggcggggccgggccgggttgaccccgcctctggacctacccgagtgacgttccgagaggtgattgggccaggtcgctgacagttcccgttgcccaagcaactagggcccggagcccggggtgctggagggaggcggcaggcccgggtcaggggcctcgagatcgggcttggggtgagacctgtgcgccgtcaccacgggcggggcggggcctgggtccaccggggttctgaggggagactgaggtcctgagccgacagcctcagctccctgccaggccagacccggcagacagatgagggcccaggaggcctggcgggcctgggggcgctacggtgggagaggaagccaggggtacctgcctctgccttccagggccaccgttggccccagctgtgccttgactacgtaacatcttgtcctcacagcccagagcatgttccagatcccagagtttgagccgagtgagcaggaagactccagctctgcagagaggggcctgggccccagccccgcaggggacgggccctcaggctccggcaagcatcatcgccaggccccaggcctcctgtgggacgccagtcaccagcaggagcagccaaccagcagcagccatcatggaggtaagtaccccaccacctccacctgccgggacacctcacccccagcccactggctccctgcatcccagttgcatccacaggcactgaatgctttgggtcggtccccaaactctcagagccccagtttcctctttcgtaaaacagcaattaataaccaccattgtaggactgttgagttaattagcaggaacatataggatgcacttgattacagagctggtgcacattaaagctaaaaaatggttgctgccgggcgtggtggctcacacctgtaatctcagcactttgggaggccaagg

SEQ ID NO: 21172 - DNA, 2403 bp, Artificial sequence
  DNA replication origin
ggcggaagttttcttcagagaccgagggacgggaatccgttgccgcccccggccgggcggcacgaccccgatttgggtataggagagaggagcgtgggaactggcggacccccatacaagtaaaggcgggcggcacggggcacggcccacccggggaccccctggatgcggcacggcccccgcaactcggccgccctcctgccgcctcccgtaaccccgggcgcccgccagcggcgcagctcgcgccaattctcgtacggtttcacgccgggtgcggcgctggactgcggagccagccgggccgctgcgcaatttgcgtagcgaacggcgcccgcgcaggcgcggagggggaggggggcggagcagcgggagccggggagccggagccccgggtccccacgacctgagccggctctcccatcagcggcctgaggacctggcgtccgcctcctccctccccttgaggctggagcgtggacgcggtgggggagggtggggcgggggcagctttcgagaattacgaggacaggaggcagaggccctccccatccgcattattggaggagagagagcctcccccagcttggggagggggagagcggggcattgggcgcccctcgcagcggccgctgccctgacccgacgggtatcagccggctctccccctccacccaggacgacatgaacgaccgaggccagggagtcctctccttgggcctctgcatccccccatccttggctctggggtaggcccagggaggagacacccccaacccctatccggtctgtcctggagaaaagagactgcccttccatgcccctgagtgaggggcctggggcccaggctgcctgtgttccccaagggcaagggtctctctgttgaggaggaggggcctgtcagccacaacttctttcctcctgagcgccccatctccctctctgcaccctgcaattcccacccctccgtatttatttccctggtcccgccgacagtccctccttgtctgtctccgggattcaggcctccctccctgacatggagagtaacctgtctggcctggtgcctgctgccgggctggtgcctgcgctgccacctgctgtgaccctggggctgacagctgcctacaccaccctgtatgccctgctcttcttctccgtctatgcccagctctggctggtgcttctgtatgggcacaagcgtctcagctatcagacggtgttcctggccctctgtctgctctgggccgccttgcgtaccaccctcttctccttctacttccgagatactccccgcgccaaccgcctggggcccttgcccttctggcttctctactgctgccccgtctgcctgcagttcttcaccttgacgcttatgaacctctactttgcccaggtaaccaactgtggtcccgggtggggggcgggaggtggcaagcctcaaggacccacaggagtgaagggcatctctgctcctaggtggtgttcaaggccaaggtgaagcgtcggccggagatgagccgaggcttgtaagtactcgggacactggtgggctcagcctccaggtcaggggcaggtgacagtcccatgtagatcccttcccacctctcagggctgagacaaaggcaacccagggaatgtctgtggaagatcttggaaaagttaaagcacctggcgcagatggctcagcagaggccttgcagatctgcaaggcacaggaataggaatgcttgtggtagtgtgagggagagggccccagtgtcatccaccatggagggcgagctggaggctccagcccatggaagcaccaaagccatatgcactcctgggtgacctggggccgcaatgccctcgtcatttgtacagtgtcttacggtttataaagagctttcccagccatcttttatttgtacaatttccctgagaggctactatcctcccttgagagatgaagaaactgaggcccagccaggtaagacagcaggatcaaggtcgcagagctggggctcagacagagacttctgactccagttggtgcaccttccgaagtaccatggctgtcagtcaccttctgacctttttgggcctcagtttctccatctgtaagagtggaggaacagggctcagactggatgccctgagttttgtcgacattggggtttcctgcaggaggtggggcaggtggtgagtgctgagggctgttgagggcccgcgctgactgtgctgtggctgcaggctcgctgtccgaggggcctttgtgggggcctcgctgctctttctgctggtgaacgtgctgtgtgctgtgctctcccatcggcgccgggcacagccctgggccctgctgcttgtccgcgtcctggtgagcgactccctgttcgtcatctgcgcgctgtctcttgctgcctg

SEQ ID NO: 21173 - DNA, 1332 bp, Artificial sequence
  DNA replication origin
ggggcaattctgggccaggagagctttgagaacaaaggcctgtgtggtctccttcccttgcaaactgcaggcccctcctctcccagcccaccagccttgatggggtaagtcacccctgcccagcctagcagcccacttcaagggctagtgtctgttcagccttaggccaaacaggcaaaagtgataggaacacaaggcagatgacagacaggtgcacaactgtggggcgcagacactgtttattgagtggcaggcacaggagaggtagctggctccggtgtggaagcagaggtggcaggtcatgccagggtgctgtgggcatctggcagccagggccatgccccccatcctagggggacggcacaagctcactatgacaggagcagcaaggagccggccagaggagggggtagccacgacccccaggatcctgggcaagaagcggcagacaaacttggcacaggggcctagggtgagggggactggggcctgggtattctgtgggggagggagggggatcacgtctgtggggtggagtagagactgtggtggtggccgcctggtcctggcacctgggagaagagcagaggagtggtcttcgtctggctgcccccataccagcccggctcacgcccgatggcaccataccagctcccagagcctagactgcccgacatactgcagcagagaaacagggtcagtctcaggacagtgaccagggccacagtcacaagagctgcaggaggaagacaggcttagaacagaacccctgtgacctagaccttcggggcccaggacaaagtacatctctaggcaagaggtggaggctttagcaataggaacccaggggacctcacctagtacagatggggaagcaaaggccatggcaggggtggaaggcaagacccggctatctcggtcccccatagcttgatggagccagcggggtgggcgggtagggcaggggtactgaggcagtgccacggctcctacctggtgctctcaccccggctgtgctcccaggagcagccctcatcttcacagtgcccagcccggtcaaagaagtaggaccgagaggcaaagacctgcccattgaggatgtggctggtgctctgggggaggaagccatcatcgatacttactcctgtcctgcactggcctcccaggcccaaccccagactccaacccaggatttgcaacatccgccccctccactggccccacagaagagggagcagacccttaccaggtcctgtgggggccggtgcacccggaagaagcccaccagcagggtggtgggcagtagctcccacacgaagaggatgaggccaa

SEQ ID NO: 21174 - DNA, 1346 bp, Artificial sequence
  DNA replication origin
ggacactagcgtgcacacgccagacagcagggccaccgcgcagcgcccgcagctcgctcccaccgcctcccccgcgtccgcacagcgacgcctcggagcgtggcgggcggcgggaccggcggccacaccactcccggaggcgcccacgcgcgagaggtgggcaccccgcccggccagtcgcccctggggcgtccctgcccctgagtcctgcccgcgcaccggagcccgcaccgcacttactgtcggccccgctgcggctgcggctgaggcccgggttccagcacggcctcgccggtgccgactgggccgcggaggcggcaggggcggagcgggcggccgccggggctgggacccccctcccgccggcagaagcccccctcctcccgcggttaacccctccggcgccgcgcttccctccgtgcagcgccctcgccgccggcgccgccccaagccgtttacctgcggccgcctggctccccacagccggccagccccgggaggtgggtggcagaggagccggagaggggttgcagcaggggccagccttctagccttggaccggagcccagtgtggccagcggcagggccccgacctgggcatcagctggcccgtctctccggacaggcaccacgctaatctggcatctcccaggcccattaccggatcgggaagggtccgcaactctccgcccctggggacagcctggcccttgggctcagcactcatgagggaggggctccgcgggacaaaggggtgggggaaacccggtggggccacctggaattggccgacgtggaggttgggacccacctctgggggagttgctgctggagcacctcctgcccccactccaggttttggccctctacctgctccccggctatccctccagggtgctccctgccccagcttttggttctcacttccatgcccagaaatcagccccggaaggctgtggctgaagctgcctgcagatcccagcatggcactggtgccagcatccactctcccactgcctgaacacccaggccctggctggtcctgaacttgccccgccctgttctcacccacttgacaacctgtgacctctccaaagaccctctggtgcctgctggggtcctcagccctcatgctggatggctttcagcctgggctttgaggctgaccacccgctactggtagggaacctgaacaggttaccaaactctggagtctccctgttcccacttacagaaaagggatgattaatcatcacttcggggtgctgttctgggcattaaggaggccagtgtttagaaatcctcaaaacagagcctggcacacacaataaagtgccccacaaacg

SEQ ID NO: 21175 - DNA, 1056 bp, Artificial sequence
  DNA replication origin
ccacgctccgaggcgtcgctgtgcggacgcgggggaggcggtgggagcgagctgcgggcgctgcgcggtggccctgctgtctggcgtgtgcacgctagtgtccacacacgtgtgcgtgggctctgggtgccctggcgcggccggcacgcccatgggggccggggatgccggggcgtctgcggagagtgcaggtggggtgcgtgcgtgcagcggggcggcgcggcgctgcagcctcgggatggagcgtgggcgcgcgggtctttgtgcccgcgcttggcggcgcgtgccggggcgtgtgtgcgcgtgggcgccgccgcccgctgtctcggactgacagctgtctcgggggctgtcgccccggtgtggcctttgcggacccccgccccgctttttccgggaactgggcgtccccagcacccctcctcgcctgggtgcggcggccgggacccgcccctgggttcctcgaaagcccggcggggcgcgggggcaccctggagggccagccaggaagcagggcgaggcgagaggggacggagaagccgcggagatgctgtcacagccgcagcgggcgagcagggacccaccattcccctgtccccgccttgcgctgtccggcctctcctccgggtttcccttcggacgcctccgagccccctcagcctcctcctcgagggccagctccccgcacccccaccaagctccacacatttcctcgctcgccccgcttccccctaggcaggcttaggctctctttcggcctcccactcgccttcctttcccttctcggtgccctcctctctttcctcacccggtagtcccagacaggggctgagggccgggcagcggaggtaaggggaaggctggagataggagggggactgggtgtgtccagccagagggatgtctgtggacagtgcagctgggggctttatggatctttgggtgtgtaggggatagaggaggagggtgtgggtgtcaggccagctcagtgaccccagcatccctggttttgcccgcagtgacgacagctccccaggagccccccgcccggcccct

SEQ ID NO: 21176 - DNA, 1197 bp, Artificial sequence
  DNA replication origin
aagctccacacatttcctcgctcgccccgcttccccctaggcaggcttaggctctctttcggcctcccactcgccttcctttcccttctcggtgccctcctctctttcctcacccggtagtcccagacaggggctgagggccgggcagcggaggtaaggggaaggctggagataggagggggactgggtgtgtccagccagagggatgtctgtggacagtgcagctgggggctttatggatctttgggtgtgtaggggatagaggaggagggtgtgggtgtcaggccagctcagtgaccccagcatccctggttttgcccgcagtgacgacagctccccaggagccccccgcccggcccctccaggcgggcagtggagctggcccggcgcctgggcgcgccatgcgcagcaccacgctcctggccctgctggcgctggtcttgctttacttggtgtctggtgccctggtgttccgggccctggagcagccccacgagcagcaggcccagagggagctgggggaggtccgagagaagttcctgagggcccatccgtgtgtgagcgaccaggagctgggcctcctcatcaaggtgcgtgggtgggccgcagccccttcagctgtcacccatcacccctggcgctagctgtgtgccagtgaggccctgtgccagtgctgctttcagatcagtatccctgaggacgggtgcagtgggaggctgtgggacagaggctggggaccaggtctctgtgttttcaatagggcaactgtggggtcatttgttttcctggagagcctggcacaggactgtgcacctataatgtctccttcagggtgtgatggtggtgggatgagggggaaatgaatgaatgaatgaatggccatagcgcatgggctatgttacatttgcacaggtctcactcaccggtctagattgccacacaaaatccaagactctcatttaaacatgaattacagttaaactgcaaatgcctttttttttgagacggagtctccctgtgtcacccaggctggagtgcagtggtgtgatctcagctcacagcaacctccgcctcccagactcaagtgattctcctgcctcagcctcccaagcagctggtattacagggattcatcaccacacccggctaaattttgtgtttttagtagagatggggtttcaccatgttggccaggct

SEQ ID NO: 21177 - DNA, 831 bp, Artificial sequence
  DNA replication origin
gtagaacgtggggttgggtgggggctgcgggcagccaaggctgagtaagaaatagcgccaggggcccgagtcggaccaagggtgggttggagcggacagggtaaggggcctagggagacgtcttactttcgaaggcttttcctccatggttctgccccaacggacccagacgccacaggcctcgagacgagaagggagtcaacgctccaggaagggggcggggcagggtctctcgcgctgggagagttcaaacgacagccctccacgcgagatgccattctctctcccctgcctctccctccctgcaccccacccgccaatgtgtgtgcagaggctggagacgcgcagcccatcctggctgatccccacgccggaccctacacagtctcctccaggcagagacgcgggcctgagagggccgagacttgaccgacctgggtgcccggggaccctcggcctgggggtcacgggaggccagaggtgcccccacggtggcccgaggaaagcaattccacacccactcgcgtccgggagcgtcacgcccgcagcggtgcagaccgttttcatttattgatgcaggctttgaggcacagtcgtgaggtgctgtgagggatacacccgcccggggcagcgacacagaaagccttgggggggtctagagatggatggaagtgagggaagggccggggccagggaggaggcggagaggcaactgtagcctcctccccagacttcagtctcgtggaaagagggctctttggtcaaacaagccaggcatgccggggagagcagaaacgaagcccttgagaggcccggccagggatcctgccc

SEQ ID NO: 21178 - DNA, 945 bp, Artificial sequence
  DNA replication origin
ttggcgcgggcgcctctcccagagaatcctagaaacttggatcccatcagcttccccccattttacagctccagaaattgagtccctggccagcttattgccctgcgggtgcccacggcctggcgaggccacactgaccggcctcgatctgggatgcagtgtccttctcccccagattgatttccatggagctgccgcggtgcaactccagctccaccagcgcgtgctcgtccagttcctccggcttgtggctggccttgtacccctcgtccaacgagccccgccccgggctgtgccacccgcgggtcttgctaatgttgcggccctcctcgtcgaagccctcgcagacctcggacagcggcatgttcagctgtgcctgggacagcgtggtcgtggtccacaggtcccgagtgtcgctatgcacgctctcctcgtccgagccttggcggtcggaagacttgagcgacacctgtgggccacatacaaggagggagccaagggtcgcggatggctggagcgggaaggaagagcgggctggggaactgagccgggccgggttggggatcccgtagaacgtggggttgggtgggggctgcgggcagccaaggctgagtaagaaatagcgccaggggcccgagtcggaccaagggtgggttggagcggacagggtaaggggcctagggagacgtcttactttcgaaggcttttcctccatggttctgccccaacggacccagacgccacaggcctcgagacgagaagggagtcaacgctccaggaagggggcggggcagggtctctcgcgctgggagagttcaaacgacagccctccacgcgagatgccattctctctcccctgcctctccctccctgcaccccacccgccaatgtgtgtgcagaggctggagacgcgcagcccatcctggctgatccccacgccggacc

SEQ ID NO: 21179 - DNA, 2220 bp, Artificial sequence
  DNA replication origin
acccccgcggcagcgctcccctccgcccccggacctggggctccggcagcgcggtcgggcaggcatgggggccgagcggcccggagtgccggagtgagccgggggccgcgggcggcccctcctccgccgcctcctcgggccgcgccgccccaccgcgccgcgtcccctcactcggcggcgccgccggctgcttgtaggacacaaaaggacatcgcggccgcttcctactccgcttcctccagctgacagcgggggtggggccggccgtgcgcatgcaaagcagggggcggggcccggggtcctatgctaatcagaccagcggggcgggcggcgcctgcgcgcccggacgagtcggggcggagccggcagcgccagtgggcgggccttcgtgcaggtcccgccccgcagcccgccgagccactgcggcgcacatgcgtacgcggcccctgggaggggcggggccggagacgcggagggcggggacaatagagccgagagcaagtggggccagaagcgctctttcgtaacggaggaggcggggcttgctgcgcgcgagaggagtgggcgaggcggtgcaggctgcagtcgcggagccaagagaccacttacagatgaaaacgcaagggcgggacgagcggagaggctggacctgctacctatgcttgaggggcggagcctagcgcgccgtcgcgaggagggaggtgctgccccgttccccctacccccttcccccaaagcgacaccaactgagcactcgaaccgtagacccagtagccccacagagctgcggaactcggggtgggtgaagccgacttaaaacatgcaataagtcctggattgcgagtcccggaaggtagggccgatagggcccggacggagaaagctcaaggtcactgcggtgaccgaatgaaggtcactgcggtgaccgaatgaaggtcacggggaagggcggggccacgtgcgtccgcctcacgcgggctgtcctgcactgactcacggaccatgcatcgactcttttatttctttaggactcaaattccactcggatggggtcaggcttgggtctggggaccgggctggcacggggctggttcgggtcgctgctcgagcccaaggtggcgtttttaattcacgtacagcctcttgctccggcgcttcttgagcccttcgatgtatcgctgcagctccttagtcaggaagtggtccctgccgatccctaactggtagcctaggaggagggcagagctcggctcagggcagtgagcaaccgaaaggtctccccaccagggggcgccgcatgtgtgattcgaggaaccgcagatgattcgaggtagcagtagcgcagggcactcaggtctgtgttagcctggggaactttgcatctctaagggtgctgagtgttaaggtggaggatggatgaggtcaaggctagggaagaggttgcaggcctgaactagggcggtggtagcgagcagtttgcccaccttctggaccagccacccactctaagccatcagctggccctttatcaccgctgggctttcctaccacagcagcaaaagttcacccacataatccactgtccaaaggctcctcacaactccccaaccagaggcagtcgaggccacaccaaggcggtcatcccactgtgcaggtggagaaacagccacagaaaagcctccctcagctggagaggggctgcactcagcctggagcccaggcctctgcccatcaccacatgtcccccactgggtcttcctgtgcccagtccctcagcttttaacttttatggggcccttggaatacttgtgagtgccaagggcatctgacaagacataaggcaccctgaaaccccacccccctgggccccagccctgcaaaatccaccagaatctgtcgtgggagttcttgggggttggcggggagcttactccggagggctttggtgaggatttccagagcttcattctccatgagttccatcaggggcagtggcagctggagaagcagcaagaggcttaggcgtccaggtacttcatctctgcccacagctgaaatgcccccacctcctccctgtggcccccaaacccccaaccagcctgcctgcccctccaccctgccaaccacccccaactttcatatcctatcaacccccaatttgcctatcccctaccccaccgaaacgcccagtctccccagcccctccaaccctgctctgct

SEQ ID NO: 21180 - DNA, 975 bp, Artificial sequence
  DNA replication origin
gcccctcccaggggccgcgtacgcatgtgcgccgcagtggctcggcgggctgcggggcgggacctgcacgaaggcccgcccactggcgctgccggctccgccccgactcgtccgggcgcgcaggcgccgcccgccccgctggtctgattagcataggaccccgggccccgccccctgctttgcatgcgcacggccggccccacccccgctgtcagctggaggaagcggagtaggaagcggccgcgatgtccttttgtgtcctacaagcagccggcggcgccgccgagtgaggggacgcggcgcggtggggcggcgcggcccgaggaggcggcggaggaggggccgcccgcggcccccggctcactccggcactccgggccgctcggcccccatgcctgcccgaccgcgctgccggagccccaggtccgggggcggaggggagcgctgccgcgggggtgggcgggcggggcgcgggggccatgtgcgagcgcggcagggaggcgggcggggcgggctgcaggcggggtccgactctggggccagtccgggccacggttgggacccagtcgagggtcggactggtcagggttcaggcgggatccggcgtccgagtcctggtgggccggcctggggcaggatctggctctggctgcgggtcctgactcgggtcagggttgggcctccgatccagcccgctccggggcagggttcaatcccgcatttgccgaagtccctggggctggccggggtggaagacggggagggctctatgtctgggaaggggctctgaagaccacgtgggggcgctcgaaggggcctggggccaccctcctctctgggtcaaaggtcatcgcaccggcaggggagaacttcctcctccttggctctccccacttacttcctgataacctggtagaggtctcccgcgggcggggagggggaggcgtagcaactttaggcaacttcccaaaggtg

SEQ ID NO: 21181 - DNA, 1407 bp, Artificial sequence
  DNA replication origin
agtcgagggtcggactggtcagggttcaggcgggatccggcgtccgagtcctggtgggccggcctggggcaggatctggctctggctgcgggtcctgactcgggtcagggttgggcctccgatccagcccgctccggggcagggttcaatcccgcatttgccgaagtccctggggctggccggggtggaagacggggagggctctatgtctgggaaggggctctgaagaccacgtgggggcgctcgaaggggcctggggccaccctcctctctgggtcaaaggtcatcgcaccggcaggggagaacttcctcctccttggctctccccacttacttcctgataacctggtagaggtctcccgcgggcggggagggggaggcgtagcaactttaggcaacttcccaaaggtgtgcgcaggttgggggcgggacgcggcgccccgggaggtggcggcctctgcgacagcgggagtataagagtggacctgcaggctggtcgcgaggaggtggagcggcgcccgccgtgtgcctgggaccggcatgctggggcaggagggcagccgcgtgtcaggtgtgaaaagctctggaggtgttttcatgagtccgtgcctgtgcgtgtggatgtggggagacctagtgagagtgtgtgtgatcatgagccttgactgagttcgtggatggggtgtgcgctccaggagaagtgtgtgagcacaagtgtgagcaggagtgagcacgggtttgggaaggccggtgcaagtgtgaaagccctcagcagagagcgagcctgcgtgggcttgtggggctcctgagcaccccggtgagtggagtgtgtgaactcggtgtgagcacgtccactggccttgggtctgctctccaatgcagaatacccagatgagggcagggtctcagaggtccccccaacatctggagaaaactgggaagtatcctgctcctggctagggattccaggtggggttgaaggttgcctgggggctacggttaccctgctccctggcctgggtgggagtaggggctttctaagcctcccccaggttcccaagggggagacctgctgtcagttactggccctgaagactctgtttccatggcaacagctaggagggggcagtgttcctgggcagtccttccttggactctgccccccttcttccccacttgctgggcttggaagcctggccctaggcccgaggttgggcaacccgtgtggcagggtgtctcccatcccccataccagtgctttcctgcgaacctatgggtctctccgtgcaggtgaccagcgccatgtccagccaggtggtgggcattgagcctctctacatcaaggcagagccggccagccctgacagtccaaagggttcctcggagacagagaccgagcctcctgtg

SEQ ID NO: 21182 - DNA, 1670 bp, Artificial sequence
  DNA replication origin
agcagctgggattacagacatgcaccaccatgtccggctaatttttttttttcgagatggagtctcactgtgtcacccaggctggagtgcagtggcacaatctcggctcactgcaacctctgcctcccgggttcaagcgattctcctgcctcagcctcctgagtagctgggactacaggtgcctgccaccacacccagctaatttttgtacttttagtagagacggggttttaccatgttggccaggctggtcttgaacttctgacctcaggtgatccacccacctcggtctcccaaagtgctgggattacaggcgtgagccaccgtgcccggccgtggtgtcttgagctgagtgcagaagcgcaaatagggggtaggagaaaatgcaccgcgaggagaaatgtgctgcgggcctgctgtctagctgtgtcatttggtcgttgcggggccctgtgaggccgggagggctgccagcacccaccatgtgccaggcctcgttgctagtgctggggccagttcctgccccggtggagctgccactgaagggggaggcgtaataaacaagataggtgagtgcatatgcagcgtggtctgttgtgctgagggctgaagagaaaccagaagcagggctcagaggccaggaggactctgcaaagggatttggcattatcacagggtggccagggaagatcttcaaggtgacagtgagcagagggaggtgagggagcctgtgtggacttcaggactagagctccaggcagggcctgtttgaggaacatggaggaggcgagagcaaggagtagaggtcaaaaggaggcaagaagcaggggcgtaggcctaggaggacataggttcgctttggcttggactcagagaagggaaatccccagagggttttgagaagaggaggtacaggatgtaatggaggcttaataggaccctcttggctgctgagtcgagaacagactggagcaagcagggacagccaagcgaggggcgaggtgacagtgactatcaggtcaagggtggaagtagttgccaggggcaggaggcggattctggaccttggaggaggtaaagcccaccagaatgtgtcggtggcttggatgtggggtgtgagaggaaccagagattctgcctaggtttcttcttgggcaagtgaacacgtggagtccacgtaggctgtgttcggtccgagatgccttctagacatgcaggatgtcaaggaggcagctggagagatgggtctggagctcacagcaagtccaggctagaggtagaaacgtgagagccccacggctggggaagattgccatgggattggagatgagctccaaggacagccctggcagtctggatggaagagcttgggaagatgctcagaaaccacaaagtggctggtgcggtgggaggaaaaccagagtgtatgctgtcctagaagcaaaagaagaaagtgtttcagtgtttctaggagcaggaagtgatcaacagccttagatcctccttttaggccaagtaacatgaggactaagaattgaccactggatttagcaatgcagaggtccttgtggcccttgatgtcggcagatgagggcagtgtggtccagagatgaggcttggggctgagatgcagccccgctgcctggtccagctcctccctcatccaggca

SEQ ID NO: 21183 - DNA, 999 bp, Artificial sequence
  DNA replication origin
tttcctccccatacccccagacctgtgcttgcccggggagagtcagggctctcctgtcagctgggtcccctcccagccccgggaggccgccactggagccctgcctcttcctggcagggagcatcgagtacagctgtccggcctccaacgagtgtgagatcaccaagcggagacgcaaggcctgccaggcctgccgcttcaccaagtgcctgcgggtgggcatgctcaaggagggtgagcgctgggcaggggctgggcgagggctgggggagtcggggacccgggccaggtgggggtgaggcctgggagttctggtgagtggactcggggaggacagctctggagagcaagccccaccctgcccacagcaccacagtcacagtcctatctgtcccacaattcaaggagtgcgcctggaccgcgtccggggtgggcggcagaagtacaagcggcggccggaggtggacccactgcccttcccgggccccttccctgctgggcccctggcagtcgctggaggcccccggaagacaggtgagagcactgtgggtacctggggctacgaaaccggaggcctatgtgtggcatcatagttaccttgggcactgggacctgtatttccccttcgtctcttcactcactcatttccccaagacatgtgaaactgccttttcctgcatcaggaaaagtagtagaactgggaacagggacgattttccaacactcacagcctgtccacaaacacacgggctttccctgggagacagttagcgctcttccctggagggaagtcactggacagctgctactgaggaaggccacagggggagccactgtgggaagatgcttgacccctgaggcctgacagattcgagtgctcctgactcttgtcctctaattgtcacagcagccccagtgaatgcactggtgtctcatctgctggtggttgagcctgagaagctctatgccatgcctgaccccgcaggccctgatgggcac

SEQ ID NO: 21184 - DNA, 984 bp, Artificial sequence
  DNA replication origin
caggaggttcctacggcgcacgcccagcttttttttgccacaaattcttcgtaagatgcaaatcatatgcaaaatagctgcaatgcaggagctctcgttgaatgcaaaataaacacattttactcctacacaggcgcctaacaccgtcgtcctctgtatcccactttcggttaaggggcagaaataccgccctatctgtaaattaggcccatggaagccgagccgcacctcattcctatatgcaaattagctgctccagtgccgaaagctccgccccatttgtagttgcgtcggctgtccagcacccagtgcaaacgaggcgtgggtcccggaagctctgttctgcgggtggccgctcgcgcctgcgcagtggaggcggcccaggcccgccttccgcagggtgtcgccgctgtgccgctagcggtgccccgcctgctgcggtggcaccagccaggaggcggagtggaagtggccgtggggcgggtatgggactagctggcgtgtgcgccctgagacgctcagcgggctatatactcgtcggtggggccggcggtcagtctgcggcagcggcagcaagacggtacagtgaaggagagtgggcgtctggcggggtccgcagtttcagcagagccgctgcagccatggccccaatcaaggtgaccgctggcccggccgggcctgacatcccccactacccccatggcaatccccgtcccgctagtctgagagtatcgctttatttcctgcctgccagacccctcccctccgcccgcccggctcatcccttcagaaggccctcgtggctgcccacctttctcgccaatcgtgggggcctcacctcccgggacagtcccgaggcattgtgttttttgttttttgtttttttttgagacggagtctttctgtgtcgcccaggctggagtgcagtgacgcaatctctgctcactgcagcctccgcctcccgggttcaagcgattctactgc

SEQ ID NO: 21185 - DNA, 1092 bp, Artificial sequence
  DNA replication origin
accgcgcccagctctacccagctctacttgttttgtgatggcactgaaatgctttttaggagtcctatcaggactatgtggaggacttaagagcaacacaaaagatcccaggtcctgatcttcagaaggggaagggcctcaccttggaacatccaggggtgaaggccccaggaactccaaacagcacacccttcttgcccttgaacagctctgccaggttcaccttgttccctggctccccttcaaacacctccactgctgggatggcatctcccacctagaaggaaggactccagggtaaggggggtgagggagccggggcaaaccagaggcaggaaggtgaacagagagcctggcagctgtgcctgcaggaaccggggctgaaacccagcaggatactccagccctgtcagtttccaagggccctccctgcccgctcccactgggttaccccatatcctccaagtttcaaggtggccctgctcctcttaaggggccattggtgacaacagagaaagggagggaaggtttccccatgtgtcgcaaagggttgcataacatgctgtctaggttacaggaaaggagtggaataaaatggacaggggctagagggctgtatttgggggtgaggaggagtccctgacaacatggagggagaggatcttggccaggtctgagggtcccaccctcaggaggaggaagaggaagggcagcggcaggtggaacgttgggggagggtgtccaggcccctacacccaggaggtgtagaacaaaagaaggaatcttttgaagggggaaggatccatccccagagtacttgagggcttcatgggaccagagtgggtagggagagagagtcagaggtgagggcctctgaggagcccaaaggttgagagcaggatgaagtagaaagggaatggggtctcacaaggtttgggaggagaagggggaaggtccaaggccctggggacggttccaggaagtgagtgaaagacagaaaggtgggaattcgccatggggggaggggaggtcatggagtgggatggggtaagcccccgcgggggcgctaagggacagctgtttcagaagata

SEQ ID NO: 21186 - DNA, 1647 bp, Artificial sequence
  DNA replication origin
aaactcaccacgcaaggcccagagcccttttgaggccctcgaaggtcccaggctggggtcatcctctccagtttcagtttgagaaaacaaggcccagagaggtgaagggctgttcggtcattgcccatggagccaggggagctgtgggccttccgccgccaacctctgggctagccctgcagagatgctaggaggatgcagggaggtgaggtgggggctgaggtaggactcagactgcccaggcccgcctgcacccggaaggaggaagctgcacagggtgtctgtggctggccccgggatcccccactcggggacttcctcttcctctcagggcaggtgcagctgccacagtgagacgggcaccccgacccgggcatggaggggggcaaggggcccaggctcagagacttcctgagtgggagtctggctacctgggtgagggggcaggtggcagcgggttggggaggggaagtgagccccagccaggggctggtgttggcgctggccgggggagggtgaggcagaaccaggccggaggggagggctgggttcaaatgtgggggatggagatatggtgtggggggctgtggtgagggaagaggggacagaggcactcagaggacgggtgagaaggggtgcttgggctcactggggcaggtcggaggggctcagggttcactctgctggtcggctgacccctctgggctcctcacaggcgctgggactggccgggctggtcggggaggcggaggactcggagggggaagaagaggaagaggaggaagagccgcccctttggttggagaagagattcctgcgcctcagcgatggggccctgctcctccgggtgctgggcatcatgtaaggggcatcgggccggggcggtggcggggaaggatctgagaggaggggaagcgggtgggcggagcctgatgctcagtgggcggggcctgagggacggtgggcgaggcctgttgacgggaggcgggtcctcgagcccacctccggctcatagtgcccccagctcccgagggggacctcggatgctcagaggccttgacggacctgctgcctggcgagtgtggaacctgaaccacctgtggggccgactgagggacttctaccaggtaaggggtctcgagggaaaggcggagacaggaggggaagaggagccccttcgggaaggcgcctcatatagtctgcctctctgcctccaggaggagctgcagctgctgatcctgtcgccacccccagacctccagacattgggatttgaccctctctcaggtgctctccccacccacaccctcctgcctctgcccccgcactactctaccttccccgccccagttaaccccttgtggcatgtgccttgcagaagaagcggtggagcagctggaaggcgttcttcggctactgttgggagcgtcagtacaggtgagccggcggtgggaaggaaaggttagggtcgagctttggcggtagaggagggagatcctgcaccagctccccttcctgtctcccctcagtgtgagcaccgggaactcttcatccgccacatccagggcctcagtctcgaggtccagagcgagctggccgctgccatccaggaggtactgagacggttcggcagcccagactggtatg

SEQ ID NO: 21187 - DNA, 775 bp, Artificial sequence
  DNA replication origin
cctgcctctgcccccgcactactctaccttccccgccccagttaaccccttgtggcatgtgccttgcagaagaagcggtggagcagctggaaggcgttcttcggctactgttgggagcgtcagtacaggtgagccggcggtgggaaggaaaggttagggtcgagctttggcggtagaggagggagatcctgcaccagctccccttcctgtctcccctcagtgtgagcaccgggaactcttcatccgccacatccagggcctcagtctcgaggtccagagcgagctggccgctgccatccaggaggtactgagacggttcggcagcccagactggtatggcacctgggacgcccttgccacaccgcggcttccactgaactgctcttcctgcgccccaggtgacccagccgggggccggcgtggtgctggcactgtctgggccagatcctggggagctggcacctgccgagctggagatgctgtcccggagcctgatggggacactgtcgaagctggcacgggagcgtgacctgggggcccaggtaggggcagcaggggcatcgtggactcaggttggggaactggaggaccatcagggagccggttgtgcaagggagatggaagtttggggcccaggcatggggttgtggtctgaggtcttgggccatcagtgatgtcacaaccagatggcccaagaccccagaccacaaccccatgtctggtgttgtggttgggggtcgatgtgcagaggcattggataagttagtcctgaccc

SEQ ID NO: 21188 - DNA, 822 bp, Artificial sequence
  DNA replication origin
tggcacctgccgagctggagatgctgtcccggagcctgatggggacactgtcgaagctggcacgggagcgtgacctgggggcccaggtaggggcagcaggggcatcgtggactcaggttggggaactggaggaccatcagggagccggttgtgcaagggagatggaagtttggggcccaggcatggggttgtggtctgaggtcttgggccatcagtgatgtcacaaccagatggcccaagaccccagaccacaaccccatgtctggtgttgtggttgggggtcgatgtgcagaggcattggataagttagtcctgacccttgacccctgacctacagcggctggctgaactgctgctggagcgagaacccctctgcttgaggcctgaggctccctctagggctcccgccgagggcccctcgcaccatctggccctgcagctggccaacgccaaggctcagctgcggcgtctgcggcaggagctgtgagtgtgcgcagcctgggaaggggactgagtggagaggggcagattaagcctggatgggaccctagccctggtggctacgggaggggtcaggcctgggaagggctgggggttgtgggcccccagaccctccctagactccccttccctccagggaggagaaggccgagctgctgctagactcccaggccgaggtgcagggtttggaggccgaaataagaaggctccgccaggaggtgcgctcacatgctccccgccaccgcggcattccctaacctccccgcacccggtcccattgcctccctcccaacccggctccttcccgtccctaatccctct

SEQ ID NO: 21189 - DNA, 1894 bp, Artificial sequence
  DNA replication origin
ccggctccttcccgtccctaatccctctggcccgcggctggctgttcccagctccacaccgtctggcccaggcccaggcgctgtcgggacaggccaagcgggccgagctgtaccgcgaggaggcagaggcgctgcgggagcgggccggccgcctgccccgcctgcaggaggagctgaggcgctgccgcgagcggctgcaggcggctgaggcctacaagagtcagctggaggtgaggcggagacggagccgcggggcggggcgtgcgcgagggggcgggccaggaggaggggcgagattgggtcccgagggcagagaggcaggttctctggaggggacagtcacaggtggagaaatgggtgaggacaaattcagggaggtggcgtctgggaaagggcctccagaggatggggcaggtgtaggggagtgggggggctgtgtaagtgatgcagccttggaaggagggctgttcccgggggggaggggcggggcatggacagaagggcggggcctgcacaaagggcggggccaggggcgagggagaaagtacctgaagagatcttggtgggaagaagatggaagggagtggcggggcctagagactgatggggtgcagggtgggggagggaggcagggtctgtgacaggctgaggggaaggagtttgggaccctcaggcgctggagtgcatgggggctgcgtggctaccggttctccctgctctcccaccaggaggagcgggtgctctcgggggtgctggaggcgtccaaggcgctgctggaagagcagctggaggctgcccgagagcgctgcgcccggctgcacgagacccagcgcgagaacctgctgctgcgaacccggctgggcgaggcccatgcggtaaggtagccagagtgatcccacttgggttgccccgtcaccccatgaccccattgattccctagtggtccctagtgattcttgcaacctctgctcttggtgacctctagtgaccctccgacctacacactcggcctggccatggtgtggagggcttgtctgacccttccctcacccccaggagctggactctctgcggcatcaggtggaccagctggctgaggagaatgtggagctggagctggagcttcagcggagcttggagccacctccaggatcccctggggagggtgagggaccccactggaagggctggggtgggggcttcctatgctttccagcagtgtactggggagagcctctgactccctcccttctcccaagcctctggggtgtgtatgtgaggagccaggcagtaaaggaggggtcctgacctcatctctcatcctcagcacccctagcaggagcggccccctcgctgcaagatgaggtgagggaggcagaggctgggcggcttcggacccttgagagggagaaccgggagcttcgggggctgcttcaggtgcttcaggggcagccagggggccaggtaagtcccctcccccagggtcctggccggcccttcccctagtccctccctgggcctgactgtccctctcgtatgccctcagcaccccctgctggaggcaccgagagaggaccctgttcttccagtgctggaggaggctccccagactcctgtggccttcgaccacagccctcagggcttggttcagaaggcaagggatggaggcccccaggccttggacttggctcccccggcattagactcagtgctcgaggcatcagctgagtgtccccaggcacctgattcagacccacaggaggcagagagtccccttcaggcagctgccatggacccccaggcctcagactggtccccgcaagagtcaggctctcctgtggagacacaggagtccccggagaaggctggccgtagatcctctctccagagccct

SEQ ID NO: 21190 - DNA, 868 bp, Artificial sequence
  DNA replication origin
tccctccctgggcctgactgtccctctcgtatgccctcagcaccccctgctggaggcaccgagagaggaccctgttcttccagtgctggaggaggctccccagactcctgtggccttcgaccacagccctcagggcttggttcagaaggcaagggatggaggcccccaggccttggacttggctcccccggcattagactcagtgctcgaggcatcagctgagtgtccccaggcacctgattcagacccacaggaggcagagagtccccttcaggcagctgccatggacccccaggcctcagactggtccccgcaagagtcaggctctcctgtggagacacaggagtccccggagaaggctggccgtagatcctctctccagagccctgcctctgtggccccacctcagggtccagggaccaaaattcaggccccgcagttgctgggaggagagacagagggaagagaggctccccaaggcgagttggtgcctgaggcctgggggttgagacaggagggccctgagcacaagccagggccttcggagcccagctctgtgcagctggaggagcaggagggcccaaaccagggcctggacctggccacgggacaagcagaggccagagagcatgaccagaggctggaagggacggtcagggacccagcctggcaaaaaccacagcagaagtcagaaggggctcttgaggtccaggtctgggaaggcccaatcccaggggagagcctggccagtggtgtcgcagagcaggaggccctcagggaggaggtggcacagttgaggagaaaggctgaggcccttggagatgagctggaagcccaggcccgcaagctggaggcccaaaacacggag

SEQ ID NO: 21191 - DNA, 1937 bp, Artificial sequence
  DNA replication origin
ggggttgagacaggagggccctgagcacaagccagggccttcggagcccagctctgtgcagctggaggagcaggagggcccaaaccagggcctggacctggccacgggacaagcagaggccagagagcatgaccagaggctggaagggacggtcagggacccagcctggcaaaaaccacagcagaagtcagaaggggctcttgaggtccaggtctgggaaggcccaatcccaggggagagcctggccagtggtgtcgcagagcaggaggccctcagggaggaggtggcacagttgaggagaaaggctgaggcccttggagatgagctggaagcccaggcccgcaagctggaggcccaaaacacggaggctgcccgcctctccaaggagctggcccaagcgcgaagggcagaggccgaggcccaccgggaggcagaggcccaggcctgggagcaagcccggctgcgggaggcagtggaggctgctggccaggagctggagtctgcgtcccaggaacgggaggcgctggtggaggcgctggcagcagcgggccgggagcggaggcagtgggagcgtgaggggtccaggctgcgggcccagtcggaggccgccgaggaacggatgcaggtgctggagagcgagggccgccagcacttggaggaggctgagagggagcgccgggagaaggaggccctccaggcggtaggtcaggttggggctcaccgctggggttgggaagcagagttccaggctgttgggagttactgattccatcagcagctgttcagtgggtgcccagcactgagctggggctggagatagaaaggccaagtccacccctgccttccaaaggtgtgcctggcctggggcacagagccatgtccactgtgtgatgggggcgctgtgggagggggtgggactgcctagtacacatcttggctctctggctgcagcagtagactcacctccaccccaggcatccttctgtaaaacaggggtactattcctggccacctggggtggtcttaggaggaccttgggagacagtagctgtaaaggtctggttcatgctggcaagggtatgttgtaagtgttcaagcactggttattcagagccaagtgctacgagagcccatgggagggtgagctgatgcccaagtggaggcaaggaggctttaggaggagtgaccataatgtcactaggtggggaggacattttgtccagagggaatggcatgtgcaaagacaaaggcattaaagacgctcaggggctgggtgtggtggctcacacctgtaatcccagcactttgggaggccgaggtgggtggattacttgaggtcaggagttctataccagcctggccaacatggtgaaaccctgcctccattaaaaatacaaaaatcagccaggcgtggtggcaggcacctgtaatctgttacttgggaggatgaggcaggagaattgcttgaacccggaaggcggaggttgcagtgagctgagattgtgccactatactccagcctgggcgacagagcgagactgtctcaaaacaaacaaacaccatccaatgaaacaacaacaaaaaaagaatgctcagggcccaggaggaagggatgatgagggccagctttgaatgtgttggtcctccctccccaggcagggaaagccagggtagaactgtgtggggctgcgcttgaggagggtcaccttggtggacaggggagcttggggctatcaggacgcagtagccatggtgtaagtggcagaggaagctgactagggaggcatgggagtgggtgtgagaggaggactggacacttttttctttttgagacagagtctccctctgttgcccagtctggagtgcagtggggtgatcttggttcattgcaacctccgcctctcaggttcaagagattctcccacctcagcctcctg

SEQ ID NO: 21192 - DNA, 1039 bp, Artificial sequence
  DNA replication origin
gtcccccagaggaagccattgggcagaatgccatgccaggtgcccaccactcccaataggtgagccccacggggagcccaacccagaagtgtggggagcacagctaccccagagggcacagcagtggccggggcatcacagagcggaggtggaggtgcttcctgatggggagtcagacctgctgaggggagtcttctctggcagatagggggtgccaggggaggagctgggcatttggtgatgctcaccggccctgcagctcccggtgggccagctccagtgcccgcatgttggccttgaggtctcggtgccgcaccagcagtccctctagctcggcctcctgccgccgctgcagctgtgccagggccttgtggtcccgaagcagggcctgctgctgcccgcgggtctcctcctgggactgccgtgccgcccgcacctcctcctccagcacctccagcttccggtgcagctcctggccctgaatctccagcacagacttctcggcctaggatggaggagggaagcaggggctgctggggaggaacccctggctggaaatcgagtgagaggcggggggctaagggcagacggtagggcccaagacaatgagagagttgtggaggaggcaaagggctgggggcacagcaggcagtacaagccccagccagaggctgatggtgagcaggggagaggcggcagaggctggctgggccaggctgtccggaaggggcacagggcagaatgggactaatggcgccctgtggaggggagggctgggacagtgagagcgcagggcgacatgggtgtagatgtgggggctggcggcaggtaggaggagatagtggcagggaggatggtgcaaaatggtggctggggtcagaggacaaggataaatgagactggggaagaggtggggcagctggctgggagctgggatagaaaaaggccacaggatgatccaaaaggagcaggagggggcagtacatgggcagggatgggcacccgggccaccacccacctgcaggcggctgctgtgctc

SEQ ID NO: 21193 - DNA, 910 bp, Artificial sequence
  DNA replication origin
ccagatcctgggctccgctgcggatggggcaggctgggtcggggacagcacaggcaggagggaggtgtgggccaagggtgaccctgtaggacccagggaaaagagcccctggtggcatcagggcagggggggcaggcctcagggaaggccaatggggtcacgcatgcaggccaggcagtgaggcaggtgccaaggtgggggacagaggatgtggggcagggaccatcctggccacctgacccccagacccacctgtcccatctgcctccctgccctcaggaagctccgtctccggggggccccccaggctctcggtgctgccagccccatcggcccccaggcgcagccccccaggggggcccccctcccgccggggccgcatcagcctcttcaccttgtctgccagccagctgcccttcctgggggcaagagggcacaagagggggtcaggacagggaggagggagggagcaaagggtgtcctggggatgtcaaaggccaggttgaccttcatggggcctggacctgagctgggcctggggtcagaggccagggcaggggcagaggttagcaggatgtccagcctgagggaggtgacagggctgctcacttggtccggggcaggggcacaggctccagcacgcggtattggtccatgatcttctccacgagcttctgcttctcgcggcgcagggcattaagctggtccctggcaggagtgagaagggagaggtgggtgtgaggcccagggaggccgaggcagtagcaaggcacaagctgcagcgaggacgcactggtcccgtgccgcagattggactgacctggaaggtcagctccaaccctgtccctaggccctcactaagggctctccccaggaacgcccaaaggggatgcaggccccaccccgctcc

SEQ ID NO: 21194 - DNA, 1489 bp, Artificial sequence
  DNA replication origin
ctctcggttggcatctgtttcgtgttcctgcagggtctcagcggagttctcccatcccacaccaggtcctgggaggcacaaggcaaccactgggcccagggccagtgcggaagtggacagagcttgcaggagacacaggggacaagaaggaagcctcctcccccaaggagctggtgggtccacaaagagttggggggctggctggtacagtgacccttgtccctcacctttgctgtgggagacgggcgcccccagggggcctggatggcgctgtcggaatcgttgcctaggggtgtccccagggctgaatgactcagagcttcgccccaccgggaaccttgagctgagtttccgccgctgcccgcctgccaaggtctcatcccgcaggcagagggagctctgggcccggcgcatgggtgccggggaaggggaccctgcaagaggtacatgcagggagggggtgagaggaggggacgggagctgaggctcctgtagggaggaggtcagagaatggggggaggctgaggctcacgcagggagggggtcagacaaggggagggggtgctgaggctcctgcaggaaggaggtcagagaagggaagtgggggctgaggctcatgcacggagagggccagaggaggggagagggagctgaggctcatgcagggagggggtcagacgaggggagcgggggggctgaggctcctgcagggaggaggtcagagaagggaagtgggggctgaggctcatgcagggagggggtcagaggaggggaggaggctgaggctcatgcagggagagggtcagaggagggggggaggctgaggcttatgcagggagggggtcagaggaagggaacggggactgagtctcatgcagggagggggtcagaagagggggctgaggttcatgcaggggaggggtcagagggggggggcggaggctcatgcagggagggggtcagaggaacagggccctggatggagtagaggggccagtgggtgaagctgcccagggccagggaggggaggtgcagaggtgggggagaagccaggcaaatgagtggggcagcaggacactggccctgtgctggccttcatactaactcactgcatgaccttgggcaaaagcttcccctcccggggcctcagtctcctcatctgcagtctaggaacaatgacctctccctagagtccactgcacctcccagatcctgggctccgctgcggatggggcaggctgggtcggggacagcacaggcaggagggaggtgtgggccaagggtgaccctgtaggacccagggaaaagagcccctggtggcatcagggcagggggggcaggcctcagggaaggccaatggggtcacgcatgcaggccaggcagtgaggcaggtgccaaggtgggggacagaggatgtggggcagggaccatcctggccacctgacccccagacccacctgtcccatctgcctccctgccctcaggaagc

SEQ ID NO: 21195 - DNA, 885 bp, Artificial sequence
  DNA replication origin
ctcgaactcctgacctcaggtgatccgcccgcttcagcctcccaaagtgctgggattataggtgtgagccacccagccagacgtgatttttttcatagtaagtctttggcagtttcggaggccaaggcaggcagatcacttgaggccagaagttagagaccagcctagccaaaatggtgaaatcccgtctctactaaaactacaaaaattagccaggcatggtgtcccatgcctgtaatcccacctactcagggggctgaggcaggagaatcgcttgaacctgggaggcagagggtgcagtgagccaagatcacgccattgcactccagcgttggtgacagagtgagactgtctcaaaaacaaaaaacaaaaaacaaaaaaacatagtaggtctttgaagcacgtcacaggccaaccccatctcacctacttagctccgccctgggcagctcagccctagacccggctggaccatcaggaggcgctaatgctctgggaagaaaggagagcaggggaggggtcaggagctcaggagctctgggcaggctggttggagttttagtaactggggtgctggggtgggcctcagagaggatgtgaaattggagcaaagacttggaggggagagtttgtcgtgtggacatacctgagaacagcattctgggcagagggaaccgctgagggaacagcaggcgtggtgcagctggaagcggggggtattggcaggtcgggggtgggcagaaggtgctcgagcctgtgggcctcctgggactctgggagtcctcctgagggaagcagatctcagctgagcctttccctctaggccctgaggtacaggaaccggagaaacgtcccctcaccccatccctcagccagtgacaccgt

SEQ ID NO: 21196 - DNA, 2104 bp, Artificial sequence
  DNA replication origin
aaattggagcaaagacttggaggggagagtttgtcgtgtggacatacctgagaacagcattctgggcagagggaaccgctgagggaacagcaggcgtggtgcagctggaagcggggggtattggcaggtcgggggtgggcagaaggtgctcgagcctgtgggcctcctgggactctgggagtcctcctgagggaagcagatctcagctgagcctttccctctaggccctgaggtacaggaaccggagaaacgtcccctcaccccatccctcagccagtgacaccgtgggaacagcaggcttgggagtgcagccttctcggcactggagtgtcagcggaggccccaggcagcccaagagctcagggagccagggaccccaaggggagtccttggacaaggaggcctgggccctgagatcctccacggtcagcgccggggcccggagatggagctgggacgagtgtgtggacaggggggatggctggcccccacgagcagctccaggctggagttctggttcttccaggtggctcccgctgaggcagcggtctctgggggatcccccagctgaaggaggctggcaggagttggcaagagaaccccctgccctgtccaggtgggaagctgagtcccagtgctgggggactgtggcctgggctgatcttgagccttaactggacatgaggggcatgagaataaagctgaactgcagcctcctgagtcttgctctgtctgttggccgcactgggtacctcagggcaccaggacacatgccgccccagtcctgctggttggtgggggtctgtgggcagagggcccctgcctggacagggcagcacaggcctttctccagggtcttggccagtccggccggccaaagcccggatgtcctggtgaggtggagaggggatgacatcctgggtagccagcagggattggggtctaagatctgggctcaggggtgtggggcagtgaagcccctgttgccccgcccccaccctctcccagggcactgtcttctctctgttcacatcctcctcctactcatctcccctccctccttgaggttgagccccctccccagggagttctcagcctggcggggcatcacttaatgccaggggttgccaggagaggtgggagggacgctggctctctgaccagggcctctagcctgatgcctgagaggcggggcaattcggctggggtgcaggatgtgagtcagggtacctggggccacccaggggagggtggagctgcccagggctgagataaggcagcctgaacttggggggtgcagagctgggagggacggtccgtccggcctcccaggtgtgacctgcagcagcttgagttcctcctcctctcagccagggcttcacaggacaggggcgtggggtggacaccctggcctctccagctggcagaggagctgagagcccctcccaccggcctcagggtgtggggcctcatggctgtcccactctgctaggtggccccattggtggtcaggaagggaaaggcaggaagaagacggagcaggggctcaggaggaccagtcagcaggggccctgggcctcatggggagagggggcagccccgtgtggcactgacatctcttcttgaggcctgctcagggctctaagctgggtactgcaccaggctaggagacaacaggagcagaacacgtgaggtgcgcatggcacctggtgggctctgcacggtgactgggggctgaagtgcttctgcaggcacccccgacagaaagctggtcagaaaactggccactcctctccttgccatggggtcccaggccgggctccagccccctcttggtgatgaggctcctccttgcaaaggccagtcctctggggagaggggccctgctggccacccccaggacgatggagtggggtgggctccactgcctgagagttgggtgacttccaggatccagaccccctctcagcctgcccagcaccaggcacctcgtcccccaccttggggcacagactcctaatgtcctccagccactggctgcagccggcattcccgggcagattcctggcttggggactaatgccccagaggctccaggttaccc

SEQ ID NO: 21197 - DNA, 1423 bp, Artificial sequence
  DNA replication origin
gctcaccactggccccccaggaagcccagggggaagcctgaggctgccctgcgtgcagattccttccaaggcacagacccagtttccatagcaacagcctgcggccaggtcttcacccaccttgtgcaggtgttccagggccagcacgatctcacccccatacacgcgcacctcagcctccttgaagtactggcgctggtagaggtgggtgaacatctccccgccgctcacatagtctgggaggtgcagtggaagtcaggaagcagccccgtcaggtggcctcgcctgcccccagccaccccaaccccgttgggatgtggtgtgcgctcacccaggatgaggtgcagcttggcatccgtctggaaagcgtagtgcagcgtgaccaggaagggcgcctggcgcaccagctccagcaccgagcgctcggtgcgcgtgtgctcttgcgtcttggcgcgctgcaccagcgccgccttgcgcagcaccttcatggcgtacagcttccccgcgtcgtgcccgcccgccttccgcaccaggaacaccttgccgtaggctgtgggagcagcgagtgggtggagggtgggctgtgagcgggagattggtgcaggcttggggggtgggggcgatgccaacccaggagggtgtgcaaatgaggcgaaggagctggggcaacaggcaggtgtgcaaaaagctggcagagccttctaaggaaagggtgtgcacaccccgggagggtgcccagcaaaaccagggaaaggatgtgcaaaccaggctggggagcatgcatctccagggggcctgctgcgaggcatgggggcggggcatatgcaaacctgcgagagatcagatggatgtgaaaagatgccagtgcaaggaagggaggcagaggtgtgcacctggctggggaagggatgcgcaaaccagcgctggggcatttgcaaaatgtgggagggggatcccatattggaagaaagggaggagctatgcaaatcacttgagaggggcgccagtccccctccccagggtgttggcaaatccaggggggtatgcacgcacaggaccgtggagggaggagtgatgtcaatgtggagtgccctggaagtgggcatgcaaactctggcgaggcagggcggggcaggcaaggcaggctgtgccgggaaagggtggggggcctgctcagtggcctggcccaggcccaagagtgagcaggcaggaggtcaggggcaccgcgcctgggacgcctgcccggtggatgggggtcctcacctcccgtgcccagcaccttgagcagctcgaagttctccacgctcaccttctcctcgtgcccggtcaggttggctgtgggcacagggggcgaatgagcccagccggtccatgacccgtcccggcctgccccgggcagccgcagtcaggccccacacccacc

SEQ ID NO: 21198 - DNA, 1892 bp, Artificial sequence
  DNA replication origin
aggccccctggagatgcatgctccccagcctggtttgcacatcctttccctggttttgctgggcaccctcccggggtgtgcacaccctttccttagaaggctctgccagctttttgcacacctgcctgttgccccagctccttcgcctcatttgcacaccctcctgggttggcatcgcccccaccccccaagcctgcaccaatctcccgctcacagcccaccctccacccactcgctgctcccacagcctacggcaaggtgttcctggtgcggaaggcgggcgggcacgacgcggggaagctgtacgccatgaaggtgctgcgcaaggcggcgctggtgcagcgcgccaagacgcaagagcacacgcgcaccgagcgctcggtgctggagctggtgcgccaggcgcccttcctggtcacgctgcactacgctttccagacggatgccaagctgcacctcatcctgggtgagcgcacaccacatcccaacggggttggggtggctgggggcaggcgaggccacctgacggggctgcttcctgacttccactgcacctcccagactatgtgagcggcggggagatgttcacccacctctaccagcgccagtacttcaaggaggctgaggtgcgcgtgtatgggggtgagatcgtgctggccctggaacacctgcacaaggtgggtgaagacctggccgcaggctgttgctatggaaactgggtctgtgccttggaaggaatctgcacgcagggcagcctcaggcttccccctgggcttcctggggggccagtggtgagctgggtgggaattggagctgcttcccctggaccccttgcaggaagcctcaacgttgcctggtggggtcccctcccctggcacctcctcgaaggggctttcctctttcagggaactcggggctgcgttcacagaacttcctcaaatggaaacctcacggcctggctcctaaggcctccttgaaatggagctcttcacacagactttcctctctctgggaccttggggcctgatccacggggccctccttctttgttttatatcttaaatggcctttcttattcagtggctctgccctggagaccccctctacaggcagatgactttctctggggggtctccttatcctgagcagggccaggagctggaggagctggggagggtttcggggaggaagcctcagcacccctcttgctcctaccagctcggcatcatttaccgagacctgaaactggagaatgtgctgctggactccgagggccacattgtcctcacggacttcgggctgagcaaggagttcctgacggaggaggtgagtggaggccacctctgcctgcagtgccccattcaatccttctccttcctgcctcttcctgctctgggcctgcattctggggctgcagaagtgaatagctccaagaagtttccacagctcagctctccaacctcacaagttgagcgagtcttactctgggccttgtggggcactggggcacaggagaggtttcgacatctaagcaggacctcttgccctcccagaaagagcggaccttctccttctgtggcaccatcgagtacatggcccccgaaatcatccgtagcaagacggggcatggcaaggtaggttggcagggaagtggggctgggggaggtggaaaggtggggtgtgaggcaggggagatgcaggccctcaccccggctccacccggcaggctgtggactggtggagcctgggcatcttgctcttcgagctgctgacgggggcctcgcccttcaccctggagggcgagaggaacacgcaggctgaggtgtctcggtgagtagggctggacgtggagggcggccagagggctgcagggcctgcctgggcagggctgt

SEQ ID NO: 21199 - DNA, 1176 bp, Artificial sequence
  DNA replication origin
aggccccgcccaattcacccctagatcccgcccatagtgcccccaagccccgccgcctgccccttttctctccgccctcccctggccggaagccatcacctggtcgtgatgcacctcgtgcagattcaccacgttggggtgtgactggcacaggcgcagggcagccacttcgcgctgcgtgttcgcctccagcctgggggacggagcagaaggagttacggtcgccgcgcttcggccccgcccccgggacagcgctctgccacccccacccctgcccgcgcctgggccctcccacctgcgactgaggatcttgactgcgaactcctggccgctctggcgctggcggcagcggcgacacacagaaaagctgccctggcccagcgcaggctcccgcaggtccagctcgtactgctggaagaagggcgagtcctggaggcgaaggcgaaggcgaaggcgaaggcggcgcgtcagaggtcccacctggtagccccgcggccccgccacgccccatgtcggagaggcttaggaccttgctgagctcacgctgcgggcgccagttggatctaggcctagagtccccgggcctaggcctctcctaaaaccaatttccccccaacccagcccagcccagcccacctgcatcatagcgctcctggccaccgctgcccgacctggccggtctccagcaccaggcgcttccagcccatcggtcatcaccgcgttgttgtggtcaaagagaatggagggtgccacaaaggagtatccctgcagggcgggagtccggggaatgggcatgggcatgggggttgggggtgcgggtgaggagactctggtggggaaccaggcaaaggcaagaccctggacaagggggcagtggggggtgttccagttgcattctggtacacacaggatgtgtggacactttttattccacctggttttataatcacttggggccatgtctgtccccaccagcctgtgaccccaactttctcatcagagtgaccacttattcctccccaggtgccaagggctgaaggcactgaaaggaccaatgaatatattgaaagtgtggcctgagttcacgcttagcttatgagaatccaactctatccgctgaggaaaaaaaacttattcctccctttcaagccggactttggcttcttctgcaagggg

SEQ ID NO: 21200 - DNA, 1142 bp, Artificial sequence
  DNA replication origin
aagcgcctggtgctggagaccggccaggtcgggcagcggtggccaggagcgctatgatgcaggtgggctgggctgggctgggttggggggaaattggttttaggagaggcctaggcccggggactctaggcctagatccaactggcgcccgcagcgtgagctcagcaaggtcctaagcctctccgacatggggcgtggcggggccgcggggctaccaggtgggacctctgacgcgccgccttcgccttcgccttcgccttcgcctccaggactcgcccttcttccagcagtacgagctggacctgcgggagcctgcgctgggccagggcagcttttctgtgtgtcgccgctgccgccagcgccagagcggccaggagttcgcagtcaagatcctcagtcgcaggtgggagggcccaggcgcgggcaggggtgggggtggcagagcgctgtcccgggggcggggccgaagcgcggcgaccgtaactccttctgctccgtcccccaggctggaggcgaacacgcagcgcgaagtggctgccctgcgcctgtgccagtcacaccccaacgtggtgaatctgcacgaggtgcatcacgaccaggtgatggcttccggccaggggagggcggagagaaaaggggcaggcggcggggcttgggggcactatgggcgggatctaggggtgaattgggcggggcctagcgtttgattcggggcccaaagggaccagggaggcgcagggagtggaatttgaggggagtagggcctgaggacgggaaggcggagctgaggatggacaagaaaagggactttggccgggcgcgatggctcacgcctgtgatcccagcactttgggaggtcgaggtgggcggatcacttgaagtcgggagttcgagaccagcctgggaacatggcgaaaccccgtctctacgaaaaatacaaaaattagccggacgcggtggcgtgcgcctgtaatcccagctacttgggaggctgaggcacgagaatcgcttgaacccggaaggcagaggttgcagtgagccgaggtggtgccactgcattccagcctgggcgacaaagcgagactgtctccaaaaaagtaacaaagaaagaaagaaagaaaaaggactttgaggagggggtt

SEQ ID NO: 21201 - DNA, 1245 bp, Artificial sequence
  DNA replication origin
ggggcctgggtggtgggagggggcttgccgccgtgggtgggtgttgaccttggcccgccacgccgcccgcagctgcacacgtacctggtcctggagctgctgcggggcggggagctgctggagcacatccgcaagaagcggcacttcagcgagtcggaagcaagccagatcctgcgcagcctcgtgtcggccgtgagcttcatgcacgaggaggcgggcgtggtgcaccgcgacctcaagccggaggtgggcgagctgcctcggcggcggggcggagcggtggcgccgggggctgcctctgaccactaccccgccgccctcgcagaacatcctgtacgccgacgacacgcccggggccccggtgaaaatcatcgacttcgggttcgcgcggttgcggccgcagagtcccggggtgcccatgcagacgccctgcttcacgctgcagtacgctgcccccgagctgctggcgcagcagggctacgacgagtcctgcgacctctggagcctgggcgtcattctggtatgggacgcggtccttgaggcggggtcagggtcgctcggacctggcgtcttcctgatgtgcagcagcacgagggaggggacaggggtcatcttggtgggggcggctgggtttcgtccgaagctgggatcggggtggttcaaatacagaggtggggtcgctctggtgctagagtcggagcatccgggtattgggggttagaagtcagggttcaccacgcgtgggtctcaggagtgcccctagtggggagggtgagtggttctgtgggagcggaggggtcagcctcggcaccccagcctgggccggcctcaccttcccctcaccctcctagtacatgatgctgtcggggcaggtccccttccagggggcctctggccagggcgggcagagccaggcggccgagatcatgtgcaaaatccgcgaggggcgcttctcccttgacggggaggcctggcagggtgtatccgaggaagccaaggagctggtccgaggtgcggagctggaggtcatagaccatggttggggagggggacgctgggacagggatggtcactgggccaggtgtcctggttggggatgggtaggggaggagagtggggctgttacgatctctttggggctcagcctttacgccaggctcctccccacacttccttgccccgcctccagggctcctgaccgtggaccccgccaagcggctgaagctcgagggactgcggggcagc

SEQ ID NO: 21202 - DNA, 828 bp, Artificial sequence
  DNA replication origin
caagcggctgaagctcgagggactgcggggcagctcgtggctgcaggacggcagcgcgcgctcctcgcccccgctccggacgcccgacgtgctcgagtcctctgggcccgcagtgcgctcgggtctcaacgccaccttcatggtaaggggcagggtctgttgaagggaaggggtgggcgaagcctcgagaggtggggtctggggaggcccggccatcggagcacagaaaggcgaggtgaggccgggcgcggtggctcacgcctgtaatcccagcgctttgggaggccgaggcgggcggatcacgaggtcaggggttcgagaccagcctgaacaacatggtgaaaccccgtctcttctaaaaagagaaaaattagccgggtgtggtggcgcgcgcctgtaatcccagctactcaggaggctgaggcaggagaatctcttgaacccaggaggcggaggttgcagtgagctgagattgcaccactgcactccagcctgggcgacagagggagactccgtcaaaaaaaaaaaaaaaaaaaaaaaaagggaggtgaaccgaatccggtggtcggtctggaggccaaggccctgtcggccttgacctaggcggctggaggcaaggtctgggaatggaggtcaaactagatctggaagccggggtcaggcgggggtgggggcactcaccctttcctttctgccaggcattcaaccggggcaagcgggagggcttcttcctgaagagcgtggagaatgcacccctggccaagcggcggaagcagaagctgcggagcgccaccgcctcccgccggggctcccctgcaccagccaacc

SEQ ID NO: 21203 - DNA, 1585 bp, Artificial sequence
  DNA replication origin
cgcctgtaatcccagctactcaggaggctgaggcaggagaatctcttgaacccaggaggcggaggttgcagtgagctgagattgcaccactgcactccagcctgggcgacagagggagactccgtcaaaaaaaaaaaaaaaaaaaaaaaaagggaggtgaaccgaatccggtggtcggtctggaggccaaggccctgtcggccttgacctaggcggctggaggcaaggtctgggaatggaggtcaaactagatctggaagccggggtcaggcgggggtgggggcactcaccctttcctttctgccaggcattcaaccggggcaagcgggagggcttcttcctgaagagcgtggagaatgcacccctggccaagcggcggaagcagaagctgcggagcgccaccgcctcccgccggggctcccctgcaccagccaacccgggccgagcccccgtcgcctccaaaggggccccccgccgagccaacggccccctgcccccctcctaatccccaccactgtgacccccttccctcataggggctgtgacctgggagcccggctcactcccggaggcctctgcctgcggctgacctgatccccaagggactgtcctttcctctcctaccccaccccactcccagacagagcagaagtatttttataagcagagaattttttatgtcttaccagatagagttgcagggaagggggggcctgctggggagtggggtttggggggccctctcccaggacactgcctcttctgggcagaaggcccctccagggggactgctccaacaggaaagagcccctcccccacttctaagcactgagttaggagtgctaactcctaaactgggaccccctaccctgttctcccctgaggccccgttcctgggaggggcacccctcaactgtcactttatggactgtctgtgcaattacgtccaccaaagacccgtgttgggggtactgaaggagaggccctgggggaccctctgaagcatttctgcctcactttatgtcatctgcttctcccctgttggggctaaggaaggagataggtggctcctaaaagaggaggccatcttctcacccaccccttcctctttggcacagctactcctggctgggggtggggccttgggggtctgggctgggcatccatggtcactgcctcagcccagccaggctgtgcctttgactttaaaataaaagtccacccagtgctgtgtgtggcatctgcgtgtcctcgttcgtgttgtgggtgtctagagcagagattctgggcagacaggctgctagcccgtggagtttggaacctcagtggggagggacaggcagactcttctgggcaagaagatattctttgttccttgacttttgctatgagcaggagggcgcaactctcatcctgggtgtatatccggacagctctgctgggtatcatttaggatattcttggttgtaaatacagctgctgcttgacttagggtggacctacatcccgataaacccaacctgaatagaaaatgctgaaagccgaaaatacatttaatgtctgcaacacagcagacggtgcctga

SEQ ID NO: 21204 - DNA, 1208 bp, Artificial sequence
  DNA replication origin
attcccccacaaaaggcagtttaccaaaaaattattaagagaacccaggaaaattgaggccagttcaggcttgctcaggaagggacccatgtccaggaaagagagagcgatgctcttccctcgctcccggtcccccttccctgggccaccggcctttcccttccggcatcagccagagccaagtgttctgaacactacccccgcccccacgaaaagtgaggaccagatggcgccccaccctctgaatacctctcagcacggagtgtgaatcgccaccgacctggcgtgtgtcagtagctgcctgggagcggccaggatgggcgtgggagcacactcttgtgtatgtgaatgtgtgcgtatgtgagtaaataagtgtgtcagtgtgagattgtgtgtgagcacctgtgtgtctatgtgagcgtgtgaagacgtgtgagtgaatatgaggatgctagggagcatgtgagtgcgaactcatgagtgcacgagtgtgtgggtgtatgggagtgtgtatgtgagcacgtgagtgtgagaatgtggatgagtgtgggtgtgtgtaagcacaagtgtgtgggtgtgtatgcaggtgtgtgctgtgaggattgtgtttgcatgtgtaagtgtgaatgtgtatgaatgtatgtgaacaaagcctgtgtgttttgtgtgatttgagtgtatgtgtgaacatgtgtgacagtgtggacatataagtgtgagtgtgaacaaagcctgagtatgttgtgattgtaagcatgtgacagtgtgtgtgcatgagtgtgtgaatgtgtgtaagaatgtgtcagtgtgtgtcagtgtatgtatgtgtgtaaatgtgtcaatgtgttgagtgtatgtatgtgtgttagtgtgtgtcagtgtggctgtgtcagtttgagtgtgagtgcacatgtgtgagcatgtgtgtgggtgtgagcgtgtgtgtgtgggtgtgtgtgtgagcatgtcaacgcgtgggtgtgagcgtgtgagtgtgggtgtgagcgtgtggacgtgtgtgggtgtgaacgcgtgtgagtgtgtgggtttgaacgtgtgtgtgggtgtgagcgtgtgaacgtgtgcgggtgtgagcgtgtgtgtgtatgtgggtgtgagtgtgtgagcgtgagtgtgagagtgtgtgtgagtgtgtcgctctctgagggaagcacacagcgccgtggtagaagctctgaagtaaacac

SEQ ID NO: 21205 - DNA, 831 bp, Artificial sequence
  DNA replication origin
cctccacctcgcctgcctcccccgaccccggccccatggccagacctttcttccacataattcccaggagtgctatatgcatgaaccaagctaaggtgtcaatctcgtttcagaaccacagcacggctccccataaaagtcatctttatggacagatatttcatggcggcagcttgagaaggctcacgtttcttaggcagctggtgcagagccaggagagctaatcatgagatcttccagtcccaggacgtgggctgcagctggcggctgtggtcgtcttatatcaaactctcaagagtcacagggcagcagcattggccccctcccaagtcattccagatgggatttaaggtggcttaatgagcattcataaaatacagcaagagaacataaactgaaaagggtgtgcaagaagaaatcaaatgggaactacatgaaatgagccagagacaggagggagggggaagaagagggagggggaagaacaggcgggagggggatgaacagggaggggccccctaagccactggaaagtgtggcaagacttcccggagccggacagagcagattcttgaggggtgcgcaggagtctcgtaggccaggatggagaggaagggcctgtaggcagaagactggtgtgtgcaaaggaaccagagagagaaggaggcggggaggggagagggggtgccgggaggagggagaggaagctcagtagttgtgggggatagcgagggggattggggaatgaactgtttcccgcaaatgcctcagccatagttgaaaggattcccactcccttccccactcacaaagtcctggtgcccttggccc

SEQ ID NO: 21206 - DNA, 929 bp, Artificial sequence
  DNA replication origin
gagggagacggaagcagggatggggtgtttgcctgacatttctgaaccttctgccccatagtcttcaacaatgttttgagggagctgggggctgggaggagcggaggcactcaccggtaggagaggaggccccagataaaggagcccaccaggatcccggacatgaagatggactggcttaggggcttcaagccctgggagctgcacaccaggtcccactgcaagaggagggtgcagtggctcagctcggggggtatgaaatcacagggctgggcacggccgaggaacgcctgacccacactggggtccctggactcccagtgccaggtcacagaggtagagaggacctgctggccatggggctgcaactccccatgggaagctcagctgcaggacagaatgtgacctggctctgcgtctgccagctgtgtggaggccactccacggggtccagtggcccccctcatgcagaggacagactctgacaggcagcagggccttgaaggggcagaagtggtagaaaaatgaacaatttcttggtaaaaagaactttggcaggcaatgtgtggctgtgtctggcagtacctggcagtggtgggctgtgaggtggcaggcaaggtgggcagtgggaggcaggggcagggagtggctggcaggggtgaaaccataggcttggcttccacctctactgagtgctggccaggtggacgtggcagagccactgcctcggctgggctatcctttcctctagagacggagtcacggagtcgtgatctggtgctgtcatcagcggtgagggtgactagagagagcttggcacggttcactgggatttttacagtggcttcagcccaggaccagtcatccattgcctgaacaccccacacccatccccaagtccgtcctccactgaggcccggcagctccct

SEQ ID NO: 21207 - DNA, 1189 bp, Artificial sequence
  DNA replication origin
gacagcgcaggcgcagaagggtcccacaggttgggggtctgtgtcctccgatggaggctgctgggggagtgagggggcgtggcaaggaatcagcagctcagctcccagaacaggaagagaggcaggagggggagcgggaggagggggagcaagaacagcttcctgggaggtggaaggaaaaccaggagtgaggatgttctggaagccaagagaagaaagtgtgtcacagagaacgcttctccccgccagcaggcctaggcttcagtgtcacctggtacgagacgtttccagtcctgccggctggccctggcgtgcccatcacctgtgccctgttcccctaaccggcctcacgttccaaggtggcctgacttacttacctgtgtcctgagccctgcttggctccaagctggggaagagcagacacttgtctcccaccctccccaccgccccttcccccatttctgctgaggcatcccttgcacctggctagtgtttggcccacgtgaggcttctggaaaggccttgagactgggggacaaaggacagaggagaggaggatggggagccaggacaactttgaggcacagggtccaagcacggccgcatggaggaggcctatgaccatctggcaggagtatgggagaggaaatgggggcggtgggggatggcctggggtggcctccctgtgaggggaaccaggccagggtctggggggccttgctgagatggggacccggaacagcctgtgggttggttcggatggccaggggagggaagaaacagaggaggcaggagggagacggaagcagggatggggtgtttgcctgacatttctgaaccttctgccccatagtcttcaacaatgttttgagggagctgggggctgggaggagcggaggcactcaccggtaggagaggaggccccagataaaggagcccaccaggatcccggacatgaagatggactggcttaggggcttcaagccctgggagctgcacaccaggtcccactgcaagaggagggtgcagtggctcagctcggggggtatgaaatcacagggctgggcacggccgaggaacgcctgacccacactggggtccctggactcccagtgccaggtcacagaggtagagaggacctgctggccatggggctgcaactccccatgggaagctcagctgcaggaca

SEQ ID NO: 21208 - DNA, 682 bp, Artificial sequence
  DNA replication origin
gggtgaagcacagtcactgaggcgctctgcaggcgtgcagggggccccaggaggaggctggtggagctgggggtggatggaagcccagcgcagggcagggggtaggcaggaagggactgtcctcagtgcagtggggccctcggaggactttgggccagcttttattgaccagatcaacctccgagattttgcaaagtcactcagtgctgtggcagcgtggacggccactgcagaggacacctgcgaggggttgcagcctgcctggtgagaggagatggtggctcaggcaaggggatgctgtggcagagaggggcttgggctgagtgtgtcctggaggaagagccaggtgagtgtgggggtgaggaagggaggccaggggacagcgcaggcgcagaagggtcccacaggttgggggtctgtgtcctccgatggaggctgctgggggagtgagggggcgtggcaaggaatcagcagctcagctcccagaacaggaagagaggcaggagggggagcgggaggagggggagcaagaacagcttcctgggaggtggaaggaaaaccaggagtgaggatgttctggaagccaagagaagaaagtgtgtcacagagaacgcttctccccgccagcaggcctaggcttcagtgtcacctggtacgagacgtttccagtcctgccggctgg

SEQ ID NO: 21209 - DNA, 1006 bp, Artificial sequence
  DNA replication origin
tgtttcccctggacgctctgcctcctgcctgtcccagctctgcctcctgcctgtcccagccctgccttggggagggacaccaggacggcgtacttcaccaccagcatggcgcagctcctccagcggagcacgggcacgcagaacaggtccagcaccgaccgcggctcctttgcagaggccacctcctccttcacgctggacatcagcaccttccggggagaatgggggcaccgtgaatggtagggcaatggccctgccccaccccctgtgccagagaacagtgtccaagtggccagagtgacggggagcctgtcctgggcctcggcctctggaagctggatccctaggggaaggggaggggatggggcagaaaaggttctctccaggccctggctcttctgcaggtttgactcagccctggtcctctcagctctagcttgcctccttctggaagccttcccttatcctccgaccccatcttcactctaatctctggcagcgcctgtttcctgaaagcagctaccttcaaataaacacattctgtttccccagacacatcgagaacccccatgaggtgggtgcgtgctacatgcaggtggaggtggtgggtgatggaggtgacggtgtgggtgctgttgataatgatggtgctgttaccgatggtgacgatggtggtgaaggtggtggagatgttttgcagagatggtggctgtggggttagtgatggtattggtggtgctggtggtgatggagtgatggcagtgaaggtgatggtgggtgtggacagtggtggtgctgttggtgatggtatcgggattggtggtggtggtggtggtgtctgtgtggaggtggtgatggaggtgttggtggtgtctgtggagatgctggtggtggtgctggtggaggtggtgctggagtgggtggtgctgttggaggccacacggatgatccctcagtgcacgtcctgtcccaggtcaagtctcgcagacagcagcatctcacctct

SEQ ID NO: 21210 - DNA, 1585 bp, Artificial sequence
  DNA replication origin
gaggtgcctgaactgctgggaggtgctcgccgttgtcagtttcctcgcagctgctcgcgctcagagcttgggctctcgctgcagcctgcagggccccggccgcctccgtccccgctcaggccttctgccagccgcaaggcagcctcctgccttcctcccggctctgccgccaccgcacgacgtgccgccctgtccctttcccccagtctcccaccctcagcaataaaaggagacacagagagggattccaggtcctcatagcctccctcattcagaaagaaaacagggaggcagctcctggggccagggaggggatgtggccccacgctcagagcagtggggtgggcggggaagcagggcccggtcccaccgcccagtccgcctgcctcaccttgcggcaccagcatgttggctagaatggcgaggccggccatggcctgggaacccgcctggatggtgcggcggccaaggaaactgagcaagagggcagtggtggcccggcccaggaagtccacggccccgaagagggcctggaggaggaagatgtcacggcccaggctctgcaggtcgaagaccagcccatagtaggagatcaatagagagaaactgcgggcaaggctggaagtcaggtccctgccctgccggggagagggcaccccaacagcaacagcacctcccaccaggagctgcctgggaggacatggccaaccccggaggacaatcctgggcttgtctcggccagcgatcccagaagcctgccaaactcaggacacaaccccagcgtcaggctcttccaggaaagggcaggcagggtggctccaccatcccttcacacacaggctttgtgtcaggggcagcgatgcgctggggcgttgcctctctggctgggaccaagtctgccctcgggggcctctgagctgcccctcacttccggactagccctctctggctttgattctgataaccagtcacactgtgcctttctcttggaagatgggaatcatggcaggacagggcctctcgggagaccctgggctgcattgcccagaccacattcaggatggagagcctgtcccccagcccctgggagtgctgccccttctctggggagagcagcctgtgactggttcatggggcagagggaccacccagaaaggccccagctcccacgctcccaggggctgggctgggcccaggctgtggctgcatctccccttgccttcccttctccatctcagggtctgctttctgcccactcccccaccccactggctcacgagtagctgaatttacggtatttaaattctcatggtttggagatgggatttggatccacaactggctgcaaggtaaaattcttctcggccacgtttaaaatctgtgctctccctgcttaacccagatgctcctcccagccctccccttaggcgtcacctgattgcatcacccaataaacatcggacaacaccagcccaacaacatcagagtaaaatcgcacaagccgcggtgtttcatgaagtttatgtgagtgacgtgagagtcactgggctggtgctcaaagcggccgacactggagccttggaca

SEQ ID NO: 21211 - DNA, 1378 bp, Artificial sequence
  DNA replication origin
caggttttctaagggccaggtccgagtcatcgtgcctctaaccgtgcccagcacaggactggcacacagggtagggcccagccagggctgcagagaggcgtggccatcttcacagtttcagtttaaatccaggtcttctgggccttgatttcctcatctgtggaaagggcatcatgctctccactctacgaggtggtctttagggcaagatgtcctggttctctgagggtcctcctccagctctcggagtgtttacgtgaggataatgagggcccccaggataatgagggcccccaacccatgttaggcttgggactgccagctcctccaaagcctctgaaggtctgctctcctgggcattgcttgctccaaactgctgtttggaatagcctgggccactgcctttctgaaaaatggcagtggctttgctactcgtcactaccaaatgtgccccaaacgcggccacaggctcaacttgaaattccccacagaacaactgggaaatgccccagtgcttatgactgtgatgatgatggtgatgataggaatgacaatgatggtggcgctgctgctgatggtggtggtggtgactgagatggtgctggtggtgactgagatggtggtgctggtggtgactgagatggtggtgatggtggtgactgagatggtgatggtggtgattgagatggttgtgggatgattgagatggtggtggtggtggtgattgagatggtggtgattgagatgatggtggtgatggtggtgattgagatggtggtgattgagatgatggtggtgatggtggtgattgagatggtggtgatgattgagatggtggtgatgattgagatggtggtgatggtggtggtggtgattgggatgatggtactggtggtgattgagatggtgatggtgatgactgaggtgatgataattgagatggtgatgatgatgattaagaaggtgctgattgaaatggtggtggtggtgactgagatggtggtggtggtggtggtggtgatgattgagatgatgatggtggtgattgagatggtgatgctgctggtgacggagcggtaagggggagtggtggtgagggggtcctagagggagactcaaatcaatcctgtcctagtgccctcagagcccaggaagagctcccacactttccaccctccagcttggcctcctctcccgctggaccagcttctagctttgcgcttgtgtaccccaaagcccagcaaaagcttttcccagaaggtcagcctccccatgggctgtcaccccaggaacagccatttccacctctgcttcacatgtgtggccctagccccgtccccaacagcactcgctcaacagcctctccctgcctccctgc

SEQ ID NO: 21212 - DNA, 709 bp, Artificial sequence
  DNA replication origin
gcagcctccttcctaccagggtacctgctctagtccagcacctccaaggaggggtgctgttcccagcccgagacccccccaaggtagggaagtctctggtgtacagctttgccccctcaccgtggggcaccagcgtgttggccagaatgcagagccctgccagcaacagggatgcggccagcgtggggcggcggcccaggtggctcagcagcagcagggcgcccatcttggctgggatgtccacgacaccaatgaacatttggagcaggaagatgttgctgcccagggcctgcaggtccagggccaggccgaagaaggtgaagccaaaggcgaacctggggcaggggtcagggaagtcagggtgggggtggggggtgggggggggtggtgggcagggtgggaacaatgggcggtgggggctcagggtgggggtgtgctgctcttagctcagtgttctggcccttcagctgccagctctgtggggcggggccagtctctagactatgtttatcaggtccccttgccagcatggcttccctttgggtttggctgatgggaggtgctggcaagaggttggaggaggggagaagcaggggatttctgcctccctctctgcttgggggctttgtctgggagtgactatgtcccttccgtggctccagctgccactgaacagtccttccctccttggccttggcggttttggtct

SEQ ID NO: 21213 - DNA, 963 bp, Artificial sequence
  DNA replication origin
tgtggacactgtgggcccctggccttgccgctgccaggagagttactggacacccagatggtgaggctgggttgggagaggctggggctgttgtggccagagtggggctctggaggcctactgatgggtttgaatcctgatactgcccccacctagctgagtgtcatgggcaatcaggttcttcaagcctcagttttttcatctgtaaaatggggcaatgtttgccctacaggattcaggaaaaagtgaagtgagatgatgctttgaggtgtccagcacagcaccgggcccacaacaggcgctggaaacagcagccactctggcctggcacctggggcaggcaagctggcctgggaaagacccaccccagaaagcagcccccagcactttcctccttcccccgacccgggaggaccctgggggctcatcacttgagtcagtgaggggcagccattcatttgtttctttattcaatccctcgcaccaatgcctctctggcccagcgctgtgtggggagctgggacatggggtcatgggactgccccaaccctctgggaactcataggctggcagggtgggaggaggcaggcttgtggctgtaactgtgggtaggagtttcacgggcatctcaggctggccctggacccctggaaggggggctgggtttgggggttaagtggagtcggtcagggatgagggtgggaaggggacagcaggcagaggatgtggcgggcaggtggctgaggcctggagggacatggggaggggccaggggccaggcttacagggcttctgggtaaagctgtggagctgagactctactgcttgtgtggagctaggagaggtcttgaccatggatggtggttagctctgagctctgggcaggtggacgggtgtggggggacaagtggcagtgcggagtcaagcagagggttggcaaggccagctcgttcccctgggcct

SEQ ID NO: 21214 - DNA, 704 bp, Artificial sequence
  DNA replication origin
cccgagtggcccagtgggtgggtggggtggggtggggcaagtgccccaactcccctcaccaggagaggcacctgcttggtgccgcccagggaaggggctcaggcctgacggaaggcctgttctgtgtgtgccgccgggcgacgtgcattgatggggaagctgctggaggagcaggggtggggggtgggagggaggggaaaggcaaatgcagatatatattacagacaaatactctagattccacgagcagcagcctgtggcacccgctgggcgcgggcagcagggaagagggagcaaggcattgtccacagactgctggggtcacttctttgcccacgggctccctgctcccccagttttttttctctctttgttaacaaatgtgtctgagtcttggaaaacaccccaaccccggaaatgtgtgggaaaaagaaaacaaaaactttccaaattccaacggtcctgtgcagtttttttgggggtgggtgctgttagatcctggcttttggctggggtctgggcccacatgggggcccacaagagctggtaagttgctcccgaacttttgggttgagtgtggctttgggttcctgggataacttgtctttgtctcacagtgtcctgtatccctgctgggctgaggaacgggcgggaaacatggctggtctctggccggttcacagaccttagcttctcagaaaggc

SEQ ID NO: 21215 - DNA, 882 bp, Artificial sequence
  DNA replication origin
aacagaaaggaaaggaaattgaaaagaaacagaaaaaaaaactctactggtttaaggctttaaaaacagatacaacagcagcatttaaacaaacctaacaacaatatcttttagggttttttttctagatttttctctttttttgctttttttttttttttttgcttttgtttttaaaaaagaagatagcataccacggaattcaggcaacttacatcaacaaataggccgtgtgattttagcatgaagaaaaaaattacaaacagagctgtgtaagcgggttctcccggaaaaaaaataagaaaaaacaacttttccgtacaacgttttctgtctatctgttcggtatctccctccctcactctctgctccctgcgcatcctgcctcctcctgaactctctctccgccctcacttgtccctctccccctcattcaacacaaagctgaactctgcacagggcaggctggggctgaggggtggtttccaccacttggtgtcagcatgtcggggagggaggaacagtgggcaggagggcttagagagtagggacatgacaggcagccatgtagggattgctacatgggtgagaggtcttgggaggggacggccacgggagggggcttggaaagctaattgcagggtggccacgggaggcgagacatcgaaagtgggaggtgaggtggcccatgaggaagagtgggcagggaggagttggataccactggagcagggtcctgtcccgtaggactctgggaggggtggagagaagccatgtagaggcagggaggtagggaggggcaaggaaggaggggagtgggcagggacacatggttcctgagctaagcctaactccccaactttctcattcttcaccctccac

SEQ ID NO: 21216 - DNA, 843 bp, Artificial sequence
  DNA replication origin
attttccaaatgctgcagctgcctgaagttggggagaggcgggaggctgcctggggtcctatcagactcctctggctcctaggagcaccccattccaggatgcatccttagtgtagagctggaccatgagtcattgtgagtctgcacccacaaaacccagcagcacgggcagcggttgggcttttggcagggaggagtctttgaggagcccggtcctcccctcctccaggtcctgccaactcctcaccaggacagcctcttctgatccttcctgaactggtgtgtgatccgggaaagcccagcaccctacgttaggtgacttgattgccccagagcctaggccgggttgagtgagcccagggaaggaagtcctcatgcgttctcatgggttctccagagccttttatcttgtggagaggaagtggggtgtgggacactgggaggaaacggagaggaagccatgtgggagacagaggctaccatgagaagggggcaccgagggggagtcatggcagtgtgggggggtgtgggtgaggggaggacacctcaggagatcgtacagtcaaagccttgggcagagaagggcccagggaagccccagaggagctgcagatgcaggggacagggctgggacccagatatggagaccaggaagcagctggggttggaggggcaagaggtcaatgtgagcaggcctgggaggagtctgggggcagaggaaggctgcagaagggtgacccgaggagcctgtgtgtcccaagggcttagctagggaaaatggttgtagggggcttaggctgggtaagacttgtttgtggtccaaggcctgaagcccccatgccc

SEQ ID NO: 21217 - DNA, 882 bp, Artificial sequence
  DNA replication origin
gggtgaacatggcttaggaactacaactcccatcagttcttgggtccagaaccacaactcccacctgcccctgaggcctggtgctctctaggccactagtagaggagatctctgctggatcctgggccctcctcttctcctgggtgttgggaggtgtcctgtgctctgtctgaagtgttcccagagtggacactgccaggactgccaggccaaggtgaggcagttacaacacagtgactgctctgaatccgatagtgtgctgggtgggaggttccccctagaccagacttgtggtctcctggggaatattagggcctgaggtctggcccagattctagtgggggagctgctgtaggaggagagcagggctgggagggaaggctctccagggcctggggcaatggggccagggagtgctttctaggcctctgcttgatacttcttgctggagccaagggtgcagccacagagagagaccaggctggcaaagcgggggtggccttgagtgctgcttgagaagtgtgggatgtggagtggtgcagtgagtgccaaggctgctcatttgagcaggttgggggtggccaagagcagctgggggagggtgggatacttgaggctggcagagggagcagagaaaggactggatgtggccagatttcccagtggaggagtgtgggcctcggtggctgccagatgagtctgtgggagtggagggccacccacgtttctcgcttgggctgctggagacttctccccattaccttgcaatgggtggcacctgggttgttggtaccagaaggctggaggttggggccggtgcttgcggggttgggggagattatgtggtcaggaggtgggcagtgagccctggatacatcctgt

SEQ ID NO: 21218 - DNA, 1599 bp, Artificial sequence
  DNA replication origin
agtggaaggcgctctgggcccaggctctgcacgcacctccggcctcaagttactcccttgcatgtggggaaggggagcgagcctgcccacctcctccagcggttgagacctgggaaaggtgccttaagtgctgcggagctgggctagtggtggtcacaggagtagccactagaagggatgaatggttgctccctctggtcgctgacctccacctccatgtccccaggaccagggcaccgtgggggtgatctttaacgtgggcacggacgacattaccatcgacgagcccaacgccatagtaagcgacggcaaataccacgtggtgcgcttcactcgaagcggcggcaacgccaccctgcaggtggacagctggccggtcaacgagcggtacccggcaggtaggcggcgcgggcccgcggaggaggcgcggtggcggggcgggtggcggcctctgataggagtgcggccgcaccggggcggggctaagcggctctggggcggggctaagcggctctggggcggggctactggagagacgaagcttgcgaggcgggactagggcaggggcgtggctaggaaaagtcgggatttgtggcggcggggcgagaccgtggtggtgcgaatgcgccccctatgggggagggtgcagggctgagctgggaaggttgcaaggccagggtccagtttgggggtggggggagaagtggagggagggtagaggtgaggagaatctgatgcgattgcggaaaggttgagttcagaaatgagggagacagatgcagaaacaggagagaaaatccagaagtaatataaaacgtgtcttggcaaggagacagggctgttaccacgggcagagccaaggaaagaaccgaggtccttataaagagcaagtcagagatccatattaggagatctaacgaaggaagaggagtagccacggagactcagagaaaaggacccccagtgtccaaggcggtgagggacatggtgaaagggaggaagagacaagtgacaacaaaaatgaaacacagggtcatgtgcgttcaataacctttgttgacaacctacttagatatcagggcttgtgctaggtccggggcactcagtccctgcttgcagggagccttgagaatgcagacagaccaagttcaacagggtgacagctgtggcggccaaggacaaaccaaggtctgaggagcacaggagagggatggagatgaggacatggaagaaatgaggaggcagagactctgaaagatattgagggaggcagagacagagccttagaatgagaggaaaccagaggggaagcaatggaaagatatggaaatagcactgaactatatgcaaagatgaggagagatgtggagaggtagatggagatgctgacatgcaggcccagggagagaagaggtggacagagccttgggagggaacggaggagagccccagcatgggagataaagagggaggggaaacaggaacgctgcagggagaactgcagaaacacagagatggtgagatacagtctgagcgacattgcagtcacacacagggcctgactgagaagcagagtgagcatctgcgacctccatcact

SEQ ID NO: 21219 - DNA, 946 bp, Artificial sequence
  DNA replication origin
tctctccccttccaactaactatgccctcctgaaagccaggggcccctcacccagagctttccagcccacaaagcctggccagcctgcctgatccccacagcacaggggtcctggccagggtgagcatgtgaaatacaggcagggaaacaaggtggctgttaggggccagaaatgtacagatgaagactgagggcaaaggctcgggattgaggactgtggggaggggtcaggggagaggttgagaccagaaatgaaatggagcaataccagaggtcgtagggaagggtgtagggcagagccagagatgggggaaagggcagggaaagaaaaggggccacttgcagactagagttcaacaggactcaaaacggtgagtcaaggagctgcagatatggtaggaggcccagagggagaccctgggaaggaaccaaggtcaaggtgggtagcaggcacagggaggggctagggcttctccctgtggagctgagcagagaaaggcagagccaggtgggagctgaggtcagggtgaggatgtggggctgggccaagaggtcagtgaggagtgaacctggctagagaggcagtaaaggagacagggtaagggggctgctgggagggcaaaggtcacggaagcagaagtcaagggcagcatagaggcaggggcagaatccagaggcaagatgaagctgcaagggtgggctgccctggggcaggtaggtatgaaggaggggcaggaataggtgcaggacacagtaggctggcctagctggtctaggagtgagcaggcagcagcccaggggaagtcacaaatgtgggacacctccgaaggctacaggagaatggcctggaagtcccaaagaggcccttgactacttttaggaaggtcagaaaacacaggtggtctcagggagtggggagctggagaaattcgaatcagatgggagg

SEQ ID NO: 21220 - DNA, 674 bp, Artificial sequence
  DNA replication origin
agtactccatggcctgcagagaagggaagggtagagaacaatcttgcattctttagaacataaatggagcagatgagattcataaaatgcttaattaaataattagccactaatgactcctcacaaagcacttcttgtgaggagaggggttcaagggaggacttaaagaaggagagaaacagatgaggcctaagggcaaaagcctagacagggagaaaatgtcagtctgggggtgggagaactctggagtcaggaactaggagcctgcagtggggggcaggagggcctgcagcacttctaaggagcaggccttgccagcagccaaggaggtggcccagttggtaacactaggccgggttccctcaggtacctcggggtctctcgcctcagggacttgaacccccttgtagttggggcaatcaggggtgaggaggctccatcccagggagctcctaggaccccaaaggggaggggctgcctgagtgctttggggggagccaccatctgcaggcccagggaggtgctgaggagagaagggaagattgttgcctggttcccaaagaggtagtgaggccagcagggggttgggggaagcaggagccatgggtccccttgctgttccccagagcacccaccatcaacaccttccatccccccagagtgagaggtgaccc

SEQ ID NO: 21221 - DNA, 905 bp, Artificial sequence
  DNA replication origin
tcctgactgcatcctggagctgggggtggcacatggggctcgtggtgacagtttttgctcccaaatggagtttagaatcaataaataggagccagctctctccagcccctcccagcctcctctctcccagccctcccctttctcacttcacccgcccctgcctcctgtcctttccttacccagccctcctcctcactccgctgcactgtttcttcagctcccccaggtgccctctccacctctctcctcctttccctcctcctctaccctctgccttcccaccctctcccctgtccgagcaggttggtgcatacgacccggtgacgggaaaggagtctctctgtgcttacctctggggccacaggtgctttccagagcgtccaaaagtttgggggacagaacccaattggagggcatcctgaaggagaagtggtttcctcagcttgacatacgtggcccaggaagggttttgtcctaaatgggacactcagtgggcaggtgtcctctagaccccccatggagggagaggttggggctgggggaggggcagtggtagtggagaggaaggattggaggagtccaggagaggcttgtgcagggggctgggggagcagctttttggggaggtggtggggagttgtacgtgtgtggcatgtcttattcctgagtacctcgaaggctctgggtgcactgtatgctgtggaccctattttggagggtgagcttggggagcaggggtgtctgtgtgtatgttggccattcatgtcctgtgatcaaacgtgtgtgtgcacggatgtatgccctgtgagcatgtgtatatgctcccctgagagtaagttggtgtgccagtgtctgtgagcacatgcatgcatgtatgtgtctgagcctgtgtgcctacccgcaca

SEQ ID NO: 21222 - DNA, 800 bp, Artificial sequence
  DNA replication origin
tgatcacaggacatgaatggccaacatacacacagacacccctgctccccaagctcaccctccaaaatagggtccacagcatacagtgcacccagagccttcgaggtactcaggaataagacatgccacacacgtacaactccccaccacctccccaaaaagctgctcccccagccccctgcacaagcctctcctggactcctccaatccttcctctccactaccactgcccctcccccagccccaacctctccctccatggggggtctagaggacacctgcccactgagtgtcccatttaggacaaaacccttcctgggccacgtatgtcaagctgaggaaaccacttctccttcaggatgccctccaattgggttctgtcccccaaacttttggacgctctggaaagcacctgtggccccagaggtaagcacagagagactcctttcccgtcaccgggtcgtatgcaccaacctgctcggacaggggagagggtgggaaggcagagggtagaggaggagggaaaggaggagagaggtggagagggcacctgggggagctgaagaaacagtgcagcggagtgaggaggagggctgggtaaggaaaggacaggaggcaggggcgggtgaagtgagaaaggggagggctgggagagaggaggctgggaggggctggagagagctggctcctatttattgattctaaactccatttgggagcaaaaactgtcaccacgagccccatgtgccacccccagctccaggatgcagtcaggacccaggacatctccccaatgctgc

SEQ ID NO: 21223 - DNA, 1338 bp, Artificial sequence
  DNA replication origin
gcaggggatgcagggattctggctctccccacccatctccctcccagagacaggggagatgtggggttggtcaagccctcggcccccattgatcccctgtacgactgggattcccaaggtgcccgtctccctcagacactagaggcctggtaccctctaagaagggggccacaagccctcttcccatcatctgactgccctgccttccagctctggggagggttggagccctcttgggggcaggagggacaggggtccaactgaggaagggaagagggcacctgggcacgcgtggtccccggaaagtggccctggggggaaccccgcccgcagacacccctccctgtgaaggatgtaaaaaaaaaaaaaacttgttttacctttttgtctccccttcccctctgcccgccccatggcccccccagactgcctgcgcgtcggctgcgcacccagtaagtggcttccctcttcttctgcagagacccaaggggactgggatgctggacgctgggatttagggagggaggctgggaggaagagaagccgtgattgctggctcgaatgggggttgggccttgagtgtggggaggggtgcaggcaggagggtgaggttgggtggttgtggaaggcaggagggaccaaatgaagcagagccaaggagagctgggggagggcctgcagtcaggatgttcactgggtctaggaagggagagacaaggacaccctttacccaagtcagcaggagggtggggaggaggtagaaatcaagggctggggcagagtcttgggtagcacctgtggtcctatggactggcagggaggagcctgagaggggctggaatacgctgctgcatctccagaattggccacaagggggaaggcgagggatgcaggaaagaggatgagggtgggaagggagccctcttcagctcctgtgttagctggggtgagtttctgccaaatgggggctccttctatggtgacagtgagggctctcagcaggggtgagatggagagtgagcaggtggacatctccagacatcccagtgcgcctgggctcaatgctgtgtctcagggtgtttctgcatggtgtggcttggggtcacatgggggagcacatgcacgtggtaggcccaggcagagagactgtgtgtgctgggcgccctgctcttcatgtgtgtgtggcatgctgtgtgcgtgctggagccctcggggtgggggggcagggatgaccagagagtgctgcaaagtccagcagcatttgaaagataagtatgttttgttttagactctggaagctgataatcctggtcttgagtaaatggccatagttcctaa

SEQ ID NO: 21224 - DNA, 888 bp, Artificial sequence
  DNA replication origin
ttcttggtctcctgaaaatccatggaaaacaccatcccatgacatgctatgctctgctcactgtcagctccctggacagggccgctcaagtttgaggaggggtctgggggtgagacctccagtggcagccagtggggtgggttcccaggggtggagggcatggccttgggagatgcggagctgcctgagatcagtccagacctcatgcaaatcatcagttcatagcagtttgggggctgccccatgctggctgctctgggaaaggtgccatcccctccctcacttctcagccttgagggttcctggttccatgtcccccacattttgcatggcatgaatggtcttttcccctgaccagggatagcgtccagttcccccaactgctccgctgctctgactaacactgtgtttcacactgtcttccttcccgtcaccccctgccctctctgcccgctgcctgccccgcatggcctctgacaggggctggtttccttccctgttgaggggagcgagaggaggaggcctgcaggggtgggaaggggcagcattggttgtccttgtcaccgagctcctctgtttgggttaggctcagtcctggtgagtgttggtgtgggtgtctgtgtaaatgcagctggtgtgtgttggtgtgtgggtgtgactgtgtgtaaatgttggcgtgacatttcggggtgttagtgggaagctgtactgtgtgtgcgaggctctgctggtgactctccacgtgtgagctggtgtgagctgggggctgcgtgactatgtgggtttttgagcctggtgaggactctgtgtggaggtggactgtggagactggcccttcagttgcagtgccatggcagtcaggaacagggaaggagctggggctagccc

SEQ ID NO: 21225 - DNA, 701 bp, Artificial sequence
  DNA replication origin
taggctcaggtgccttcgaggcccttgtggaacccgtcaatggcaagttcaacgacaacgcctggcacgacgtccgggtcacccgaaacctgcgccaggtaggaggagtgagaagaaggccagggattagctatacctggggtagaatgggggttgggagagggggctgccgggagcttgtggtggagggatcagggctgggcagtgaggtgtggttctggagaagaacaggagttggggctgtgagggtcccgacataaggctgcagtggctggcaggcttcagagaccagggagctgagctgaggaggctccagaactgtccctgggcaggaacctgagggcaggggaaggactgggctcagattgttgggagcagctgggctctcgagggatggggctaagaaatcaggtgatttagcaggagggcaattcaggagatgggaggagtgagccagtgcctgaatgggtgctcctgggtgccagggggtggggaggggttcctgtggagtgggcaggctttggcctggtggagcagatgagggtgtcccaacactagggcagcaaggcacgaaggcaagcctgagttaatgtgtgcgggcaggatgtgttctgcccccagccgaggcttttttagggcagaggcagagatggagccagtgaggtggtggcatagtaggtaggtgacagagagcaggagca

SEQ ID NO: 21226 - DNA, 885 bp, Artificial sequence
  DNA replication origin
ggtgaggggcgcctctgcccggccgcccctactgggaagtgaggagcccctctgcccggccagccgctctgtccgggagggaggtggggggggtcagccccccgcccggccagccgccccgtccaggagggaggtgggggggtcagccccccgcccggccagctgccccgtccgggagggaggtggggggggtcagccccccgcctggccagccgccccgtccgggaggtgaggggtgcctctgccctgccgcccctactgggaagtgaggagcccctctgcccggccagccgcccgtccgggaggtaggtgggggggtcagccccccacccggccagccgccccgtccgggagggaggtggaggggtcagccccccgccgggccagccgccccgtccgggaggtgaggggcgcctctgcccggccgcccctactgggaagtgaggagcccctctgcccggccaccacccgtctgggaggtgtacccaacagctcattgagaacgggccatgatgacaatggcggttttgtagaatagaaaggggggaaaggtggggaaaagattgagaaatcggatggttgccgtgtctgtgtagaaagaggtagacatgggagacttttcattttgttctgtactaagaaaaattcttctgccttgggatcctgttgatcggtgaccttacccccaaccctgtgctctctgaaacatgtgctgtatccactcagggttgaatggattaagggcggtgcaagatgtgctttgttaaacagatgcctgaaggcagcatgctccttgggagtcatcaccactccctaatctcaagtacccagggacacaaacactgcggaaggccgcagggtcctctgcctaggaaaaccagagac

SEQ ID NO: 21227 - DNA, 3250 bp, Artificial sequence
  DNA replication origin
cacgctgcagctggacacgccggtggccgacgaccgctggcacatggtgctgctgacccgcgacgcgcgccgcacggcgctggcggtggacggcgaggcccgcgccgccgaggtgcgctccaagcggcgcgagatgcaggtggccagcgacctgttcgtgggcggcatcccgcccgacgtgcgcctctcggcgcttacgctgagcaccgtcaagtacgagccgcccttccgcggcctcttggccaacctgaagctgggcgagcggccccccgcgctgctgggcagccagggcctgcgcggcgccaccgccgacccgctgtgcgcgcccgcgcgcaacccctgcgccaacggcggcctctgcaccgtgctggcccccggcgaggtgggctgcgactgcagccacacgggcttcggcggcaagttctgcagcgaaggtgagccccggggagcggccgcccggtgcctgggcgcgggggtgagggcctggggcgcttcgtgggggtcggagtgtgtgtgggctcctgaggcacgggggctgggcacgagggcttgtgagtgggtgcgagcgctccagggctgcggggacgcgtgtccgggcgagggcgcgtggggttggcggtgggcggggcgagtgggcggggccggcttgggcgtggtcagcgtgagtcctgcggcgacctgtgggcagcctgtgtggtcaggttctgaaggggctgctgagggtggggtgcatgaagccccgtgggcttggtgggtgagggtctgtgaggcgttcgtgaaggcttgtgggtgggggtctgcgtggacagggcccattaaaggcagtgggcggggaccatggggcccctgaaggacagtgggtggggcttgtgcatagggcggggcctcgtatgaggccgtgaggggtggtgagtggggctggcgtggaaaggccagtgtgggtggggcttatgagacagggggcgggacctcgtgtgaggccgtgaggggctgtgagtggggcctgtgtggaaggccagtgtgggctgggcctatgaaacagggagcaggacctcgtgtgagaccgtgagggcctatgagtagggcctgtgtggaaggccagtgtggtcagggcctacaagacagggcagaccttgtgtgaggctgtgagggggtgagtggggtctgtgtggaaggccagtgtgggcggggcctgtgagacagggggcggggccccatgtgaaacggtgaggggctgagtggggcctgtgtggaaaggccagtgtgggcagggcctacgagacagggggcgaggccgtgtggcggggctttggggcagggagcgtagtcgacagtgggtcgcagtctttgaaggtccgcgagccaagggcgggaagtgcggcctgtgcggcctggacaagcactaagggatgagggcctaggcgtgaggacgctgagtgtgagaagggcacgatggcgattccagcgcaggcgagggagaatggggattgcgaggctgtggccaggaagcgagtgtttctttttcaccacaaaatcctcagagcgcctccgaagagtaaagggaaaacgagggagagggtggctgaggcttctcaggctcttgacgaggagtggacagtttgggtgagggtcagagatggccaatagtctctcttgatgacagacggggcgtggaacccctgagagcgtggggtttgatgggagattgctgggctggacagggcgaggtgggaccctgggccgtggggctgactatggaatggcgcttgggagagaggctcaccggagggaggggtccggccagcacccgcgctgcccggaggccgagagtctggccaagaccgtgaagtggtgaagtgcgggcgggtcctgggctgagcggcccggggcggggctgtggtgtcggggggcagggggcgctgaggagaggaagcactgggaggagcctcttccattagggtctggctgggcgtggggaggggctcccccatcggtctgggggcggcgcatgcgcgtctctccccgcccctcgtccctgttcttccagctcgtgtgtgcctcaggcctgacgttctctcccctggtccctctagaagctgtgggccactcagcggttgtgtgtgtgtgtccgtccccccagagtcagaggcttttgagggagcgtgtgcatgtgcacgtgtgcgctggcaacatgaatgtggcccggcactgctttggggataggtgtcctgtggctgtgtgcctgtggacagccatgggagggcccagcctgcaggtgtggccctgggtgtgggaagtctgcacttgggagagtcgtttgcctgtgtatctgtagttgtggtcgatgaatacatccaaaagttctggggattgttttcttggggttattggtacaaggttgtgggttacgtcatcaggaactgtgtattaagttaagctgacaccttctcaccctttctccaaggagttcagctgtttcctaaactgtgaaattctgtgtcggtgtgtgtttgcctgcgtgtagaggcccgcgagtctggcagtgtgtatttgacgtgtgaatgggtctgtttgaataccagtgtttgcagatagaggagtctagtgcctagtagagtgagtagttcccaagtgtgagggtgtctgctcatgtgcttgtgttttaacgtgaggcctcagtaagacagccggattgcatgaggactctttctttccagaaccttaatttgatcctctggttcctctacccttcccccaaagcctgcctaagaaaacaggatgaatcatcctctgatttgatggagggaaagctcgagctacgggaggttagggtaaccggtccctggcctcactgtggctgaattgggcttgggtgtgtgaaaaatgcagccagaggcaccttggtcaaccagagcctttgtatccattccctgagaggattcattggccagaggcttccagtgaggcaaacaagtgcatgcttctgaatacgggttgtgtggttgtgtgtctaagatgtgtttgagtaactgtgtgagagggatggctgtgtgtataatatggcttggtatcagatgaatgtttgtgtcagctgtggtgaagctgtgagagatggttgaatatatgtatctgacccattgtgtgtgtgtgtgtctgtgtgtgtgtgagagagagtcatgtaagaaaaagaaacgtgagccaggtgcagtggctcacgcctgtaatcccagcactttgggaggctgaagcg

SEQ ID NO: 21228 - DNA, 1326 bp, Artificial sequence
  DNA replication origin
acgaaagcgtgaagcgcagccgcaggcggccgtccaccagcagcagctccaggaagtcgcagtcgccgccgtcgtccaggtagagcagcagcgcgcgcgtggcgttggtgcgcaggctgaagctgagctcgccgctgctcgccgcgcccgcccagcgcgcgtagcgagcccactgcccggggccgccgccgaactccaggccgtccgcgcgcgccgccagcgccagcagcagcagcaacagcagcggcggcggtgtcggccgccaccggctcccggacgccatgcctacggcggccccggccccgcccggcccccggcccccgctcaggcttcagagccgcgggcgcatggggcgggagggggccgggcgctccccgcgctgagcggggctcccttgcaggctcacagtgccatgggcccggccgcggggcgaggcgcgcagaggcccagatgccggcttccctcaggcggcggcggcggcgcccctcccccgccgcgggctccgacagaagagcagggagggatgcctgcgggagaacagagaggaaagggttaatgagaacagagaggaaaggtccaacgagaggggccgtcggtgccgggctccccacgcatatcagcaggcaccagactgtttccctgcagaacttagagaggccctgacctgcagagggtcccgaggcaagagacgcggattccgggggccagcacttaggagagatggcacgcactaggggcagcattggtttgagatgtggacagggagaggtgacacgttcgagcccggcaggagcccaacctcagcccgctccctcaccctctcaaaggaccccagtgtcaggaaggaccaaggccagctccttgagcgaggcctgggaactctcctccgcctggtgaccccagccccttctctgaaccgcccagcctctgcctggctcccacctccagccactgttcctctcatcagctcttgatactggataatgaagttgctaaataattcattgggattaattaaatgccaattcgtcgatggtatcacagggtaaccagactgggaagggggcaagggagagaagccagccaggacccagatatccaggccccaagccctctccatccaagcagggactcaggcatccaattctgtgtctccagttcccccgaaaccacgctcaccccttcccaggccccagcctcactgcttaccaacccaggtcctttctgaagctaaatgtctgtcatcctcaacttccagctctcagtgctcagcctcaggactggccccactacctgggctctctttacccctcagttccctctgcc

SEQ ID NO: 21229 - DNA, 2663 bp, Artificial sequence
  DNA replication origin
ctggcggcttctgagcccttgcattggctgcgctgctcgcccgtcagcgcagcgtggtccaatgcgcgcgtctcgggggcgggcactggtgctgatgctgccgtcagtcggtgttgcagggatgcggcggcgggagcagccgccctgactcgcggagcatcctcctcggagaggcaccgcggcggggcgggcgggcgggcggggacgcggcggggagggagagaggcgcgaggcggcagacaccgctagccctggctctgccacccgtcggagacggggcggccctgtagctctgctacccaccctccagcttctggcgccccgagaaccaggtaaaatgggggggggggggcgctgcggcggagacgggcggggggcgggagccgatcgggggaggggagcggatcggagggggcgagggaggcaggacggatgaattggggggcgggggcgccgcgctgagagggctggcccggtgacagcgaggaggcaaagccgctgggggcttgggggtcggaggctcctgtggaaggggcactggccctgagagctgaggagaatggggaggggtgggaggaagggtctttgggggaagggatggagagaggaggggcatccagaggacttagagggggttcttaaaggggggtccccagtctgtgctagccccagaggcttgaagcagcgccgggccagaggagctgttgtgttctggagggtctaaccagcgagaaactgggcttcgtgggaggagaggagagggggctggagaagagagagaagtggagagggaaggaaaggggccaggccaagggcttcgtcctgaggggacccactgaggaccaggctttcctgggggatgggagccaaggggagaagaggttattgggagagagcagaggggaatgtgccaaggtgctccaggcagagatgggtctgtgctggtggagagctgggaaagatggggtctgagggagaggagcggaagcttgcgggggaaggctgggggtgatgagacagggagactgggaaatcagtaggagggggctttgctggggtgggaatgcgctgggggcggtgacagggttctggtcagagagtgctgcagggggagaggaagctgcagggcccttggcttgctcccccacccctaaagaggaagggaccatttctcatgtcccagcctcctcccccagctgaagcagcaatcttccctggggtctttgggttggggtatgagcccttgaacccttgatgggcttttggggcacaattggctttggggtgctgttgtctcctttactctcacccccctcctgaatcttgggagagggcattcgatgcctcattgagctagcaagggctgggaggggctttttcttggtgtctggaggtgaaggaggaggctgtccacctggaataatgaaatagatttttagggggtgggtcttgggtccccagtcccttggctgccctgggggcttccagatagccctgttttttcatgtgttggcgggtgggcgtctctcctcttccattcattcttatccttccctgttgtctaccttcccagtgtctgggtgttccttttggaggagggtggacattagggtcttactttctctgtcttctgccagagaaggagaaagaaagaagggagagggaaggagaaggggagggaggtctgcagtctgctaactgtgaggccttctgttttgtgggtgcttcagcccctcagtccctacctcctcttgcttccagggatggctctagggatgctggcatctgaggtgtggctggatcttttgggagacaggggagaagggtctggctgggggctcttcattcatgctagaggaagtgttctcagacccatcctatcctcagatccacaggggtgggcgggatggaccaaccagccacggctgccgggcagttctttccagcccaggcctgggctgaatccatatgacattggagttctgagaggaggggctgggtgcgcgagtggctggtggggacccctctttccttccaggctcagtcactacccaggtccagctgctccctcccgcttacccttgccagtgacacagacactctgacaatgatacacgcgctcggtggcacccacccagacacacacctacacaggcacacacacctgcgtacacaatacacctcctggcagcatacagcccacactccccacccagagaggctgccacctcatgcctgcctccttgagacctcccccaggtgccttgctgccatgtacacaacacacacacggccactacgtgcccccagagcccccagcgcagcactgccagccctcacccttggatgcacacagcccccatccaaccactcacctccccaggctcacagccatcgcaggcacacctgtgcttcttcctcatacaccttcagtccttgcaacacaccctctccttccagacaccccatccctcccaggtctacacagcatgtgggcacaccctcccagacacaccagtccctgccccccagcaagctcatcctgaagtaccatgtgcatgtctgtctgggtgctgaacaccttgccccaggcctttgtgtgtgtgcacgtgtgtgtgcacaccagcacatgtttgctaacacacttaatgctgtggctcacc

SEQ ID NO: 21230 - DNA, 1260 bp, Artificial sequence
  DNA replication origin
tcgcgcgggacccaggcgtcccggccccagcacccgcgctcctcccagcctctcgaggttctcgggcgcccgggcccccaaccaggcgggccccaaacccggcctcagtgtcttttccgggaacccaagcactctcgcccctcgcccctcgccccttagttcggggccttgggtcccgcaccctccccccacggccagcaggtcttcgcgcagcgcggggctgggacaagccgaaggagaggctgtggaccccgacttgggacgccgcgagagcagggctgatgcggggcctgggccgcagcgccctctgctggctacccccaggggcgggcccgggcttcgaggagcctagagaagggggactcggtgggtccatggctgctgggggctttttccagtcggtagcctggcccccacctcccaccgtccggagggcccctggcttggagcccccagaactgaagaggaaggggctttgctgggataaagacggaggcggtgggggaaggaaaggcagagatgggggcggggtagacctaggaacttgggggtttcccagtcctgcctcatgggaatcccagagtttgaggccaaactctcagttctgcctggaaccctggaccgaggtacgagtaggtgtgggggcagggttgcgcctgcacatgcctggtgactgagggcacctggcagcagcccccttctctgttctcctcctcccatccatgagtttcagttagagtggtgctggggggcgcaggtctctcctgtaagggtacatgcatcactgtgcatgtgtatgagtgtgggggactgggggacacccttcactcactccgccaataaaagtgtacacacactggcacttagtgtgtataccccgaggttggtcactgggctgctgaatgagacagtgagagacagagtgtgtgtgtgtatgtgtgccagaccattctgccagctcactccaggaccctggtttctgttgcagggtctgtgatctgcacagctggtggtagttggcacttccttagccagaggcaacatgcaagaacacttacattcaaccaccaatgcatggacattggggcactcacagccatgcacacatatctgtgaacactgggcattcccagagacacataagaacacctgcagaaatgccccaccatggtaacacacccacaggaagcatatactgcccaagaacacacacacttgtgcacacaggtacctacaccaggcaattaatgcatgcccaga

SEQ ID NO: 21231 - DNA, 849 bp, Artificial sequence
  DNA replication origin
ttactaaaggttctgaagctgggccgggctgcccctgggatcaggagactccagacagcagtcctgacaatgggaactacctcctcagtcccccaaactgggaggtgtcccacagcagctgtaggattgtcctaggggtggagacctgagcaccttccactccaaagcacagtatctgtgggcctggcagtggcctcagttcccccatgagtgccccggtcccccaccccagggtttccccacatcacatccatccctgctttgagaccccactccccctggcctgttctttattttgggtcactcccttctctttcctggtcatatctctcctgcaggcctaccctgtgttgggccccccagccctgtctctgcatcgggtgcccccctgcccctccttctgtcctcagccccctccgcccttccccctcttgaggctgtaatatccgtttcacgatttgggggctgagttgctataacaacagacggcgattgtgttgtgaagagcagctcgctcctgtgccgcctgcctcctgtgctgcctccatccctgcagcccagtcggttcctcttggctcctctcgtcactaccctccagttccagtctggcctcttcctggtgtgtgtgtgtgtgtgtgtgtgtgtgtgtgtgtgtgtgtgtatgcatgcatgcatatgtgtgtccaggtctgcctgcccgggatgtgacaagtagcggtcttcatggttgcatgtgtctgaatttggtgtctgagcttcacattgtatgcgcctgtgtgcatgtgtgtgcatggacatgcatgctgtatctgctgtgtttcccctcccccatgtgtccccactggcctt

SEQ ID NO: 21232 - DNA, 853 bp, Artificial sequence
  DNA replication origin
aaaattgggctgtgaggtcatgcagggaattgatttttggtgggtgggtctgcttctgggatgatgtggatgcctcccgtggagaggggaagggttgatgaagtcccagggacctggaagtgtgttctgcagcaatccccctcccagcagagatccgtgaggaggaggtacagacggtggaggatggggtgtttgacatccacttgtaatagatggtgagtcctcccacagctggcaccagagctccccactgagggctgggggggagctggggagtatcagggaaatgggtgctttatccaaatggctccaagccaggtgggctactaccttgttgttaggggggtgtcttcctcacaacctgtttttctcttcccagctgtggttggatcaaggactcattcctgccttggagaaaatacttcaaccagagcagggagcctgggggtgtcggggcaggaggctggggatgggggtgggatatgagggtggcatgcagctgagggcagggccagggctggtgtccctaaggttgtacagactcttgtgaatatttgtattttccagatggaataaaaaggcccgtgtaattaaccttcaccatcagcgcctagaatcccggggggtagggggatggtatactttacaggatgacaatcttgggagctagaactttgtagccagagaaacttgggaggtctggaatctcatgtgtctggagtcttggggaagagaatcttagaagcagaaaaccttggaacataagaatcttggggagggtctaggatcttgaggagaccagatccttggacatctaaaacttgaaactagtaggtctgcacccgagaattgc

SEQ ID NO: 21233 - DNA, 949 bp, Artificial sequence
  DNA replication origin
tgtgggggtatgactcctctgtcctttgtccccagctctgggagggtctcacggaactagtgacggcgacaggcaactatggcaactaccggcgtcggctggcagcctgtgtgggcttccgcttcccgatcctgggtgtgcacctcaaggacctggtggccctgcagctggcactgcctgactggctggacccagcccggacccggctcaacggggccaagatgaagcagctctttagcatcctggaggagctggccatggtgaccagcctgcggccaccagtacaggccaaccccgacctgctgagcctgctcacggtgaggagcagggggcagggaggtggggagctgggcaccaggggttgacagtttccccaggtcctggctgtgggcgtggcctggggctctgggttctggccaagaaactgagatctagcgtgggctctggggtttggagtggatgctgagaaggggtccaggctctggttggggctgtggactgaggtctgatctccaggctggtatgtggactgtgggcagtttgaactgggcctgggtcccgggttgagttctggcaatgggctgtgttctagggctgggccaagctctgcattctgtgggcaggggtggtttctaagcatggccctgggctcggagtgaagttctgggcttggctttacacttggtcttggggtctagggtgggagttgggttctggtttagatccagacaaggttctagacattgggctggggcttaagtgttaaggtttggagtggattcttagctgcttctgggctctggaggggatcagggttgaaatcagagcttctggctgggttccgacctggcttcttccctgacatcttggcaatatgttgtgttcaaggtttggggccatgctgtggtttgatctgtgcgctgggatgacatgggggttgctgtgctgt

SEQ ID NO: 21234 - DNA, 1565 bp, Artificial sequence
  DNA replication origin
ccgtcggttcccttcttggtctagcagagccttcagctccttgatctgctcagccaactccgggttcaagtcaaactccgctgggaaggcggagatccagtacctggaggagcggggagtcacccaagatagcccttcccccaccatcacccagcaggctgcaaggagctatttgagattatagtcacctaagcaaaaagaccctcaaactatggttccagctctttccttcgccactccaagtgtacattagacccttgagacaaccacccgcactgcgcagaaaagaaaattaaggcccagacccaggaaggggtgagcctgtggcagcactgcccacccggacaagccagggttcaaacccactcccagaaacagcgccctgccccctcctccaggccagcctgaagccagagagaagggagaaaggggaggggctagagccccaggggaaagactcacctgaccaggtggcacgttttcacctgcagggaattggagttgtccttccgggattgttggtaggtgaaggagagggttaaggaggccgcttaactctagaaagggaggcctgcgtggagggaggctgggggcggggcctggttctaggagacacgttctagggatggggcttgcgctctgcggagatgctgggggtgaggcttgagctctgggaggggttggaggtgggggtggaggactaggtgctgagggaggctgaaagcaaagcctgggctctgggagagagagatgcacggggcgcacccaagcctgaagcaggggcaggccccagactctagggagaaggagggcaaggcctcggctggggacagagcctggggacaggaccgagtcgctaggagcaaggagggggcagagcctaggccctagttggaggctgggacgacgcctgagctctgggataaggagtggcctatacttaggagcgaggctcattctgcacctgggctgggcagaggggctgcgcatgggctccgacggcgggggccttggcaaggccggcgaaggatatatgtggagcagcttggccgccagctgagaggaggggatgtaccaggggtgcatcatgaggaacatgcgcaccagctgcgggtcccgcaccttcccggagtcatctgactccgaagggtcaaagacaggtggctgagctgggtccgcagctaccatgcctcatcctcaccccgcaacccgccaggtatcggtccttcgggtgcacgctcgaccccgcccacctcctgcttgcccaggactccgagagcaggaggcaaattagagaggaaaggtgtggtgggcgagagataggcacgccctgaggactggaggaggggagcgcccgagccgcccatcgtccggaggggaaccagctggggcggaaggagcctgggttccccggggtcaagaatccagaggtcatttcctgagcgcttggggggaaggggcaccccttcaccagataagccgccccccattagccggaaacagctcccaggccggagatagcgagttcctccggattccccgggagacagataatgcccctcaag

SEQ ID NO: 21235 - DNA, 1601 bp, Artificial sequence
  DNA replication origin
ttcgtttcggtcccccctccgcgtcccgggcggcggggcctccggtcgcccgccctcggggcagctagtggcgcagccccccgcccgcggccctggcctcccgggcggcgcggcaggggaggggttaagctgccgcagggaccgccgcgtgcggggcgagagggagcccccggtgggggtggcgcagccggcggtgcggagctccgcgcaggggcggaggggggagggggcagcctggcgcgggggcgggggcggggcggcggggagcggggccgcggcgtggagagcgggcgggagccgcagccgcagcgaggccggcgggcgggagcgcacggaggtggggtcggccaggccggtgcgggctccttgcggcaggtcccaagagtgagtgggcgagcgcgggcggggcgccaggcgaaggagggcgcggcccccagcgactccccccccgcccagggcggcgcgggcgggctgggggcggcgagcgggtggggagtctgcggcccgggtctgggagagggggcagcggccacgagagctaaggcgcgctggatccccggagggcggaggacctccacggtgcacccagcttttcccagccaccttccagcggggccctcccccgcgtacccccatttggcagatgagaaaattgaggctcccagaggccaagtgattctcaaggtcacacgaggaagcggtagagccaggcggggacggctctgggtggctcttaggaaaagtccgcctgagaactccgtacaggagctcccctgtcctccagcctgggggagtgagtatgtgtagggccggggtacctttccgtggggcaaggctctgccaaaatctgggagtgaggggagtcagggagctggggccgcagggcgggccctgcaccgcaaatgggaggggggcgacggaatgggcgtgcgcacccatgggggtgtgtgcatgtgtgtgggagtgtacatgcgtggagaggcactgccttgcgtgtgtgcacacgtgtgaggatgtcagcgcctgtgtggccgcgggactcaaggctggcctggctcaagtgaacagcacgtccaggaggcgacctcgtccgcgggtttgcattctggggtggacgagctgggtatgtgtgcctgagggtttcttcgtgcaggtgtgcacagggtgtgggtgccattgtgtgtgagagacggaggatgggaggccggtgcctgtggcccggtgcgtgtaagtgcggacgcctgcacctccacttaggtccccggcctccgacgaataacttgggtgtggagtgtttgcccctgccagggtgcgtatgaccccgccagtgaccggagttgctaatggtgtcatgcacccaccggccacccttggcgcgagcgcccccctctggacaccctgctccgtgcgcgctcacagttcgcctgtgcggggccggggccagggtcaggagccggggatagggaggaagagggcctgtggacaagctgagccgggacccctgggacctttgcggaggtggcctgggagcgctcagttcccaggctcaggcttcccgctgacgcctcctggccgcagcgggctccccccgccccaggaat

SEQ ID NO: 21236 - DNA, 1313 bp, Artificial sequence
  DNA replication origin
cacctccgtgcgctcccgcccgccggcctcgctgcggctgcggctcccgcccgctctccacgccgcggccccgctccccgccgccccgcccccgcccccgcgccaggctgccccctcccccctccgcccctgcgcggagctccgcaccgccggctgcgccacccccaccgggggctccctctcgccccgcacgcggcggtccctgcggcagcttaacccctcccctgccgcgccgcccgggaggccagggccgcgggcggggggctgcgccactagctgccccgagggcgggcgaccggaggccccgccgcccgggacgcggaggggggaccgaaacgaagagcccctcccccaaccgcggacgccccagtgccccccgccctgcctgggtgtcgggcggaggaagccgggaggggcaggaagcggactgcggtggggaaggggcgccccgcccagcccccagctcgggttcctgttttcgagacaaaccgttcccatggggctaacccggcccgggaccgggcgtcttcctgcaggcagcgggtggcacaggcctagtggaggtcgggggcgtggggacagctggtccttgagatagtctgggggatgggctaggacaagatgggaatattttggggagagggacctgtggggagcgaggaatgaaatcgtggctatctggagacgcggccttgatgtctgggaatgggggcggggggcccagttcacacaggaggaacggggccccggaagcctggctccccacagggtcgaatggaaaggggcagccgcatgtggcggtgggttctccgcagctcggagactggagacctggatgcctggccaacagggaggaacttgggaggggcagccgcaggcggttggggtccccactagccgggcctaggagagcgggtaacggtttccgaccatttggcttcagacacactcactgtgaaaccaccgaccccaaacctcccttccgaggcgtgcccctcccagccttggggcgggggatccaggaccgcccccgcacctcagtcttggtaatgtaagacttagaaacaggacctttctgttcctcagtttccccataatgagggcctagactaggcggtctgcgagtgttccctgccgtaacactcccccgactttggatccagtgtagccacctgctaagagacccttaaacgccgcagtagggcggggctaagggcggagccaagaaggcgccgagcatcctctgcttcctccccctcctgggtcctgccctcgacagcgcggatcctccgtggtccgggaagcctcagccc

SEQ ID NO: 21237 - DNA, 1669 bp, Artificial sequence
  DNA replication origin
caggaccgcccccgcacctcagtcttggtaatgtaagacttagaaacaggacctttctgttcctcagtttccccataatgagggcctagactaggcggtctgcgagtgttccctgccgtaacactcccccgactttggatccagtgtagccacctgctaagagacccttaaacgccgcagtagggcggggctaagggcggagccaagaaggcgccgagcatcctctgcttcctccccctcctgggtcctgccctcgacagcgcggatcctccgtggtccgggaagcctcagcccaagtcccggctcccagccccggtgggccccacccaggcagacgccccgcccccggccagcgaggctggccgctgacctagtatggacacggcactgggaagagaggcgtggagggtgacgccaggaaaggggctggagaggcctaggccccgcccccacgggtcgccccctccacctcccatcaccgtcccgccgtgggacgcacctgccgagggtggaggataagggggtgactgcgcggctgctgttgagcccgccaagagctaaaaatatttcccaacaaagaggagtaaggaggctcccaaggagaatgaatttattagggagtgggtgcagttggtcagaccccataaataggaggggaccgggagcccgaggacggaagggggcccgtgtccttagtcacgctggacactgggacattgagagtggggaaaatgagggttccaggaggggcttagagatctaactccagtaccccaccctctgcatgaggtgctggggctggcccaagagagtgtgacagactcaagggctggtttggggtctggtctggaggctcagatggcctcatccggggctggcaggcgctggcgggaaggctccacaccccagatctcccgggcatactgggcaatggtgcggtcactggagaacttgccagaggtggctatgttccggatcaccatccgcgtccactctcttgggttctgcaggtcaaagggaagctctggttcactctgctggcaggatctccaccttctgcctcatcccaaccagggccaccaaagccctgccaacccctggcccaggacccctcaccttgtacaaggcgctgactttctcctggcatttaatgtagtcttcataatctgcgaagactttaaacctggaggggaaaggataggcatgtgctattcctttagggggctaggataagttctatgaggtcaagggccaagcctgccctgtcccagtggacagccggggacctagagggtcatgctgcttccaaaggcgcctggctccaactaccaggacccgcgtccggcttccccaccacacacctgagcctcgatctgccctgcggccccacctgagtgattcccgggccaaccagctcaccggtcatggtgcatgagcatattgacaatgtccttgaacaggtcgggctgtttgggggagaagaagccactgctcagctgctcaatgacctgccgaagctcaggaatgcgatcgtagtactcctgggcattgtacctgccaggacagagctgtggtcagctccccggaaaggggttcctggctcctcttccagagaaaagctgagaagtcccatgccccagggtcaaaacccaggtccagcctgctgctc

SEQ ID NO: 21238 - DNA, 2457 bp, Artificial sequence
  DNA replication origin
ctctgcctcggggttcccttcccagtttgggagcgtgggaggatatgaatggagtgaagggatcagagcctgaggccagagggaccgtcctggaacctggcactgcagtgggggggcccactgggatgcgtagtgtgtgaggagacccactgggctgaggtcagcatcctgactgcccaccccgtgtgccaggcgtgggatgtgacagtgaggacctgtgcctacaccaaccacacggtgctgcccgaggccctggagcgctggccggtgcacctcttggagacgctgctgccgcggcacctccagatcatctacgagatcaaccagcgcttcctcaacgtgagtccggaggcttgggggatggtgtgggggtgaggggggacacccagtctgggcctgggagtcggggcgtccagccagggccctgagactctggggcagtgggggcactgggcagagctctgggggtgtggggctggggactggggatgggggttcctgggtctggttctagctctgggctctctgggcacagcgggtggcggccgcattcccaggggacgtagaccggctgcggcgcatgtcgctggtggaggagggcgcagtgaagcgcatcaacatggcacacctgtgcatcgcggggtcgcacgccgtcaacggcgtggcgcgcatccactccgagatcctcaagaagaccatgtgagccccgctttccagatcccgcccctctctaggccccacccactccacgcctctgtcacacagaagccccgcccttcaccgaccactctctggtctctgggccctggcgcctttcacaggtggcgtcattcttacaagcacagcagccccttccagtgccgccctgtcctgagatgacctcctcttacacacagcacccccaaccttccccaggtctgcattccctgccccaggcccctttcagcaagacaccagggtaggggccccagggcagaggccttcattgtacaggggtgagtggtgaccctcgtccaacctcatcctgcagcttcaaagacttctatgagctggagcctcataagttccagaataagaccaacggcatcacccctcggcgctggctggttctgtgtaaccccgggctggcagaggtcattgctgaggtgagaggccaccgtagggccagtagagtcaacatgggtccctgcagggatcagctgggtatggtcgtgtaggtggttcactgcatcagggctcccagctgaaggctgaaatccctcctgcactgtgttccccaagcctcgcatccacctggaggagggacaccatcttaattgcatgagggtgctctgtgtgctaatggaggccctggctgtggaggtgaacacagcagagggagtcatccatgggtcacatctgaagtgagcctggaagggggcagatatctggtagggaaggcgcaaggtcatgctggcgttaggaaaaggccaggaagccaggaaggcctgctggggtcaggtggggtcagccatcagagctcaaggacgggaggggaggaaggtgcatggatgccccgtgccccatctgggcggctggaggaggaggggctgggagggcccccagagcagcctgctgggtgaagggggcttggctgacctggaaatggccccttctgtgttgggaggagggaggacatggggatgggcttggctgagagccgtcttcccatagcgcatcggggaggacttcatctctgacctggaccagctgcgcaaactgctctcctttgtggatgatgaagctttcattcgggatgtggccaaagtgaagcaggtggggagagatgcaatgtgggacagctgtgctgtgtggagagcgctggaggggccagatgtctgggtcaggcgtggcaaatagagctcatctctcctgccagcccaggccgttggtggaagttgcctggagtctgtggtgggaaggcatcatctgacctcacatgaacagtgctgacattgattagcaatgtctgccctggtacaggagtggacagaagtagccagtgagcctcctggtagccatcctcctggggctgactggagtgtggactgtaggatttcctgaggctgtggcctgttggtgagcccttccccgtctctgcctccaggaaaacaagttgaagtttgctgcctacctagagagggaatacaaagtccacatcaaccccaactcactcttcgacatccaggtgaagcggattcacgaatataaacgacagctcctcaactgcctccatgtcatcaccctgtacaaccgtgagtggcagccactctaccctgtctctcagtgctcccccgtgttcctgcggcatagtacatattgcccaaccaacatctcctttggacttgggactactcttgggacatggaattatccccatttcacagatgggcaaactgaggctaagagagcatagca

SEQ ID NO: 21239 - DNA, 2697 bp, Artificial sequence
  DNA replication origin
ccagggcccagagaccagagagtggtcggtgaagggcggggcttctgtgtgacagaggcgtggagtgggtggggcctagagaggggcgggatctggaaagcggggctcacatggtcttcttgaggatctcggagtggatgcgcgccacgccgttgacggcgtgcgaccccgcgatgcacaggtgtgccatgttgatgcgcttcactgcgccctcctccaccagcgacatgcgccgcagccggtctacgtcccctgggaatgcggccgccacccgctgtgcccagagagcccagagctagaaccagacccaggaacccccatccccagtccccagccccacacccccagagctctgcccagtgcccccactgccccagagtctcagggccctggctggacgccccgactcccaggcccagactgggtgtcccccctcacccccacaccatcccccaagcctccggactcacgttgaggaagcgctggttgatctcgtagatgatctggaggtgccgcggcagcagcgtctccaagaggtgcaccggccagcgctccagggcctcgggcagcaccgtgtggttggtgtaggcacaggtcctcactgtcacatcccacgcctggcacacggggtgggcagtcaggatgctgacctcagcccagtgggtctcctcacacactacgcatcccagtgggcccccccactgcagtgccaggttccaggacggtccctctggcctcaggctctgatcccttcactccattcatatcctcccacgctcccaaactgggaagggaaccccgaggcagagagcatcagatggggcagaggggccctgaagcccaccttgtcccagtccatccgttccaggtccaccaggatcctcatcagctcggggatggccagggaggggtgggtgtcattgagctggatggccacctggggtagggggaggggtcagtctgggctccaaaccacattccatgctatggtcactgccctatgccatttggaggcccccagagagcccagcacggttctgtgactgggctgtgggcagaggcaggccggtgctcatgggggtgggaggaatggggggagtggggcgggaggaggagggaagcccaggttctgagcctgtggattgtgaatcctgaacaactgaccctcccacactcccagtctccactcccttatctattacatggggcaggcaggccgaggctggagggagaggcctagcacacactgtccggtcacagagtcgccctccacacgcatggtaccttatctgggaaggcatcgaagttcgtgcgcacgggatcacggcagccgaacttggaagacttgaagcgacggatgatgtcctggagggtggcagccaccacgaaatactcctgcttcagccgcagctccttcccttcgaagaactggggacagcatgaggcagcgtgagtcagggcggtgggggcatggcctaaagctgcggtgggtgtggccaggagggactcccacccataccgggacccctgagccctgagccggccccctctctgggacccaggggcctttcctccaccaagaactagtggcgagagacagtgtcaggaagaggggtacaagaaccgagtgtgttgtgggtgtcgccagggaacagcccctccaaagtgcccttcgctaacccagtttcctcaggactcaggtgtccttgcactcaaaagacttgaggtgggggcacaggatgcacaaggccagcaatatgccctgggtgtgactagggcaccagcaagtgtccttccccagctctccctgacccctgctgccaaggactcaggcttccagcccccagcccagggggtgacgcacattatcattggggtacaggacacgagagatgttctccgccaggtttcggtccaacacagcctggatgtagccaccgacattgactgagggacaaaagtggggacagggtaaggcctgcgctgggcgtggccggcgggcaagctggggttgctggctaccagtggatgaactcacagtccttgaggttgaagtcattgggagccttggcagaccagaggcgcatggtgttgacaacattgttgcgatagccaggcacgggcgtatcgtagggcatggccagtaccacctgcggggggcaatcctgtcaggagctggccagccctggcaattgcctccctcccctcagggctgggactcaaggctttatccctgcactctgcagacccaggctcttgtccttgtctagcatcgatgagctgggtaaccatgagcaaaccccatagtctctctggaccgcatctagagcaaagacaccctcaacacctccccgacacccataagccctgcctgggcagacggtggtgaggaaaatggaaggaggcaggtgataagcccggaacccaggaggggctctgttggcgaccactctgcagcaatgggggctgggctggccagcctggcctgagcaaaagctagaggacactgtggactcatgagagggctgggggaacccagggccaggctgaaggggtcacagaggtcaagtccatccaaaggtctcatctctggttgaccacagggctaattcacggtgactaattctgccccgccttccataactagcaaacatcaataattgtctgctaccacggtgccaggggtacattcactcc

SEQ ID NO: 21240 - DNA, 1088 bp, Artificial sequence
  DNA replication origin
taccgtgcgcgaccacctcgtggggcgctggatccgcacgcagcagcactactatgagaaggaccccaaggtgctgctggggagcctggggtgggggtatgggctgaaggcgctgccagggagctggcgatcttgacttaagtggctgcccctcgtcactctaggttcttgggggtggagaatccaggggtgccaggcacaaggggtgctgggacaatctgagggagaaacctggggcaggagtgggggtcagggagctcagagcaggtgggctggctgcaaagggtcagtgcccactcggagaaggttggagtgggtgctggtgggcaggacggcgcctgtggcctggctgggcccaggtggaaggacacatcagttgctgcatgtatgcgcggtgtgcctgtgcagcaggcggggctggggcagctggggcggcagagatcaagtgtccggtggggtcactggtaaatgtcagcaacctgacacgcctcggtggggagtgggggaggggcgggcagacggcccaggaggggacccaggaaactgggagaccaggcactggcagcatcctagtttctggtgcctctgggtctccttgggattgaggcttgagggccaaggggaactggacagtgcaaggatgggaggtgacagtctctagcccagtctctagccactgtgtgaccttgagcaaatgacttttttctctgggggtgtgtgcagggggaaggggtgcccattctcccgagtacctcagtccctgaagtgggtatggccagcgctatttcccagatgaggagactgaggccaaagagagtgatttgtccaaagtcagaggaatgctgggaccagaaccttaaccgctgggccccaaagcctgagacagggagaaacaaattggggacagggatgggactgctgagcagggcaggcgggccagaggtccaggcgtggctgggcctggctgagtgttggtgtgtggccctgaccccattccctgcccatccgtctctctgggcagaggatctactacctgtctttagagttctatatgggacggacgctacagaacaccatggtgaacctgg

SEQ ID NO: 21241 - DNA, 767 bp, Artificial sequence
  DNA replication origin
ctccctcccctctcctctcctccccttgccctcaaaatagctccctgagctgccaggccaagaccctcccattgcaggggaggcggggcgtgctgcccagagccaggctttaaatccccttgaggctggggagctccactccttggctggaggcagtgctgaggccgccgtcccctctaccatcagtccagtccggcccgccctcctgcagccatgtcccggcccctgtcagaccaagagaaaagaaagcaaatcagtgtgcgtggcctggccggcgtggagaacgtgactgagctgaaaaagaacttcaaccggcacctgcatttcacactcgtaaaggaccgcaatgtggccaccccacgagactactactttgctctggcccataccgtgcgcgaccacctcgtggggcgctggatccgcacgcagcagcactactatgagaaggaccccaaggtgctgctggggagcctggggtgggggtatgggctgaaggcgctgccagggagctggcgatcttgacttaagtggctgcccctcgtcactctaggttcttgggggtggagaatccaggggtgccaggcacaaggggtgctgggacaatctgagggagaaacctggggcaggagtgggggtcagggagctcagagcaggtgggctggctgcaaagggtcagtgcccactcggagaaggttggagtgggtgctggtgggcaggacggcgcctgtggcctggctgggcccaggtggaaggacacatcagttgct

SEQ ID NO: 21242 - DNA, 1006 bp, Artificial sequence
  DNA replication origin
gtggcttccctggccagttccaatgtcctgctaagtccctgctctttccttccatcaagatcagtacctgggaagtacgcctgtgggctctggggtctatcgcctgcatcaaggaaaaggtaatggctgtctgctggctgtgggtcttcacctaggcttgggtgagtgggggttctggcccaagtccccgcctttccctgaggcctcatctttgcctccacctgtccacaggtatgatgccgccaccacctatgggcatgatgccgccgccgccgccgcctcccagtgggcagcccccaccccctccctctggtcctcttcccccatggcaacaacagcagcagcagcctccgccaccccctccgcccagcagcagtatggcttccagtacccccttgccatggcagcaaagtgagtagaatattttgggcttgtgggggtgggtgggatgggggtggggctgacaggaaccatagagcctcacacaagcaggcaggtgtcttgggatgagcccctgggctctgctggggttgtaaacagaaagggcctcctggtccagggggtggaggggcatcttgaagaggagagctgatgtttggtgtggttgtgtctggggagaggttcgtgggggcctggaggggagcctgctattgtaggtagggggccagaagtccagaccctcgcaggctgagtgagcggctggctggactgagcctggtgcatatgggtcgagtgggatggtgcatgcttgctctggcaagggctgcgattggggtgagagactgcagaggtgggactgggcagtggggagacagcagctgtggccttgaggttgaatgtgccgttcggtggtggcggcggctgggcggagggacatcagagctgttcttgtgtctggtaccttcccctcagcccttccaggggcattggtgacaaagggcttactctgttaagcccagagacctcgaggctgaccccagggtagtcctgcccacccctccactcc

SEQ ID NO: 21243 - DNA, 878 bp, Artificial sequence
  DNA replication origin
caggctcagtccagccagccgctcactcagcctgcgagggtctggacttctggccccctacctacaatagcaggctcccctccaggcccccacgaacctctccccagacacaaccacaccaaacatcagctctcctcttcaagatgcccctccaccccctggaccaggaggccctttctgtttacaaccccagcagagcccaggggctcatcccaagacacctgcctgcttgtgtgaggctctatggttcctgtcagccccacccccatcccacccacccccacaagcccaaaatattctactcactttgctgccatggcaagggggtactggaagccatactgctgctgggcggagggggtggcggaggctgctgctgctgttgttgccatgggggaagaggaccagagggagggggtgggggctgcccactgggaggcggcggcggcggcggcatcatgcccataggtggtggcggcatcatacctgtggacaggtggaggcaaagatgaggcctcagggaaaggcggggacttgggccagaacccccactcacccaagcctaggtgaagacccacagccagcagacagccattaccttttccttgatgcaggcgatagaccccagagcccacaggcgtacttcccaggtactgatcttgatggaaggaaagagcagggacttagcaggacattggaactggccagggaagccacccctgtgataacctcagttgctatccttacgcgagttctgaaaaccatgcctgtaaaaggcaggtctgtgcttacccaacacagaatcactccctgaaccagaatggagtcttgctccttccagagccacaaccctggcaagccaggcagacccagcacat

SEQ ID NO: 21244 - DNA, 1738 bp, Artificial sequence
  DNA replication origin
ctcccgggccgccgccgcccccgcccgtgggctcgatgggggccctgaccgcggccttccccttcgcggcgctgcctccgccgcctccgccgccgccccctccgcctccccagcagccgccgccgcctccaccgccaccgtcccccggcgcctcgtacccgccgccgcagccgccccctccgccgccgctctaccagcgcgtgtcgccgccgcagccgccgccaccccagccgccgcgtaaggaccagcagccgggcccggccggcggcggaggaggtgagtcgggccgagagagcgcgagaggcgtcgcgcggacgggcccggccgcctgaggggcgcgcggcggcggcgacggcggctgcacgcggcaggggcgcgcgtgcgcgcacggggaggcccgggcggaggcgcccctgggcgcgcgcggcctggttctagggcctcgagtgcgcacgcgcgctgtggggggagggctgggcgggcgggaggcgctctgtgcgcagacgcagtgaggtggccgggctgtgcggcgcaactgtatagactgggggcccactattgctgtccagtccgctggtgtcgggaacaggggtggcgggtgttcagcgctggacggggtgctagctgtgaatgccagcagggcgtgaaagcctcacctgatgacgtgcagcgactcccttctggtcttgaggaaccagaatgggaaccgtaccaaggatagctcctctgcttctacagcaaggcagggttttcatccgggagaggttggcatgcttcagatgatggttgggtctgatctttcttggtctcttttggggagagaattttagtttgtttttttttttaaatctgttcagtatgtttagatctcagtctgatcggctgccctgtcgctttgttttaaaaagcttttccctctgatcctgtaccccttgggaaatagaaggactcttttgtggcaaatgtagggagtttctgcctatgtacggggaaaggagaacttggctgctattgtataggttgttgaatttttgatagatccttttaagagttcagaccctcagtgtccaactggccaggaaaactgaatgctgatcttggctaaacttatgaagacaaaggtgatcttgttgaagaattgggcttttcccacttggtagggtgtaactaggtttagttgtggtccggcctctcgtacaaaagtgactggtgaggggagtggaggtgggtggagcccccagtcccatcaggactgctttacaaatctatgattcttcagtgtatttttgtctcccctggggatttcagagcactcatggttgatgtagtatctatctaacactctctgcagccatatgcattaagattaccacgtttatatatctgacagtttttctagacaaaagaaggtgaaatgttaacttgcctgaccaaggaccacatacccttgtagtggccataagctttaaatctctgatctctgaggtttgttttctgtttttttaatgtttaagttttaggttaagctctcagcttcacagtctgctgagtttctgtgtagtaccttaaatacccttagctgtctgttgataactacttgtatttacatcggatggattttgtctctgccttttagacttcccaagtaagaagcggaagaggagccgctggaaccaagacacaatggaacagaagacagtgattccaggaatgcctacagttattccccctggactta

SEQ ID NO: 21245 - DNA, 1080 bp, Artificial sequence
  DNA replication origin
gcggcggcgggtacgaggcgccgggggacggtggcggtggaggcggcggcggctgctggggaggcggagggggcggcggcggaggcggcggaggcagcgccgcgaaggggaaggccgcggtcagggcccccatcgagcccacgggcgggggcggcggcggcccgggagccagcagccccgccccaggcccgggtgcaggcggagggcccggctcgaagcctcctttgggcccggggagcgggggcagcccgggggggcccagcttacccaacggcgtggcgttcgctccggtcgccatggcgcccccggggacaggcaccggcacctgcttttcctctgcggcggcttctccttcgcaagcctcccggggggaggggacccgaatgcgctgccggagcgcgcggagcccgtcctctcacgcggcgggcggcggcggcgcgagacgcacaaagagggaggagagagggcaccgcgggggcgggccgggggcggcggggccggggcctggattgggccgggccgaggcgaagggtcgaaatcggcggcctccgattggcggagcctcagtccttcttgatgcgcgctgggattggccgaaccgttaggccaagcgaggaaatggcggcggagttcggtgggctgggaggtgtcgcagcgcgcacttcatttgttactgcgtgaactgagctccgagtccagaaaggaggggatggggtggggcgaactctatgacggagcgacggcgagctctctcattggctgcggtggtggactcaatcaatctcgcctgcgttgtagtgtcgcgggattggctgtcgctggttccagcctttttctactcccctcccccagggggcagtttctccgggattaagcgagagtcgcggcggaaaaggcccagccggaacgagatttacggcgggggagtcctggagcaggaagtgcgcatgcgtagatggagcaaaaccgcctctccacccgtctcccttcaccatcgacccttgggtccagcaaggaagccctaagtgacgtcaacctttgttcccatggtaacgcagaaccttggggcgggagcagggg

SEQ ID NO: 21246 - DNA, 944 bp, Artificial sequence
  DNA replication origin
cctgagaggcagaggttgcagtgagccgggatcacgccactgcactccagcctggccgacagcaagagtctgtctcaaaaaagaaagaaaaaaagcccaaaaaatcaaaaaatggggccaggcgcagtggctcaggcctataatcctagcactttgagaggccgaggtgggcggatcatgaggtcaggagtttacgaccagcctggctaatatggtgaaaccccgtctctactgaaaatacaaaaattagctgggtgtagtggtgcgcacctgtagtcccagctactcgggaggctgaggcagaagaatcacttgaaccctagaggcagaggttgcagtgagtggagattgcaccactgcactccagccagggcgacagagtgagactgcatctcaaaaaaaaaaaaaaaaaaaatcgaaaacttagctgagcatggtgatgtaggcatggcgttgtgtgttggtggtcccagccactcaggaggctgaggtgggaggattgcttgaacccaggaggttgaggttgaagtgaactgtgatcgcgatcgtaccactgcattgaagcctgggcaacagagcaagaccttgtctcaaaaaaaagaaaaagggaaatgtggacagttagcagccggtactgaggtccagttagagggagagctgggaggtgtggagaggcctcagagaccgggcaagcttgggaggttcgaaagtgtgtcagggtttctaggcaggtgaggtagggaatggcactccaggcagggggaagagcaagtatatgttagtatgtgttggggcggagcagcctggtgagctggggagctgttaagagtttgcctgggggccaggcacagtggctcacgcctgtaatcccgcactttgggaggctttggcgagtggatcaactgagtcaggagttcgagaccagcctggtcaacatggcgaaa

SEQ ID NO: 21247 - DNA, 1061 bp, Artificial sequence
  DNA replication origin
acgtctgggccctgggcatcactgccattgagctgggcgagctgcagccccctctgttccacctgcaccccatgaggtcagcccaacacttgcccctcacctgacccttgatctgcggcctgtggcccctgacctcgcgccctccacagggccctgatgctcatgtcgaagagcagcttccagccgcccaaactgagagataagactcgctggtaagggccacaccctgctgccgggacccccttttctgtcagccccatagtggacaaacagcctctgccaactcccggggggcaaccccaagagccctgtcctttctgggctactacagaccatctgagtcaggggcctggtccttctgtgggttgaagacccagcgtggtcaggaaagaagggcagagggttggtggaggagccgctgtgtcgcaaggcagcgttgctcggccagtggcccttggcctcggctggctccttcctgggtgggcccagcagacgcctctggaggggtggtagggcagctggcaggacaccctgcacgagggctaacctggatctggcgctggggggctcttgtgccttctaggacccagaatttccaccactttctcaaactggccctgaccaagaatcctaagaagaggccgacagcagagaagctcctgcaggtgggaggcagggggccgggagagaggcccagtactcaaaagcagggccctggatcaggggccaacctgatcacccccctcccccactttccagcacccgttcacgactcagcagctccctcgggccctcctcacacagctgctggacaaagccagtgaccctcatctggggaccccctcccctgaggactgtgagctggaggtaggtgaggggggctggaaagtgagtcttgggctggtctgcttagaaagagcccgagggtgatgttggtggaggtcctttaactggcaccattccagctcagggagctggcctcagctgagccctcccattaggagtctctgtcatgctgacttttgtttcctgtaccacccccttgataggtccctgccctt

SEQ ID NO: 21248 - DNA, 1166 bp, Artificial sequence
  DNA replication origin
gggctccaccacctgcattctcaggggaagatccacagagacatcaaggtaggcacctagctgggggcactcctggggagggaggaggaggccctcgggggcaccagatgggattgtctctcctccattcccacagggagccaaccttctcctcactctccagggagatgtcaaactgggtcagtaccctggggacaccatcagggtgagggctctgtggaccctccccggctaccctggactcaagggttgggtgtcactgggcaagtcactttgccacttgagtctcagtttccctgcttagaagatggaacggtactccctccctgctggaaaatagaggaggttgggtctgcacggagttgacatgggaccaggcactccgtcagggatagagggtggttgacccctctcaggagagggacctggccttgcctagggcctgcggcagctgtgaccaagcggggccacctgcccgtctgagccctgccaggtgcagccgagccagagccctgggcgtgggagggtgagtggcagccagagggctggtgagagtggctgtttctccccacagctgactttggggtgtcaggcgagctgacagcgtctgtggccaagaggaggtctttcattgggactccctactggtgaggctgcgcctggggcggaggggtaggggccacagagcagggcacccggccatcccatctgtgaccccacctctaggatggctcccgaggtggctgctgtggagcgcaaaggtggctacaatgagctatgtgacgtctgggccctgggcatcactgccattgagctgggcgagctgcagccccctctgttccacctgcaccccatgaggtcagcccaacacttgcccctcacctgacccttgatctgcggcctgtggcccctgacctcgcgccctccacagggccctgatgctcatgtcgaagagcagcttccagccgcccaaactgagagataagactcgctggtaagggccacaccctgctgccgggacccccttttctgtcagccccatagtggacaaacagcctctgccaactcccggggggcaaccccaagagccctgtcctttctgggctactacagaccatctgagtcaggggcctggtccttctgtgggttgaagacccagcgtggtc

SEQ ID NO: 21249 - DNA, 1941 bp, Artificial sequence
  DNA replication origin
gcgcggccccgcccccgggcctcagccccgcccccgcggcctcagagccacgggcgcccgccccgccccgcgccgccccgcgccggctccgcagctcgcgcccgcccgcctgccggcccgcccggcgccgggccatggcgctgctgcgggatgtgtcgctgcaggacccgcgggaccgcttcgagctgctgcagcgcgtgggggccgggacctatggcgacgtctacaaggtgcgacgggacgggcgggagagccgggaggagggtgccagccccgcaccccgcggcaggatctagcccccggccccgccccccatcccgcttcaccctccgcccctgcaggcccgcgacacggtcacgtccgaactggccgccgtgaagatagtcaagctagacccaggtgagggcccgggtcgggcctctgcgccagaggaagggcagagcgcccgcgggcgcggggtgcgggcggagggttgacgtttccgagacccctgagaggcgtgccccgggaggtgctgtcacctgcacctgcctggcccggagggaggcactctgtgcccattttgcagatgggggcactgagtcagggcaaccccagcgcgccttccccatgatgctttgtgcttcccaggggacgacatcagctccctccagcaggaaatcaccatcctgcgtgagtgccgccaccccaatgtggtggcctacattggcagctacctcaggtgaggctgccttatcctcctggccccaggcagcccccatgtgacctgctttgtgcccaccccagctctttgtccctaggaatgaccgcttgtggatctgcatggagttctgcggagggggctccctgcaggagatttaccatggtgaggccagggctccaggccccagcaggccccagccttcccccacccctaccccactggggtaccagaggggactctgggccctggacttgggctcctctccactcctgcctggctgtgtgaccttgagagaaatactgtccatctctgggttcagtatcctagactaaactgggaggggacgtggccaacaccgctttcatttaacagtgcctgctgcttttcccacacacggtagcctgggagggtgggcatgacccccgggcccccaagccagcctctcccttttcctttcagccactgggcccctggaggagcggcagattgcctacgtctgccgagaggcactgaaggtagctgggcctgtgaggtgcccacacctctggtctccagaagctgtgggccaggagcccagatgaccagcagggaggcgggtggagtgcctcgggtggggctggcccgaggggctgtaggtcctggggaaaaggggccccagccctgttgccggaagcagtccatttccctcttggctcagtcacttcctgtttggggagaggggaggaagaagcagcctgagtggggggccccagtcctgagagggggtttggggaggtgggacagtgctgggtggctgctctcagggactcctctttgtcgccaggggctccaccacctgcattctcaggggaagatccacagagacatcaaggtaggcacctagctgggggcactcctggggagggaggaggaggccctcgggggcaccagatgggattgtctctcctccattcccacagggagccaaccttctcctcactctccagggagatgtcaaactgggtcagtaccctggggacaccatcagggtgagggctctgtggaccctccccggctaccctggactcaagggttgggtgtcactgggcaagtcactttgccacttgagtctcagtttccctgcttagaagatggaacggtactccctccctgctggaaaatagaggaggttgggtctgcacggagttgacatgggaccaggcactccgtcagggatagagggtggttgacccctctca

SEQ ID NO: 21250 - DNA, 1626 bp, Artificial sequence
  DNA replication origin
gaccgtgtcgcgggcctgcaggggcggagggtgaagcgggatggggggcggggccgggggctagatcctgccgcggggtgcggggctggcaccctcctcccggctctcccgcccgtcccgtcgcaccttgtagacgtcgccataggtcccggcccccacgcgctgcagcagctcgaagcggtcccgcgggtcctgcagcgacacatcccgcagcagcgccatggcccggcgccgggcgggccggcaggcgggcgggcgcgagctgcggagccggcgcggggcggcgcggggcggggcgggcgcccgtggctctgaggccgcgggggcggggctgaggcccgggggcggggccgcgccggggatgccccaccgccagtccgggaggaggcgcccgcgggacgggccctcggcggcgcggggaagccccaaggccggggcggagcctacgtccttccgccgccactgtcgctcgcgctccacaggtagggagcgcaaagtcccgggagccagaagacagagggaagagggggcgctccactccccgccccatccccaatttcccagataaacatggacttgcgctttatattttttttaacaaaatgtattcatctttcttggaactgaaaaataaatctatgtacaaaacaggaagagatcaggctcttgtcacccactcctaaccctctgcagatttcctccgggatgctccgagatgggctggacctctgggaggttcccagagggtcggaagggaggtcctgctctgatccggggccagtttcgtcaggaagagggcggggctcaggatgctcataggctgggggcggagttttgtgtcccagactcgggatacgaaggagaggaaactaggatttccaaattctggagcaggactgaagttatttggggcagggagcttggattcgcaagatatggaattctgaagtgcggaaatatactcctaggggctgagtggtcctaggctcccgggctggaggtgggacctgtgctccttgggttaagggtgaaacctcagctcctacaagctgggaggagccctgagtaacgttggtctggctctaggtgagcggttccgaggaggagcttgggtttctaggggctgggcctttaaagactggtaattaggacccagcgtgaggtttccattggccggctgggattctgggagaagagacctatattctaacgactggggcagagccctgggttctgagctggagaaaatcgtgggtttgatacagactgtactcgggaccgggaacctagggtttgggtagaggtgaggcctgtcccctttgggctgggggcagaacatgggctcagagttgggggactaagggcggagcctgggtccccacaagcggtccgaagtccccagtagttcagaggcctttgcgctgccgcttgaggaaagacagagtgtagtcactaggggtggacactttctgcttcttcatctgcacttgcgactgtgccgtgagttgcagcttgatggcgctcgagttgatcttggtggccaccagcagctccttcatgcccttcatcttctcactctggaaagtgagcactggaccctccggcggtggtgatgctgtgggtgct

SEQ ID NO: 21251 - DNA, 1719 bp, Artificial sequence
  DNA replication origin
agggcacaggccaggccccccacctaggcaaagacccctggctccagaaaaggtaagcataggttgggaacattcttagaacctctttccttttataaagccaatccatagccaggacgtaccatccctacctccacccctcagctgagggagggagtctggccatgaaactgaaggcacagggtagaaacctctaaaataccttcagtcccgtccaacgtgggcccaggacctcagttatagcaaaagggaacatagctgtctgctcagggccaccttcctcctgccatccctaatcccgtacatgcagcccccatggcctgtggaagggagccctgtccaggtgggaggctggacacaggctggagctccagcctttcacctggctttgctcccccggccgctcctcgcccgcctccagcaagctggctgcctccttcagcaggttggggatgacatcattggctacttcaaagaactccttgtagatctcctcgtcttcccggcagtagttgtagctgtgagagcagtggggtctctgtagggtctgaaggggtctcaccatcgggggtagccccagggacctggcgggggatggagcccccaggggctgggggagtaggtggggtcctcactgcaaaatgatgctgtctgggtcagcccagaggaagaaagcaagaatgaggaggggggcatggggccgagggtggaagtcccactgctggatgatggtggttaaacattggagatttgagactgttctgagaaaaaaaaaattaggaggagaggggagggagggaaagatgtgacaccttaatcagggtccctacctcctgggtaatggtggccttgctgcctagggactggatggaaaggggatggggcgtgggagccaggcctcagtcctggacgagggtggttggaaactgatggaggggaagaaaggacaggctgcaggccctagtagggggatcctcactcctggatgacagtggccgtgtccgcccaggcctgcagggcttcccgcacattgcggttgcgacagtggtagccagccaggtacatgtaggggtagatgtgttcatcccgatagtaggtcttggctgaggcaatgccctggatggaggtgaggcagaggatcctcagggaggcagccccagctgccctgctggcacaaatgccccaccagggcacacccagaaggggccacaggaagatcccagggagtcctctccatctccactcccacctccactcgctgccagcccttctacctggtctcctccctgggtctacaggactgctggctgaggcctggggcagactgcaggggtggggcctgccctccgagctcagggcccttctctttctcagacactcttctacacatcaccaaagactttcaagcccagcccaatggccctcctccccacctacacccaccaagtgaacaccccctcttcatcagtgctcctgccacatttgacctctgttatactccaggaaggacagtaagcagtggcagaaaaggcagggctgaggggacaaatgcagcccctgccactcccaggctggggaaccctggacacccctcagacagccctgactgaactgattctgcacacagttgacacaaagtgagactggatgggcgataccccccaacacacaaagttctcttctcatctgcccagatgagggcccctgcctcagccactg

SEQ ID NO: 21252 - DNA, 729 bp, Artificial sequence
  DNA replication origin
gatcctgctggtgcccactggtggggtgagacaggtaagaatctgcatctcgtagaatcgagggcagggatgggctcagcttgttccctagcctaggtcactgtgcaaggcctagcataaaacggaactgcctgacgtttgaataggggacggacaagcctcccggacccgctcacctgcattagggaggttgcagggctcagcgatccctgggggcaggacacagactcgctggacagggatgtccagggtttcctcttcactgctccagcagcagacgaggagacaaaaataccaagatcagatttcagggatccaaagggggtagaaacttggggtggggggtggcacactggaggctgaggggctgcccttactggggtctgcgtctccaccgaggccttcgctgcccatggaggctgggcgccgcaacgcctcggagaagctgtggggccgctgtgggccggagccgcgggcaactcggcccttctcttcgggagcctgttgggtgacagtgcggaggggctgggactagcaggcacaaggaggacaagaggcccaaggcacaacagaccaggacaaatgaacgccactgggcccccagcctggttttacttaagtcccaggtagcagaagtgtgagtcccaggccttaggagtaattacagcggcccgtgattggctagagctcaccacagaggccggttattggctcagcctcaccaaagtg

SEQ ID NO: 21253 - DNA, 1618 bp, Artificial sequence
  DNA replication origin
accctgtcccaccctctgtggcttgcaggggaccttccttttccatggctgagctcatgctcctctcctgcctgagccgctctccttttgtttctatctagcaaactttttttttcttttgagacagggtctctgtctgtcaccaggctggagtacagtggcacaatctcgactcactgccacctccgcctcctggggtcaagtgatcctcccacctcaccctctcgagtaactgggggcacaggtgtgtgccatcacgcctggctaatttttgttttgttttgtttgagacagaggagtctcactctgtcgccaggctggagtgcagtggtgtgatctcggctcactgcaacctttgcttcccgggttcaggtgattctcctgcctcagcctccctagtagctgggactacaggtgcacgccaccacacccagctaatttttgtatttttagtggagacggggtttcaccatgttggccaggctggtctcaaactcctgaccaagtgatccacctgccttggcctcccaaagtgctgggattacaggcgttagccaacgcgtccagcctaatttttgtattttttcagagatggggtttcgccatattgcgcaggctgggagtctcaaactcctgaactcaagcaatcctcccgcgcggcctcccaaagtgctgggattacaggtgtgagccaccggccccggcctgtacctggcaaactcttaactaggtaccaccccagtgtcagctcagggcctggagctggtaggcgctccaaagataaccgctgcgattgctgtggtcaccattgccttcgtgctccccgccctgcttccccgtcattggtcctttccttctctttgccccactctctctccgtccagacctgtgtcacggctctcatcgcctccacttcatgactggcttggtgcactggggtcccacagaatgggccggggctggtttcctcatccacatcaagcccccagcccagggtggcacactccaggggcgatgggcttggaggaatgagtggaagagtgaatgaatgaatgaatgaggcagtggggcagtctggtgcatgcacaagtaactagcatgatgggtaagggctggaagagaggggcagagtgtccttcgtgagcaatggctctttggggtggggcctgcaggttgggtgccgcatatcacccaagctgcccagggccaaatcgcagctctcaggaccagctgagtgacctgaccttgaccatcacatggctccaggggttccattccctcatctggaaattagggattataacagtagtacttgctcagagttgttagaaaattaaggcaggaaaagcatgtcgtgtttagaactgagccaggcatgtggtgagtggtccagggttatctctgatttgatgtggaggctgggccgggcgacagggagtcttcagaggaaggaccttagcgtggggcatggtagttactgtgctgtggcaggggacaaggtgttccctgtggaacagagggggaaacagctcagaggtgcctggcgtgcccgcagggtatgcggccccctacctgacagtgttcagcgagaactccatcgatgtgtttgacgtgagga

SEQ ID NO: 21254 - DNA, 793 bp, Artificial sequence
  DNA replication origin
ctttgccctggcggagctggagaacatagaggtagcaggtgccaagatccccgagtctcgaggctgccaggtgctggcagctggaagcatcctgcaggcccgcaccccggtgctctgtgtagccgtcaagcgccaggtgctctgctaccagctgggcccgggccctgggccctggcagcgccgcatccgtgagctgcaggcacctgccactgtgcagagcctggggctgctgggcgaccggctatgtgtgggcgccgccggtggctttgcactctacccgctgctcaacgaggctgcgccgttggcgctgggggccggtttggtgcctgaggagctgccaccatcccgcgggggcctgggtgaggcactgggtgccgtggagcttagcctcagcgagttcctgctactcttcaccactgctggcatctacgtggatggcgcaggccgcaagtctcgtggccacgagctgttgtggccagcagcgcccatgggctggggtaaggcctgctgagggcttggcaggggggccaggcaccttcagtgggtgggtgaagacagggtcccgcctcaactcatgagcctggcattggaggcctttggtgccagtttgcatcctccagcccaacaacaccctgtcccaccctctgtggcttgcaggggaccttccttttccatggctgagctcatgctcctctcctgcctgagccgctctccttttgtttctatctagcaaactttttttttcttttgagacagggtctctgtctgtcaccaggctggagtacagtggcac

SEQ ID NO: 21255 - DNA, 1476 bp, Artificial sequence
  DNA replication origin
gcgggaccctgtcttcacccacccactgaaggtgcctggcccccctgccaagccctcagcaggccttaccccagcccatgggcgctgctggccacaacagctcgtggccacgagacttgcggcctgcgccatccacgtagatgccagcagtggtgaagagtagcaggaactcgctgaggctaagctccacggcacccagtgcctcacccaggcccccgcgggatggtggcagctcctcaggcaccaaaccggcccccagcgccaacggcgcagcctcgttgagcagcgggtagagtgcaaagccaccggcggcgcccacacatagccggtcgcccagcagccccaggctctgcacagtggcaggtgcctgcagctcacggatgcggcgctgccagggcccagggcccgggcccagctggtagcagagcacctggcgcttgacggctacacagagcaccggggtgcgggcctgcaggatgcttccagctgccagcacctggcagcctcgagactcggggatcttggcacctgctacctctatgttctccagctccgccagggcaaagagacgcacgctggggccgcggccacacagcacgaccagcaggcctgcactggggctcaaggtcagctgctgcacgcgccggcactcccccacctggaagatgtctgcagggttggcgaggggagagtgtcactggcaggtggttgaagagtgacccatccccatcctcctctgcccgctggggctgcccctgcccacgcccaccctagcccagctttgataggtaccgttgctgcgcagatggatgacaaagagcccctcctcggtgccaagcgcaagtcgatcctggtctggtagagggaggcagagggtcagaggtcagcagtcccactcaatgacacggagattgggcagtccacctgccctgctgtgcctgtttatcttgaggaaatgggggtggcaataatcccgctgtccctgcctcactgacccttctctcccagtctggacaggcttttccagaggggttggggtgaggcccatcatcttgagctgtgggattttgggtaagtcatgtcacctctcagagccttggtttccttatgtaaactggggacaacgatggtacttcctcacagagcaactctgaggaagcgaggaagtgatgcaggggagggttcagcagagccccttgctcaataaatcccctcccctctggttcccgactgctccagggacccgcacaacctctcctgtgtctcccgccctgagagccgggcctggctcagggcctcagctgctggggaacgccaaggagctctgtttcatgcctctttcccagccttagttacagaagagccctgctgagccccaggttcaaggctgagcacaagtgaagctcttcgcagctccacccaggagatgttatgaggctctgggtggttctacagcagctcccccagtcccccagc

SEQ ID NO: 21256 - DNA, 1225 bp, Artificial sequence
  DNA replication origin
gtgtctcgtggctgcagggaatgggcagtagcagtggcccttgggactattcctagacaccagcactcccgcaggcctgaactgcttcctccagtcccctccaccagctcaccgaggatggcagcgcagagcgtgtgaggcagcagcggcagcccgttgtcgtaagcctccttgagtgtgtacacgggccggggtcttggccgcgcgtccagcagcagccgctgcagctcacccagcacctgcagccagcgttcccgctccccctcgctctctgccagcagcagcacagtgcacgtggtgggcggcactgccagctgggaggttgtcacctgtgggcaaggaccccagctggagggccgtggaccagagccatctgtcctccctcccttcctgcctccagcagccgctgtgccccgggggcctagcgtgcactgtcagcagcagggagtaggccagacaggcaaacagacaactccagagccatgcgaccagcgccataatggggcaaggacgggcctagtgggaacacagagggacccaaaccggggccgggaagtgaaggatgacttcccaggagaccagacatttctgctgaagcctgagggacgagtaactaaccaggagtagtcaaggtaggtgaggggctgggctccagtgcagggccggcaatttcgtgcaaagacagatgtgaaggactgagaatgtggtgcacacaggcacagggcgccttcagaactggagagagcaaggtgtgaccagagcagagacaggtgccaagggagagggctgggaggcctgcagggtcagagccttggggcctcaagggctaggtcaggagcaccccgagccccgcagacgatgggaagccacagcagatcctaaacgaggtgagaccgggccaggtgctcacgtggaaagcgtgctgtggttgtgggctggcccaagagggcagtatgaagtggggggacagtggccagagctgggacagcatggggaggtggatggtggctgctccatctcatcccaggcactcaccctaaagatgcgtggcaggtccctggattgggcatggataacatcagaggccaggacaggggtagccgagaactgggggtccctgggaggttcacagaacaggtcagaaatctccctgtccctgactgccccccttaccactagtcccttgccccatgccactgcccggcacctacctcagatctaggac

SEQ ID NO: 21257 - DNA, 1827 bp, Artificial sequence
  DNA replication origin
gggacagcatggggaggtggatggtggctgctccatctcatcccaggcactcaccctaaagatgcgtggcaggtccctggattgggcatggataacatcagaggccaggacaggggtagccgagaactgggggtccctgggaggttcacagaacaggtcagaaatctccctgtccctgactgccccccttaccactagtcccttgccccatgccactgcccggcacctacctcagatctaggacctgcaggagggccccactgggcgggctgagcctcaggtcaggggcgtcaaacagcagcaggcgtgagtcactcagggcagcaaacacgcgctgccagccccgccggacacctgagggccgcggcacctggcggaaaggcaagcatgggagggctgcagggaccctcagccccccatgcccatcttcccctccctcggcccccactcaccgacagaaagccctcataggcagtgcctgtgcctgtttcggggtgtactcccagggctgtgcggaggaggtcagggggcacggggcagggtggggcctgtggggcacaggttgtgtgacaaaagtagccgcaggctgtggggaaagtggagaaggtggatgaggtgaggctgggaggggacagccccaaaccaggacgggggcatgtccagagccagcttccctgaagccacggtggcacccgaactgtccccaattcctcatcaagtgagaaaaggaacaaagctgagcaggaggaaatttgaccagcaggtgccagtgaccctgggatgggagaaacagcctgggtatgccagggccacacacctgggaccgtggctggagcatagtgggtggggactctcaccatcacaacccaggccctggcggcccaggcccagcatcagcgaggtgcagcggagacacttggtcggggatgggaagctccgggggcgcagcgtgtgtgagccgggctggggagggggacagccattacccaaggcctcccagggccccatgccccatccctgaggggtcaggaaagacaaggggctgagccaggcaacagtgacctccgagtcccagccaatctatggcggcaggcaagctcatcgccaccacctccaccccaattgtgcctgctagccacgatgcacgtggagtgtccccacagtgcccattcagcctggcagaactgcttggtgcccccaccctgcttgcccctctgggcactgaccttagcaggaagaccttctgtagaggctgtgttggcagtgggtgctctggggaacacagcctgcaggagggcgggggagcaggtgagacgggcaagggcggggcccaggccccctacgatggacccacctgtcctcacccccatgcgcaggctgcgtcggccctccggcctcagatctggctctcctccatgccttgtggcctctcctgagatgccagggtccttggcagaatccttctgggggtgggagagagaggagcaaagtcaaggtccctgtgcctctcccagaacttctccccaacaagccccttggcctggtccttacctctgagctccggaaggacaggaagggaatcagggagtttgagggcttggtgtctgcaaagaaagggtgggtcactggcctggggtccctggcctgaggaactagggtccaggaggggcctcagttcccacctcagtaaaatgggaaatgaccacagggtggggcagggctgggcacagcaggcactccagaagtgctggtcacagatgatggagtaagcggcagagtccaggaacagactcctgtctccaccaccctgccaggccatcgtggagc

SEQ ID NO: 21258 - DNA, 1150 bp, Artificial sequence
  DNA replication origin
aggcctgcagcccctagggcagggaggacaggctctatgcttcccacgtggggcccctcaggctggaggcatggatgccagtctgccaaggtgctgagactcacaaacaggacaaagatgcctttccctggtgctagcactagcccctgaaggcgtgagtgctcaggatgcctccaggcctgaccggctctctcactcccagccctgcctccctgtctggacgaagcttttgtctggtcaagaacgtcctctttcctcacatcccagatacctccaggaagggcaactccagccactcccaggcactttccaggcctggattagccccaggttttgggaaggaattgggtcttagggaggcaggagtgatcagtcaggatggggggcagctgtggtctggcgccctgcctcagtttccccctgccaggaggtaaactccctgccagctgggcgggtctgtgggtgggacagagagctgttccacaggtttatcaggcagaagcccgcagcgggggcggggtggaaacctcattacagaaattcattgtctctttcccaggtctgtgtgtggagctggggaggagcagccccgggcctccccgtgggagttgaagccagcaccatagggacccacccgccagaagagggccgaagcccaggcccacaggcaggaggatccaggcccctggacaggctgcctaatcctctggcctcccacagggcatgggggctccgggcaggagcagggacaagtagagacaagcaggagaggaatgagtcacagccctttgagttaccttgggagattgtcaacagagggcccccatgccggggtcccaggcagaggtgctggaggcagtcagggaggagcacacatgtgtgtgcaaacacacacacgtgtgtgggtgtcatggggggggtgacaacaacacaggcagacaggcatagcacggaggcataccagggagacaggcacagaggcaggggcctctgactgcctcgccctggatggaagggttggggctaggggacaactccctggcacatctaggtggcagcctccccctctaccccaggccttgtgccttcccagagctcaggagtgccaggaacgctagttgcccactgggcaaacacctgcctcaccccg

SEQ ID NO: 21259 - DNA, 1101 bp, Artificial sequence
  DNA replication origin
aaacacacacacgtgtgtgggtgtcatggggggggtgacaacaacacaggcagacaggcatagcacggaggcataccagggagacaggcacagaggcaggggcctctgactgcctcgccctggatggaagggttggggctaggggacaactccctggcacatctaggtggcagcctccccctctaccccaggccttgtgccttcccagagctcaggagtgccaggaacgctagttgcccactgggcaaacacctgcctcaccccgccctggccaggcccccgtgccttttccccatggcccggcagggtgtgaccagggaaccctccagctggcgccagtgcccacagtgggttcagggtcaccccgggccagccactcccaatgactcagatgagtctaccaggaaaggtacagacccatctccagctaggcccccctccccggccccggcgccacagcccccaaggagcttggccagcagcctgcacaggccaagggttggagatcggttcctgagtccaggctgcagtggtcttgtacccagggagctgggggtgtgtgtgttggtggggggaaggtctgcaagtgtgcgatacctacagatctgtgtgttttgcagtgccaatgcggtcggggtggtctgcagcgctccctgggtctctccatgagttgtgtgtctcaatgcatccgagaggaaggagaaacagagcccgtgtatcagtgggtgacatgcatgagggtctgtgtgtgtcctgcgtcaggtgtggcctgtaagcaaggaaatctgtaagggactctaggcggtgcactgggtacatgcgtctgcggtcgatacctgagcacaagttggtatgtgtgtgcatgtgtcggggtctgtgagagggagagagcgtgtgtgagaattggagtgagggtgaggtgtgcaggcgagtgtgcgggccgcgggggtccggtggtacgcgtcagggccactgcagggagtctgcgagggaagcccgtgggggtgcgggtccctgcgggaaagtctgcgggtgcgggggtctcggcgcgatatccctaggcccgcccccgctccgtgccgccccgccactcaccccagc

SEQ ID NO: 21260 - DNA, 1315 bp, Artificial sequence
  DNA replication origin
ccctctcccgccctccccgctgtcaccttcctccgccgccgccagcgcgccctcacctgggcgccgcgccccgccccccgacggacgggcaggtgcgcgccggccaatgggagccgcggctagaggtgaaggtgggggcggaggcgcgcgggggcgggcccaactcccggccaggaagtgcgggggcgggccggggagaacaactgacttctgcgcggggcgcggtggggttctgcggggtcggaaagactccccagatccccgcgcggccccagacccagacttacctgggccctccctgggccctgacccaggaggcgcggagcactgcaacttctctcgccccctgggtcgcagccgccttgcccttggctaagagagaggggctagggacgcccgcggccccggagccggatgggaattgtagttcgctctctccatggtttgcccgcgcttggcacccatcgcccccccgcccccgcccaaaaaaaagtttctgaatcttactttgattgtatcattagagttgatgtgggagacaggaagttggggtagggatggtcacgcccatttggcagatggacacactgaggcttgggaaggaggaaggcgaattgaggggctgaggacaaggtggctcttaagttagaccctggggtggaggtggagctgggctggtaccaacaccacaggcgttttaagcttcagtaggagcagggcctgaggtctgacctggaacgtgaagggcaaggagaggtctgagataggctggaggaggttggggaggggaggggctggctctgtccagtggtatttctgatttctgtccagctgggatggaccaggcaccatgaggagagatcaaagggtgggacatattggtggcttcagacaacacttttttttttttttttttgagacagggtctctctgtcacccatgctggagtgcagtgatgcaatcataactcactgcagccttgacctcttaggctcctgcctcagcctcttgagtagctgggattacaggcagatgccaccacacccagctgattttttattttactttttggagtcaagggttattgttatgttgaccaggctggtctcgaactcctgggctcaggtaatcctcccaccttggcctcccggagttctgggattacagacatgggcaactacacccggcctagacaacacttctttctcttttttgagacagggtctcactctgtcccctaggctggagtgcagtggtgcaatcgtagctcaccacagcctcaacctcctgggttcaagtgatcctcccacctcag

SEQ ID NO: 21261 - DNA, 1005 bp, Artificial sequence
  DNA replication origin
cagaaccacgggcttcctcttaccagcaccaagctgtcgtgaggccccgccaccgccacccaccaccacctcccactgtggagggtgcgtcccaaagctccagttaagtgagagggtagggcaggagctgggatgaccacccttcctcagccaggaaatgcaacactggggtccaggaacggggtgctccccgggtacccacacctaatgccccctgggcagggctgctccttggctggagggtgggaaggggagacaaaaatcacagcttttgaacagtggttgggaagttattgggaactttggtcaagtatgaaagatatcactttacagaacagaaactagcttatgtatttttctggaagacattctcctactcccctgaactcccaaaaaaagaccaaggtggctgggccctgcttctgtgactgctgagcggggttgcgcgtcggagccggtggggcgcgggaggaaagggcagggcccgcgcacggggagcctgggcccgggaggggaaggcacaagaacccacttcgcccgagagcacgggggaggcagagccaggtgaggaaggaagccacggtcccgtgaagcaacctcagctcagaagcacacggagggtgcctggtgttcctgtccatgcagcctcagcctagcagctgccaaaagggcgacctggctcccccacggtcgcagtcgctgcactgtccagctccagccacagcaaaggccggggggcagaggccgtgcacacagggctggcacacaggggaggcggcgacaaagaacgcagcctctaacgttatatattaaaatagccacagttcttgtgcacacaattccatcctctcacccctgcctcccccgccaggcccaggaacagccttaaaagaaagatggtggttttccttttcgagaggcgaggaaacatccgctcagtctttatggaccttgagaaatggtgaggcttcccctccccccgtctctgcctcccggccgggcgtg

SEQ ID NO: 21262 - DNA, 1293 bp, Artificial sequence
  DNA replication origin
ctcttgccagattgtgtctgctcctaggactgtgggagccggtggtggtagcggccttgagcttgacccatccctcctgcttccctgttcctgagcgagcaccttggagtatccttggagtgtccttggaggctctgctctcgggggcagcctgggccaagagagcgcctgatgctcaccccgtcctcacaggttcacgcctacatcatcagctccctcaagaaagagatgcccaatgtctttggtaaagagagcaaaaagaaagagctggtgaacaacctcggagagatctaccagaagattgagcgcgagcaccagatctcccctggggacttcccgagcctccgcaagatgcaggtacggctgtcccgaggccccatgcaggctggtggccatcagggcagaaggaaggcccagggcactggatttggagggaatcccatctccatggggaagggcctccctgaacggaagcagctgggttaatcaccagcaccccacccaactcagagttgacccaggcggtgacactgcagaggggaatgtggtgactcaccctgcgtggtggggggagggcagggccatgccaggcgctctggtgccctgtccatgaatccttgccgcagccctgcaaggaaagagctggaggtgcctcctgtgtacaggttagagagccaagggccagatggttttgccgagtcgcccctgctagtgtgggggagcagcactttatgcttgtgaagccctgactggaaccacttggcctggagtctgggaggggcctcccttcccagcccttgtccttcctcccccgcccacaggaactcctgcagacccaggacttcagcaagttccaggcgctgaagcccaagctgctggacacggtggatgacatgctggccaacgacatcgcgcggctgatggtgatggtgcggcaggaggagtccctgatgccttcccaggtggtcaagggcggcgcctttgacggcaccatgaacgggccgttcgggcacggctacggcgagggggccggcgagggcatcgacgacgtggagtgggtggtgggcaaggacaagcccacctacgacgagatcttctacacgctgtcccctgtcaacggcaagatcacgggcgccaacgccaagaaggagatggtgaagtccaagctccccaacaccgtgctagggaagatctggaagctggccgacgtggacaaggacgggctgctggacgacgaggagttcgcgctggccaaccacctcatcaaggtcaagctggagggccacgagctgc

SEQ ID NO: 21263 - DNA, 1989 bp, Artificial sequence
  DNA replication origin
tcatcaaagcaccggtctcggacaaagcaatctcgaattgctctttttcgggtagaagcagcagaaagcagtaactggctgtgcaaaagccaggcagtcagtgctggctgacctaatgggtgacttccacacatcagccagaccctctgaacctcggtttcctgaaccagtcaggtgggggctgccaagatgatgtctaagatccttccagctctgaaactctaggcttccaaattcagaaaactggtcctgtgccatgtctctcctttcaaaaaaggtgtgccctcacaaggaaagtgaagaggactccgcctcttcaggacccttagcccaaagggctgcactcaacctggccttgacagacaaacatcaacagccgtaaaacaggagggcgggctgaaatgcctggaagtgaacagaccctgctgaaggtcagctctgtgcctggagtaggcctggccaccagcttggctctagggcaagctgccctgcacagctggatggcgtctggaaaggaatgtgaccgtgcagggcggggacctggaaggcaggattcaaagattccttcagaggctcttcgctggtgcagaattatgaaaggcatgtggagtccgtgaacgtggggtggcagggaggacagggtctgtgaagtactttggtatgtcgcctgggggttgggacgggcatgtctcgagtttctctggagaaaagtgagcttgggcattgcactccttgaggggcgggagcactgtgtttcattcacagcactgagacaggcagagtcctggagctcactctcctcgcgtgcagaggccacttaactggaaaagtgaggtccaagtgggtgaaggaacctcagattctgtccctcagtgcacagaagggcttagggccagaatctcattgcagggctcccactgccaccacctcatcctgcttcctgaaacccctcagggcagcactgacctcttgagagctgccattgggagaagtgttcgaacctcaactgtcccctgcctccaaggggctgccccaaagtcagcaagccacagccgatcctcctcctccctcctacacaaaaccaccgtcccaggggaggcagagcagacccacaccgcaccagagaagggaatggctaaaagtttcattgtgttttgctattgacacttaagaagacagggaggggagggttgatttccgtgaattaggtgcatccagcctgcgggacggaggtggagaccaagaaaaggagcgcaggaatggctcagcttcctactgcggccctgctgctgaggggagtggggctgggatctgcaggagggcttggtggttaccctggaagattctggggaggacagaagctgggggagccgacaacgcccactcttagacccccagtgggtttactctgggaaggggcagggcccttggaccagggagtggtcactgagggtctcactggggcctcggagacaaaggacggcggggcgacagccacgggagggtcaggctccgagtgaggggtgtgccccggacgcgccccccgccccctggagtgatgggtgggtacctgttgaggaaagcgttgccaaacgcgttgagcttgcggaaggggcgccgcgggtccaccacgagcgcgttgcccggcaccacgccctcagtggggccgtgcatgacggcgatgaaggagtcggtggtgggctcgggcccgatgcgcatccccgggaagtcctgctcgatcaggtgtcggatgaaggtggtcttgcccgtgctgtactgccccacgaggagcaccataggcttgttgtcgaagtcagcgtcctccagcgcgggcgagtggaactcgtggaagcggtagtgctcctccaggggtagcagcttctgcgcgtacagctgccgcagcccctcagccaccgtctggaagagctccggctccttcttgcggcgggcatccttgctgacccagctgaacatactgccggacacggg

SEQ ID NO: 21264 - DNA, 1589 bp, Artificial sequence
  DNA replication origin
tgcggagccgaggcggggccggccggggcagggaatcgggagcgacccacactgcgcaggcgcacagcccagcccgtcgaagcgccctctgccgaatgctgcgcacccctcgcggagcggcctttatagggtcggtccctcagtggcggctagcgccgccgcggcgggggcagggcggaattgggggcggtagggaggagcccctcccagccccgcccctccgactggtgccacgtcttcccctaccccgcccccattggctgattccaaatctcgcgaggctgtggtccgggtgccgtggcaaccgcacctgtttcgccccgcccctcgtagggaggctcgcgaaagtgctgcggttaggaaggcgaggagcgggcgttcggcggagacggcctctgggccgcgcgccttccggcaccgtggcccccccacacccccgcgggatggctccacgagacacccagtcaggcaccctggttccctgactacgcgccgcgcccgccgttcgccacgtgcggtcctccagctggctcggaatccccggaagcatcggagtacccccaggcggcggcacctcctcctctcagcccagcttcccagacacacactgtctttgtcccctcatcttttatctgctttgggagagggagagacaggaaagtggtagcagagcaagctgagggagtagagaatccggggcgggctggtgactggggaaagaaaaatgggcagcgagaggcctgacctcccctcaggccgacggggtgggaatgggagagggacgcaagcgagggaggacatgggtgacaccggactcgcgcgggagaagagaaggcttccccacaaaggctatagctggggcaaggcagggagggcatgaggaggaagttgaggctctctggccacttgcgtattgggaagtgaaatcggaaattccctatgtggggaagaggggaagtgtgggggcaacaatgaaatcttgtgggaatttagggggaagtttaaaaacccaaatacttccactttcctctcggggtcaccaccatttaccatcatttactgggatctgtgccctacctccccttaccagttcctggctgttccatggggctcactcccccgccatcctccccggccacacacagacccctttggctgtccaggctggtgagaatcttcagtgggtgatgtcagagctttggggactgattgttatgtaaccagtatcaagacaccaacctgtggtagcaggaccctgggggctcttaaagagatctgaattgaacctgcgactttgaaagcctcaggtccaacttcctcgcttctgggagatgtggaagcctggagggctaggggcctgtatcaggggataacttgggctggtaggctaagaggaagaggcaggaactcaaatctgagaacgggggatatctcaggggaactgagtggtggaatctagagaggacacgatgggaggtttgttcgcctaccgcttgtaagatcccttccgagggaatagatagttcccttgccctcccctcttgctccctaaccattggagagcggataagtaattccaaccctgcctg

SEQ ID NO: 21265 - DNA, 1303 bp, Artificial sequence
  DNA replication origin
gccgacctcacactcacctctcccagggaggctttactcctccccgcctgggccttctctctctgaggctggcgtacggtcaatctgcacaacctctcagggcctctgtcagcgtagcgtttcacacacgtgtggtgtggacgatgggacaaagacaatactactgaggcctcccaccgccagctctgtgctgaccgccccactgtgtctaggctccctccctaagcaactttgctcatgcacaaggtcagtccttctgtgtgcatttattaagtgcctcctttgagtctgaggctacaggaaaaaagtcagtggccgccactcctgggggctttcaggctggtgggggaaatagcccggtgtgggtgatggggcatgatgggggcgctaacatcccagccacagagcatccagggagccagtgagtggggtaatggggggcggggcggggggccaggcaggtgtccgcgagggagtgacccttgggcaggtcttgaggagttctgagaggggttggaggtgagacccaggccagggaaatgtgcatgggcccagggcctgctgggtaaaggacacaggtcagtgggctcaaggagctgggggagggtgctggatccgccttgctcatgcattggaacaggtctccaatagccctcgcaggcctttgtgggatcgcagtgctctgcagaggcagatgcaggaggacccccagggcagggtggctgctgtctgctcccctttcaccctatgccagtgctctgagtctgaggcctgacagccccaagagggttagagtccagggccctaccatccagcccatgtatcctgaacacctactatgctggtgggtgggggaagcagccagggaggatgagtaagtcatggaccttgccctcaaggagtctgaaactagcacaggattagataagcacacagggctccttaactctgtagggaatgagataagggtggcgggagaggcccacgaagccggggtgtgggcagagaggggagcagcgcctgcagagtcatgggatggtctgcagggaggggttgctgagctgggccacggcaggggccaatcggggcccagggattcagagcagccaggacagtgtgagcagagctgcctgtgggaaggggagagagacagtgtcttaggggccagatgtttgttggctgcctacagtccccaggagaaggtccaacttgctctgtgacttcagcaaatgtgcaccctctctgagcctgtgtcctcctgtcccaaacaggttcatgatggatgccaggaggaccaggtcct

SEQ ID NO: 21266 - DNA, 968 bp, Artificial sequence
  DNA replication origin
ccctgattcccaacccgagccttggtttccccatggacccacccacctctgtgcagcgccactgggaagcagggcagggaggagcgcgatgggagcagctcacaagaaacaagatgtgtggggggcaatgggcgctccctggtcctgtgtaaagctttgtgcagtgagggttgggattccggctgcagcgctgctccagcacccctcccccctccaagtgctggagctgggaccccagatcagagtggaaaccaaggggccaaggcctgggccaccccaaaagcccccactagggatggtgagagcaacatctagaatgcctcaggctcagccttccccgagtggcctcaagtgacaaccaggcagggtcagctgggctccaaggaccatccctccctcccctggcagccccacgtagctcctgccacatcaggagtggggctggagtggcagcctcctgggaggggcaaggcagagcccagagccaggggaaggcgtgcagggctgggtgcctctgggtccccctgtgccctgatctgctgggcaaggccaggaggcatggcgacccctggtggtgacatgggaggtgctgggtgcagaggtgggatctggggcggggccaaggtcaaggctgaggccagggttcacagggacagaggatctgagaggggggctggcggtgggcagtttattccacttcatgcagacactgacccacgcactcacggagcttaaaaataatacatcgaaccacacggatatcatcccctcctccccccagacacagaaagacacttggctgagtgggatggggtccgagggtccaaaagcctccgtcctgggagaaggcagcagtgtgggcccaggtcgggggaggggcagtgtcctttctccccggaggaaaagtgcagagccagggctaaggccccaaggcagggaggcccccctctcacagcagattggcaacg

SEQ ID NO: 21267 - DNA, 1237 bp, Artificial sequence
  DNA replication origin
gggtgtctctgagcgctccttccccctagtccaagggttccgggacctgctgtggctgcccattgagcagtacaggaaggatggccgcctcatgcgggggctgcagcgaggggctgcctcctttggctcatccacagcctctgccgccctggaactcagcaaccggttggtacaggctatccaggtgagtgggtgccctgtatctgggctgtgcaggacagagcagctggagccctctgcaccacagctccctggttctgtcctcaaagctcctcagagtgggcagtctgggtatgacagccctactttatagagaaacagccacggagaggctaagtgacttgcctgggacctccaagccaggtctcccgaggcccacaggggctcccatgcaggagcgggagtgccccccaggccttcagagcccactgtgtctcctgctcatggcatgtcttgtaaaggggggtggaggacggctgtgtttgcagactaagaatctgaggcgcagaggctgccctggttcattcaggccatacgcttcgctaggccagaaggaccccagggaagctggggagccagtctcgtgggcagttgtcagatgaattctgtaggggatcgatggtcctaggcggctaaggggtgagtgcaggtgcatggtgcattctggaacctgcaagctcagaccccaacaggacagagggcagggctccaggggaggtgggagggatgcatgggcaccagggagcccccgggagtgttcagtcaggtgggaaagagtgatgccaggtgagatgctgggcagaggatctggcagacagaaggaaggatgggcctctgaccatctggcaggggcgtctggggggccaggcaaggagcggtcagtctcaggcgtgcagctgcggcagccatgtggaacctgctgaatgtggtggtcagcaggaagagaggtttgggttgagaagactttaggaaagtcccctgaggagtcccacgttcctaggttccctcagcagagtggcaggtgcctaggaaggggaggaagagtgggaggaagtggggagtgaggctgagcaggaccccctaggccagcacagtgacaggcagggaggctgagggctggtggggtctcagactgtcctgggggcctggggctgacgtgtgccccagccagctgtcctcatccagtgctcccatgtcccccaggccacagctgagaccgtgtatgacatcctgtccc

SEQ ID NO: 21268 - DNA, 915 bp, Artificial sequence
  DNA replication origin
cttgctgcgggcacctgcccatttcccagtgcccagcactcgggtggtgctacgtgaggtctccctcgtctggcacctctatgggggccgagactttggcccccaccccggccacaggtgaggaggagcgggtgcaggtggcagctggtgaaggttggggctcaggctggtccaggtctgactttcagcagctggagaccttgagccccatccaccccaggtgggcctcagtttcctcatccttccttatcccgcctgccttccaggactggggctagcgggggtctcttgtcccaggctaaaaggcccgctgaggacggggagggaatggggttcctctgagtcagcttggcccctgtccctcttcccagggcaagaactggcctctcaggtcccaggagctccccttcccgctgctctggccccaaccggccccagaactcatggcgcacgcaggggggcagcgggcggcagcaccatgtcctcatggagatccagctgagcaaggtgagtggggtggcgagtgcctactacacgtgtgtgtcatagaacaacgggccttgttctcgatgtcacgtgtagcaatgactaatgcagaggaaaacccctgcctttgtagtggaggaagccaggcagggaccaagatgtatcgagtgtgtccgatggtgaagagcgctcaggggagagtctgcaggggtggaggagacaggtgtgctggggagggtctggaaagtcctcttctgaaggcaccatttgaacaaagacctgaacaagtggggatgtgagccaggaagagttttcaggcagagaggacagcgtgaaagccgcaaattggggccaggcatggtggcttatgcctgtaatcccagcactttggaaggccgaagagagcagatcacctgagctcaggagttt

SEQ ID NO: 21269 - DNA, 2872 bp, Artificial sequence
  DNA replication origin
gtgctccacatctctccatgctggggccctcaaatacctgcctggcccttcctatgccagtctctgagcctggtcatgcccttgccctatctcaatatggccccctggctggcctctgttgctaagagtggcgcatgtcgggtggcttttataagtaaacaagcacattgtgcgcgtcgggcaaaggtggggcaggccttcttagtgctctcgtggcccctgccccagctcttctcccactaccagagagggccttcctgtcccacccgctgagtaccactcagccctcactgacctgaacgccctcgccctcagagccgaccccggcgctcagttgcctgccattgccactcagaactggccctggacctggccaacttccaggcggacgtggagctgggggccctggaccggctggccgccctactgcgcctggccaccgtacctgctgagcctccagccggcctgctggtgagaggcccctgccagggccaggccgggggtgggtgcagggcctgggtccttcggctcttggtcacagtgggaggggctccgacggctgctctgacccccaatcctcctgcagacagagcccctgccggcgatggagcagcagacggtatttcggctctctgcaccccgggccacgctgcggctgcgcttccccattgccgacctgcggcctgagccggacccctgggcgggccaggccgtgcgggctgagcagcttcggctggagctgagtgagccccagttccggtcagagcttagcagtgggcctggtcccccagtccccacccacctggaactcacctgctccgacctacatggtgagagcccccgagtgacagaacttggggcaagaggcctggcttctgggagagatgggcttggggctatggaaggggcccagtcacaacccgagcagtccctggcccaggcctttaccagctcttggggtcccagcactgcctgtccccggcctcctcaccgacaagtagggtggaccctttgtctctggctttctctgcccaccaaggtgtgtgtggagtcgggggcacagctctgagccgacctgggcattggggaagaaataggaaaaggcagcagtgatgacccccctaattccccatccccctccaggtatctatgaagatggagggaagccacctgtcccttgcctgcgtgtctccaaagccctggaccccaagagcactgggcgcaagtacttcctgccccagtaagtaggggctctggactgggcccaggagaggagggttctgctgggggtggcagggggccagtttggaactgggtgccgggggccctgcaggccagtaacaggcctgtgccccggcagggtagtggtgactgtgaacccccagtccagcagcacacagtgggaggtggccccggagaagggagaggaactggagctgtcagtggagagtccctgtgagctgcgggaacctgagccctcgcccttctcctctaagaggaccatgtatgagacagaggaggtgagacttggccccacctcttcccaggaccccctcccgcccaccgcccgggttcctgccgtaggagccacctgtgtggctgtgggccagggcagcacgaccacctggggtgggcatgagctgacccaacaccagtgaggatttcggctcttccattctttccagccagtcagagagtctttctgaaacggcactggtgagggcaggcccctggggagcatgggtcctcgattggaaagatcaggtcctgccccacctgacccgtggatcagcactgtacacttagaaaggcagttaagggccaggctctgccacttggtgactgtgtcatcaccctggggagttatctgaccttgaagagttacctatagatgagtttcttcccctggaaaatgggcaccatgacctgtctttctctctttttttttcttttttttttgagatagagttttgctgtgtcgccgaggctggagtgcagtggcatgatctcggctcaccgcaacctccgcctcccaggctcaagcgattctcctgcctcagcctcctgagtagccgggattacaggcgcgtgccaccacgcccggctaatttttatatttttagtagagacggggtttcatcatgttggccagactggcctctaactcctgacctcaaatgatcacccacctcagcctcccaaagtgctgggattataggcatgagccaccgcacctggcctaattttgtatttttagtagagacagggtttcaccgtgttggccaggctggtctcgaactcctgacctcaagtgatctgccctcctcactctcccaaagtgctaggattacaggcgtgagccaccgcgcccagcctaaccataacctgtgtcacaggcctgttgtgaggatgaaagaagttaacatacctgaagcccttagaacagcacaggtgtgccatcagcactgtatctgtacggctatcatgcatccccagtagagaagggctcctatgaatgaatgaatgatgaacgacaggagggcaggactgagaccagagacaggccccagccagcgtctctaagatgactctcctgctctttccacctcaccctgtccagatggtgatccctggagaccctgaggagatgaggacgttccagagccggaccctggcactgtcccgctgcagcctggaagtgatcctgcccagtgtccacatctttctgcccagcaaggaggtctacgagagcatctacaacaggtggagacccggggccagcagggcgggactggacactgggtgggcctggcctcccttacctgctgtccacccgcctatctcaggatcaacaacgacctgctcatgtggg

SEQ ID NO: 21270 - DNA, 1230 bp, Artificial sequence
  DNA replication origin
ttctgtcactcgggggctctcaccatgtaggtcggagcaggtgagttccaggtgggtggggactgggggaccaggcccactgctaagctctgaccggaactggggctcactcagctccagccgaagctgctcagcccgcacggcctggcccgcccaggggtccggctcaggccgcaggtcggcaatggggaagcgcagccgcagcgtggcccggggtgcagagagccgaaataccgtctgctgctccatcgccggcaggggctctgtctgcaggaggattgggggtcagagcagccgtcggagcccctcccactgtgaccaagagccgaaggacccaggccctgcacccacccccggcctggccctggcaggggcctctcaccagcaggccggctggaggctcagcaggtacggtggccaggcgcagtagggcggccagccggtccagggcccccagctccacgtccgcctggaagttggccaggtccagggccagttctgagtggcaatggcaggcaactgagcgccggggtcggctctgagggcgagggcgttcaggtcagtgagggctgagtggtactcagcgggtgggacaggaaggccctctctggtagtgggagaagagctggggcaggggccacgagagcactaagaaggcctgccccacctttgcccgacgcgcacaatgtgcttgtttacttataaaagccacccgacatgcgccactcttagcaacagaggccagccagggggccatattgagatagggcaagggcatgaccaggctcagagactggcataggaagggccaggcaggtatttgagggccccagcatggagagatgtggagcacaggggaagagggacagggctgggcagcagaggaggccctggcagaggccagggtggggtcaacacgccatggggacagcctggtggcctggagcgggtgggttaccttaggcacacggcgcaggatctgtgtgtggcgcagatgggcgcagggccgagctgaggcctgggagcccagcgtaccaggaaaggtcaggatctgggatgggacccgggaggcacacagggtcaggcctggccccacagccacccaaacctccagaccccgcctcgtacacattctgcctctgccctcacctccgtgtactcaggctcagaggtgccccggggccacagacactccagcacctccagctgcccgaagtgcacttccatgct

SEQ ID NO: 21271 - DNA, 1327 bp, Artificial sequence
  DNA replication origin
gcaggtatttgagggccccagcatggagagatgtggagcacaggggaagagggacagggctgggcagcagaggaggccctggcagaggccagggtggggtcaacacgccatggggacagcctggtggcctggagcgggtgggttaccttaggcacacggcgcaggatctgtgtgtggcgcagatgggcgcagggccgagctgaggcctgggagcccagcgtaccaggaaaggtcaggatctgggatgggacccgggaggcacacagggtcaggcctggccccacagccacccaaacctccagaccccgcctcgtacacattctgcctctgccctcacctccgtgtactcaggctcagaggtgccccggggccacagacactccagcacctccagctgcccgaagtgcacttccatgctggttgtccgccggccccgactgcccgtccgcagctcccaggacagctgcacggctgtgcccgttagcctgcggggaagaggacaggcgtcagaaggtgcacttagggggctctgatggtctctcctcaggccctggcctcgggcttataccgaacatggctacagggacaggccctctggaagcgtggtcgaaggtgatggaagtctcgggaaccgaagggcccatccttggtggcatcaaactcggtgaaaaagtgcgtggcgaggtcaggtggtccggaagatggggcagacgtctgaagcaaggtcagggtcacaccccccaaggtcatcttcagcagcgagtcagggcgcatggtgtccaggagggggttgggggccatcttgcctgaggggacagaggcttcagcaggggctcccaacagattccgggtaccccaggtggagcaatagtttgccaccaggctgggggttgggaggccaggtctgccccaccatgtggctctggcagaaggcttggtcaggcaggggtgacactggtgcctccagtagaccaggccttctgcccaggctcaactgaaccctcctcagggtgctggaaggacaggatgtgataaagcacccagcctagcacccacacacaataagctctcaataaacatgaacccagatatacagcctggcaaaggctgatctcacccttctcttcctatggaagaggaagctgagtctcagagagttcaagtgcttgactaagatcaatgactgaaaaacctaggctctgtccactctatcaccagctcccaccttgtttggtccccagggaaccaagtcacagatggtagatatccaggcatcgctggggatttcctgtgtgcctctgacagcccacggcactaaggcctcttc

SEQ ID NO: 21272 - DNA, 1689 bp, Artificial sequence
  DNA replication origin
gaagcggcggggcgagccgggggctctagtgaacagcggagccggacggggatcgccggcgggcggcaagcggaggcggcccaggcccggcggtctccgagatgtcacgatggctgtggccatggtcaaactgtgtgaaagagcgggtctgccgctacttgctgcaccactacttaggtcacttcttccaagagcacctcagcctggaccagctcagcctcgatctgtacaagggcagcgttgccctgcgagacatccacctggaaatctgggtgaggagccaggcccgagtccaggaaggtgcggagggtgggagcgcagcgacctgaggctccctgcggcaggatcgggctgggggatcaggcaccgggcgtagagaggccaggggaatcttgccctctccaggcgtcagaggcaccccggctggcctcttcagttccttaccagagccagaaactgagcgggaaggggtttctgtctccacgggaggagaaactgaggctggagagggcaagatcacctgtctggagaatgcaagacaaactcgtcgagtttgggggctgagttaaggaggttggctctcgggctgaggaggggctggggagggagcgtaggaactgagctgggccagggcagtgacagacttgggcctgcgcagctggtgggggaagctggtaggggtccggagccctggcgaggacacctgtggatcatgtgccctgacctcttgaccccacggtcctgagcccgtaggtgggatcaacaaaccaccggatgtgtatgtcaacaaccgcgtcagtacgtcagtaccagtgttgatcaacacctcgtgtgcctgggtcgctgcctacttcctgcttttgggagagtgggatgggccaagtgggtgtctagggagggactggatggcccccacctacatctcccaccgacccccccggctcagtgtccctgcctggagggaggccctggaggaaaggtggggagatctggcttcaagccgggaggaggccaagggagatgctagggaggccaagaggtgtaaggtcagaggcttgaggctgggaacggtgaggagccctgactcacagctcagctgacctggggagctttgaaggagccaccaattagaggcgcgtcctggtcgatccaccaggtccagagcagcaggggtgggcatggaggcagggacttctcagttttgtggctggactcagggggctgctaatctgggcagaagagctaggctttgggggtaggccaggccctggtgagcaaatgtggggtaggataatcgtgggccctgaactgggggcaccccccagtggcctgctgtctgtgaattctggtgtaggaagccctctctgacctctaaccttagcctcagcctctaaggccgtctctaggctgccccttttttatttttatagagacaggatttcgctatgttgcccaggctagccttgaacccctgaagggatcctcccacctcagcctcccaaagtgctgagattataggcatgaaccaccatacccagccctaggcttcccctttttactttcagctccagaaaacgcccctactcctgttccctgccctcttgttggggattgaattggcttctctagggccctggtggaatgcaggcgctttcttgataaccagcccctcctccctcccagctcagc

SEQ ID NO: 21273 - DNA, 1879 bp, Artificial sequence
  DNA replication origin
acctcagctcctccttcctggccccccaaacctcatggggtgggggacactcacttctcgaaaacctagacttcggtcgccaacccccgggggctgcccgtagggagggcgacggccgttcagggccccttcgcagcggttccgctcggggcgctggggctgggcggcggcgctcctgggttctctcccgggctccgggggggcggctagagcatgcccccaactcagccccgggccgggactgggcgctcggcgggctctgcaccggccgtcgcagcgcgcggatctccgctgaagtcctgggactccgacccaacgcggtgcagcgcaacgggagccccggctcggctccgtgcgcaccggcacccgccgcccagctgctcaggatgacatcaagtcacctccccccacccggcccgcacctccccgcgggctgaaagggggggctgcgtcaggaaggcccggggccgctgggagatgtagtccccgcgccgtttaaagtgagctgccagaccaaaggggacacccctgagggcagactcgggggtgaaggccgaagcttttgaagccagagagcagagtgggatgggctctagccgggggcgggaagcctggattctagaagggaggctgcatagggaaagaggagggcttaggagtttgcaccaggaaagtagggtgatgccaggacactgacaggaaggagtcgcagcaagctacgctaggcccacagatttggcctgggccttctatgccctaggccatccccccaggaacctcacccttaccccagaaccaccagacacttcagaaaccccttggaaaccagcactggactagttaaaagtctgcgatgagtcagtgcttgctgggaggggtgtggtgcacccaagcctgctgggagatgcagtccatcctcaggcctgcagtccccctcccgtcccttgctgtctatggtgacatcatggtctccagtttaaagggccagtcttggagtggcaaagcccgagaggaggaggttttctccttgagctgccacctcatcccaggcagcctggccttcccggatggacctttcagcccccctggaccctaagatgtgctgggtgggtcagtgtctcttgctcaaaatcctgctgctggcatgcaaggcacaggtgggagtccaggagtttggcatgctaaccaaaagttcccagcctgcagtcctgggcccccgtcctaggatcctggaccccaacactctttatagccctgaactccatcccgctacactgctgtgaaatctccaccctgaaatgttgcctggatgagcagctggtccatggtgagcagtaggaaagggtgatgagaccagataatgaggtcggggaggggactaggggccttttcagagtctgccccatcttgctttgggtcttggtgaccactcagtgctccagcggaaccacccagccatcctcccggttgcagaggaagcctgggtgcgcaagaggtgtccgcctaccaaagcaacagaaggcagaggcctgcaccgagggccgcagttcaccaggctggggtccaggactccggcactggagacccagcaagtgctctgcttgctcaggaacctccggcaggccttgcccatccggcccttggtgtccctgtctgtccaatgggaatccatgatctccctccttgcccacctcccaggctcttctgcatccctgaacaagctgagggagggcaggcccacagagcctctgcagccaggcaaggaccccaaggcctagagaggagaagcgccttgcccagtgtcacacagcgtgtcatcaaaagttggggccaggggccaggcttccacctcccagctggctacagcccatctccacaa

SEQ ID NO: 21274 - DNA, 1254 bp, Artificial sequence
  DNA replication origin
tgccctcaggggtgtcccctttggtctggcagctcactttaaacggcgcggggactacatctcccagcggccccgggccttcctgacgcagccccccctttcagcccgcggggaggtgcgggccgggtggggggaggtgacttgatgtcatcctgagcagctgggcggcgggtgccggtgcgcacggagccgagccggggctcccgttgcgctgcaccgcgttgggtcggagtcccaggacttcagcggagatccgcgcgctgcgacggccggtgcagagcccgccgagcgcccagtcccggcccggggctgagttgggggcatgctctagccgcccccccggagcccgggagagaacccaggagcgccgccgcccagccccagcgccccgagcggaaccgctgcgaaggggccctgaacggccgtcgccctccctacgggcagcccccgggggttggcgaccgaagtctaggttttcgagaagtgagtgtcccccaccccatgaggtttggggggccaggaaggaggagctgaggtgggggagggtgccaggttctaggagcggggtggcatcgggacagcacctccagtcttggggttgtcccaagtggccgggattagtggagcagcgatgcgttccattctgaaaggggcagggatgacgatcggggctccattctgagtcggggctggcttgggggataggccctattctgggaggggttgttttggaggctttctgtctgagagaagggagggacatgtccaggatgggagggggctgcacccctattttagggtctgggcaaggataggagggaaaagacctgggcactccacgcagcctcccggctctcctgaggaactgatgggctttctctgtctctttcttgctgatctttctgcctgacttcgttttcaaaagagccagggtgggaaccctaactggactcttcgggacccccaggaaggatctgaggcctgagccatcctcctttctaccctgtctgccccccaggactgggcagttgcaggaggccctgggggggggcccaggactgtggttgtgccccccccccaaaggccggacaggatgggaccaagttagtctgtccagtctcacccagcacctcccaggcccagagagaacccccggggctctgaaagcttgccctgccgcctgaccgccatggagacgaagctgccccctgcaagcacccccactagcccctcctcccccgggctgtcgcctgt

SEQ ID NO: 21275 - DNA, 951 bp, Artificial sequence
  DNA replication origin
ggcagggttccctgggatcaccacataggtcccttccccagccttgggccatagggccagactggccaagcctgaggacaccgtagagatccttggccctgaacccctccccatttctggcccttagaacagggtgccacctgagagggaggcagcagctgtttggggcacctgtggaaagctgctgcatccaggatttgtgatcttgctttaaaactcaggccatcatactctctgagcctggattaggaggaagaaaagcaaccctcaacccccaggaatggaggaagggacagtagttgtttgctgtctgcaaggagcaggagatggcacaagagcatggggcctgggggcagcagaggcagccgtggagattaggagggtctgccccacccacagctggggcagctgggggagctggggcccaggcccaggatgccctctcctccccagatgtgccggcttccgagctgcacgagctgctgagccggaagctggcccagtgtggggtgatgtttgacttcttggactgtgtggccgacctcaaggggaaggaggtgaagcgggcagccctcaacgagctggtggagtgtgtggggagcacccggggtgtcctcatcgagcccgtctacccagacatcatccgcatggtgagcacctgccacccaggctccgagggccggccgagagggcgtgtgagccccgtttcctgtccgcaggacccctgcgtggagaataaccctgtactcatcggcttggcctcagtccacgtcttccttccccccgacctgctgctgcccaacacccactgaatgcctccgggcctgccccacgtccacacctttgcttatgcttgcctgagacctggagtgccctgccccacaccccataccatccatggcctggctcaggtgccgcctctgccaagaagccgctgtcaataaccaagct

SEQ ID NO: 21276 - DNA, 1133 bp, Artificial sequence
  DNA replication origin
ccgcccgccctgacgctgcgcctcccgagggctgaggctgggggagcaagggcgactcccccaccctttcccctgccggactggggctcttggccggagcggaaaccttgaagttcctgagttgcatcttggctgcgtctgacctgagagtcagaacccagggcccccaggtacggacgaactcatcctggggccagtgtaggcccccgttcccagcaacacagtccaaatcctgctcatctgggccctcggcatcatcctctgacagagcggaaagttgggcctccccctacccggctccggtggctctcagttcagggcggcggtgccccctggaggccgttcggaaacatgcggggcgtccctgggttccaatgacggaattgcagtcccgccccaaaggctgcccccacccagaggcccagcgtttccctgttcagaagcacagttcctacttttgcagatggaaaaactgaggcccagatggtgcttagcacagtggctggcatgtagtaggtgctcaataaatatttgttgttgaatgaatggctttgtccaagagtttcattctttactttagcgctcaagaagtccagaagaagtgaggaaataggtcaaggaccaagcccttttgtaaactcaggagacagccttattgctgcaggtaagtgtggataggcagcacggaagagcctctctcatgcttgggaaagagctgtcagcaccagctgaggacaatagctaactcctgtgtaactgtttgcaacgcacttcacgtgttcagcttcatcctccctgcaaccctgagaggtttatattcttttcgtagctatgataatggaatccagagtgtttaaggagcatgggtgagattcaaactcaggtctagtaaatggtaaagcacaatgtcttcatgcctccatgaagtttgcctagagagaggtctggaagaagctggagcttcccatcttgcagaaaggggcttgtggtcagaggagggctgaacagataggctgcctgagtgggacccttcggtcagcaccatttaccctccatcacacacacacaaggaagaaagtgagcatatcgcctacccagaggcttcgaaatgcagctaagatcaaaatgggaaa

SEQ ID NO: 21277 - DNA, 889 bp, Artificial sequence
  DNA replication origin
ggaagaaacggcggccgggagggggctccggggaccatggggctcctgaccattctgaagaagatgaagcagaaagagcgggagctgcgactgctcatgctgtatcctaccggacgccggaaccgcgagggtggcggggtccagccgggcaggcggtgccgggcgccccctgtcgggagcggaacgcggcggccggcgcgtcccaactgcccctggcgtcaccacgcgggccccatcaatcgccccgtcgggccgggaggagccgcaccccaggactggggcaggggccagctccgagggccgcagaagcggtcctgcaggcgcagcggcggggctaggcggcccgagtgtcaggggtggtgggtcccggagataactcggacgccaccacccggcggcctggcccaagcgtggggccgctgccctcccggctctgatctcctcccccgggcccgagggttccaggccccggccccgccctcgagctccgaatcccgggggcgtgcggggtggcgggtggcgcgtgtgggctccgcggatcctttcgagcgtggatccaacagtccgtctctttggtgttacgcggcccgtggttgtccctgcggctgaggatgtgtgtgtgtgggcccgagtgtcccgtgcgccctgtgcgccttctgagtccagttaggcgcccgcacctgttcccccagctctgtgccaggctccgcgggggaatggctggggagataagacgcttacgtgcacatataacttaataatcacatcatgactgttttgttttttgagacagggtcttgctctgttgccctggctggagtgcagtggcacaatcaaggctcaccgcagcctccagcttctaggcttaagtgatcctcctgcctcagcc

SEQ ID NO: 21278 - DNA, 1753 bp, Artificial sequence
  DNA replication origin
gcacctgcccggacatgtgcccggccgccgagcgcgcccagcgcgaaagggagcaccgcctgcaccgcttggaggtggtgccgggttgccgccaggacccgccccgcgcggatccgcagcgcgcggtgaaggagtacagccgacccgccgccggcaagccccggcccccgcccagccagttgcgtccgccctccgtgctgctggccaccgtgcgctacctggccggtgaggtggcggagagcgccgacatcgcccgcgccgaggtggccagcttcgtggcagaccgcttgcgagctgtgctcctggacctggcgctgcagggagcgggcgacgccgaggcagctgtggtgctggaggcggcgctggccacgctgctgaccgtagtggcgcggctcgggcccgacgcggcgcggggacccgcggacccggtgctgctgcaggcccaggtgcaggagggcttcggctcgctgcggcgctgctacgcgcggggcgccgggccgcacccccgccaacccgccttccagggcctctttctgctctataacctgggtgagtcgggatcctggcggctgggcagagcgtggggacaggagcccaccatgacagtggaggtagggaaaggaaggattagctttaacatctcaccattagccccctcccaggacagcacaagatccaccgagccccgacgtgggacctcgggcccatctctgggtcttagttgtctcaggaataaaagtggagggggcaagggtggaaagggagaattggtctaaatagtgattttcaaacttttttttttttgagtctcgctctgtcgcccaggctggagtgcagtggcgcgatctcggctcactgcaacctccgcctccctgggtcaagcgattcttctgcctcagcctcctgagtagctgggatcacaggcgcgcgccaccacacccagctaatttttgtatttagtagagacgggggtttcaccatgttggtcaggctggtctcgaactcctgacctcgtgatccgcccaccttggcctcacaaagtgctgggattacaggcgtgagccaccgcgcccggctgattttcaaactcttttaacctccccgcccagtcagggttaccaagcaaacaagaacacatatgcccacgaatatacctgagacagaagtttaaggcattagagatactttctatgggcgatgcattccaataaactcttattatttgtttctttctttgtttttgagacagagtctagctctgtcgcccaggctggagtgcggtggcatgatcttgcctaactgcaacctccgcctcccgggttcaggctattcgcctgcgtcagcctcccaaagagctgggactacaggcgtgcaccaccacacccggctagtgtttggatatttagtagagacaggccaacaccatgttggccatgctggtctcgaactcctgacctcaaaatgatagctcacctctgcctcccaaagtgctgggattacaggcgtgagtcactgcacccggcctgtttgtgttttttgagacagggtctcactcttgcccaggctggagtacagtggcttaattatagttcactgcagcctcaacctcgtgggctcaagggatccttctgcctcagccttccaagtagctgggaccacagatgtatgcaatcacacccggctaacttaaaaaaattttttttgtagagatgggatctcgcatgttgccactcgaattcctgggctcaagtga

SEQ ID NO: 21279 - DNA, 2172 bp, Artificial sequence
  DNA replication origin
ggagcgtgagcctcccagagccccaggactgggccagagcacttaggtttctttttccatggtttccaggtaataaaaggaacttgttttgttggtaccagtcactagatgtgatttatttgaggggctgttgtagggagttaggatacacagcatgcagggagaggaacgcagactagccaaggcctaaggtaccccaagactcactttcgccactggtccttggccttgatgacctgagttggcatctgaggttggcacgcatcccatctccacccacctgccaccaagggcagttggtggttttgccatcccatccctgtcccctgctgcccaccctctgccacctaagcaccaggatgagggtgagttgcattagggcttgccactcccctcagggacctcaagctgttgcctgagaagcttgagagggtcctgtggtagtgccctcttctggcaccaaggaagaccaggacatctcaggaaagcaggcaggagagggttggagtaaagggagggctgaagaaagagggctggggtcagaggtcagccacaggcctcagggtggctgccgcaccctccagggctgtcaccacaatgctgagctgtctctggacctcagcccaagcttcagatccagaagctgtgtccctggccctggagcaggcattggataggcccgggaatgtgactacggagcccgtgcgaggtgcccagagcacatggctgacaagagaaatgggacaggatcagggtcagtcagtcaggggccaggaaagagaagcctgggcctagaactggctcagctcctgtacgcagcgaggcagaaaagcacccccgtccacttgtctctgaaggccagggagctcttacagcagtggcggtcgggggaggaaatgtgggttccagtcctagctcccagagggaccctcaagcaactttcctcccctccctgagccttacattcccatcttcttcaggggctgggttgcactctaaagggcagagaagctgaccacctcgtctcaggtggggagccattgtccggccccacctggaggcacctcccaggactctgggacagactcacctgtagtagcgttcctctgggaaggctctagggttcagaaaggtccgttccaagagcatcaactggtcattgagcatccggacctgcagggggctggtggggaggcaggaactgccagtcaccctggagccagcagcccagctaccagcctggtatcctgccctgggtgctgccctcccagcccctgcccgctgcccttgctcactcagggctgcccttctgcagtgttgatatgcgttggcccaaggctgcagcttctgcctcaaacttctccactgcagtcaccagaggccctgtgaggaacaagcagtggctcagtcatgggggtgcagggctccccatacctcagggtcagggctgtgcatacccaggctgatgctgtgctgctccagcagggccccaagatcttgctgggctgcctgcaggaagctgcggagtgtctcactgtagtcactgactttgaggggcaggaagaagctgtcactgagccggagaatcacactccccgctgtccgggccacagcctgatggctgctgaagcctgcggcaaggtgacaaggccagggctcagtcttcagcctctcctgtcctggtctcaggatgccccttgtctccctcctcacccgggtccaaaaacttgtccacatagtcaaaggtgtcaaaggctgtgtggtaggtggggtagatcctggctgaagtcttgctctgggggaacaaagcccagaggtgacaggcttgggatgggaagtgggagaaggtgtacctccagtgagctgcaaaatgtgggcattatctccactgaatcttggccatgtctgtgaggtggcttctagaattcccacagaaaaggaaactgaagctcagagaggttaacctgctgatatcacatagctaattagtggaagagctgggtctggtgccagtttccagtttcacagaaaggagaagaacctggggctttggggtcagatagattcaaatcccagctctactaccaagaatcgctgtggctgtgaggtggagaacatactttttggagcatcaaacagggaggtgccagctgggcactctgcaccccttgt

SEQ ID NO: 21280 - DNA, 1623 bp, Artificial sequence
  DNA replication origin
gctcacccggtcataggtataggcaatgtccatggaggagatgcccaggaagtgaacgaagggtgcatagtcgctgccagcacccagagaacccaagctgcgggaaggaagggggccgggataaagagcgctgggccggaccgcctcgctccgggcccccttctgtccctgggcttacctggggaccaggccgtacaccgggctgctgcggttgaagtaccggatccagttgtcgtagatgctcaggtcgccagggcctggtgagcggatctggccggaaggagaatttagtctcggtgcgcggccctccccagccccaacaacagggcgggttctccaccggtctcctgcccacccgtggtccagtccttacgaggcttgccccagcctcagtccagccccagcagatctagagagtaccactccccagccccgcccacccgtagcggccccgtccgccgcacgcggcccgccccagctagttcagccccgcccggcctgcccccttccacctctttggttgcagagaagacgacgctctggacagggggcgtcccctgcaccctaagggtagcgttggctgtgggaggaggggagaaagactatttgggccccagccccttcttttacccacccagtcgtcccgccgtctcctcccctttcctgccccaccacccacataccaaacaccgagatgtccacgttgatgtaggccaccgtgcgctcctgcagcttgttgaagaactcctgcgggtgcgaggggcgacgtcagccccgcgccgttctgtcctgggaacccctttcgatcccctaccctgtagggccactcacttctgtgaattccgtggagccaatgagcccaaactcctcagccccccagctcgcaaacacgattgatctgcgaggacgccaggtgcctgggaatgggggatagagggttggaggacagggtcctcctgatcctagggtgccttaggagaaaggctgctgacgtgaggaggggagagcgggaaaaggcggggcagctggtgacaggatgtcctggcaccctgcagccaggccttccaggaggctcccgcaccaaacactgaccccaactccaagccccctgaagggtcgggtggtcccttctaccagaatgcctactgcccctctctctctgtgggcatgctctgggaagacttccgaccctccaccctcaacccccgcctccaggccaaactccatagccatcttcacttggtgataacacaggaacatttcctgttagggcattatccacgtggaaccaatccctacaacaatgccttgagggagatactattattatttccatttcacagttgaagaagctgagagaagctaaatgactttcccagggtcacacggctggtaggcagcagagccagtttcaaatccagatatttggctccacactgtgggtatagggactggaggtggaagccaggttgcaggatgctctgcctcccgggttcaggcaggagaatcgcttgagcctgggaggtagaggttgcagtgagctgagatcgtgccactgcatccagcctgagggactgagtctcactctgtggcccaggttggagtgcagtggtgcgatctcgg

SEQ ID NO: 21281 - DNA, 1907 bp, Artificial sequence
  DNA replication origin
cactcgttccacgatctccgtggcagcgtctgcgagcccggcagcggccagcagggccccgggagcccgcaagcgccggtggaagcggtccagcgcccgcaccagcagtgagttgtcaccaccaccctgctcctgcgccagccgccgctccaccagcgcaaaatagcggctgcccagctgccgggcgaaggccgccagcttctcggcacctgctgggccctgggccgcaaacagctcctggtaggccgccgccacctggcagaggccgcccacgaagccactgcctccatggtcggtgaactctaacacgtcgggagccggaggtgagggccccagctcggcctccaggtttctcagctccttctccagccggccgcgggcgtgcgccaggaactcctcgcacagctcctccgcaggctcgcccagggccagcagcagctccacgcactctgcctgctccggggcgcctgagccgccctccctgcacgagggagaggtagtgaagggcagggccggggctgccggtggatggggcaggagcaggaaagcaaagcacacacagggcagggggacagctccaggagggcccaggagccgggcacagatggggctcggggctggcgggagcgctggggtcagggcagaggggccacacctaaagcgctgccgcagctgctgggccaggcgggccgtgatgacctggcagtcgtcctggatggcgcggaacgagggcaggtgttggtactgctgcagcacggcctgcgcgcggccctggtagcgcaccgcctgcccataggcgcccagttccacgcacttggtgaggcgcgagggcagctcaaagaggaactgcagcttccgcagcagcgcgtggacccctgggggacggagggtgacgttagccccagagccccaggaaaggcccactgcaggccctgcccggcagcgcccacctgccagcttggtgatgcgctcgtggcggtcctgcagcgtggcgctgatgcgagcgctgaagtcggtgatcactgccatgttggtggccagccggtccatctcatcctccatcttccggaaatcgttcttcatcttccggatggtgtctaggagggcaggggcggggaaaaggggagagcaggtgactgcagggcgggcgcaacctcagctccttctcacccaccccttcacagacgccccagcttgctccaggggcgcatggatgattccagagaaaggactgcgagggcgtgggtcacagcgcacatgggggcgggggagggggtttatgttcccaaagcaggcgttactcacatactccccgtaaccccctaaccctggtgcccaggagagccggccctcagaattagtccagatccgaagcaggccgcaggtgcttagccagctgccaccactgtgcctcaactgctccatcagaccacaagcagccaaggcagggaccgctggctcccaagcgcatctgcgtgtccagcgcactgcctggatgaggcaatacattcttgttgaccctcatctcctttccagacctcccaaagcctttcacatgctttccggaacatgggctgtcttctctgaagggccctttccctttggtcctgatagaatcctgcctagggaggctgtttttcctttcacacaccaggtgcctgggagcctggtcccttcatgcttctaaatcatgcctagatctcctctcttcaaaaccccggcttctaggaagaccatgccatcaagccacaaccctcctctttgctgtctctactgtcctctgacactcctctcagttccccatcactgcctcttctcctcctcctgtcacctccttgtgcacatccacatggatgagccttccaatgttcctgactgttcactgacggcctcaattcaattccacc

SEQ ID NO: 21282 - DNA, 1601 bp, Artificial sequence
  DNA replication origin
caccgcggggcccgctatttagtaggtacatggtcgctatttatagaaccagtggagtggggcaaaggcaggatacaagagttggtctgaggtctaatcttcagcaccagcaccaaccctgccctgacttcctgggtaaccctgagcctctgcttctccacaggtaaaataggggcgaagatgtcataatcctgggctgagaaggaacaagaccgtggacataggcactccccagcccgtttggtcttcatccttggagacttgttcccctggggttccctcacggacgccctggctacagaactggccccgtgagaagcccagatacacatgtcccctcctccaggcagggactgccagtgatcctctgctgccccagcccctcttgaagggacagtacccccagcctgcgtcagggctaccccggccagcctgggcagcacctgcacgtcgatggcggtggtatcctccaccacccgcttcatgacggcccgcacattccggggctccagagtgctgagccagtcgcgagtctccacgctcttgcgcagcatctgtgatatgaccaggccctgcaccttcacgtagtgggtcagcagccgccgcgccgtttccctggcctctgcacacagcgtgctcacgggcgtcactgggaactgatcctgagccaaggaggcagaggacagagggagtgggtatggtgggggcagctcaggggccactgccaaccaggagctgggcacagattgggcaaggtggaggctggggtacacacaggcagctggtctggggtctggccatgagggcactgtccagccatctgcattcccagcaacaccattccctgcccggctaggagctagtgcttcacctgcaccagaaactgttcatcagtgagagtgaggatgtaggagatggtggccgtctcgtagtccaggcagaggcgggagagcagcaggagcagggcaggtggtgtggcaccccccttctccccagggctgtcgcagaagctctgagccgtctggcacatagagtggacgaagcccacgatgaggccctcacggacaccctgactgcagaactcaccctgcaagagaaggtgcccaggtccacagcaggtcccctcttccaggtaaggctgttaatgaccctctgctggggctctaagtgccccagccccctctgcaagggacagcatcatcctacattctaagtaccccggagcagcttccctgagtgggggcagagaaagccaacactggggaccccaccatgccctgcttctcagcccagctgcagatgccctgagccttccccaccccccagaccgtgcataagaacctgaaaccacacccagagtgcctggtttccccagtttcccaagcactggcataaaaggttttggagggtcaaccagcaggttgaacaaggaacacccaagaggaggcgtacccggaagtagggcttgttggagaaggacacctctttggcggtgaaaaggtgcactgctgccagagaggccttaatgtggctcaggatggagctggccacattggccagcaactcggccaggccagggccctccttcccagccacgcgag

SEQ ID NO: 21283 - DNA, 2263 bp, Artificial sequence
  DNA replication origin
tacatcctcactctcactgatgaacagtttctggtgcaggtgaagcactagctcctagccgggcagggaatggtgttgctgggaatgcagatggctggacagtgccctcatggccagaccccagaccagctgcctgtgtgtaccccagcctccaccttgcccaatctgtgcccagctcctggttggcagtggcccctgagctgcccccaccatacccactccctctgtcctctgcctccttggctcaggatcagttcccagtgacgcccgtgagcacgctgtgtgcagaggccagggaaacggcgcggcggctgctgacccactacgtgaaggtgcagggcctggtcatatcacagatgctgcgcaagagcgtggagactcgcgactggctcagcactctggagccccggaatgtgcgggccgtcatgaagcgggtggtggaggataccaccgccatcgacgtgcaggtgctgcccaggctggccggggtagccctgacgcaggctgggggtactgtcccttcaagaggggctggggcagcagaggatcactggcagtccctgcctggaggaggggacatgtgtatctgggcttctcacggggccagttctgtagccagggcgtccgtgagggaaccccaggggaacaagtctccaaggatgaagaccaaacgggctggggagtgcctatgtccacggtcttgttccttctcagcccaggattatgacatcttcgcccctattttacctgtggagaagcagaggctcagggttacccaggaagtcagggcagggttggtgctggtgctgaagattagacctcagaccaactcttgtatcctgcctttgccccactccactggttctataaatagcgaccatgtacctactaaatagcgggccccgcggtgattaccctgtgatccttgtgatgcttgagtagctgacttagggcatcctcagcaccgatgggctggtggtttcccctgactcgggcctccttgcagtacctctttttaccaccaggtggggctcctgtacgaagagggtgttcgcaaggcccagagcagcgactccagcaagaggactttctccgtgtacagcagctctcggcagcagggccgctacgcccccagctatacccccaggtctggctggtcaggggagccccagggggaagggacaaaagagggcgagggtgcagggcgggctctgattccttgtcttccccaatccagtgccccgatggacaccaacctcttgagcaatatccagaagctattctctgaacgtattgatgtgttcagccctgtggagttcaacaaggtccgacttccaacgtgactcagacttccagggatcccggggagggttggctggagcagccccacacctgcccaaggagccccaggactctgtgaccaactgggggtgaccctgaccctccagtctctgtctctagggctgtttttaggtagtacagagtgccctgcctccaaatcccacagcccttgtcccagtcttggtgtatgcccagcctgagtctgggtgctgacctgggattactgtttgcccttgtccttatccccacagtagtcttgggtcctccccagggttttctgttcacccatggtccctgccccgcctcactccaagctcagggatgcctctgattgctgggccctacctgtcccctgccctccagatgacggcgctaatattgtatccctcccttcttatctggccccggagactttctgcctcatcccagctacttccatcgtatgtctcccgggcccctgcttggaacttgggtgtcccccacacacacctgcagtccccaagctgcatccctgtgtccctgcctgcaggtgtcggtgctgaccggcatcatcaagatcagcctgaagacgctgctggagtgtgtgcggctgcgcacctttgggcgcttcgggctgcagcaggtgcaagtggactgccactttctgcagctctacctgtggcgttttgtggccgacgaagaactcgtgcacttgctgctggacgaagtggtggcctctgctgccctgcgctgcccagaccctgtgcccatggagcccagtgtggttgaggtcatctgcgagcgcggctaggcgcagccgctgccatgcaccggtctgtccctgcaccccatggcacccaggatctggtctcggtggtccttccccgcaggcaggtgtcaggaccggcctaataaacatgtgtggcctcctcctctcgcttgc

SEQ ID NO: 21284 - DNA, 866 bp, Artificial sequence
  DNA replication origin
tgtgcccatggagcccagtgtggttgaggtcatctgcgagcgcggctaggcgcagccgctgccatgcaccggtctgtccctgcaccccatggcacccaggatctggtctcggtggtccttccccgcaggcaggtgtcaggaccggcctaataaacatgtgtggcctcctcctctcgcttgctgggcgggcctttccgggggcggggttttgaagctgaggcttctgaggcgcccgcgtcgggtccgcccccgagcgccgattggctggtgtgctgggcccagcatgggcagggggcggttccacttaaaaaccctgggacgagagcggtccttgtctgcgttccgtgtccaggcaggtgcaggcgccgcggggccggatcctccgcgcggccgagtccatctcctgggaaatggggcggacagtgtttccttgactgactattgtgagcgccctctctctccggcggagcggagaccatggcccccactcagggcccccgggccccgctggaattcggagggcccctgggtaatggggcagagagatgggacctggggcaaaggctaagcgaaggagagctggagcgggtgaactaagagcgggggcgagatctgaggatggaaggctttgggggtgtcggaggcagagggacccgggggtttgcagcgaagggtgtctggagagggagagctgaggaggggccggttctgggggctgcagaacggggatttatggtgtcgactgggagcaggaggagggtcttcgaggggcctgggggcgggggactaagatggacgcctgggaagggaactgggaggcagcggggtgcctgggggccgagggctgaggacggggtgcggaggcg

SEQ ID NO: 21285 - DNA, 1526 bp, Artificial sequence
  DNA replication origin
gatttatggtgtcgactgggagcaggaggagggtcttcgaggggcctgggggcgggggactaagatggacgcctgggaagggaactgggaggcagcggggtgcctgggggccgagggctgaggacggggtgcggaggcgcactctgggaatgccgagagggtcccgcagagacgtcagggcgcccgtgcgggccggcggggagctggggggctaggggcggacgcccgacgtgatggcccttcccgcaggcgccgcggctctgctactgctgctgcccgccaccatgttccacctgctcctggcggcccgttcgggccccgcgcgcctgctgggtccacccgcgtccctgccggggctggaggtgctgtggagcccacgggcgctgctgctgtggctcgcctggctcggcctgcaggcggcgctctacctactgccggcgcgcaaggtgcgggccccgctcgcggacgctcgggggagggaagcgaatgggctcggcgagggaaaggacgccccgggccttatcagagcccccttggacccgcaggtggccgaggggcaggaattgaaggacaagagtcgcctgcgctatcctattaacggtgcctaggggacgggccctcgcgctggagttaagcggccgggggtggagctccaggcctagcggggaggtccacggagattggcccccaccccaggctcctttgtgtgcctctgttacgcccaggacagacgccgggggctctccctatgcccctcgtccccacagccttaccccatttactgctactccgtgcaccacagcagtggctggggtgatcctctgaaggccagggtggcagcctaatgcttggggcagggtctgtggcccccctgagttttgggctctgcgtgtgtttgcggggtggggatgtggaggcgcgcagccccagggctcactgtgcgctgtggttcaggcttccaggccctggtgctgacagccctgttggtggggctggggatgtcagcggggctgcctctgggggcgctcccggaaatgctcctgcccttggcgtttgtcgccaccctcaccgctttcatcttcagcctctttctctacatgaaggcgcaggtagccccagtttcggccctggcacctggggggaactcaggtgagaggggtcctggggtggagacggaggcagattggggcgtctgcctgtacattcactctccaatattctccaggcaatccgatttacgacttttttctgggacgagagctcaaccctcgtatctgtttcttcgacttcaaatatttctgtgaactgcgacccggcctcatcggctgggtatgttgggcttgactgagctggcctcaggccagggggagggttagggtgggtgagcagcgcttgggcagggcagggccaaaactgtgcagatgcgagtcattaaccattcatattccacaaacatttgttcaatccacctgtgcctaggtactgggagacaaaaataaagttagaggcaaaaaagcatctttgct

SEQ ID NO: 21286 - DNA, 1084 bp, Artificial sequence
  DNA replication origin
ggaggtggccgccctcactggggagctggagcggctttggggaggccccgtgccacctgccccaagaactctcattgaggagctccctagctgaacgggttaccctggtcattaataaagctgtgactggtcagccctgttgcttgtttctgagggatagctattgtcccaccagaccccagattcctgggcccacaagccactgctcagcttctccctgatcagtgctgacccagccagtcctaggggagagaagtgcaccaagggttcccagtgtttatccaaaggaggaagagcatctccgattttggtcactggtttcatttttttccttgctctaaaccacctcttctctgaggttgttcatcctcagggctgggtggggtgcaagcccttgagtcccaagtgtgtcgaggctcctggtcctgggtgtgctggtggatgagtgggcacatgcccccacctggggtggtggagccgcttcagtagatgtagggcatgatgcggtaaggcacacgccggcagtactcctgccaggccaggccgtacttctgcaggcactgccgctcatcccgggcctcacggtgcaccagcagcgcggtgaagtagaggaggtagaagtagggcagcaggtgtgacacccctgtagagaaggaggctctgtgaccaccctgccggcccctccaccccgcagttcacaaacgtttccacacctcatggctcatgtgggcatcggggctcagcagcaaaagcgccagggtctgcagcaaagcacacggtactaggttggcacagaggtgtgccccagccacacactgggtccacccccagctctctgactactctcactggtgcatacccaaagtaggcatcctgtggtcgctgagccacctcttcccctcacatgtccctacccatatccacatgggccactcaccgcagggcaaggaccaagccagagccatgatgaggtctccaagatagttgggatggcggaccataccccaccacccagacaccagcagtttccgccctgtggctgtagagatggtctcaagccctggggaaagacagcagggtggag

SEQ ID NO: 21287 - DNA, 1270 bp, Artificial sequence
  DNA replication origin
gagaggacaaattagtaaaaggcagagcagtccccggggaggggccagcgcggggggggatgggggggctggggcgcggcggaagggcaccgcggggaacggagggggagggccgggcagggggtatttttaaccaggggcagcagctcgagttgcagggccggacggccgcaccccacgcgcgccctggcgggcattccggggcgattgtgcggcggcgccgcctcccgcagccccgggcccgcccggtccccagctcccctcgctccgcgcgaccgcagctgctcccgccgttcccagccagccccggcgcggggccgagattacctcgggctgcggcagctgctctgaggaggggccgggctggcagcgagcagacccctgccggacactcagcaaacggcagcctcaccccgcagggccgcgccactccccttccccaccccaccgccgcgtcccggctcagcgctccccggggaacgcagggggaccgggctcgctgcgtgaccttgggtaagtccctgccccgttcggcccgactttccgcatgcgtgcatcctatgggatggggttgggcaattgtgggagcccatctttctctaacgttctggggtttcttgaacctggaaacttagagaggtggacatccctgttctctcccccaggctctcagcccacccacctggaagcgcccatgtgtcaccttacccaggagagggcggcagaggctgcgagcaggacggcagccccctctccccacccccaggaccctgagatcctgcttcacgggctgcaagaagttggggggccaggattcggcgcggaggccgggggtgtgggtggggagactgcagagactcccgagacccccccaagtcagggcttttcgctggtctcgcagccccagcccagcagctgctgcagtcttgcatgttgtggatgcaagcattttgctgaggaaactgcatagcgttcccaggactctagggcccacgacccctcaaaagttaagagccgctgatctaatctaaccccactttcaccctcagttaacaaaagaggaaaactgaggcctgagagggtgtgacttgcctgaaatacctaacctggtgagtgatgggtggaaccagctcctaggctttctgcgcaggtgtccagggacagagaagggtggtttaaactagagaggtggcaggcagaagtagatggatttgataactatttaggatacaccatcaaaatttaactcaaactggattacacacctaaa

SEQ ID NO: 21288 - DNA, 887 bp, Artificial sequence
  DNA replication origin
gtcgggccgaacggggcagggacttacccaaggtcacgcagcgagcccggtccccctgcgttccccggggagcgctgagccgggacgcggcggtggggtggggaaggggagtggcgcggccctgcggggtgaggctgccgtttgctgagtgtccggcaggggtctgctcgctgccagcccggcccctcctcagagcagctgccgcagcccgaggtaatctcggccccgcgccggggctggctgggaacggcgggagcagctgcggtcgcgcggagcgaggggagctggggaccgggcgggcccggggctgcgggaggcggcgccgccgcacaatcgccccggaatgcccgccagggcgcgcgtggggtgcggccgtccggccctgcaactcgagctgctgcccctggttaaaaataccccctgcccggccctccccctccgttccccgcggtgcccttccgccgcgccccagcccccccatccccccccgcgctggcccctccccggggactgctctgccttttactaatttgtcctctcgcggaattggcccccggcctgcggagggaggggcggggagacaccgtgagtaagagatagtcagagaccgtgccggagagataagggagagccgagaggaagcggggtaggagccccaggaggaggaggaggagaaggagagagggagggcggagggcggaggggcggcgggaggagggcggggaggagcgctcttcctggttgggccctgccctgagctgccaccgggaagccagcctcagggactgcagcgacccccaaacacccctcccccaggtaagaagctgggtagccgagccgggattccttgaccctggccactgctcctgggctgaggggctgcccca

SEQ ID NO: 21289 - DNA, 1850 bp, Artificial sequence
  DNA replication origin
ccccccccgcgctggcccctccccggggactgctctgccttttactaatttgtcctctcgcggaattggcccccggcctgcggagggaggggcggggagacaccgtgagtaagagatagtcagagaccgtgccggagagataagggagagccgagaggaagcggggtaggagccccaggaggaggaggaggagaaggagagagggagggcggagggcggaggggcggcgggaggagggcggggaggagcgctcttcctggttgggccctgccctgagctgccaccgggaagccagcctcagggactgcagcgacccccaaacacccctcccccaggtaagaagctgggtagccgagccgggattccttgaccctggccactgctcctgggctgaggggctgccccagcacggtcccttctcgggggcctctgcgttcctggagcaggggtgggggctggcggagcggcacagcccaggcgcctgtcccagcctggctcaccgctgtccccaggggctgggctagggcccaccagctctgatatcgagcctgctgcgggggcctgaggagggggaccccgaccgtctggggttttcagcccacggcaaggggccggtgcaccaggagcttggttagtttggggagggggttgcaggcctgtgaacaggatcaaagaggccttccctgctgtgtcccacctgcccagttccttgtgctgtctggaggctccgccctgccccacctgacctgctggctcactacagagctgcaagcccctgacaatgggatccgggaaaggagaggtggccggcacgcctgggaactgggaaatccctttcctggattcactgggagcaccgggaggtggctgagaaccctacttctgtgaggggagcagtgaggcagggaaaccctaggtttggggatggataagcaggggcaggagagcagagcttgcaggcaggagcccaggttctagtcttgggaaggcctgggttctgagcaggcccatctgtccggcaggatgtcggaggagatcatcacgccggtgtactgcactggggtgtcagcccaagtgcagaagcagcgggccagggagctgggcctgggccgccatgagaatgccatcaagtacctgggccaggattatgagcagctgcgggtgcgatgcctgcagagtgggaccctcttccgtgatgaggccttccccccggtaccccagagcctgggttacaaggacctgggtcccaattcctccaagacctatggcatcaagtggaagcgtcccacggtgagaggggccatcctgggtgggactcggctaagccagatcctggatgaggagtagggatgggactccatgtccctggtggggaatggggtctggggtggcctggtgccaatttctgggaggggctggccgaggaacaggactctgggtctctcgtaggaactgctgtcaaacccccagttcattgtggatggagctacccgcacagacatctgccagggagcactgggtaggcccccagggcgtcgggtcccgggtattttttccacagtagttccccattcccgctccttcaggctctgccccaacccctccctcttgcaagcccaggcaggatctggctatcagcgctggggctggtttgcccagattcctgggtcttttctgcaagctgaggggagttaagtggcaccctggccaaggaaccccagattctccctagcacccgcttccccccccggggcaggttggtagagcaggctaatgtgcatccctcctgccccaggggactgctggctcttggcggccatcgcctccctcactctcaacgacaccctcct

SEQ ID NO: 21290 - DNA, 1098 bp, Artificial sequence
  DNA replication origin
gagagacgagatgatgtatttctcaataaatggtacagggaacggtggttatctatttggggaaagactgaaattggatccctacaagggagaagaatgcttcaaaacagagggcagggagccgtgctgaggatgcagcacaggaggacagagcagcggcggatctggcaaggccaaagcttaagtgacctttgagagggtggttttagcagcatggtagggatgaagctggactgggaagggttaagcaatgaagcagaagtgagaaaggaaatagggagtatggtaattcctgataaattgtgctttgaaggagggcggagaaatgaacagggaagtggggtcgagagggttgctttgtgttaagacagaggactctccgtaatgacactggagagagaggtgacagatgaaggagcaaatgctttcagaggtgagggagaatgggatctggagcagacgtgggggtccccatgaacagggactgttctgccactgtcgcaggtggggaggcgatgaggacacaggcacaggtgcagaaggctgggggatttggaggtgggaacacaaggtgtcctgcaggatgaagtctatcttttcagtgaagtgcaaggccaggcccgaaggtgagagtaacagtggggagatatcgaggtgagagtggaaatgttactaaccagtagtggaattgctggggattatggaaaatgctcatttgagatttgtggctaagaatttacagggaaaatatggcatcggttatgtgatttctctcctgccacactcaatggttcccaagccagtggagatgggttttgtgccagatgatgggagacaggggccagggaactgaaagtgtttgtaggaacaagattaaaatgatagctctaacctaggtaaggagagaaggcaagatgggagaggcaggatggtacgcaagtgatgggttcaacggactggcttggtcgaagggttgaagactaagggagtggaaagagtcgaaggtggaggtcagagagcgggtgtttgcaagacaaggcagctctggtgccctcatggtgggggctgagctaaggtagagaaaaagcgtgctgcagt

SEQ ID NO: 21291 - DNA, 744 bp, Artificial sequence
  DNA replication origin
aaaaaaggagcgaaggagggaaggccgaccgcccacaggctgggcagctcctggtcggcagcagggccagggaaggacagagggggcgttggcttcggcgcaggaaggcacaggcgttcccagccccggggcctccccgagccgggaggcggctccacacgcctggactgcagactgtgtcgagctagtggttatagtttatagtctgcaggcaaggccaggccggtggtgctgagtgggtggcctctgaagtggggagaggggacacatcaggatgctggggaaacccggggctgtcccgaggcaggaacaagcgaaagctgccttcctggcttggcaatgggtggggcccagggagtccatcccgagcccatggctggcacaggcaggggccacacagttctgcccggagcagatgaacgatggtggctgggaggagaggggacaggaggacgaggctgcctctctgctccaaggaaggcacttgcagctggggtggcctggtgtggtgtggtaggaggcgaggcttggcagacgaggagggaggggagcacggcaagggggaccgagtccctgcctcatgcaaacatggtcagctgcaaccactgcgggagaacaggcaggtcagctggggccgcagaaatggctccctggcttcttccccacccaaaccccaggtccagcccccaactccacgtctcaggagccacctcaggaacctcatggaggggttactttcttacc

SEQ ID NO: 21292 - DNA, 1680 bp, Artificial sequence
  DNA replication origin
cgggtgagcgagtgagtgggcggatgagtgagtgggtgagtgagtgggagagtgagtgggtggatgagtgagtgggcgagtgagtgggtgggtgagtgagtgggtgggtgggtgagtgggcggatgagtgagtgggcgagtgagtgagtggatgagtgagtgggtgggtgatgagtgggtgatcgagcgagtgagcgagtgagtggatgagtgagtgggtgggtgagtgagtgggtgagcgagcgggtgagcgagtgagtcagtgagtgagtggatgagtgagtgagtgggtgggtgaatggataagtgagtgggtgggtgggtgggtgagtggatgagtgagtgagtgagtgggtgcgtgagtgggtgagcgagcgagtgagcaagtgagtcagtgagtgagtggatgagtgggtgggtgggtgagtgggtgggtgggtgagtgggtgggtgaatgagtgggtgggtgggtgggtgagtgagtgggtgagtgggtgggtggctcggtgggtgagtgagtgagtgcatgagtgagcgagtgagtcggtgagtgagtgagtgagtgggtgggtgaatgagtgagtaggtgggtgggtgagtgggtgggtgagtgagtgcgtgggtgggtgagtgagtgcgtgggtgggtgagtgagtgggtgggtgagtgggtgagtgagcgagtgagcgagtgagtcggtgagtgagtggatgagtgagtgggtgggtgagtggatgggtgagtgggtgggtgggtgagtgagtgggtgggtgggtgggtgagtgagtgggtgagtgggtgggtgagtgagtgggtgggtgggtgagtgagtgggtgggtgagtgggtgggtgagtgagtgggtgggtgggtaagtgagtgggtgggttggtgggtgggcgagtgagtgagtgggtgggtgagtgagtgggcgagcaagcgagtgggtcatggagtgtgtggagaagaaaagctgcctgtcttcttggcctgcttccctgctggccaagttgaggctgtgcgctctggccctggaccctcatttgcaaacagggcagatcaccctgccatcctgtccttgggcccctctgtggcatggcaaccctctggtccacataatgactccaccctggctcctgctcccacaccagggactggccaagggctcacccgctgtgagttctggttcgaggcctccctccagccacagcagtgctcaggtgacctctccccacctgccacacgcccctctggggctttgcagaatccctgcctttcctcgagcccggactaaatctcctcgccagcttccttctacactatgtccctctgtctgtgaccaacctctgccacgaagcctgggtcccagcagtttcaagtttctgttttggaagggtggctttcgcggggtaccccatcttccccgggactgccttgataatcccctgctcgggtgaaaggggcaggcgtgggctgcccatttgttccttgggggatgctgctgctgcctcccaaaaccctaatgcctgtgcccattctctggactcaggctgggctgcaagggccccctggtctggtcctacctgcagctggcagcttcgggggccgccacagcgtatttcagctccttcagtgcctattgcgtcttccggttcctgatgggcatgaccttctctggcat

SEQ ID NO: 21293 - DNA, 824 bp, Artificial sequence
  DNA replication origin
ttggtgctggaggcccctcacctcctctccatggctgcgatggtctccaccaggggcatgttgcgggtctcggtcaggacgcagacggccagcccagccaggattgcggtggccccaaagctcacgggtggcaggatggtgctgtattccccaagtgtggtaaccaggggcgccgtcaggcccccgaggcgggcgtggacagaggcaaagcccatccccatctgcctgtgggaggtgtgtggatggggatgggtcagtgcagcaacctgcacccctaggggcccaagagggccacgccctgagtgtcagaggacagggcaggagggaccaggggtcctgcctcggtgagcccaacaggtctcaacctgcagcatctccccccatgcacccacctgatctccgtggggtacagctcgccggtaaacaggtacacacagatgaaggagctggccaggcagcctttgcccagcgctgcctgggctgtgcacaggatctgcgtgcctagacaggggagtagggtgcagctgaggaggaggggaggagagggaggcccagggtgtagtggagaagggtggagcctcaggaggggatagggcgaggtggggggaagaggcagagcccactcagaacccagaggagaaccaggatttccaccacctccccttcccaactgttcctaggacccaggagtcccctgactgcccttctctgacttctccctccttgctcctttatttgcatctgtcaccaagtcctgctgggtaggcaggtgctttagagtcaggcctgggttcaaattgcagctctcaccccgctggctgacc

SEQ ID NO: 21294 - DNA, 984 bp, Artificial sequence
  DNA replication origin
gcaggcggctgggaggtgtaggttgtagcgagccgagatcacgccactgcactccagcctgggcaccattgagcactgagtgaacgagactccgtctgcaatcccggcacctcgggaggccgaggctggcggatcactcgcggttaggggctggagaccggcccggccaacacagcgaaaccccgtctccaccaaaaccagtcaggtgtggcagcgcgtgcctgcaatcgcaggcactcggcaggctgaggcaggagaatcaggcagggaggttgcagtgagccgagatggcagcagtacagtccagcttcggctccgcatgagagggagactgtggaaagagagggagaccagagggggagggggagggggagggggagggagagggagagggagagggagagggagggagagggagggagagggagagggagagggagaatggcttcctttcttaaggttacttcatggtcaaagatggctgctgcagccctcaacgttttgcttgtgttcccggcagcgggaagaaggaagtagcaagagcctaattttgtatttttaatggagacagggtttcgccatgttggccaggctggtctcaaactcctgaccttaggtgatccacccacctcagtctcccaaagtgctgggattacaggtgtgagccactgcacctggcccatacatgcactttaacactccgcctcccataccctcatcctctccaagccctgctcagcacccagatgaagactgtcctcccccacttggcctgcagggaataaagtggacagggacaggggaagatatgaggctctcgtagttgtccagacaagagacaatggtggcttgatatagggccatggacacagggctggagagagaatgacagatttaagtctattctggaggcagaaatgataggacttgggctgggcgccgtggctcacgcctgtaatcccagcactttgggaggccgaggca

SEQ ID NO: 21295 - DNA, 1265 bp, Artificial sequence
  DNA replication origin
ctcccatgtctacttctttctacacagacacggcaaccatccgatttctcaatcttttccccacctttcccgcctttctattccacaaagccgccattgtcatcctggcccgttctcaatgagctgttgggcacacctcccagacggggtggtggccgggcagaggggctcctcacttcccagtcggggcggccgggcagaggcacccctcacctcccagacggggcggctggctgggcagggggctgaccccccaacctcccttccggacggggcggctggccgggcggggggctgacccccccacctccctcccggacggggcggctggccgggcagggggggctgaccccccccgacctccctcctggacggggcggctggccgggcggggggctgaccccccccacctccctcccggacggggtggctgccgggcggagacgctcctcacttcccagatggggtggctgccgggcggagaggctcctcacttctcagacggggcagctgccgggcggaggggctcctcacttctcagacggggtggttgccaggcagagggtctcctcacttcttagacggggcggccgggcagagacgctcctcacctcccagacggggtcgcggccgggcagaggcgctcctcacatcccagatggggtggcggggcagaggcgctccccacatctcagatgatgggcggctgggcagagacgctcctcacttcctagatgtgatggcggccaggaagaggcgctcctcacttcctagatgggatggcggccgggctgagacgctcctcactttccagactaggcagccaggcagaggggctcctcacttcccagacgatgggcggccaggcagagacactgctcacttcccagacggggtggtggccaggcagaggctgcaatctcggcactttgggaggccaaggcaggcggctgggaggtgtaggttgtagcgagccgagatcacgccactgcactccagcctgggcaccattgagcactgagtgaacgagactccgtctgcaatcccggcacctcgggaggccgaggctggcggatcactcgcggttaggggctggagaccggcccggccaacacagcgaaaccccgtctccaccaaaaccagtcaggtgtggcagcgcgtgcctgcaatcgcaggcactcggcaggctgaggcaggagaatcaggcagggaggttgcagtgagccgagatggcagcagtacagtccagcttcggctccgcatga

SEQ ID NO: 21296 - DNA, 946 bp, Artificial sequence
  DNA replication origin
gccgcgaccccgtctgggaggtgaggagcgtctctgcccggccgccccgtctaagaagtgaggagaccctctgcctggcaaccaccccgtctgagaagtgaggagcccctccgcccggcagctgccccgtctgagaagtgaggagcctctccgcccggcagccaccccatctgggaagtgaggagcgtctccgcccggcagccaccccgtccgggagggaggtggggggggtcagccccccgcccggccagccgccccgtccaggagggaggtcggggggggtcagccccccctgcccggccagccgccccgtccgggagggaggtgggggggtcagccccccgcccggccagccgccccgtccggaagggaggttggggggtcagccccctgcccagccagccgccccgtctgggaggtgaggggtgcctctgcccggccgccccgactgggaagtgaggagcccctctgcccggccaccaccccgtctgggaggtgtgcccaacagctcattgagaacgggccaggatgacaatggcggctttgtggaatagaaaggcgggaaaggtggggaaaagattgagaaatcggatggttgccgtgtctgtgtagaaagaagtagacatgggagacttttcattttgttctgcactaagaaaaattcttctgccttgggatcttgttgatctgtgaccttacccccaaccctgtgctctctgaaacatgtgctgtgtccactcagggttaaatggattaagggcggtgcaagatgtgctttgttaaacagatgcttgaaggcagcatgctcgttaagagtcatcaccaatccctaatctcaagtaatcagggacacaaacactgcggaaggccgcaggttcctctgcctaggaaaaccagagacctttgttcacttgtttatctgctgaccttccctccactattgtcc

SEQ ID NO: 21297 - DNA, 1044 bp, Artificial sequence
  DNA replication origin
ctgccacgtgccctgttcgtgtgctgccatggtcacaaacctgcagcagggcccctgctagcctcttcagcctccagccagtgctccatgcctgctgccctgaacatgtgcctgtcagctgtcggcggtgcccagcctccagggctaggtccctgcacatgctcctccatgagccctgcgatttgctccctccacctcacctggccacccccatgcctcccgtggctctcagctgtgatgtctcccctcagggaagctttctggacccccattgatgttgggtcaccttgtgataccgtgggaaactctggaccatggacctctccgtggcgttgtcatttggttcatgtccattttccattggatcatagccagtcccccagagtgtgtgccatgtggtaggcacccagtgaatatggatgagtggatggatgggtgggtgggtggatggttgggtggatgggtgggttgatgggtgggttgatggatggatgaaaagatggatggttaagttcatgggtgggtggatggatgaatggatggatggttaagtctatggatggatggatgagtgggtgggtgggtggatggaaggatggatggatggaagaaaggatggatggttacgtggatggatagatagatgggtgggtgggtagatgaatggatggacggatggatggaagaatggatggttaggtaaatggatgggtggacggatgggtggatggtaggatgccggggatagcaagaagagggtgtatgggagacacatgtttaggaaataaaagttgggagctggtgacccctcctctgtgcagcacccaccacaactccaggcacctctgcccttggcctgctctggttttctccatctgacacacttgactccatctgatgctctgcagtgtccactgtttacaggtttctgtgctggagtggcagctctgggtggcagcagagattctgtccactcattcatttctgcatcccgctgccgaggagagacccccaacctgcagggcccttagcaggtgttgtgct

SEQ ID NO: 21298 - DNA, 1158 bp, Artificial sequence
  DNA replication origin
acgttagaatactacaaacttacaagctagttgatcagtttacctcccactagaaaagacagtatgggaaggcagaggccgcgtggcctggacccccgtctttgctgtcaggcttccagagtgaaggtggggctcatattcagactagttcctggtccattcattctttcagtcagtcagtcagtcattcctacagggccagaaactttttttttttttgagacagagtttcgctcttgttgcccagactgctcaccgcaacctccgtctcctgggttcaagagattctcctgcctcagcctcccgagtagctgggattacaggcatgtgccagcacacctggctaatttttgtattcttagtagagacggagtttctccatgttggccaggctggtctcgaattcccgacctcaagtgatctgcccgcctcggcctcccgaagtgctgcaattacaggcgtgagccaccgcgcccggcccagaaacatgttttgaagggcaggcaccgcacagggtgctggagacagactgaaggaaactgcacctctcagtgactcaagagagatttgttgagtatctaccaagtgcctagcgctgttcttgtccctggggattcagcctctggattgggacctgcagcccagagaagggaaatgggggaaatccaagttcccaggtacatcatgatacccttccaggtgggtaagtgctaagaagagtggggcagaggaagtggtgggtagtgacggggtggacagacctcactttctagaggatgacagctatgccagctcagtgtgaccaggatggttggcttcaatgctgtcagtgtgggaagggcttttagggaggcagagccgggaagacctcagtgggggaggcaggatgctgggggtgggggaagatgccagacaagctgggaggtccggatgggaagaaggggatcatggtaggtaaaataacagcccccctaaatatgttcacatctagccaggtgctgtggctcatgcctataatcccagcactttgggaggccaaggtgggaggattgcttgggtccaggagtttgacactgacaccagcctgagcaacatagtgagaccctgtttctacaacaaataaattagccggacatggtggctcaagcctgtagtccc

SEQ ID NO: 21299 - DNA, 988 bp, Artificial sequence
  DNA replication origin
tggggcggggcgccacagagatgggcctctcgggggacccccgcgaagctgcgaaaatcccagcccgaactcaccgtgaggcgcgcagacggcagaccggcggacagcaaggtctcaggagctggacagcgcggcggccggacccgaccggcggtgaacttacagagtgcaccgcggaccccgcagccccgccccggcccgcggagccaatgccggggccgcgccagccaagcccctccccatccccgcccaggccccgccccactccgggcaccgcccggggctcccggcgtgggaggtgccgctcccgggtccagcggtcgcgcgcgccctggagtcctgtcctggttctggcggctgagggccgggtggcgcaggcggcctccggctgtgcccatgggaactaaaaccttcggttctagaagagccgggggagaggctccgggaagaccgaattcttcagaaatcgcagagagaccttggaccggatccttccctgcagggctgcgtcggggaagcgccggcacaagtatattcagcgacttccttggaagcgcctacgttagaatactacaaacttacaagctagttgatcagtttacctcccactagaaaagacagtatgggaaggcagaggccgcgtggcctggacccccgtctttgctgtcaggcttccagagtgaaggtggggctcatattcagactagttcctggtccattcattctttcagtcagtcagtcagtcattcctacagggccagaaactttttttttttttgagacagagtttcgctcttgttgcccagactgctcaccgcaacctccgtctcctgggttcaagagattctcctgcctcagcctcccgagtagctgggattacaggcatgtgccagcacacctggctaatttttgtattcttagtagagacggagtttctccatgttggccaggctggtctcgaattcccgacctcaagtgatctgcccgc

SEQ ID NO: 21300 - DNA, 1466 bp, Artificial sequence
  DNA replication origin
tgaaacggatccgggctgggctgggctccgcccgggtaggagtggggaggggtcggcgcaggaacccgagccggagctaaggagccggacccgtgggaggggcgggggcccgcacgcccgagctctggccctgtgccgagcggacactaggacatcgcccaggccggaaagcacaggggggaggctcctcccagagcttggagactagggcagggtccccaatcgccccctttttccccgattgtgggaccagaaaccccgaagcaaaaagatctcgcaggtaatccccatctggtacttgaacgcgcagctccttggggaccgcctgcctggagcccgggggaggggcgctggagaccccggtgcgctctcggagtcctccgggacacgaggcgatcaagggagcacgcgcgccacctggcggccgcggagccgggcacctctccggaggcaccgggaccccgggagacccagcggccgctagagggtctctgcatcctcgaggtctaggagggcgggaggaggtggacgcctggggtcaggagcccttcgtttttgctattgttcaaagcactggccccggagaatcgaagtgcttgaggaaggaaggccttgtagatatttgctgaatgaatgataaaacctacagtgacccgctgaaccccgctattgtacattggcgctctcacctgcaatattgcagtgggatctccagtggccctttagtggtggcttcgttgtcagcccattttatagatgggaaaggtgagacccagagaggagaggcgtcttgctgaaggttactgaggaagtcccaggtggagctggatttaaggacagtctcctgatttaggagaagagggggtgtgaggtggcctaatattcttcatgataggaggatccctgcctgccggaagtcattttctcattgggaggtccagggctcctgtccagggcaatcacagagagctaggatgctcctatctgctccccgactgctgcagggagctcccctcccagctccccacagccctgtcctgatggagacctcattctcatatctctggacacatgaaagttgggcagacgggggcagccaaaggtcaggatgtagatggaggagatctggggacccactgttcccagcctagctgtgagcccctttctctcccgctccccaaacatattatggaagtaggcgtggcccactgcatgggaaccacgtggaccaggctgggtacccactcttccacttcctaactggatgacgtcgccaatgttacttaacatctctgaggttcagcttcgacttctgtaaagggccgtaatgaccccaccatgccgtgactgggagctttaagatgagaaactgtgcgtggcaagctggatcctagggtcttgcagttgccaaatctaaattcctggggcgtgagggttgtaattcccagctctcccctgggccgctg

SEQ ID NO: 21301 - DNA, 1074 bp, Artificial sequence
  DNA replication origin
aaaacaggaccagaagtttatataaatataattaataagcaaactaatgacatcaccatgggacacacacaaaagttcttgcaggagcagggtctgtgtggcttcagttgcctgcagcgctcccaggccagagcaagtgctctaggatctgaactgcccgcagtgcagccctgcagcctttcccagggcacgttgatgtgcacacagtttccctgaaggcaaagtgaacatgtggagagcttacgtggcagcgcgtatgtcttcagtgtgtgttttagaagtccaactgttgtttttatgtttttaaaggaaagatttgaatcaagcagttatgggccccctgaagtatccttttttctagaacattctgaaagtcatccttgcctatgggaagcctaggccggcctgcactgttatgttcaataaataagcagggtgctctgggctggggattgtgtgaggagcagagcgcagcccgtcctcatgcttttccactgaagtaggccaggcagagagggagtacagcaatggatgcgctttggcagctgagtagtccgagagccagaaaagaaatgtggaaaataagaacgctgtagcaggcctaggtgaggaaatttaggaagggtttgcgggaggtaggatttgagatgggtcttggagagttggacagtgtcagccggtaggacgggggtgcggacggaagcctgtgaggaaggcagaggatgcggagctgtgagcggagggagcagcgaggctggagagcagctgggctgcgggtcaagacgtctgcgtttaattcgggactgaaggttagcagggaagggaacgatgccagatcttgagtttaagaacttgaatcttgtaaagtaccaaatctaataaaatactcgtcctaaatcattactggcccaagcatgcagtgtttccgtggccgacagactcgagccagcgctgtccatggtaaccagcttttgtgtggcttaaagcttgcatccattttctcctttcatcgttttcccaaaacaattccgtgagggctgttagccctgcttggtagacgaagaagccgatgcg

SEQ ID NO: 21302 - DNA, 1582 bp, Artificial sequence
  DNA replication origin
ggcagccagtttgcccaacagccggtgtcggtaatgggccttaaaggcccggaccactgagctgggcaggggaggcgtggtgctagaggcggccagaggcaagagcttcacgtggtagagcccaggcaggcctgccagctcctccaccactcgggcagccagcagcaaagccacctgtcggccctgctgtcccatgtcccggtcaaactgtgccaaccactctaaccaggggatgcccaggtccgggtggtaggaggcaggcagagcctcactgcggatcccaaagaagcatctcggggcagcctggagcccacccagcagtacccgccgcttctcggtgcccctgctgttggcacacagcagcacctgtacttgatcacatgcaccaaagctgccgggcactgcccgatacagcaagggcaattcagcacagccaaacacgtcctctggagagaagtcttttagggaaagaggcagctgagcctgggatgtgagccccgggggaggtggctcaggggggaatgaaggcgcaagaacatggcgggccccaaagccgacgttgtttcggcgtttccagcggaccagccagccgatgctgggcacgaagtcctggcccatgatatcggccagctccttggctttgtggagcagcatgggccccgtcacgtcccaggccttggcccgggcaatgtggtaccagcagagcagagcctcgtcgatcccgctgtacttggactcccgcttgcgcttgcgctctcggttggctgtgccgctgcaccagtccgccagcagcttctccttattcttgcagatgcgcgagatctggggctgggaaacctggaagcgccgggccacctccgactgggacatcttggactcatccaggagttccagcacctggatcttctcggccagggacagggcgtgaagcttcttcttgctgctcagctccatggcctctccggggcacctgtgcggggaggaaagattgagcgggtagagtaatctgaggccggaagagctaggaaaggagcgcaggagggaaaagagattagatgaggacttgcgcaggcaccgggtgagactggacccgctgaaagaggaagtggctaggccgagtggaagccggctggccccgtccccaggatgccagggcagagctggggagggggcgtctctccactcagaaggacaggggagtctgggctggggtctggcctcactcgggaagaaggatgaaaagtgcaggggacagctgcagagataacaaaggcatacggacgggggagggcctgggactggggccgagggggcaggtgtggggctacggggctgcgggggaggagcccccgggagggagtgggaggcggcttgggctggattcagatgacgccgctggggggtgggaggtgggtggatgcacacagagttgaggtgacaggtgtacagacgacaaaggggacagagggtgtctgaaggagcgaggctaatttggtgccgggtcctgagagggaggctaggcgacggtcagtcctgaggggagcgagagggcagggccgagggcgcaggtgcacgagcgaca

SEQ ID NO: 21303 - DNA, 988 bp, Artificial sequence
  DNA replication origin
ctgtctggttttgtagccggactttgatgaggtcaaaaggagccagacagtaggcctgttggtgatgaaacatgagggccccgggtggggctttgggctgggaactggccccttatattcacaagaggaaggaggcaggcagggggccacatcttccagtccctcaggaaccctgccggcacccagcctctcacgtgcatgtgtggctgggatggccaggatgtctgcatgcgaccgggacaggccacctcccttggcatcaggcccaagagtgagaggcactgcccctcatgcaacagtgaccaacttgcctggcctacagcaggcactcagaacaagcctggattctttttgcaggagcaggttggtttctggcctccctaaagccggcagtgagcatacctgtacggtgggcagggccaagtgaaggattcagcctgtgactgtgaaatagcaaagaaaccaccctttcccagggtgaaggaggtcccctcgtgagtgctgttctcctgcgcccacctctcagaggcccggaggggcacaaggccagcccctcctgcctccagagaggcaagactccttcccattagcatcccaccaaagaggcttctgagtgtgggaaggtgggtaatggggggacttggcaggtgctagggctcttagaatcggcagaagcagatgctacacagatttgggatggaattggggctggagtcctggtgagggtcagtgctggggggatgtagagggcgatgggggcaattaagatttgggtcagagatgccagtaggtcaagatagcttttggagtccaggtgagaatcggggtccatgtcaaggctagcctgtctctgagggatttatctgttttttgcttgtttgttttgtgacaggtacatgggctcagttcctcagccctggagatggctgatggcgacgggggctggcggtcgcctctggtggtgggtggtggtacttagggtgtggca

SEQ ID NO: 21304 - DNA, 971 bp, Artificial sequence
  DNA replication origin
gagggcgggagagccaggtgagcaccctataccttgagccctgctctccaggcccaccctgttgggcttacaaaggaagttcacctttgacctcacctgctgtcctgagtcccctctgggcctctgccccacctggctgtgggccgcagtcccgggccctgaggcctgttgtgctgtggtcccagcccagcttctgggtggcattcctcttaggagaaagagagggacgttctgaacctgcctcctgggggtgcgacctcccccaaactccagaaccagcctctgctgtggagggcagggctaggcagtgggcaggtggaggggaggggagaagctcctctgcaggtgcccaggcatgacccccatcagggccctgcagttctgcgtggccagctggcagcagggcctgctctggatcccggcgacgacattatgagttgaagaaagaagagtaaagctctcggagaggtgggaacctgggtgattctcccagagtcccgcggctcataggcggtgggatacccgggtatgggctccagcgaggacacgtacgtctttggctggctcttccctcttgggtgtgcatcctcaggtggggcctggggtcttagtcccttgtcccagtgccttcctggcccagtgcctgtgtggagggggtggcaggggcagctggagtctctagagcttggcaggaaggtggctgcatgtgtctgagatggccctgctctccttcctcctgcctgaacccctctttcctcttggcacagacttgcttcctgggcctggcacgagggccctcactcatagcaccctcttgtcaccacaggcgctctgggcttggtcctgggacacccgtttgacactgtaaaggtgagtttaggagagctgccagaggaatgaaagatctcacctgacccaaatgtcagggtgccctgagatcaggcctggctaatcttgcctttcctgcctct

SEQ ID NO: 21305 - DNA, 2214 bp, Artificial sequence
  DNA replication origin
ttttgagacagagtctcactctgttgcccaggttggagtgcagtggtgcaatcccagctcactgcaacctccgcctcctgggttcaagcgattcttctgcctcagcctcccgagtagctgggattacaagcaagcgacaccacgcctggctaatttttgtatttttagtagagacggggttttcccacgttgagcaggctggtctcgaacttctgacctcaagtgatccacccgcctcagcctcccaaagtgctgggattacagacatgaaccatcacgcccggccaccattggaattttagagcctaaaggatggtaaaggggggtttaggaagcagagctctgttcctggtttagccagtagccccatgtggcctcaggcactgtgccttccccagcttcagtttccctgctgtaaagtgggtgatctccatgtcctccagccctttgagttcccagacagagagagcatgaggaccccatgaggggctcagtggccaagtgaggggagttaatggagccctttctggagggagtggggaggcaactattgggggtaaatggtgtttccctactggaggtggtgacagatgggtggggcccagggtctaggttgtaaaggagggctgtggggcctctgggaaatctggaccagaaatgttgggacgagaaagggctgcagaggctggatgcaggggtgggtggaagggctgtgggcaagggggcccgtgtggagctgtggctgctcttccaggtggaaggcccagatggcccaaagagcagagacaaggacccctggcctcaggccagcaggaggggcgattggccatcagtggggactgcctaagggtagagcagggagatgtggatcaggcagcgctcgggaagcttggagcaagcgctggctcctgcaccccggtgacggacatccccatacatctctggatgaacttggaagtggcctcacacctctcaaaggcagagaacccggtggccactgttttttggtgggtgctggtgtgtgagctgaaaggctttgtccctcctggcctgaggcattgagtcctgggtccagagcagtggtggcatggggcagcctggagtttgaggggctggactgctgcacttggtcattctgccaacccctggcgaggtcactgtgccccagggatacggcggtggacaattctgcagcccctgtgggtggcagcagcgaggaatgtcaggtagtgatcagcctgtgaaggcaaacagatgtggcaccattggggtgatggaaaattttgaggaggggctgccttaattaggggtccagggaaggtggcccttgaacttagacctgaatcagccagccacgggaggatctggggcaaaggagtccaggaaaagaagaacatcaagcgcagaggccctggcacaagcaagctggggatgatttaaggagatttaagaaggccaaggtggcaggagcagagtgggagaggcagtgagagaggagataaggtgggagggccaggcaggagctgggttgcgtgtgggccacggaggtgcagagcttgcaggatggaaggtcagctggagctcctcagaggtgtcagaggtgggcagtgatgacggggaggcccaggctctgccagtgggggggcaaggcagccccttgggcctctgggccccagttgtcaatttccagttctgcttcctgatggcactgagggttcctttgtgccccagcaccttccattggccagtctccagtttcagcttgccgtggggctgcagtgaacacttagtggctggctctgcctggagccagacccccgtcgcttgctgtgtgactgtggacaaggaacttggcctctctgaggctcatttgctctatgggtgaaatgggggatagggttattgcagagtaaatggctctggacccttggcacctgctcagttactattggttgcgactgtcgtcatgctgtgcggtgtgataggtggaagggcagccactggactggccggaggctgcatgggccactccccatctcgtcctgcagaggtgcagctgaaacccaagcaccagccctacaagctgggacgccagtggccggagctgctgctgcgcttcaccagtgccccagacgatgacgtggccatgggtcagtgctgctgcctgtctgtccttgcctcgggaccacctgagtctgcatctctggctcccag

SEQ ID NO: 21306 - DNA, 2870 bp, Artificial sequence
  DNA replication origin
tgcacggccctccggttttctcagccctggtgggtgaggttggtggccagggcctgggccaatcgggagaggggagggctaagcagagtggggatgcccggcagtgacccagcctctctccccagatgagcctttcctgcagttccgaaggaacgtgttcttcccaaagcggcgggagctccaggtgaggcaggagccctggtggccccaccaggcctggccccttgtgcccagcctccctgtccctagacccctggacattcgcaccttgccccagcccaactgagcagctctccctgccccagcccagctgagcggctgtccctgccacacccccctgcagatccatgacgaggaggtcctgcggctgctctatgaggaggccaagggcaacgtgctggctgcacggtacccgtgcgacgtggaggactgcgaggctctgggcgccctggtgtgccgcgtgcagcttgggccctaccagcccggccggccggcagcctgcgacctgaggtgagggcctgtgtgacttgaggcgggggcgctgggtgggggagtttgtccttggaatggaacttacaagcagtcttcagtctcgcaaggtgggggcagggtcctggagtcaggaggcctcagccccgcaggctcactctggccctaggcagttgttccgcccctcagcctccttttcctcacctgtcctgggctggagcctcaggtgaagtgaagtctgggagaagaatctggagccctgcctcctgccggccagggtcagaggagctgggcttttggagtcacagccagggaccacccagatactgaccctttgtcaccagtaacaggccagcttagttccagacttctggggtgttccccaggcggtcggcaagctggctgtccacctcccagccctctccaggagccgagttctctgctgtgtaaattagcagggccttgggtggcgaggattgagtctgccctgccaaagcccaggccggtctctggtctccatggaggattatcccgaggtttagaaataattccagtgaaggggccggacgcggtggcccaggcctgtaatcccaacactttgggaggtcaaggcaggcaaatcgcttaaggtcaggagtatgagaccagcctggccaacatggtgaaaccccatctctactaaaaacacaataagtagccaggtgtggtggcacacacctgtaatcccagccgtttgggaggctgaggcaggagaatcacttgaacctgggaggtggaggttgcagtgagccaagggcatgtcactgcactccagtctgggtgacagagtgagactctgtcttaaaaaaaaaaaaaatgccgggtgcggtggctcacgcctgtaatcccaacactttgggaggccgaggcgggcagatcacctgaggtcaggagttcaagaccagcctcaacgtggagaaaccccgtctctactaaaaatacaaaattatctgggcaaggtggtgcatgcctgtaatcccagctactcgggaggctgaggcaggagaattgcttgaacttggcagatggaggttgcagtgagccgagatcaagccattgcactctagcctgggcaacaagagcgaaactccgtctcaaaaaagaaaaaaaaggactgagcgctccaactgcagcttatctgatggccggtccacagcccacagagtacccgctgcctgaggcggggaaccaactgtgggtatgccagggcctctcctccttcatgtggggcgggggagatgccctttcttttgtgagcctgtgctagttgtaggttggcgttttcacgtttttatctggcagaacaaagcattgagagcattaaaacccctgcaccagttttggttataaaagttccaccagttcagaaatcccaacgttcctgacttggtgacacagatgttgctctgaaaccctcctgctgcagtctgattctaggcaggtgggggctctttgttcggcctccagaccttccctcagcctctcacctctgctgtgagctgcagacctgggcccatctcctgggcctccttcactcgcctggctgccctgtgtgtctgtgtgccctcgcaggtgggggtcagggacctctgcagtgccgggcacactgcgggtgctcagggtggtgggttccttcccttctgggggtgaagaggggcctggtgactcctcgtgtctttcccttcggctcctatgagtttcctgggtggacacgtggtaaccaaccaggcaggaggcaggaagggttgggtgacaggaccaggccccatgggggcccttggtgcacatggggctgcagtgcagaggctgccggctcaggcaggactggtgggaagtgcaggaaggtggggcccgggttcctgttcctggatggagatgcaggcatctggagccgcaggatgagcctttggcttcagacggtgaccccgggtcagacgggcagagggacagccccaggtgggcctcatagggagccccatcacaatccttggcctgcacctggagagcttgtcaagttttagggccgggggagctcacctgggacaggtgggggtgtcaccatccccactctgcaaaggaagcaggcgcaggacaggaggtgcctctcaccagctgtacagctgctctcggcagaagcagacaggctggccctggagtctgcccttcggaggggggccgagaactgaaccccctctgtctggtgcctgggtctccccttgtgggctccttacccagcctctgacttggaagtagatgtgtgtctgcttcctccaggcagccttgcttccctcgccctcccccgtgagcctggcacctctggttgggccgctagcacctgtctt

SEQ ID NO: 21307 - DNA, 1420 bp, Artificial sequence
  DNA replication origin
ggaggtgcctctcaccagctgtacagctgctctcggcagaagcagacaggctggccctggagtctgcccttcggaggggggccgagaactgaaccccctctgtctggtgcctgggtctccccttgtgggctccttacccagcctctgacttggaagtagatgtgtgtctgcttcctccaggcagccttgcttccctcgccctcccccgtgagcctggcacctctggttgggccgctagcacctgtcttccttcctccacagggagaagctggactccttcctccctgcccacctctgtaagcggggccagagtctctttgctgccctccggggccgtggggccagggccgggccgggcgagcagggcctgctgaacgcctaccgccaggtgcaggaggtcagcagcgacggcgggtgcgaggccgccctgggcacccactaccgcgcctatctcctcaagtgccacgagctgccgttttatgggtaagagccacagccccgcggtcccccaccccctccgcaggctgttcttgggctttgctagcacagctgccagtgagcccacctctgctccagctgagctgtgtccccatgaagtggtgtcttgtcacgagcacctcaggccccaccgttccaagctgggcacctgtcctccccttcctcctgtcaggggctgggacaccttggatgggtcctctccttctacctggcacagtcacctcgtcactggcccggccgacctcgccttcagccagctgtctctgtcacgcaattgttgtctaacaaacagctctgtgcacctactgcacgcacgctccctgggcactggaggtccccctgagccagagacaccgtgcccctgcctgatgaagctgatgttctagtggagagagacgagaacacagaggttgaggagagcctgtcattgggcacaggcggcagccaggagaccagaggatggggtgtggcttgggccttgtggtcagaacaggtgagatggtcagatgcaggacgttctgagggcagagtgacaggatttgccagatggatgtgcagtggatgaagcgaaggagaggaggcagagaggactggcctaagcccctggcagatggcgttgtcctccgctgagctgggggcggcactgtggagtggtcagggaaagtttaggaatttggttttttgtttttgttttgagacagggtcttgctctgtcactcaggctggagtgcagtggcacaatcgtggctcactgcaggctcgacctcctgggctcaagcaagcctcctgagtcgctgggaccacaggtgtgcagcaccatgcccgggtaatttttctttcttttttttttttttttttgagatggagtatcgctcttgttgccaggctggagtgcaatgccatgatctcggctcactgcaac

SEQ ID NO: 21308 - DNA, 832 bp, Artificial sequence
  DNA replication origin
tttgaacataaaggtgagaatatcttggagttcaaagccatgaggcagggagaggagtgccctcgaggggggccaggaaaatggggagcagcaggggaagctgggggaggaggtggctggtgggggcggaaagaagcttccaggagcatgtagttaagctgagaagggggagggggccctcctgtggcaaagcagaggccgatggggctagaagcagcccccagcatgggaggcgcaggggtggggtctggctgccaagggaggggtgaagggcaccaaaaggaagccggagaggtgtggaatgaaggatccagagagacccgagatgaaaggaggaaggggtgggaacagtcctgaaagggccctgtgggagggaggggcgtctgatgtgacccaagtgggagagggaggggcaggggagggaggctggggagggaagcaggggagggaggcaggggagggaggcaggggagggaggctggggagggaggctggggagggaggctggggtagaagaggtgctcggtgctgagtaaaacacgacgaatgaaggggaaaatcaaacacaggcttggagaggcccaacgtttccacgcccaccgcaggtgactgtgaatagggtcacaacagcactggtcttggggacaggaggggagggtgcaggctggtctcaaagcactcagcaagccctcaacaaacagctgcccgaaccccacagctgccaccaccaccggcgtggagtctgcagaccaggcctcctgacctcccagggcagctctgggtcagcaggactcaaggcaccccttgtgcccaggccgctttcatcctcagg

SEQ ID NO: 21309 - DNA, 1124 bp, Artificial sequence
  DNA replication origin
gtttcccggatcacatcctggacaatgctgcagaacgtctgtgacgcagcagtgagaagggacaggaaaggcactatggccaaggcccgggctcggcctgctcacagctgtgtcctgagatggaggccagctcacactgggtctggagctgctctgcaatgccctgtcctcaggaactccccccggtgtgtgcacgcgcatgcgtgtttgtgtgtgcacatgcacagaagggctgctcaccgtcctccacgtagtcgatggtggagagatgctggatccggctggacaccacactgccctgcctccgcagcttggggcgctgaacaggagccagtgaggagctggggtccgagggcgagccagtcgcactgtcctgggggcctgcgggctccgccgcctggctcagttcgatgcagtactcaatgagactgctcatcagttcggcctggggaggagggggcagtgtgaggcctggccagggcccccttccatgcctgttgctgagcctgaaatgagctctgctctctggttggggaagcaggggaggggacacacatcactcaggagggagggagcagggaggcaggggaggtgtcccacttgggtgactgtgaaggtgagtcctggtggatgaggaggggtctccagatctgggagttcaggtgggaaagaaagaacattctggtcagaaggcacagcccaggaaggctgactccatgggcagaagcaggtggggagggagggggtagggagccagctgctgcagagaggacgaagagtggggaagcggggcggggaggcgggtggtgctggctgggaggaaaacctgcagccaggaggaaggggcgcgatgtcaccagggcaggggcgggcggctccctgccagcacgttcttcaaaagtgactcctactcaacaggtgtgaagcatgaggcacactgacagaaaagatgcagcagccgggtgccagcgggcacagctgggcaccaaggacagggccttcaggggtttgagggagtcgcagagggtgttaaaagggtggcaccccttaggacacaggtatttcctgagtgcctcccacgtgccaagcactgctgcaggcctgggataagatgaggccaagta

SEQ ID NO: 21310 - DNA, 1180 bp, Artificial sequence
  DNA replication origin
cctgggcccttcctccttcccagctgccctgagccctcttccagcacctcctgtccccacctcacacactaagtcttcctgctatttttaactatttgacataatttgcaaaagagagaataatagtcccagctcttcccaaggacttctttgtccggtgcccatctgaccttggcactttgttgtgggggtggcagtgaccctgacaagttctcccagccagcgagagcacaggcctcccatacagtatcgtcaaggtcagcagcctcccgggcaggggggttctactccccgcagaagccctggcaccatggccaacttgctcacagagggcactcagtcagaccaaggtgggttggggcagaaaaggctccttcagagattcaaggacagtcacaactggtgctgtgatggggccaccgggacaagcacagtgcaggccattcccatcagcagggacccaagaggaagtggtaggctctggcagtgggggcggctggcggtcctgaagacagagggctttgcaaacctaggggtggaggtagtgggatgtcagcacctgggctccctgctcagaggagctggcgccaggattcccagtgggtgggcttggggaggaggctggaaaggttagcacaggcgaaagtgtggggcctaggaaagctgggctcgcttatttggccaaggagggtggggagggttggaggaggtctaggggccgctggaggtgcagggcagcccggggaggcagggctatggggcccagccacgcattccacaggccttctctctgcgggaacaggagtgaggacacaggcgctcagcgtggcagggtgggaacaggaaggtctcgtgagctctgtgacaggatggggctacaggagacagaggtagcagtgagctggtgaagaggcaggaggaggcaaggaggacagggtgttctagggtgccagctcaggcaaggctccaaggagtgggtgagtgctcaggaggacgggggaccaaggcctggggtaaggggcaggtgcccaggcactctagcatggcacggaacaggggacagtcccaggacatccggatgcagggggctgacaccgcaaagttctttcctgtaaagcacagcccgaggcctggggcttggccctgggcagaggaagccccccttagatctgccttggca

SEQ ID NO: 21311 - DNA, 1301 bp, Artificial sequence
  DNA replication origin
gcttctctttaacagtgctttttgggatcgcggacagcgctcaaggtgacatttgggaggcgaatgccatgaggaagaagaccccttttcttcccggatgttgttgaggtcgggcgggggacgcgcttccccgagaggggctgggggcgtggcgggcgggggcgccctcttgagtgggcgacgggagccgccggggtcgcttgaggtcaccacgcccagccgaggcccgaaagaagggccggcaggacatctggaaaattccaggcggcggcggagggatctctgcagagggcacgtcccgccgggaggcgcgcgtgactttcgggcggtggttccgagtcgggctcggccgatgacgtcagcgcccgggcgcgggttgggggcggggcggcccagaaggccagcggggtgctgcgaggggacgtggaacgctccgcaccccaacaggcggtttctctggccaggaaaccctgctgcgggctgatagcgtccaggagctagtgggtgacaacatggagccccgtggagccgcgcgggcgcttcaggggcaggcatcgtggttttgactcttcccaggggcctggcgaggggacgtgtttcctgagaatgcgcatccctgccggggtagaacattcaagaagtgtgttcaggatggattaagtgggaagaggccgttgcaaaataatgtaaaaccaagatattgtgcggaaagcagtatctgacatagccgagggacaggctgtcggctcattttacatttgggtgggggtggggagaaaggtgatttttatttatttatttattttttatttgctgcatttgcaagcaggcatccccagcctggctcttctggaagcaaacctggtgaactcctgagccctccagcaaggcgggcagggcccgaatgtctggagaggactttggaccgtgtagcgggcacctcccttgctagggggtgcagggtgatgaggaagctctggcccctgaggtagaggatgaaaaaggaccccggttcaagtaaccagaatggaaaatggcatctgacaggaactcctgccaggaacctctccctggttaacacccacaccccatacaaaacaaccccttgaaagcaggcccccttggcaaccgagaagaagctggtgaagacatttcgcctgcgtctgtgaggtggtatcagcaggcagggctgggcctgacatgcacccctccctgtgcttctcggaaaactggtgactgtgtgtcatctgaccttcagcacagaaggtggtgatgtggcaagcccaggcttgctccctggc

SEQ ID NO: 21312 - DNA, 1171 bp, Artificial sequence
  DNA replication origin
gcggagcgttccacgtcccctcgcagcaccccgctggccttctgggccgccccgcccccaacccgcgcccgggcgctgacgtcatcggccgagcccgactcggaaccaccgcccgaaagtcacgcgcgcctcccggcgggacgtgccctctgcagagatccctccgccgccgcctggaattttccagatgtcctgccggcccttctttcgggcctcggctgggcgtggtgacctcaagcgaccccggcggctcccgtcgcccactcaagagggcgcccccgcccgccacgcccccagcccctctcggggaagcgcgtcccccgcccgacctcaacaacatccgggaagaaaaggggtcttcttcctcatggcattcgcctcccaaatgtcaccttgagcgctgtccgcgatcccaaaaagcactgttaaagagaagcggggatacactggggtccttgcgtgggggccgcctgggagaccatgcaccgcccgggagtctctccgggcagggtcggggagggacttttttgccggtggccgtggaggaatcgtcccgttgagcaatgaccccggtgacgcggctgagggctataaaagcaaaagttgtggcaagtccagccggagttagcgacagggagggatgcgcgcctgggtgtagttgtgggggaggaagtggctagctcagggcttcaggggacagacagggagagatgactgagttagatgagacgagggggcgggctgggggtgcgagaaggaagcttggcaaggagactaggtctagggggaccacagtggggcaggctgcatggaaaatatccgcagggtcccccaggcagaacagccacgctccaggccaggctgtccctactgcctggtggagggggaacttgacctctgggagggcgccgctcttgcatagctgagcgagcccgggtgcgctggtctgtgtggaaggaggaaggcagggagaggtagaaggggtggaggagtcaggaggaataggccgcagcagccctggaaatgatcaggaaggcaggcagtgggtgcagggctgcaggagggccgggagggctaatcttcaacttgtccatgccagcagcccctttttttccagaccaagggctgtgaacccgcctggggatgaggcctggtcttgtggaactgaact

SEQ ID NO: 21313 - DNA, 1154 bp, Artificial sequence
  DNA replication origin
agaacagccacgctccaggccaggctgtccctactgcctggtggagggggaacttgacctctgggagggcgccgctcttgcatagctgagcgagcccgggtgcgctggtctgtgtggaaggaggaaggcagggagaggtagaaggggtggaggagtcaggaggaataggccgcagcagccctggaaatgatcaggaaggcaggcagtgggtgcagggctgcaggagggccgggagggctaatcttcaacttgtccatgccagcagcccctttttttccagaccaagggctgtgaacccgcctggggatgaggcctggtcttgtggaactgaacttagctcgacggggctgaccgctctggcccagggtggtatgtaattttcgctcggcctgggacggggcccaggccgggcccagcctggtggagcgtccaggtctgggtgcgaagccaggcccctgggcggaggtgaggggtggtctgaggagtgatgtggagttaaggcgccatcctcaccggtgactggtgcggcacctagcatgtttgacaggcggggactgcgaggcacgctgctcgggtgttggggacaacattgaccaacgctttattttccaggtggcagtgctccttttggacttttctctaggtttggcgctaaactcttcttgtgagctcactccaccccttcttcctccctttaacttatccattcacttaaaacattacctggtcatctggtaagcccgggacagtaagccgagtggctgttggagtcggtattgttggtaatggtggaggaagagaggccttcccgctgaggctggggtggggcggatcggtgttgcttgcctgcagagagggtggggagtgaatgtgcacccttgggtgggcctgcagccatccagctgaaagttacaaaaatgcttcatggaccgtggtttgttactatagtgttcctcatggcgagcagatggaaccgggagacatggagtccctggccagtgtgagtcctagcattgcaggaggggagaccctggaggagagagcccgcctcaattgatgcctgcagattgaatttccagaggcttaggaggaggaagttctccaatgttctgtttccaggccttgctcaggaagccctgtattcaggaggctac

SEQ ID NO: 21314 - DNA, 1255 bp, Artificial sequence
  DNA replication origin
ggcacctcgggaggccgaggctggcggatcactcgcggctaggagctggagaccactccggccaacacagcgaaaccccgtccccaccaaaaaaacatgaaaaccagtcaggtgtggtggcacgcacctgcaatcgcaggcactcggcaggctgaggcaggagaatcaggcagggaggctgcagcgagccgagatggcagcagtacagtccggctttggcccggcatgagagggagaccgtggaaaggagagggagagggagagggagagggagacgggagagggagagggagacgggagagggagagggagacgggagagggagacgggagagggagacgggagagggagagggacagaatctccatctctatttaaaaaaataaaaaattggccaggcatggtggctcacgcctgtaatcccagcactttgggaggctgaagcgggcagatcacttgaggtcaggagtttgagaccagcctggccaacatggtgaagccccgtctctactaaaaatacaaaaattagcttgggcgtggtggcacatacctgtaatcccagcaactcgggaggctgaggcgcgagaattgcttgaacctgggagatggaggttgccttgagcagcgatcgcaccattgcacttcggcctgggcgacagagtgagactctgtctcaataaataaataaataaatagaaaaagctggctgggcacggtagctcacgcctgtaatcccagcactttgggaggccgaggcgggcggatcagaaggtcagaagatcaagagcatcctggctaacatggtgaaaccccctttctactaaaaatataaacaattagccggttgtggtggtgggcgcctgtagtcccagctacttgggaggctgaggtaggagaatgtcgtgaacctgggaggcgaaggttgcagtgagctgagaccgtgccaccgcactccagcctgggtgacagagcgagactccgtctcaaaaaaaaaaaaaagctaccttcacatctgggcttgtggttggggggtgttggggaaagaccttgagaagagacatgtgtactttgggagcattgaggtggattggccagctaggtacactgaccctctgcagactttgaggagtcagctcctcagctggcggggttgaggcctcaggagaattagcttataatccttatcttctgcagagccctccatccaatctgcgctgctttctgcggggctcccagatgcgtataacatcacccg

SEQ ID NO: 21315 - DNA, 1219 bp, Artificial sequence
  DNA replication origin
gagccccccacctccctcccagacggggcggctggccgggcggggggctgacccccccacctccctcccgaacggggcggctggccgggcagaggggctcctcacttcccagtcggggcggccgggcagaggcgcccctcacctcccggatggtgcggctggctgggcggggggctgagccccccacctccctcccggacggggcagctggccaggttgggggctgacccccccacctccctcccggacggggcggctggccgggcggggggctgaccccccccacctccctcccggacggggcagctggccgggcagaggggctcctcacttcccagtcggggcggccgggcagaggcgcccctcacctcccggatggggcagctggccgggcagggggctgagccccccacctcccacccggacggggcggctggcctggcgggggctgacccccacctccttcccggacggggtggctgccgggcggagacgctcctcacttcccagacggggtggcagccaggtggaggggctcctcacttctcagacggggcggccgggcagagacgctcctcacctcccagacggggtcgctgcccggcccaggcgctcctcacatcccagaccgggcggcagggcagaggcgctccccacatctcagacgatgggcggccgggcagagacgctcctcacttcctagatgggatggcggccgggaagaggcgctcctcacttcccaggtgggatggcggccgggcagagatgctcctcactttccagactgggcagccaggcagaggggctcctcacatcccagacgatgggcggccaggcagagatgctcctcacttcccagatggggtggcggccgggcagaggctgcaatctctgcactttgaggggccaaggcaggcggctgggaggtggaggccgtatcgagccgagatcacgccactgcactccagcctgggcaccattgagcactgagttaacgagactccgtctgcaatcctggcacctcgggaggccgaggctggcggatcactcgcggctaggagctggagaccactccggccaacacagcgaaaccccgtccccaccaaaaaaacatgaaaaccagtcaggtgtggtggcacgcacctgcaatcgcaggcactcggcaggctgaggcaggagaatcaggcagggaggctgcagcgagccgagatggcagcag

SEQ ID NO: 21316 - DNA, 986 bp, Artificial sequence
  DNA replication origin
aggtgggggggtcagcccccaacctggccagctgccccgtccgggagggaggtggggggctcagccccccgcccagccagccgcaccatccgggaggtgaggggcgcctctgcccggccgccccgactgggaagtgaggagcccctctgcccggccagccgccccgttcgggagggaggtgggggggtcagccccccgcccggccagccgccccgtctgggagggaggtggggggctcagccccctgcctggccagccgccccatccgggaggtgaggggcgcctctgcccggccgccccgactgggaagtgaggagcccctctgcccggccagccgccccgttcgggagggaggtgggggggtcagccccccgcccggccagccgccccgtccgggagggaggtggggggctcagccccccgcctggccagccgccccgtccgggaggtgaggggcgcctctgcccggccgccccgactgggaagtgaggagcccctctgcccggccaccaccccgtctgggaggtgtacccaacagctcattgagaacgggccatgatgacgatggtggttttgtggaatagaaaagggggcaaggtggggaaaagattgagaaatcggatggttgccgtgtctgtgtagaaagaggtagacatgggagacttttcattttgttctgtactaagaaaaattcttctgccttgggatcctgttgatctgtgaccttacccccaaccctgtgctctctgaaacatgtgctgtgtccactcagggttaaatggattaagggcggtgcaagatgtgctttgttaaacagatgcttgaaggcagcatgctcgttaagagtcatcaccgctccctaatctcaagtacccaaggacacaaacactctgcctaggaaaaccagagacctttgttcacttgtttgtctgctgaccttccctccactagtgtcctatgaccctgccaaatccccctctgcgaga

SEQ ID NO: 21317 - DNA, 893 bp, Artificial sequence
  DNA replication origin
cccactcagtgtgggttcccgcggtctgttcggcgcagccacagggtcctcccaccaccctcgcggcccttcgccagcccagataccgttttcccgactttggaacggagaccacaacacccgccccggaactactgaaggctcaagttaggtcaacccggcaggaaaccggttcccaaatcccaaggcggacccaggcccgcggttccctccctcaaggctggaacagcgcgcagtggccaccgccgccgggtctccagcccccaggagcgcggcctcctcccggactctctccgatgcggtcctgccctggggacacggcaggaagaagggacctggctgggggacgtggccccggcgcgggggcaggggaggcagcgcgggactcccagcggcccctgcgcgggtgcccacccgccgtcacgtgacacgccgggcgctgagtcaccgggaagcatctggctgggcggccgggattggccaatctgcgggaccgtctggagcggaagggcggtggtagctggccctgcttctccctccccaggatctctgcactggccttacgaactggggagtccaaggggttccaggacgggaaggggagtttgagaccagcctgggcaacctggccagacccggtctctattaaaaatacgcaaaacacacacaccacacaccccaccccacacagcccacacaccccacacggccagcagccctttctgtcaccgactccgttcccctggccagtgagctctccgtccccttttcctcccttttcgcacacgtgcctttcctgcctgctcccacctggtgcctgaggcgtctctgcgcctcagcactggctgttcggtttgcactacggagggcagtgtaggtttgaaaaggaaagt

SEQ ID NO: 21318 - DNA, 1236 bp, Artificial sequence
  DNA replication origin
agagaccaccagctgggactggggtgagcctctcagagcccctagcaccagcccaaggctgcatgggctgactgtgtgggcggatgctgcctaagtcatgtgcagagccgtcctgagctgaggcagaactataagacatgaactctgttttcaagacaggtgacaatgacaaacagcaataaaagccacacaccatagctcaggataacaagggctgagatgcgtttggacaatgagaagaaaataaaaattaaaaaaaacagctgattcaccaaatgaagggcacagtcccaggcgtgctggtgacgtcactgggcagggaaggctgcaggaatctgcagcatggactgactgttcaggttcaaggggtcttgacctggctcctgaagttggggggctcccactgccaggagagtggccacgactgtggggagcagtggagggaggtcagtgcaagtagggaaagtagggatcttgctgccacaaacagtgggggtgggggtggggggggcaggaacagaggaggctggactgcatgaggtttatggccttggctcagggtggggcagtaggtgataaagagcccagagagaggaaaagtgaccctttgtgacctgggccctggtctctgttgacatcttgggcctcagctgcagtctttgcttgagcagaagagtcatggaaatttccacccagattcctttcccagcactcagtccccagctccacattcttctaggccctgctgggctgagttccgcttgtgggggctgcaggcttgaagaggccgaggacagcctccaggtcacggggacagccacagaaggccggtggagtggacgcatcagaatttcaggcatgtggggcattgagctgccatgaaataccagagccatcccccgtgcctgacaggtcccagacgccccagggtccctgctcctgggagggcaaagaggaggagtaacagcctcctccgtcacagcagtactcgagtcacatcagctcatcaccaatgtgcctcccccagagtaagggcagcaggggcggaagaagcccaggggcacctaaatattgtgggttcagcacttctgctctccagaaatgatccaggtccactgttttctcagggggagtattttatatgtctatctctagaagcttccaaggggaaaaagtgacttcaaggggaaagaggagctgggaagaccttggcagctccttccccttgcccggcct

SEQ ID NO: 21319 - DNA, 1194 bp, Artificial sequence
  DNA replication origin
aggcttggggacagtgcctcaaccacagctatggagcactggtgagattctgggactggttatgaaaagtctggttgggatgcctttgggagataactcaagggcagagatgccacagtgagacggtgctgggtttcaatcacggttcagcccctcattggatgtgagaactcacacagttccctttgggtgcgttaggtcccccatctataaactggggtgagggccaggcacagtggttcacgcttgtaatctcagcactttgggaggccgaggctggaggatcacctgaggtcaggagttccaggtcagcctgaccaacatgtttgaagggggcctgcccctccacacctgtgggtatttctcgtcaggtggagacaagagactgagaaaagaaataagacacaaagtatagagaaagaacagtgggcccaggggaccggcacactcagtatacgaggacctgcaccggcgctggtctctcagttccctcagtatttactgattactattttcactatctctgcaaggggactgcggcagaacagggtgatggtgggaagaaggtcagcaggaaaacatgtgagtaaaggaatctgcatcataaataagttcaagggaaggtactgtgcccggatgtgcacgtaggctggatttatgtttctctttacccaaacatctcagtgtagcaaagagtaacagagcagtatcaccgctagcatatctcacctccagccatagggcagttttctcctatctcagaatagaatgactggtgggctttacaccaagacattccattcccagggacatacgggaaacagaggccttcctcttatctcaaccgcaaagagatcttcctcttttactaattctcagcacagaccctttacgggtgtcgggctgggggatggtaaggtctttcccttcccacaaggccatatcaggctgtctcagtcggggagacaatacccaggctttctcgggcagaggtccctgtggctttgcacagtgcatcatgtccctggttaatagagaatggagaatggcgatgacttttaccaagcatactgcttgcaaacatatagttaacaaggcacatcctgcacagccctaaatcccttaaaccttgattcaatacagcgcatgtttctgtgagcacagggttggaactaaagttacagattaacagca

SEQ ID NO: 21320 - DNA, 1512 bp, Artificial sequence
  DNA replication origin
ctcaccttcttgcggccgcggtgcagggcccagggcccgggcaggccgccctctgggggctccgggatgagctcgaacggaaagtcccggaccgggtcccgggcaaagaaccacatcgtccccaccgccgccgcgggttcgggcgccttagctccgggtcctccggccgcccgagccggggcggggcggagagggggcggggcctgcgtcagacgggggcggggcccgggggccagggcggggcctacgtcggggcggagcaggacgtgaattggggcggggtggggcagaacctgagttggggcgggaaggggcggggacaagggaggggcgggagaggggcggggatgggggggctagggaggggcggggatgggggggctagggaggggcggggatgggggggctagggaggggcggggcagtccggggcggcgggcggtactaagatcagtactccgccgccgggtaagtcacttaaaaccctccaagcctgtgagcccttttatctaaagaggcctaaatcctaaaggataatagagcctgccttctagcgtactgtaaggatgagagcttaagaagggacagagggatggggaaaccgaggcaaaaagggggagaggtagaaagactgacaggcatgagagggtgcagtgaggagtgaggcagagacccagagagggagactggccccacgccagacactctctcccaccagcaagtgggtgcctccaggctccggggaggagtcggtcctggtgaagtgaccatgagagaagcacgaggagacgccccagagaaagagcgtgggtgagaggcagagagtgaatccaaggttccaaggaggtccagaaccccggggcaggggcgggcacccagggaatggaggaaggagagactgaggagggaagaagaagtgaccccaggaaaggagggagggagaaggagcaactgggcaggtctggaagaggccaaagggctgggaggggaccctgctctcctgggctcagctgcccggctctcaagccaacggattgcatctctcagtgcctgtgtagacagccatggagtggtgttagctcaatcagcacatcacactggtggggatccagcccctgagctgtgtaggaggggctggacaggcagtggttcttctgctggtagggtctcaggacccaggcttggggacagtgcctcaaccacagctatggagcactggtgagattctgggactggttatgaaaagtctggttgggatgcctttgggagataactcaagggcagagatgccacagtgagacggtgctgggtttcaatcacggttcagcccctcattggatgtgagaactcacacagttccctttgggtgcgttaggtcccccatctataaactggggtgagggccaggcacagtggttcacgcttgtaatctcagcactttgggaggccgaggctggaggatcacctgaggtcaggagttccaggtcagcctgaccaacatgtttgaagggg

SEQ ID NO: 21321 - DNA, 2330 bp, Artificial sequence
  DNA replication origin
tctcccgcccctcccttgtccccgccccttcccgccccaactcaggttctgccccaccccgccccaattcacgtcctgctccgccccgacgtaggccccgccctggcccccgggccccgcccccgtctgacgcaggccccgccccctctccgccccgccccggctcgggcggccggaggacccggagctaaggcgcccgaacccgcggcggcggtggggacgatgtggttctttgcccgggacccggtccgggactttccgttcgagctcatcccggagcccccagagggcggcctgcccgggccctgggccctgcaccgcggccgcaagaaggtgagtgcggccgagctccgtaggccgcggtcgacctgggccttgcctattccgcgccgccgaccccgtcgcgttgcgcccggcctgacgtggcggcggaaccaaggggtagcaggccggggagggggcgggcagtgcctacgtggcgggcggagggaccgagggaccgacaggcggacagggccggggtcacgtgggcccggcgaagtgtccctaaggctgacctggggagagacctggctgcgggcccttgtcttccggccacacaacagctctgggaccatctcaggccccgctgccctcccctaggccacaggcagccccgtgtccatcttcgtctatgatgtgaagcctggcgcggaagagcagacccaggtggccaaagctgccttcaagcgcttcaaaactctacggcaccccaacatcctggcttacatcgatggactggaggtacctgctgccttgcctgcccgtctctgcccctcacgatgtcctggttacccactcctgtctcccctcctgccctgtttccaccctatgtgccccagcacccccagatttggtttcctcttccccatctctcccaacttcaagtcgcttatctctccttcctctctgcccctccgcccttgataaccctgtgtccccttccccagacagaaaaatgcctccacgtcgtgacagaggctgtgaccccgttgggaatatacctcaaggcgagagtggaggctggtggcctgaaggagctggagatctcctgggggctacaccagatcgtggtgaggtggggggcagtggtgatgagagcagggatggggggttgcaggtgctggggcgtgatggctccttttgcccccagaaagccctcagcttcctggtcaacgactgcagcctcatccacaacaatgtctgcatggccgccgtgttcgtggaccgagctggcgagtggaagcttgggggcctggactacatgtattcggcccagggcaacggtgggggacctccccgcaaggggatccccgagcttgagcagtatgaccccccggagttggctgacagcagtggcagagtggtcagagagaagtggtgggtgactgggggcagcgcgccccaacctgccctgtcctggaggcccctgcagcctcaggactcctagactagttggcactcccctgttccctgctgcctggctggggagggaatcagtgtcccaggagtgagggacactcctctgcccccagggtcctcagggcggtagggcgggatggacacagcattcggggttgggtgattctgaacttgaaagctctgtgacctggacagatgtgcctagttctctgaggcttggtttttttaatctgttaagtgaggctaatgaaacctgcctcttgggactgatggctcagctgagggacatagccaggccctggcatgcagtgggtgcctggtgcccaaggcaggctggaggcctgtgcaggtggttggtggggccctaagagctctgggtcactgccacaggtcagcagacatgtggcgcttgggctgcctcatttgggaagtcttcaatgggcccctacctcgggcagcagccctacgcaaccctgggaaggtaagtttcttgcccctggctctttgccctgcctcagcccctctgccagctggctacccctgccctgacactgacccctcccctacagatccccaaaacgctggtgccccattactgtgagctggtgggagcaaaccccaaggtgcgtcccaacccagcccgcttcctgcagaactgccgggcacctggtggcttcatgagcaaccgctttgtagaaaccaacctcttcctggaggagattcaggtgagcccccaacccaccctgggcttcgaccctatctttttcattctgcccctaccctgcttttcagggtacctcacaattgaccctcaggagacaagcatggactgtggagttaggccaatccgggttcaaacccaggctcca

SEQ ID NO: 21322 - DNA, 1072 bp, Artificial sequence
  DNA replication origin
caggaggcagaggttgcagtgagtagagatcacaccactgcactccagcctgggtgacagagtgagactctatctcagaaacaaaaaagatacggagacgagagtggctctgaggcttgtggcctgagcaactggaaggttaggagttgctatttactgagatgacacaagcatgttgggccccatcttggctgtttctgttaggcagctggatggagatgtcgagttggccactggttatgcatgtgtgaaatttagggaagtctgggctaggggtatgtgcctgggggttgtcagctcacaagatggcattgaaagccatgaaatggctgagatcacctagggcaagagtgttagatagaaaagagccctctagattggctccgggtgtgtgaacgttagagtctcagcaaaaggagcagccagccaggtcagaggagaaccaggagggggtggtgtcctggaagaccagagaccaaagtttcagggagggaaaactcaggggtgtcagaactgctgagggtcaagtttggtgaggatggagaactggctgttgaaattagtaccggggagggcatcagtgacctcaccctgagccagtttggcagagtgtggggctgtttgtgtgagtctaggtggagtgccatcaggagagcagagcagaggaaatgggaaacaggagtgcagacagactttggaggttttgctgtaaagggggacagaaatggggtccctttcttcaacatgctggacagggccaggcccaggctgggaggtggccttgcaggctttgatgggtgtgctctgggatgagggctgccaggaggctgttcctgcacaaggccctttgcccgccacagcccacagttcccactcatttctgccccacagtccatgctgctcctggccccaaagctgaacgaggccaacctcaatgtggagctgatgaagcactttgcacggctacaggccaaggatgaacagggccccatccgctgcaacaccacagtctgcctgggcaaaatcggctcctacctcagtgctagcgtgagtgtcctgcacaactgctgga

SEQ ID NO: 21323 - DNA, 1165 bp, Artificial sequence
  DNA replication origin
aatgggaaacaggagtgcagacagactttggaggttttgctgtaaagggggacagaaatggggtccctttcttcaacatgctggacagggccaggcccaggctgggaggtggccttgcaggctttgatgggtgtgctctgggatgagggctgccaggaggctgttcctgcacaaggccctttgcccgccacagcccacagttcccactcatttctgccccacagtccatgctgctcctggccccaaagctgaacgaggccaacctcaatgtggagctgatgaagcactttgcacggctacaggccaaggatgaacagggccccatccgctgcaacaccacagtctgcctgggcaaaatcggctcctacctcagtgctagcgtgagtgtcctgcacaactgctggagcccggtccctgtcgcaggaccacagcctcctccagggccaggagtcttgtgtgtgggggccttcattctcccagagacttagaccctgcacgctgttggccccatatctgggttcccagaggaggagtgagttggccgaagtcacacagtcaggagggatctgggatctgaatccaggcgtgcttggccccatggcctgtgtgcatcccttcagccagggtttgtaagttcagttgcttgccgtgcccagacagttaacaggaatgaacggtcagctgggcagggaggaagggagcctgtgtccgagccctggggacagctgctgttgtggtcccatgccctgaggcagtgtggaacccagtgatttgggaagagaagcccaggtccagagttttaggtcaactctccccatttaagtgattcattcatatttttcagattctggggacctatgggtggtcccattctgggaagtaagggctggtggttctgggtcccaacattgaccctacactcaggagccctctttcctgccccatcgtagaccagacacagggtccttacctctgccttcagccgagccactagggacccgtttgcaccgtcccgggttgcgggtgtcctgggctttgctgccacccacaacctctactcaatgaacgactgtgcccagaagatcctgcctgtgctctgcggtctcactgtagatcctgagaaatccgtgcgagaccaggtgaggcacagctgggcctgggccct

SEQ ID NO: 21324 - DNA, 2965 bp, Artificial sequence
  DNA replication origin
gccctgaggcagtgtggaacccagtgatttgggaagagaagcccaggtccagagttttaggtcaactctccccatttaagtgattcattcatatttttcagattctggggacctatgggtggtcccattctgggaagtaagggctggtggttctgggtcccaacattgaccctacactcaggagccctctttcctgccccatcgtagaccagacacagggtccttacctctgccttcagccgagccactagggacccgtttgcaccgtcccgggttgcgggtgtcctgggctttgctgccacccacaacctctactcaatgaacgactgtgcccagaagatcctgcctgtgctctgcggtctcactgtagatcctgagaaatccgtgcgagaccaggtgaggcacagctgggcctgggccctgggctggggctgtaggggatgtcagcccctagctggcctggtaggttcttgggaaccccagagaccccagctctgcctcgttaccccacaggccttcaaggccattcggagcttcctgtccaaattggagtctgtgtcggaggacccgacccagctggaggaagtgggtgagtggcttacactcgtgttccctctttccctgccatgtccttgactgtgacctgtttgtgtcccacccccactggagtttctgaaaggtcctagtgagcagacttgactcagctcccccttcacagatgggagaaatcaggcctggagaaaggaggggtggctgcagggcactgtcagttcctgctgtcctgtcacccatgggtgcctgacgtgcccatacccacctctctctcatgccactgcccagagaaggatgtccatgcagcctccagccctggcatgggaggagccgcagctagctgggcaggctgggccgtgaccggggtctcctcactcacctccaagctgatccgttcgcacccaaccactgccccaacagaaaccaacattccccaaagacccacgcctgaaggtgagtgtcctggcctagctgcatcagtggctgagagggctgagagctgcaggcacccaggaactcttactgtctgactcccccggggatggtgaaggggatataggagctgggtaggctccagtcaccctgtgggcttccttggtgccccttccccccagtagcccccttcccctagcagcctctgccctgtcccaagacccccctgaaagctcagtgagcctctgctccccaggagttcctgccccagcccccacccctgttcctgccacccctacaacctcaggccactgggagacgcaggaggaggacaaggacacagcagaggacagcagcactgctgacagatgggacgacgaagactggggcagcctggaggtgtgtggggctgagggagcctccccaggggaccccagctcaaatccacaggctgccattcagggagcttctgtggggcctggctggagttggcctgtcctcatcagcacagcatccctggcacgtaggcctcatggagtggccattgtaggccagagccagcagcaggccccattcaaccccagcggccccagggagcaggctaggcagatggtgcctggggcattccctgaacttcctcactcttacccacaccgtccccctttcccctcctccagtgcccacccagccatgggggtcagcaaggagaggccactcctgggtctagaaccagaccagttctgcttgggggatgggctcaggttgggctgagggaggactggggctgtcctcagaatggggcagagctgggggcccaatttccccatctggctgacagcagcagtttctggccctcaaggctgttggaaggggcatctagatctcattccccagccttaaagaggggtgagggcaggccagggtcagcgtccatttaatagatgggaaacagggcctgaggagcaaatgaggaggaaggcaaaagacagtggtggggcccgtggctgggatgatgctggggcgggctcacttgccctttagcatggggtgggagtcagtggtcccttcccacactgcagcaggaggccgagtctgtgctggcccagcaggacgactggagcaccgggggccaagtgagccgtgctagtcaggtgagctgggtctggtggggaggtgtgtgtatggggctctttcctccttgggcccagggctacttccccctcccgctcttctacaggtcagcaactccgaccacaaatcctccaaatccccagagtccgactggagcagctgggaagctgagggctcctgggaacagggctggcaggagccaagctcccaggagccacctcctgacggtacacggctggccagcgagtataactggggtggcccagagtccagcgacaagggcgaccccttcgctaccctgtctgcacgtcccagcacccaggtacccagcacaggtctggcgagagggtagagatggtggacctcagccagaagtgggccccactgcagcccacacttctctttacagccgaggccagactcttggggtgaggacaactgggagggcctcgagactgacagtcgtaagtgcttcccctgggtgggctgaagactagggctccccgactagcccgcccctacaggcccccggcaggcactggctggagagctgagaccggggctccccttcctgacgccaggacaggtcaaggctgagctggcccggaagaagcgcgaggagcggcggcgggagatggaggccaaacgcgccgagaggaaggtggccaagggccccatgaagctgggagcccggaagctggactgaaccgtggcggtggcccttcccggctgcggagagcccgccccacagatgtatttattgtacaaaccatgtgagcccggccggcccagccaggccatctcacgtgtacataatcagagccacaataaattctatttcacacccctt

SEQ ID NO: 21325 - DNA, 814 bp, Artificial sequence
  DNA replication origin
gcggggcccgggccgagctgtgacggcccccacccaccccctcgctgttcgtagacgtggacgagtgccaggacccggcagcctgccgccctggccgctgcgtcaacctgccgggctcctaccgctgcgagtgtcgcccgccctgggtgcccgggccctccggccgcgattgccagctccccgagagcccggccggtgagggcgagggttggccttggccgatcccggggccctgtccgtcacgtggcccccgcgcaggtggggtggggcggaggcgggcggttcctgccttgggcccctcccctgatgccaggtgtcttccgcagagcgtgccccggagcggcgcgacgtgtgctggagccagcgcggagaggacggcatgtgcgctggccccctggccgggcctgccctcaccttcgacgactgctgctgccgccagggccgcggctggggcgcccaatgccgaccgtgcccgccgcgcggcgcgggtaaggcagtcggggaggagttggccgggagcgaggatgggggccagggcccggggacccggacgtcgctgaccagttctgctcctcccagggtcccattgcccgacatcgcagagcgagagcaattccttctgggacacaagccccctgctgttggggaagcccccaagaggtgagtgctgccgggtcgggcggtggcggggttggtagcctttggccggggctcagtgttgaagtccatattgttccgggccacgcagatgaggacagttcagaggaggattcagacgagtgtcgctgcgtgagtggccgctgcgtgccgcggc

SEQ ID NO: 21326 - DNA, 847 bp, Artificial sequence
  DNA replication origin
tcgaaggtgagggcaggcccggccagggggccagcgcacatgccgtcctctccgcgctggctccagcacacgtcgcgccgctccggggcacgctctgcggaagacacctggcatcaggggaggggcccaaggcaggaaccgcccgcctccgccccaccccacctgcgcgggggccacgtgacggacagggccccgggatcggccaaggccaaccctcgccctcaccggccgggctctcggggagctggcaatcgcggccggagggcccgggcacccagggcgggcgacactcgcagcggtaggagcccggcaggttgacgcagcggccagggcggcaggctgccgggtcctggcactcgtccacgtctacgaacagcgagggggtgggtgggggccgtcacagctcggcccgggccccgcccctcccgcgtaccccactccccggcccgggcctcacccatctcttccgggctcaggcactggcgctgcgcgggactgtactcggcagggggcgtgcaggcacagcggtagccgccgcgcgtgttctcacacactccgttccggcagttggactcgtccaggcactcgtccacgtctgcagggaggaaaagcgtgggtagcaggggcaggcccgggatgggcgcggtggcgcgtgtctccctgccgcttccccacggccgccggggggcggagctcacccacgcattccagcaggttcccgtcgtagtagaagccctgcttgcagtagcactcgtagccaggctgcgtgttcacgcacttgccctccttgcaaatctccgacccgaacaacatgcactcgtcgatgtctgcggggtgacaaacactg

SEQ ID NO: 21327 - DNA, 1408 bp, Artificial sequence
  DNA replication origin
gttggactcgtccaggcactcgtccacgtctgcagggaggaaaagcgtgggtagcaggggcaggcccgggatgggcgcggtggcgcgtgtctccctgccgcttccccacggccgccggggggcggagctcacccacgcattccagcaggttcccgtcgtagtagaagccctgcttgcagtagcactcgtagccaggctgcgtgttcacgcacttgccctccttgcaaatctccgacccgaacaacatgcactcgtcgatgtctgcggggtgacaaacactggccgctccggtcccgcagctgcagcccggaggcgtgggctgggcgcaccaccggagcgaagccatccccgggcggggcctacaggaggggcggggcctacagggcggggcctgcgaggaaggtgcgggcggggcttacccggcgcgggcagctgacccagcgagtcccggcgggatccgggcgagcccaacccggggtgagagggcgcggggcgggcggagccgcagggcgcttaccacggtgggctgggatgccgtagttgacgatgttgttgtcctgggtgtagccctttccgtctgggcagaggctgtggaactcggctgcaggggcagggcggccgtggggagggaagaggcaggactgagcgcgcgcgtgggcttagggctgcagcccgccgcctatttcccaactgccagggggcgccatttcccacatttggcttccagatgaagaaactgaagatctgggaaggggcctgcccggctcctgacctgagctgtagactgggcaggggtagatttcgcagtggtcgccccagccggcccccagagagcagcagcactcctgctgggtcacgttggtggccaatacgctgtcgcagaacactgtgtcatcgaagttcaggtagcactccttcttgtggtggggctgctccacctctgaggggcagacggcagctcagggttgtgcacagaccccccttggccctgtccaccctgcccacccaccacaggtctttccccccacattccctggctccccttagcctcctcctgagagttggctctgttctcaacgtggtgttctggacccttcatcgtctggccccaccagactcccccagccaaaagagatttcttccggttccccaaatttaggagggtggggccaggacacatctctgaatcccagctgcagctcaggggagttgtccagtccgagggaggagctgggaggacactcaccctcacaaccgtgctggtcctgggtgggagtgaagccctcatcgcagacacacacataggagccctgaaggttcttgcaggccccatggggaaggcacaggctcgggtcctggctgcactcatctatgtctgcggggcaagagtagcgcagctggaaaccca

SEQ ID NO: 21328 - DNA, 2547 bp, Artificial sequence
  DNA replication origin
agcccgggagcttcaagtgcatcgcctgtcagcctggctaccgcagccaggggggcggggcctgtcgcggtgagggcggggcccggagccgagtgggtggggccgtcaggtgcctcccccagtctggctccgctgggggcggggcggggtagcggtggtgattggcgtctgggggcggggccttccgggagtagaggctgccctctcaaccccgcgttccagggaagagacccacacccccgcgaggtgcgcggtccgccttccggtggggcagagtccgaggctaggtctttccgccgcagacgtgaacgagtgcgccgagggcagcccctgctcgcctggctggtgcgagaacctcccgggctccttccgctgcacctgtgcccagggctacgcgcccgcgcccgacggccgcagttgcttgggtgagcgccagcacccccgccccgggcctccgccgccccctacgcgctgaagccggggagcgggtcacgctgtctgtaaacagtgggtggaaggtggctcattcatccccaggtgactctgctcactcattttctcaacgaactttgccaaggaaggcaccactagaatttccacgtaggaagggtctcggggtagagctcgaagctgcgtttgcaaagcatgttacttaaatttgaaggaaaaaagatatcaaagaatgagggcagacgatagtactcccccctgcactcctgtttattatacgccaagaggcggggctgggggctgggactcattgaaaactggagaaggaaagacagactgtagcatgcagtgctgggcctggatggagctgggctgcttcctggagacacagcgggatgggaggaaggaggcctgggtcatcttaaagaatcactaggaattgggcaagaaaggaggagaggaacagcatggcaggcacaggggttggcactggcagatcagaggtgagacagagggtggggtgttggggaactgtaaggaatgatcaggctatgggggctgaggctggccggggagggacaggtccccatcccttggagggccccctaagtcctgcctgggaggttgtgcttcacccagaaggtgttagagggcacctgcagcattttaagtgtaagagtgacaagatttgccatttgttttagaacgttccctgctgctgattgtggagggaggtctgttgcagagacttagggcggagacagtggtggacaggatgagtggtgggctcaggatggccatgagacgatgatattggagaaatattagacctcctgggttttttaactggatgtcaagtgaaagcgagggtgataacgacccctccccgtttccagtttgggtgagtgagggggtagtgctgctcactgggaatgggtcctcatgcgtgggcatgtttgggagggaaaatgctgagctccacattggacaaattgaatggattgtgcctgtgagcctctcagcaggagatgccagcatacccacctggaatgatggaccatggaccgggggagctatggagtcttgggtgggcctgcttagccaacccaaggtgggttgggtaagcagagcatctagcagagccttgtggacactgacagttcaggggcaggctgcggaaggcgttggaggagatggtgggggagggatggcaggggcgcctgaggggcaccatctgggaagctggggaggacatatttccagggaaggaggaggatgagccaagtgcagtagagaggttcttgtaaaataataactggtgagacaataagtcttaggacaagacttaggggtctgccccctaatcctacatggaaatcctagtgatgccttccttggcaagaaggtccctggtagccttggcagggtagcttttgggatatgatagggacagaggccagagatatgtgggcagaaagtgaagaagaacaagacctggggactcttgctcttccaaagtggggctttggtataggctgaggaggtgatgccaggagagtggaccaggagacgagggcagcagggtcaggagaggagggaggagagccagcggaagggacatctcttgctgtaacaggagcaggaggggaatggatgtagataacgatgttcagtgggttaagggggattacctttaattctctcaatacacagtgaagggcctgggttgagtaggggactcaggagaacagtggcggtttggaagtatcccagggcatggggctgcctaggggctttatggaagtcaaagctttagaggagtcagagagggaggtgccagccacacgaggctctgttggactgaggctgaagcctgtgggtatgttccagcatgctcagcttggtggctgctccagtcccactccgcacccaggatccacaggccacagctctgaccagagactgggcattgccagacagtgaggaggaaggagaggtgtttatggatcagggacgggagtcctagggatgataagccctgggctccagctgggaactatcagagtctgggggtgtcaggcaagctcggaggactga

SEQ ID NO: 21329 - DNA, 829 bp, Artificial sequence
  DNA replication origin
ggggatatggcagaaggtgagcgctccctgctctgccgcttgacctggccatgcccgcagagactgatgagtgccgactgaaccagaacatctgtggccacggagagtgcgtgccgggcccccctgactactcctgccactgcaaccccggctaccggtcacatccccagcaccgctactgcgtgggtgagcgcagggcaggcggcgggcatgcaggtgggtggggggggaccccagataacgacgcttcctttgacttttcttggcctacccgttcttctcagatgtgaacgagtgcgaggcagagccctgtggcccggggaggggcatctgcatgaacaccggcggctcctacaattgccactgcaaccgcggctaccgcctgcacgtgggcgccggggggcgctcgtgcgtgggtgagcgccgccagggcggaggcggccctgggtgggacgggctctcctccagaccgccgtgtaatccctccccttgcccgccgcctcctacacccccttcgtggccccttcctcccgcacagacctgaacgaatgcgccaagccccacctgtgcggcgacggcggcttctgcatcaactttcccggtcactacaagtgcaactgctaccccggctaccggctcaaagcctcccggcctcctgtgtgcgaaggtgaggggaccccattcagaccaaagaaggagctccttagctgtctctccacctggggtggggctggggtgcctgcatttttttttttttcccccgagacggagtctcactctgtcgcccaggctggagtgcggtggtgagatcttggctcactgcaacctc

SEQ ID NO: 21330 - DNA, 1532 bp, Artificial sequence
  DNA replication origin
cacaggccagtgtctctgaaccaggggaagtccagtgcactgagccttgtcaaggaggcttgagtttaatgccagaggctatgggcagtgtctgcaggattttgagcatcataattgctagctcagactgagcagtccctctgtgccaggtactgtctgaagagttttacgttctaaataccatttaaccttctcatactctgcaaagtgagcgttgttagcctcgttttccagatgagaaagctgagcctcaaagaggttcagtaacctgccccaggtcacacagctgagccgtgttcaagcccatgcctgtgtgggcttcaaaagcacaagggaactgccaacccagctgaaaccctgatcctccatgagctcctagggttagggctcaggtgggagatggctgttcttgggggctttgggaatgtggacaaggcccctcaaaggaggggctgttaaggaagcctaaggagaggtactccaggcaaagagaacagcctgcaaagcccactggccaggtgagtttggggcagagcagagttcactgttatggcccaggctgcatggcaggagtgagggggaaggggtgtgggaaatgaaactggtgagcagtgaggatccaaaggaggggagaggctggaggcagggagtcctgggcttggtgacaaagagagtgaggggggtggttcctggatctgactgcctgtgcacagctttggcactagttaggattcccaggaaaccagctcctgctagtcttgggagggggtaatcaacccttctggaatagggggtcgggtccctggggcaagggcttatggagtcactgggctagaggacactggtgtgaccgaggctatagagtttaaggtattgaggcgactggggagaaaggagttttagtcccttgggtgggagtactgggacgactgaggggccctgaggggatgtggtttggtttgaggtgagtggggtcagggtcttggagtgaaccgggaatggaagtatccgggcctgggtgtggggtgatacggctgtcaggggcctggagtcctagtttggagctttctggggtcttgatattggggttatctaaaagagagaaataggacatcctggagttggagtatgggcgtacaggaacctgaggtcatggtgtgactggggtgttgaggtctgccctggggatatggcagaaggtgagcgctccctgctctgccgcttgacctggccatgcccgcagagactgatgagtgccgactgaaccagaacatctgtggccacggagagtgcgtgccgggcccccctgactactcctgccactgcaaccccggctaccggtcacatccccagcaccgctactgcgtgggtgagcgcagggcaggcggcgggcatgcaggtgggtggggggggaccccagataacgacgcttcctttgacttttcttggcctacccgttcttctcagatgtgaacgagtgcgaggcagagccctgtggcccggggaggggcatctgcatgaacaccggcggc

SEQ ID NO: 21331 - DNA, 1133 bp, Artificial sequence
  DNA replication origin
tgggggcgtggcctaggcaggggtggctttgctgggcgggccttacctgtgacctgagtgggagcgatctctacggcgctgcgggaaggaggcaagtccggcaggaaccagcgcatggtcgggggcgagggacgggagatcagctctgcgggcggcagtgcactctggtcagagacgatattgactgaagcctccctttccacttcagtcttggcccggcgccccaccccagcttgactgtccccgagtacttaaactgtgaactccccgcccacccagtgatttagcccttgaggactcatccctacagtgcccagctcaccggggtagggccgggcaggagtcgtggtggcagttgggtggctctgctgcactgacctctcctcactcaccggctgcgggtgacagcagcatgagccctcctgtccctcgcctgcccacccctcccatctgggttctcatactcactgagtccgtggtcacccctaaaagggaagaagatggggccatgaagtgttggggcgggagaagggagtcagatctgggatcagcagctgagtatttgcagttagggtctctgggagttcaacaatcatgtctccaggtcaagggtcaggggttagattctggggttagggtgtgtttgcatagtagtcacatgatcaggttgaatggccttgggttacaggtcaggctgtagaaggcttaggaggttatagctcagggtcaaatatctgggtcaggggtcagagggtcaggtgggaggtcagtggatgggtcagggataaggaattgggggttagactgtgaggtcagatctgtggatcacgggtcaaggggtcaggcctaggggcttggcatgggtcagggatcagaaggggtcaggctagacctctctcttcctctgtgtcctcaggtggtggagcctggctagggctctccggaagctgctggggcttgggtggcccgtcagggtgcaggaaaagggaaaagtcactctcgccctgaatggtgagcgtctggtgggaggtgagaatgtggtatcccttcccagctgggcagatctccttgaacgcagctgcagtcaagacagcagacacaaaagtgagcatttcctggacaggtgcatggac

SEQ ID NO: 21332 - DNA, 1502 bp, Artificial sequence
  DNA replication origin
aggtgcaccgcattgagagctcgaacgccgagagcgcagccccctcccagcacctgctgccgcaccccaagccctcgcacccccggccgcccacccagaagcccctgggccgctgctttcaggacactctgcccaagcagccggtgagtgaatccacagtcgggatctgcctttccttctctcagggttgctctgccccaactcactcggatagcagaaaactgaggggcgggggaagaggaaaaggcccaaccctaacaggcggcaccggggcggggtgctctgtgaccccacctccccctccttcccctagtgtggcagcaaccccctccccggcctcaccaagcaggaagactgctgcggtagcatcggcactgcctggggccagagcaagtgccacaagtgtccccagctgcagtgtgagtgcttgggctcagggggcgttccctatctggtggcccctccccacccaccccacccatccctgcagtgggagtccccaggtcaccagattcctctctacatctgctgtgcccctccccagttccctcctcaccctcccctgccaagctatcctctctctgcagacacaggagtgcagaagccagggcctgtacgtggggaagtgggcgctgactgtccccagggctacaagaggcttaacagcacccactgccagggtatggccagctaggagattctgtgggctggaggggcaggccagccatcactgggggtggggagggtcccaaggtgggcgagagaggaggtggggctggggcaagaccctgaggttcttggagcagcctgctgtcaccccatggccccagaccagaggggccaaacttccacttaccacagacatcaacgagtgcgcaatgccgggcgtgtgtcgccatggtgactgcctcaacaaccctggctcctatcgctgtgtctgcccacctggccatagtttaggcccctcccgtacacagtgcattggtgagacctggggctcaggttcctgggaggtcacaaggcatgggtgggagcaaggatcagagatcgcaagagatcagagtggggttaagggttgactgcaggaggaacaaggcccagagccaataggatcagggatcagcagggtccggggtcacatgagatctgccattagcagtcacatggggtcagggattacatagagtcagagtcatgcagaacataggcttgatgagtaggagtggtgaagtccaggatagctagaatcgggagtcaatggggtcagtggtcacataagtttcaggggtcacatgagttcagggtcatatggggtcagagaccacatgggggatcaagggttgtctgggccggagaggcaaggtctgcagcagctgggcagagggacgtgggcaatgtgcaggctcagatgcccatgccccccactggcccctgcagcagacaaaccggaggagaagagcctgtgtttccgcctggtgagccctgagcaccagtgccagcac

SEQ ID NO: 21333 - DNA, 793 bp, Artificial sequence
  DNA replication origin
tgtggtaagtggaagtttggcccctctggtctggggccatggggtgacagcaggctgctccaagaacctcagggtcttgccccagccccacctcctctctcgcccaccttgggaccctccccacccccagtgatggctggcctgcccctccagcccacagaatctcctagctggccataccctggcagtgggtgctgttaagcctcttgtagccctggggacagtcagcgcccacttccccacgtacaggccctggcttctgcactcctgtgtctgcagagagaggatagcttggcaggggagggtgaggagggaactggggaggggcacagcagatgtagagaggaatctggtgacctggggactcccactgcagggatgggtggggtgggtggggaggggccaccagatagggaacgccccctgagcccaagcactcacactgcagctggggacacttgtggcacttgctctggccccaggcagtgccgatgctaccgcagcagtcttcctgcttggtgaggccggggagggggttgctgccacactaggggaaggagggggaggtggggtcacagagcaccccgccccggtgccgcctgttagggttgggccttttcctcttcccccgcccctcagttttctgctatccgagtgagttggggcagagcaaccctgagagaaggaaaggcagatcccgactgtggattcactcaccggctgcttgggcagagtgtcctgaaagcagcggcccaggggcttctgggtgggcggccgggggtgcgagggcttg

SEQ ID NO: 21334 - DNA, 1386 bp, Artificial sequence
  DNA replication origin
ctctcaccgctatgagtgactcactggcagaaaggaaaaagagaatcctacctccccccgcccaggacacacccctctgctctgtgaggcctggccccaagaggccaggcaggatgggctgggctgggatgtgcttagcctgaccctgagggccatggatatgggctgtccctgtgaggcccttctggcatccaggagagcagcacccccgccctcctgccctcctgccctgggaagtgagggcagccatggggtgggcaggagaagggctggggctttgggatgagtcagagccccaaggctggtagtagcacaggttgaaggtgagtatgggacagaaacagacagaggtcccatcctctccctcagtcattctttcattcattcccccgaaccccctgtgggacccagagctgaggccagcctggccctgccttccagagcaccctctataaggaggcagacagacaagaacatagccaagcaggtgccaggcagagctggccagtgggtggtaaggcaggagagggagctcaggggggccggataggaggaaagcctccctcctggtggagacactgagctaggaaggatgagatctgcatatatagagaggggggggacctggggccctgttgtggagggaagggcatggatgaggccaggaggcaggaggcaggcacatttgcaagagggagatgggtcctggggtgtgcagtacacagggaaggagcagagggggatgggctgaaaaggttctggtccatggagtgagcttctgcctgaggcaggtttctctgggacactgagattgtggaccagcaggagaggctggaagccaaggaggggtctgggtggccaggcctgggccagggcaggagcagtggccctagggaggaggggaggcaggttcatgggacattagaggctgtaactgggcaggggagagcaggagggacggagccgtcggggctcagctgtggatgcctggtggccaggtgaagaggaggtggggaggcaggatgctgacttctgacagtatgtcctgggcagaggtgcctgagagagccctggaaaggctgggggctgtgtctgtgtcttgagatgtggacatctttggcagtggtgaggtgggcgccccaggatggtgaagagggagagggtggagagcaggcagagaggactgaggcctgaaggagggaagggtttatgggagaagaggaggaggcgccagggacggagccaatacctttggaaggctcaaggggaaagccagatcaccataattatttgctaccacttattaagcaccctttgtgtaccaggccctggggtaagcatttgtacagcccttacctcatctaacccacacatctctacagatga

SEQ ID NO: 21335 - DNA, 1411 bp, Artificial sequence
  DNA replication origin
gagcccggccagggggaggcgcggagcgggccggccgcccggccttcctctccctcgctcctcctctccgcctcaacttgctccggcctcctcgctcctgcctgagttcggggcctggtctgggcttcgtcctggggctgggaagtttctgcgctccccgctgtccagtctgcatctccgcgcctcccgccgggcccccgcggtcccctcccgcccgcttcccccgctgccctccctcgctgccccctaccctctcccggggctcccggccctctactcccttcgggcgcgggcccctcgccccgcccgggcgcgccccccctcccccgggtcctgcggccccggatgcccgggccccgaggggctgctggcggcctggcccctgagatgcgcggggcgggggcggcggggctgctggcgctgctgctgctgctgctgctgctgctgctgggcctgggcggcagggtcgagggggggccggccggcgagcggggcgcaggcgggggcggggcgctggcccgcgagcgcttcaaggtggtctttgcgccggtgatctgcaagcggacctgtctcaagggccagtgtcgggacagttgtcagcagggctccaacatgacgctcatcggagagaacggccacagcacagacacgctcacgggctccggcttccgcgtgggtgagggccgggggcacggctgggggcaggggaaggacaggcaccaggcccggtgggagagctagtggggtcttggccttagagactgggggctgagggtataaagggcagagatccgagggcctgggggaccaggggcctcagggaacttgggaggctggaactctgggggccagagttggagggctgcatggaggcctggactttgaagctttgcgttagggttggggcctaaggggtggggaaatgcagaggtcctggatgacactggcttcccagaaggtgctgagttctgagcaggagcacacagggtttttgaggaatgtgagccggggacaggaagcctcagagaagggctaaatattcccgcaagaagcagacttgctggaagaaacaagaaaagtctttacaaaatgtctaaagtagggcctgccagagtagacacctgcattccctgggaggaggagctaaggtcagggctggggatgggagccggctactggcaaggtctgagtagggagggtgttgaggcctaaaagtagggtgcaggcctgaaggtagggactagttcggggttctcagcctctccttttccaatgcctccccataagctcctaacatcctgcctcagaggccctcagggcccccctcatcctcccccaagcccctacaccctccccagttcagcttggagtccaccccctccccagcatctctctttaaagggccaggcct

SEQ ID NO: 21336 - DNA, 913 bp, Artificial sequence
  DNA replication origin
agaaacttcccagccccaggacgaagcccagaccaggccccgaactcaggcaggagcgaggaggccggagcaagttgaggcggagaggaggagcgagggagaggaaggccgggcggccggcccgctccgcgcctccccctggccgggctcctctcccgcggccgcggggaggcagggagcgcgcggggagggctcagggagaagtgagcagttgttttccctggctggagcgcggcgcggcggcggcgaggggggctgggacgctggccccgggccagggacacagtttttttttttttgttgtttaaagcgtcgcctctgccgcctggagaagcgagggtgtgcaggctggcggaggctggggggtggcgcggggacagtccccaccccagatgcccgcccccgccggaacccgcggccgcgctgggccctttccagagggccctcacctgggaccgtctggccggccgcggattcctccgggcggggcggggcggggaggcctgcgtagagcgagataccgaggctgagggagagaggtggccctgccgggtcacactgacgatggaggccgggtggagccggagcccaggccttccagctctttcccagcctcccttgcaaacgtgggggtctcagggccccaaagtaacttctcgttagtgctggtccaatcccctctgaggaaagggctaaagggtggggacagcctttggccagggctcacggaggtcccaggaggaagtctgtggggtccagaagaggagcagaaagaacaaagctagaacccagcttccctgccagccccctcggaatggcttcctggtgcccaccctgccacctcccccctttcctttcgtctggccgtgctggcggggctggctctgggcctcagacactctggaatcgccaa

SEQ ID NO: 21337 - DNA, 2444 bp, Artificial sequence
  DNA replication origin
cgaggctgagggagagaggtggccctgccgggtcacactgacgatggaggccgggtggagccggagcccaggccttccagctctttcccagcctcccttgcaaacgtgggggtctcagggccccaaagtaacttctcgttagtgctggtccaatcccctctgaggaaagggctaaagggtggggacagcctttggccagggctcacggaggtcccaggaggaagtctgtggggtccagaagaggagcagaaagaacaaagctagaacccagcttccctgccagccccctcggaatggcttcctggtgcccaccctgccacctcccccctttcctttcgtctggccgtgctggcggggctggctctgggcctcagacactctggaatcgccaaggtctgagctcagggcctggcccccttcccaggctaacagccgggaggacgggggcgctgtccgagggcccaggggctggagaggggcacagcagagccccagggcaggggctggcagcggctgggggtgggggtcttcaggttggccatggctggagaggagcatagttccagaccaggcttgtccgctggtctggaaggaaaggctgcaacgtgcgggggcccaggccttactgtggggcctgccaggagaccccagggttccgtctctgactcacagaactcagcaggaggtggggacggctagggcacatccaggaaaagcgctgccaagtcagggcggcaccagaccctctcccggacagcacccggggcagcagtctaattggggagaggaggttcagggactcactttcaggcacacctgtccaaggaactctgtttttactttgagcgtaagttgatgtgggtagctttagggggacgcttagtaagtcccccttactaagcggtgcagggctgggagggacaatcacatgtccccagggatccctgctgccggaatccaggatggggtgtgaggggcaagcccctgcttcttggggccctggtccacacggaggcagggaataatgctaggtgccgaccacctgccaggcacagggctgagcattgtatactcattttttcctaacactcatctgaacctgtcctgactctgcctagagctggctgtggctcaccatggagcacagcacagtcaaacagtccagggttggattcttactgtctctaagccccagtttccttgcttgtgagatgggtatctattcactcaacatctatgttcaactactggtaataaaaaacaaaaaattaaaaaataaatgtaaaaaattcactcaacaaactgagactccaccacatcctaagctcttggccacaaatagaaccagtcctgccttcctggagctgctgtactaggagagctggatatgtgccagatcaattcacacagaactgtggctacaacagaggctggtaccgtgacagagaagggcagggaagcaggacaggagagggctgggacctgggagacaaagagagtcttccatcggaagctggaagatgagtaggagtgagtcacacctgtgggcatctgacctcaggggaggctgcagggggaggctatccagagaactgagggaaggccagtggaacaacagggtgtggtggagagggagagccgaaggtgtagtggtggtgggaggggccggccatggtgaggaatttgcttttattctcattgcagtgggactgtgtcagggcaagagcgggcactctgccttcatcccaggagagagatctcacttggccctgggagagatgtatttgggaggggagatgtaaagactgggtgaagtaggggtgctggagaggtaggtggcatgaatggcccccagattcctggcctgatctctggatgggcgaagaagaggggaggcagaggagctggaaacatggggcagggtccacagctctgttctggtcctgctgagtttgagatgcttgtgagtcatccaagtggaggtgcccgaacccgggagtctgcagctcagacaggatgtctggcctggagacagaggcttggggttatacagggggcatctacgacagcgggaaagggtgggcttactatggagagaagagagcccagggtgcccagggagatcactgttcccgggtcagggagaggaggcggagtcaggcagggagaggaggcggagtcaggcgaaagaccagaaagagcagctggagggagcagagaggaaaaccaggagtgtggtggggaagagccaggaggacggtgtggccctcggtgtctaaagctgctgccagtatgatggggggataacagcccttcttcaggggctgatgaggggactcagtgagaaggatcaatgaaagtgtccagcccagtaatgatgcccaactcaaatgatatccaaccaaattccttcagctctcagggcctccgcaggaaatagctga

SEQ ID NO: 21338 - DNA, 2100 bp, Artificial sequence
  DNA replication origin
ttcctccgcgtcagccccccgcccagctggcccggcgcccacccactcaccatctccttgcgcagcgcggccagcgctgagtcgaggttgacaggacgacgcgggccggctgcgggtcccgcgttggcggcgccggcggcgtggcggggcccgtccggggcgcgggcggcgcggctcagctcgtcgtggatgcggctgcgctggctgtagacgcgctccagctcccgccacgagcccccgctcgcattaaggaggccgctgaggccgcgcggcagcggtgggagcccggccaaagcgcagcccgccccgcccggcgcctctgccgagggcagcccgttcatggccggggccggcgcggacggcgatgccacctccttccctccaacgctccgcccgggccgccgcccgcaggccccgcaccccgcggccccgccggagcccagccgccgcccgcaggcctcgctttgttccttccccagctcctcagactccgcctctgccccaccccctctggatgggccgggcctctcttaaaaaggcaacggttgtgggaccacgtcgcgcaaagctgagaaaaggcaacgggacatccactcactcaaggggagatggaaaaatgcggcggaggggggaaaaggctgaagggggcaggcgtggtttcttcacggttctttttgctaccccgtctccccgccgcgccccgccccgcccccacacccaaggaaaatgatctaacagtggagtcaggagactggcaagtccacacttggtgcctaacgtgccacctgacgctggggtcaccacaaactcctgtcggtgtctgagtacctggggtgggcatgagatgggataggctgatagggtcaggatgctcaggggaaggaggggaatctatcaaggggatcggaacacaaaacctcacttccaggtggggaatggacaccagatggcggaagaggctgcagaggtgctgccagagacaaggctagggtccacccctctggctgctacctttgaaaaggctatggcttcttccttagaaaaggggcatcacatagtcctctacctactccctcatcctgactggggaaactgagaagaaacaagctcaactcatctcagggcgtcaaggagagcagagtggagaggtgaagaggccaaaagctggaaaaaggtgagtggagctggggctggcatgcacacttggaaccaggaaaaaaacaaaccacacagaggaacagctgtttttctagagggtttttctcaggggcttctcttagtgctgtagctgctgcaggctgcgcagggcctccgcacatgcgcggataaggccacacagctggatgctagtctccagggaggtgctagagcccagttcagcagaggcccaggtcagcttctgcaagagggctgtctgtgtgcaggccatgacatctgtatttggaggcacagcaggagcaggtggcccctgggctgccttgagtcctgctgcagctccctcacagtgctccggacgaggtactgggggctggggcgcaggtcgagagcccagggggagctctgaggctgaggccagctggtgctcccgagcttgggagagggcagcctgggcattcagagctaaaaagaggagaaagtgggtggaatggtcaggatgcctggcccacctcagccctgagccatctccttttctgctctgctctttctgtgcttgaggtgttttccctgtccctctataaggcaactcatccactttctactttgtatcacatttatgccctagcttcaattctccatcagtactgggcctggttgagctcagactctcgcgcagtggctggcacacaggaggtgcttggtgctcttattgagttaagggtcctctttagagcctaaaggagaaataattttacttctaccccacccagagactccactgtcacctctcagccctactgttctcgggcctctatcaccacttaaccacgcttcccccctaagcatatccggcccctctcccggattattttttactcttaccgggattatctttatccacgtctgagtcgagttcctgacaagccacgcagtagattttcc

SEQ ID NO: 21339 - DNA, 1638 bp, Artificial sequence
  DNA replication origin
gccacccctccctcccacccgcggggcgtgaggtcccaggccgttcccggaggcgcctcccccgcccccgccggggccccttgctccggcgactccggccacccatttcctgcgccgcctcaaccccgccccgcgcggggtggaaagtttccctcctcaaggtgggcggctccttctccttccttcccggcaggcagggaaagcccgaagcgaactgggaggagggagcgggggactcggaggtcgcgggcgagagaggggaagtgactcgaccgcagtcacccggcggctgagccaggctcggccagcaggcagcgcccccagccccgccccggcgggacggcagggccttcactcggcgcggggcggggggggagggggtctcgggcgccacctgctggcagagcgcggggccgcacctgccacaaacaccgcggtcttcccgccccagagccagccaggcagagcacaacgacgctgagtgtatttatttatctacgcgccctggagaccggcccctaaatttaaatatccagcacggggccttggccctcctggccgtgggtggttattgggacgggtcctggagcccttccagggcagaggaacccagagcccggaggtgggatgcccctgagccagcagctgccgatagcaacaaaaggtgaggaggagatgggagccaggcactcatcccaatcccagagacgccaagcggaagggaagatgcttcgggccccaccgcaaggctgagggttggccaagctgggggtgcacacatgtggaagaactggaggcccagtgccatgagcagaggctgtaccctagatgcccgccccagtgccagccaacccaagacaggagaaagagtttggcagtttcgcctctgaggaatacatgcctggccctcctgtgaggtgaggcggtaggggggaaggcgcaggctccgaagtctgagggcttgccggagggggagtttctgagccttttgcatgggtgcatgccccctgccccccagcccttcagaggctgatgtggaaggcatcctgcagccactggtcacgggcattgtgcgtctggggcacagtaaggggtggcgggtcaggaggcaggctggcatcgggaggctcctcgtcgtcagacaggcccgcatccggtgggtaggagctgtccgaatggagggaggatgacaggtcctggcagaagctcaggtcttggcacaggtgtttgtagtcctggattgactcgtacaggccccacagctggcacaacaaggacatgtccaactgccgcagccccacctgcagacaactgagggtgggctggagttggggtccaggccaccccagcccagccccgccccctggaatagtgggccccagcccatcttccccgcaccttcctaaacgaagtttttgtggacatcaggcaccacctgcaagctatgcaactttagtcatgaccctcacccaaaaaatggggttatccatttagccggatgaaatgaagtaacgtcagcaaaacatttgaaaatatatggtaactactgccataattggtaactatcactaattattgttaccataacccttgcaacccaactggtgcctgcaagtcctctgagacccaggccgcctg

SEQ ID NO: 21340 - DNA, 1682 bp, Artificial sequence
  DNA replication origin
acaggccacgaactggaacttggccgcccgcttgcccacgcgctgcaggcgcttccacaccgaggtcatggcccccgccaccccgccgcccacttctcaggcccggggctcccgctggcccgccaccgctggcccggcccgggtccccatggcctgtccgcgccgcccgccccgtccgtgcggaggtgtcccaggctccgacccgggaccgcgctctccgctgccgccgctggggcccgcagggtggtctggctgagtctgcggggtcgcctggggcgcgtcgggtggcgagcgcggagctgggagcgcgccgtttcctggagccgcacccccgtcggaaggcgggcggggctccggcgcggggcgggggccggggcaggagcgcgggggcggggcgacccggcttccggggcctcgcgccgcgacccgggagcgggagcgggggcgggggaggggggcgtggaaggggtgtcgcccgaccgcagtgcccgctcggtgcgcgcagaggctgcgtggagagagggcaaccagcaacttggtgccaccctagagagcgctgcccgggccgccttccttcctgcccgcagccctgggaggtacgtactactggccccctttcaacggctgggaaaactgagacccagaaaggggaagggacttgctcagagtcatactgtgaatgtggacgaggaccagctctcaactccaaggtgcagccacccacgtcttaaccagagcaggaaggcgtcagtaacctcggtggcccaacctcagaacctgactctgctgtcaagggggaagataatcccaaaccccgacaagtagctggagaatcataactgacctccaaccaagtgtgactttgggcaaagcgctaacactctgagcctcagtttcaacgtctattaaatggggataattgtagttccgccttttagggaatccctgagaggatgaacctcagaaggcatttagcagaaagcctggctgattttgccatgcctccttattaaatgggatgcgctataatggatggggaaaacgtgtcatttttgtgtatgtttactctccctccccaggaaagcctgcctggagcgttagcagctgtgaacccctagattagagcccttatcgcctacccacccgccctgcatggtaatgagcctctgcaggtgtcagctgccctggggcaataggtcagtttgttccttcccgctgctctgcaaggtgtgtaaatggacaggagcccggtgcgtgactgctacttggtttaacgggatgtctgagtgccaggactgccatctgggctgcatctccaggaggcaaatggctgcagcagggcgcggggatgtgctgttcgtccgcacacctcggtgtgcggcttcacctcttttcaggaggttgtgaggtgtcgtgtgcgcgtgtagggggctgagtacccactgtctccgaacgtgctggcttcttccggtgggcttgacaactgggtttggttctcagtcccagcggtgtgggtccccggtttcctaagaaaccttccacagataactgtaaagaccgctagtgctgtggggagagccggcggtcttcacagactgagcggggaatacgggtccctggaaccccaatcaaacttcaccgccgcggagtctcatgcttggcctccgggaaggcccgaggtg

SEQ ID NO: 21341 - DNA, 1633 bp, Artificial sequence
  DNA replication origin
accaagttgctggttgccctctctccacgcagcctctgcgcgcaccgagcgggcactgcggtcgggcgacaccccttccacgcccccctcccccgcccccgctcccgctcccgggtcgcggcgcgaggccccggaagccgggtcgccccgcccccgcgctcctgccccggcccccgccccgcgccggagccccgcccgccttccgacgggggtgcggctccaggaaacggcgcgctcccagctccgcgctcgccacccgacgcgccccaggcgaccccgcagactcagccagaccaccctgcgggccccagcggcggcagcggagagcgcggtcccgggtcggagcctgggacacctccgcacggacggggcgggcggcgcggacaggccatggggacccgggccgggccagcggtggcgggccagcgggagccccgggcctgagaagtgggcggcggggtggcgggggccatgacctcggtgtggaagcgcctgcagcgcgtgggcaagcgggcggccaagttccagttcgtggcctgttaccacgagctagtgttggagtgcaccaagaaatggtgagtgggagggaggcgggggggctcccccgaacttgctgggacctcatccggccctttgagcctgagaggactctgcccccccagcccaatgaccaaatgggcccccaccccagcttgggccctggttccgttcccaggctcggagattcagaagtgcccttgcaatttgtgggacccctggagttgggggcgtgggcagccttccctgcgcgggggtcaggactttcaggcctgaggttctgcctgtgtccactccttcctcagctgcggtcagggctgggggagggaggccgcatgtcttgtgccagaaaggtggttcagggtggcattggaaaagggatcaagttttgaggtctgcaggtggctagggctggggcaggagcctccctgaccttacttagtccagctaagaacagagatgttgccccctcctcccctgccatcttgttgagccagaagaacccctccaactcccgcctcttcagccagagtgctgggaggctggaaacatctccacaatgtccttaaaaggggaaactgagtgctgggaggattgaggagggaggcggggagcagcttaaaggggcctgaggacctaggaggttgtgggtccgggaggagagggttgcggagggcaaggtggcagggtgaggggtgattcaccagagggtgcaggccccagcctggactaccaacaggttcaggggcatctcgttcacatgccgccacccatagctgcccaggcccctgcgtcacaccctaaatatacgtgcttgctggtgtcagcttcccttggctggattagggcacagctgtgggggcctcacccgccaggcggggctaaatttaggctccccaggggaagggctggggcaggaagggaccatggggtccagggggaggggagtaagcaggaggctggggtcccttgggcagctgccatatccttggccttgcccacactgggcctgctagagggccattcacatctttcagcagagcctgggagagcttgggggctggcacttgaactctggcctctggctcctgctcca

SEQ ID NO: 21342 - DNA, 1350 bp, Artificial sequence
  DNA replication origin
cctgggggagggggaaggggagggagaaagggagcaggctgcttggtcaggctcacctgcctccccatctcctcttcctcctcccccagctccctcagggtcttccttctgcccacctccccctcctccagaagagggcctgggcagccccttatctggggccacagggtgcagggtggagctgctaaggtagggtggggccagagcagaagggcaaaggcccagacagtgtgggcaggcagggactatgaggaaagacagcaagtgagaaagggacaggcacatacagagaccaagacacacagaaacacaaggacctggcaagagatgccagacacagatgcacatgtgagcatcgtgcacacacgcagactccaacacagggagagacaaagacgagggataaaagaagtcccttcgcacaaagatgtttgtggagcgcccaccataaacccagcccagttttggggacagaggagggcaaaagagagacaagacctttccggtgaggacaatggaggtgggggcagactaccagtcaagaaggaaaataaattaacaagcgaactccagggtgatgtgagggaacccctgggggtctccttgaggttgggtgtctgggcagagatgagtggcagggggatgggctgtgtgaggatctggagaaagagggaatggcaagtccaagggtctgcggctggagggtgacatcagagagaggggcagagagttgggggtgaggccggagaagcagcagagggtcagcctgtcattaaccaacaccgccatccctcgcccaccatgtccagccctttgctgggcgcaggggtcccaaggaggatcagctttcggcaagatgatgacagtggagcctggagggcaatcagaaaagacttccagggggtgacatctaagctgaacagcatatgccaggtcagacatggaggagaggcagaggcaaagccagaggacagagatggctgcgcagggcccattcccaggcactgagtggactcatggctgggcctgggggcagagggccccttggggttagatgttcaactgctgcccaggaggggtgatgcttgaggggacgatccggcccagggcagcacgcgaactggccttgcctgtacccagccccatgcctgcaccctctcgtgatgctggggtttgcccagctcactgttcgtctgaggccaagccaggataagtgcctctctgttaaccctgaggatgctgaggcccacagaggtttggagccaaacaagtttacacggttgagcctagagccctccaacccagagccaagttcccttccccaagcccaaattgccagcgatggcagag

SEQ ID NO: 21343 - DNA, 3089 bp, Artificial sequence
  DNA replication origin
gaagcccatggagctaggctgggcccgagcattgaggataaaggttctggagacccttttggaaggcagagactcaaggctgaagagatggacactgaggacaggccagaggccagtggggtggacactgagccaaggtcaggaggcagagaggcaaacactaagaggtcaggagtcagagctggggaggctgaagagagttcagcagtttgtcaagtggatgctgagcagaggtcaaaggtgagacatgtggacactaagggaccagaggcgacaggggtgatgcctgaggcaagatgcagggggacccctgaggctcctccaaggggctctcaggggaggctgggagtcaggaccagggatgaggctccctcaggcctgagcctgcccccagcggagcctgcagggcactctgggcaacttggtgacctcgagggggccagggctgctgcaggccaggagagagagggtgcagaagtgaggggtggagcacctggtattgaggggacaggcctggagcagggcccttctgttggagcaataagcaccaggccccaggtgagcagctggcagggggccctgttatcaactgcccagggggcaatatccaggggtctgggaggctgggaggcagaagctgggggttcaggggacctggaaacagagactgaggtggtagggttggaggtgctgggaacccaggagaaagaagttgaggggtcagggttcccagagactaggacactagaaattgagatattgggggccttggagaaagaagcagcaagatcaagggtcctggagtcagaggttgctgggacagcacagtgtgagggactggagacccaggaaacagaggtgggggtcatagagaccccagggacagagactgaggtattggggacccagaaaacagaagctgggggttcaggagttttgcagacaagaactacgatagcagagactgaggtactggtgacccaggagatatctggggatttagggccactgaagatagaagatacaatacagtctgagatgctggggacccaggagacagaggtggaagcttctagggtaccagagtcagaggctgaggggacagaagctaaaatattagggacccaggagataacagctagggattcaggggtcagagagatagaagcagagatagcagagtctgacatattggtagcccaggagatagaggtgggacttttgggggttctgggaatagagactggggcagcagaaggtgcgatattggggacccaagagatagcatctagggattcaggggtcccagggttagaagctgatacaacagggatccaggtgaaagaggttgggggttcagaggttccagagatagcgactgggacagcagaaactgagatattggggacccaagagatagcatctaggagttcaggggtcccagggctagaatctgaggtagctggggcccaggagacagaggtcgggggttcagggatctcagggcccgaggctggaatggcagaggcccgagtactgatgacccgtaagacagaaattatagttccagaggctgagaaggaagaggctcagacttcgggggtccaggaagcagagactagagttgggagtgctctcaaatatgaggctttaagggccccagtcactcagccaagagttttaggatcccaggaagcaaaagcagagatttcaggagtacaagggtcagagactcaagttctgagagtccaggaggcagaggctggggtttgggggatgtcagagggcaaatctggggcttggggggcccaggaagcagagatgaaggttttagagtctccagagaacaaatctggtacttttaaggcccaggaagcggaggctggggtcttgggaaatgagaaggggaaagaagctgagggaagcctcacagaggccagcctgcctgaagcacaggtggccagtggggcaggggctggggcgcccagggcctcttccccagagaaggctgaagaggacaggaggctgccgggcagccaggtagggatgggggccgccgagggcccagtctgctgcttcccactaacctggggctgagcgaacggcggctctgcatggacccacctggtggaatgggatcgggtggggtggggggctcagcttgaaggagccccctcatcccctcctctctcaggatgccctggctctcttaccccatcttccctgggccgcatggagctggacacctctaagctgattttctgggctgactttgaggtgtggctgctggtgacctctgatcttgtctgggggccactgaccttttaggtgaccttggcagataaccctggatctagaaacccttttacctggccccaaggctctagccagtggtctctggtgacccctgcaagctcagagatggggctgttgtgtgccaggcatgagcttccccaagaggcagagggcatacatcccatttatacattccctaagcccacccctgtgtcctcaggcaccacctgccctggtcagctccagccagtccctgctggagtggtgccaggaagtcaccactggctaccgtggcgtccgcatcaccaacttcaccacatcctggcgcaacggcttggccttctgtgccatcctgcaccgattctacccagacaagatgtgagctgccagaggggtgggaacgaatgggggagccatcagggagggcagtgtggacccagcctctgaccagcacactctctgcagtgactatgcctcgctagacccactcaacatcaagcagaacaacaagcaggtgagatggggtgggggactgcctggagggaaggagggtctggagagccaggctctcagtgtcagatttggagaaagtggactgccgggcccagcagtggcttctggaagttctgccactttttacccctttggtcattaaattgtttgttttccttattttcgtttgtttgttttaaagcgtttttcctcccttagatggtttttccaaaaccaccctttggtaacggggtggacggtgtgccgttgctaagcaacgcgagggcgggccttgttgctgg

SEQ ID NO: 21344 - DNA, 1965 bp, Artificial sequence
  DNA replication origin
acatggtgctactgtcggtgcccgacaagctcatcgtcatgacgtacctgtgccagatccgcgccttctgcaccgggcaggagctgcagctggtacaactggagggcggcggcggcgccggcacgtaccgcgtgggcagcgcccagcccagcccgcccgacgacctggacgccggaggcctggcgcagcggctgcgcggtcacggggccgaggggccccaggagcccaaggaggccgcagaccgcgcagacggggcggccccgggggtggcctccaggaacgcggtcgcgggccgcgcctccaaggacggcggggccgaggccccccgagagtcgcgacccgcggaggtcccggccgaggggctggtgaacggggcgggggcaccgggcggcggcggcgtgaggctgcgacggccctcggtcaacggggagcccgggtcggtgcccccgccccgcgcgcacggctccttctcccacgtgcgcgacgcggacctgctcaagaagaggcgctcgcggctgcggaacagcagctcgttctcgatggacgatccggacgcgggagccatgggagctgcggctgcagtgagtgtcaaggtccttctttcttcccccgccgcagcgcggggtcccgggaagatgggcagagaacgggcgagcccccaaggggccccaaggacagagctggcgcgagggtgacggtttcagagtggcggggctcggctggacccaggaggggctatctgatcagagggaccctggtgctgtggaagagtcctctggtgtggtagtgagctcctcattaggggacgcatttgagccaaggcccaccaggcagggtccccagctttgcggccagcctgggataagtgctgagggtttttagtgcttggcacttggtgtggggaatcaggctgcagaagttcccggagcatccacgttcctggcactctgcccagtgcttggtaggctggaaggtgggtttgggcatttctttccctgcaggtggctcatcgttaaccagcagccaccctgccccatgagctgggtgcagactatctgtactcaagggggattctccagggcctcccagccccaggactctggcgtacatctttaaccccagatgctggagaccagtctcctcttttcttacaatggaaggttggagatgtgagatcgtgagggcccgtgtccctgctgtcatcccctatgggttgtaggtcatctcctagagtgtcgtgtcactgtgctgaaggggacatggtcccagaaagagcagggatttgctcagtgacccacagctgctggagtccaggacacgggctttccagctggagtcccagcactgccccatcctgcctgtcaaccaaggggcagctctgccaggctgctgcaaaccttcagctgtccaggaatgacccctgcatttgaaggaaaggagtgaattcattgggaaagtctttctggaagaagccaccatttgagctaggttgataagatggccaggtttttcccaggtgaaaaatgagtggggttctcaaatggtgggaactgcattagcaaaaatgtggcagcaggaaagtttaggcctcgtttagggaactgccagccatctcccggaaggtccataagtggcaatgaggccaggctgagagcaggagtcctgggtgtagggtcagaggcacaagcattgagcctgtgagtgagagacagagggcatgggtgacacccacctgtggaagatgtgatacgcaggagtcaagaggacaaggccagctttggcccatctgttggcctcattaatgtgtgtcagtggctctttaaatcttaaaggggaggtgccccctctgggcccaagttccagcatctggtgtttccaagtcaggccttcccccagctcttgtctcacaggagatatctgacccatagggctggaggggactcctcattggccacccccctcccc

SEQ ID NO: 21345 - DNA, 1140 bp, Artificial sequence
  DNA replication origin
aaagaggaatttgagttagacatgaggaagcactggaattcccacgaggcctggcatgcggaagctctgcgctgctgaggctggatttctccactctcctgcttctgcctgtcccgtcagctcagcactctttatgtgcctggcctgcccatggactcttagggtgtgtatgaaagcattttgcaaggtggcattgaggccccctgcaagttgctgtcaaaaaaggggagatgtgtgtttccctagattcctttctagaagccctgcagctcccaggtcacacagggctgggctttctcccattttacatacaaggacacaaacagaggccccaagggtgtgactggccccaaggcacacagcaagttggtggccaagcttgggaacaaactgctgggttagacaaccctgggccctagaccagaccctttaggagcctcatctctgaccctcagtttcctcatctgtaaagtggggagggtcgtggtccctgcctcacagggctgttgggaggattcagtgagtcagtgcacataaagtgctttaagtgcccggcacagaaacacttggtagatattagctgctgttattagtcagtgtaccttgactgtattttttgggcccagctctgtataagggggagacatgggaaaccagcagctgtgacggggtgagtgggggttggagctgtgatgggggaggccatgggagcagcatctgcccagcctggggatcagaggaggcttctggagacatggaagtcagggagggaggcgggaagagtgtgggggccccggcaggggggtctctggaggaagtagggctgggctgggtcgtggaggtcacgttggtaccaggcagcccaagatggaagctgactccaggctgagaaagctattttgggaactgaaagtcggccactgtggccagggggcggtgtctaggcgtggctcagggtggtaggaacattgaggctggggccgcctgaggctttggcatgaggctggggggctgaggagagatgtgaaacagttacaccgggggtgaaggtgtcagagaggcctctcagtttcagcttgagtcagcaggcaggccatggtggtggctggtggggaagtcaccactgccccaggccagaga

SEQ ID NO: 21346 - DNA, 1651 bp, Artificial sequence
  DNA replication origin
gggagcagcatctgcccagcctggggatcagaggaggcttctggagacatggaagtcagggagggaggcgggaagagtgtgggggccccggcaggggggtctctggaggaagtagggctgggctgggtcgtggaggtcacgttggtaccaggcagcccaagatggaagctgactccaggctgagaaagctattttgggaactgaaagtcggccactgtggccagggggcggtgtctaggcgtggctcagggtggtaggaacattgaggctggggccgcctgaggctttggcatgaggctggggggctgaggagagatgtgaaacagttacaccgggggtgaaggtgtcagagaggcctctcagtttcagcttgagtcagcaggcaggccatggtggtggctggtggggaagtcaccactgccccaggccagagaggattgcctctgagccagggatgtccagggctgcctctgagagaggtacaggtgggagtggacacgggcaggtcaaccactgtccctgccccatgaccccgacacaggtcagatgacccagatgtggggggccagggcaggagcagttgaggggccaggctatcagctgagtcgaaagttggggacccccagggctgacagtcccaacaagtcactaggggcgggcaggtacatggggtcagccctgcccttccaagctaaaattcaaagatccagccagcctggcttgtcctgtgtgtgtgagcatgcagcagccgctcctgggtgtgggaactgaaaaggcagcagggcacccccttttggccaggaggtggaggtgctggctcaggagggtccaggtctggggagccctgaggacagaaggggagggagcctggtggggcctctgcaggaggcagggctgggctgggtcacacggatggggccatgtggggcagtgcaatggtcactgcatggggccctggccatgacggagaagccagcactaggtgacagaagtcagaggtggcctgagggaattccatggaagaggagtcgaggccgggcgtggtggctcacacctgtaatcccagcactttgggaggccaaagtgagcagatcacctgaggtcaggagttcgagaccagcctggccaacatggtgaaaccccgtctctactaaaaatacaaaaattagctgggcgtgatggcgggtggctacttgggaggctgaggcaggagaatcacctgaaccaggaggtggaggttgcagtgagccatgatcctgccactgcactccagccagggcgacagagcgaatctccatctcaaaaaaagagagtagggaggaaaggcctgggctgggcccttcacaggctctcatcctgtgaggccggagctcagcccagccccaggaggggaattgggaggctcggagcctgggtgtggatgggcccagggccacagggccaggaaggatgaaggctgtggcctttgcttgaggaggcatttctcttggaaggaggtgggcccgggggttctgtgcatgcaggactagaggaggggcaggggcgggcaggagctggggtcaaggacccctcctcccctctgtatgagtggctctggctggccccaggcccaggctggtgggaaacccctcccagccctcactggcccctt

SEQ ID NO: 21347 - DNA, 1171 bp, Artificial sequence
  DNA replication origin
aaccaggaggtggaggttgcagtgagccatgatcctgccactgcactccagccagggcgacagagcgaatctccatctcaaaaaaagagagtagggaggaaaggcctgggctgggcccttcacaggctctcatcctgtgaggccggagctcagcccagccccaggaggggaattgggaggctcggagcctgggtgtggatgggcccagggccacagggccaggaaggatgaaggctgtggcctttgcttgaggaggcatttctcttggaaggaggtgggcccgggggttctgtgcatgcaggactagaggaggggcaggggcgggcaggagctggggtcaaggacccctcctcccctctgtatgagtggctctggctggccccaggcccaggctggtgggaaacccctcccagccctcactggccccttcttccacaggaaggccaggcccctgaccccagccctgccccaggcccacccacagctgcagactctcaacagccccctggtgagtagcaggagtggtgaccatctcagttcaggctgctcacaaagcctggactggggacttcctgggggtgggtggtggttagggggtgccttatcatcatctctgtctgcaggtgggagttccccctcggaggaaccacccccaagcccaggggaggaggctgggctggtaaggagggctaagtgggaggagctgatgggtgagcaccacctattcagggcctgggctgagtccaccctgttctctgccttttccacccccagcaacggttccaggacacaagtcagtacgtgtgtgcagagctgcaggccctggaacaggagcagaggcagatagatgggcgggcggctgaggtggagatgcagctgaggagcctcatggagtcaggtggggcatacatctagggatcccttccccaacacatgccactaggtctgtccagccctgcagctgttcctgaccttgggaggagctgggaggaggcacggctggcatcagcgttcccattttacagccaggcatgctgaggccctgaagtggcttcctcgaggcacacagttctggcttctgggatgtcacaagggagcaaaccccctcccccaacccccagctgccctaccctgacacggggcagggggcaggcctggtgactgtccctgt

SEQ ID NO: 21348 - DNA, 1482 bp, Artificial sequence
  DNA replication origin
ttgagagcccaggtggagcggagaaaaggccggcgctggggtagtctcgtccaactttattgctctggagaacaggagggcaagccagcgcggggcggtagtgcccaggcatccctctccccgaggccgccggcccggccgtgccgtcggggaggaccccgcacccgccgcgagcgcgcacacaccctcggtgacaaataaatacggcggccgccccgcccgtggggtcggggatccgccctgccctgtacggggaagggcgccggcggcccctagcggacacgcgcgcggcctccgggacggccgggtcgtccgcagcgcaggcccggggcggcggcggacgccggggacgcgagaagttatgggccacccgggccggcggcctcagctcagcacgcagcgctcccgccggctcaactgccggctcagcttgcggcgccgctgttccaggccgcgctccaggcgctcgtcctcctccagggcgctggggagaacgggttcgagtcagcgctccgttgggcggggtccacacgcagccctctgcgggagcaagtcccggaccctcccaactcccagcgccgcccagcgccactcacatccgctccttgtggtccaggtcccggactagctcatcgcgctggttcaccagcgacaccagctcctccagtaggagctgctctcggtgctgctgagcggacgttttctgccagtctgagggtcgaagcggctaagcgtcaggaggcgcgggcccagggctgtgccgcctccaccctggctctgtcttgcctcccggcccctgagcccatgtcccaccttcgatggccagcatggcccgcagctcgcggctcagcagctcgaaccttcgctccaagtcctgctcctccatgctggaaggtggcggggggtgggtggcgggggggtggcagttcaggaaaaggggcgtagggagagagtgcccagggctctggccactccctgaccccatcccacctccccagcagttcccgagggcagggctgaccgcagagctatcctctagtctccagaccacattatcgcttttcttctgttttctccaattgctgggtgtttgtgttgctcctcccacacaccccccagaaggacccccgaaggattatttggatgaacagtactcataaacaggaagcactggctacagttattctgaaaaatcccaaacgcaaaagggaggcaaagctgtctccaccctgcaggatgacaaaggcaatggccgcagagtggcttcggaccccacatgggaaccagatcagatctctctgggcttctgttttccttactgtaaaggctggagtgcagtggcacgatctcggctcactgcaatctctcaaccccaggagggttcaagcgattctcctgcctcagccttcccagaagctggaactacaggcgcccgccaccaggcctggctaatgttttgtatttttagtagagacggggttt

SEQ ID NO: 21349 - DNA, 1438 bp, Artificial sequence
  DNA replication origin
aggagcagagccagctagaacctgggcctggccagttcaaggccaccagagggcagccttctgcggaaggcagtattggggtaggcagggaccccagcagacatggcactcagagctctcactgtccactgactctctcttctccaggttatggccacatggccccactatcgccaggcggaaaggccttctgcatggtctatgcagccctggggctgccagcctccttagctctcgtggccaccctgcgccattgcctgctgcctgtgctcagccgcccacgtgcctgggtagcggtccactggcagctgtcaccggccagggctgcgctgctgcaggcagttgcactgggactgctggtggccagcagctttgtgctgctgccagcgctggtgctgtggggccttcagggcgactgcagcctgctgggggccgtctacttctgcttcagctcgctcagcaccattggcctggaggacttgctgcccggccgcggccgcagcctgcaccccgtgatttaccacctgggccagctcgcacttcttggtaagtccagccacctaacagcgtgtgggggaagggggaagaggagcctggactaggactcccataaatcactggggggctgggccttgcaggtggagggacctcactccagggcacggcgtgggaggggtagtcgaagagctctggtggcagcgttgagaagggggtgagtggtgccagttgccagggcaagtcactgcgctgggaggtgggcggggagcatcaccagaacccaggcgctgccccagcaccttctcctccccaggttacttgcttctaggactcttggccatgctgctggcagtggagaccttctctgagctgccgcaggtccgtgccatggggaagttcttcagacccagtggtcctgtgactgctgaggaccaaggtggcatcctagggcaggatgaactggctctgagcaccctgccgcccgcggccccagcttcaggacaagcccctgcttgctgaagcgtcaggtgaccgagttcagctccgtaaggtggcggcacctgaggaggaagcagccaggagtggctggggaagaatctggagatggagccgcggtgagggtgggcgggaggcctcagaggatactgttaatcataaaatgagcaacgacttcggctattttcaactatttcgaatgggacttccctgagccaccggccaccatcccgggaaggccgaggtccagcctccgctggccctgggaacctcgaaaccgcaccttccggcttaggatggcagagccgcccgcctcagcctcggcgcactcccctccgcctattgagagcccaggtggagcggagaaaaggccggcgctggggtagtctcgtccaactttattgctctggagaacaggagggcaagccagcgcggggcggtagtg

SEQ ID NO: 21350 - DNA, 1420 bp, Artificial sequence
  DNA replication origin
cgcctgggttctggtgatgctccccgcccacctcccagcgcagtgacttgccctggcaactggcaccactcacccccttctcaacgctgccaccagagctcttcgactacccctcccacgccgtgccctggagtgaggtccctccacctgcaaggcccagccccccagtgatttatgggagtcctagtccaggctcctcttcccccttcccccacacgctgttaggtggctggacttaccaagaagtgcgagctggcccaggtggtaaatcacggggtgcaggctgcggccgcggccgggcagcaagtcctccaggccaatggtgctgagcgagctgaagcagaagtagacggcccccagcaggctgcagtcgccctgaaggccccacagcaccagcgctggcagcagcacaaagctgctggccaccagcagtcccagtgcaactgcctgcagcagcgcagccctggccggtgacagctgccagtggaccgctacccaggcacgtgggcggctgagcacaggcagcaggcaatggcgcagggtggccacgagagctaaggaggctggcagccccagggctgcatagaccatgcagaaggcctttccgcctggcgatagtggggccatgtggccataacctggagaagagagagtcagtggacagtgagagctctgagtgccatgtctgctggggtccctgcctaccccaatactgccttccgcagaaggctgccctctggtggccttgaactggccaggcccaggttctagctggctctgctcctcttcgtcaggggatcccttaccctctctaggccattcttttcttttttggaaaatgaaaggatgaaagaagacagttcctcaggccttttgtagctgggacaattctgagaactgcgctgcccttaacagatactcccgattccacagctggtggaatatcatccactctttccccaaatgtgtgtcatgtcctgtgtgccaggctttgtactgggatctgaatcagcccaggccctgccccttctggtgggggagtcgggcaggcaaatcatgaagggctgcaaagaggcagcatgggcgagagagggcatgtgccaggcggggaggggtgggagtgcggggtgtgctgggagaacaggatcagctaatacagagctgcaaacgcacatgcctaccggagccagatgggagacaaacaggagtggtggggacaggggtacactggaaagtgtgagctgtatccaaagggcaggccccattctgctccagtcaggatgttgccttgcagggattctggctcagtgtgagtgggtttcctgattttccaaaagaagttggaaatatgagctgggcacagtggctcacacctgtaatcccaacactttgggaggctgaggcaggtggatcacttgag

SEQ ID NO: 21351 - DNA, 997 bp, Artificial sequence
  DNA replication origin
cccagccacccacacagcacctcctcctggccccgccctgcccagcccctcccaggtgcctgaggtggagccgccagttcccacagcaccccagcggcctgccatggggggtctaaggccctggtcccgatacgggctcctggttgtggcccacttgctggccctggggcttggggctgtggtgttccaggccctggaggggcctcctgcatgcaggcttcaggctgagctcagggcagagctggcagccttccaggcagagcatagggcctgcctgccacccggagctctggaagagctgctgggcactgccctggccacccaggcccatggggtctccaccctgggcaacagctcagagggcaggacctgggaccttccctcagccctgctcttcgctgccagcatcctcaccaccacaggtaagagagccaggcagccaagtcggggggtgcggctccaagaggccatggctccctgggggctttggggttcatgcagcccttccttcagccccaaagagccagatggagcccaggccctgtgaggcctgacatcacagctggggctccccaccaacacaccccaactggtgcctccacttcaactgccaggaagggtgtggcctccccagtcccaccccaggcaccctttgagacccaggagagctgcccagatgccacagcctgtggccagataggggatacaatacagtgggatggattcttggatggaagcaaatagaatgaacctgggaaggacagatcaggaccatggcctcgggtgggggagtgagggaagataggggaggaagtcggcatgagatgcttgtggatcaggagggcacagacagggatgagggagtcctgcagagaaatcgcgtgggcacaggcccagggaaaagcagcaatgagacccacagccctgggttttcgtattttttgccccacaaagtgtctcagtattttttgaattggaatttgtatttccaactttt

SEQ ID NO: 21352 - DNA, 826 bp, Artificial sequence
  DNA replication origin
gggcctgggctccatctggctctttggggctgaaggaagggctgcatgaaccccaaagcccccagggagccatggcctcttggagccgcaccccccgacttggctgcctggctctcttacctgtggtggtgaggatgctggcagcgaagagcagggctgagggaaggtcccaggtcctgccctctgagctgttgcccagggtggagaccccatgggcctgggtggccagggcagtgcccagcagctcttccagagctccgggtggcaggcaggccctatgctctgcctggaaggctgccagctctgccctgagctcagcctgaagcctgcatgcaggaggcccctccagggcctggaacaccacagccccaagccccagggccagcaagtgggccacaaccaggagcccgtatcgggaccagggccttagaccccccatggcaggccgctggggtgctgtgggaactggcggctccacctcaggcacctgggaggggctgggcagggcggggccaggaggaggtgctgtgtgggtggctgggacccggctgggatggctggggtggctggggtgtgaacaggagggaggtgagctgcatcacccttcccaggtcctggaggcaagacatttgcccatttcacagcagctgggatggtggggatgggtggaggaaggcggctgcggtgaggggaggaggcggaggaagctgaagcctagagaggacctcacacttattcaaggtcctgctcactcaggcacccataccacattcattcattcattcattcattcaagtgcttagggaagaggacaggcacaggtcct

SEQ ID NO: 21353 - DNA, 930 bp, Artificial sequence
  DNA replication origin
accagggccttagaccccccatggcaggccgctggggtgctgtgggaactggcggctccacctcaggcacctgggaggggctgggcagggcggggccaggaggaggtgctgtgtgggtggctgggacccggctgggatggctggggtggctggggtgtgaacaggagggaggtgagctgcatcacccttcccaggtcctggaggcaagacatttgcccatttcacagcagctgggatggtggggatgggtggaggaaggcggctgcggtgaggggaggaggcggaggaagctgaagcctagagaggacctcacacttattcaaggtcctgctcactcaggcacccataccacattcattcattcattcattcattcaagtgcttagggaagaggacaggcacaggtcctttccttcctggtgtttacacaagaaacctcttagcaaagaaacatggcaacctcacattgtcatgagttccatgaaggaaacaccctgggtgatgggagagctctgcggggagcgggggggttatctcactgggaaagctctgctaaggaggtgatatttcagctggggagtaagaggccagtgaaggtaggaatgagcttggggtgtgagaggaacagagggctggctgtggcaggggagagttgggggtgaaggggggataaggacacaggcccttgaggataaatgtggtccagggagacctacgctgggctactgtaggcgtcatggatggagtgattttggcctgggtggtgtggtgggagaggaatggtggcagctgggaaggatcaggtgggggtgggaggtggggagaggactccagggtgcccagagcacccgggcagatgatacccttgcgcccgattgccagttcttcctgagaacgctttgtgcctgccctcctgactccctgcccctg

SEQ ID NO: 21354 - DNA, 1190 bp, Artificial sequence
  DNA replication origin
gggcggtggaagttgagtcaagtaggtcactgtgcacatggggaaactgaggcccagagcaggacagtgtcttggggacctcagcagttgggggttgcttgaccctgtgcccctcctatatcctcacaggaggcactgtctcacccccaccggggacatcacgctctgctcctggcaccccaggcaccccacgttcaccacccctgggcctcatcagccgacctcggccctcgccccttcgcagccgcattgatccctggagctttgtgtcagctgggccacggccttctcccctgccatcaccacagcctgcaccccgccgagcaccctggaccttgttcccggactcagaccccttctgggactccccacctgccaaccccttccaggggggcccccaggactgcagggcacagaccaaagacatgggtgcccaggccccgtgggtgccggaagcggggccttgagtgggccaggccactcccccgagctccagctgccttaggaggagtcacagcatacactggaacaggagctgggtcagcctctgcagctgcctcagtttccccagggaccccacccccctttgggggtcaggaacactacactgcacaggaagccttcacactggaagggggacctgcgcccccacatctgaaacctgtaggtccccccagctcacctgccctactggggcccaacactgtacccagctggttgggaggaccagagcctgtctcagggaattgcctgctggggtgatgcagggaggaggggaggtgcagggaagaggggccggcctcagctgtcaccagcacttttgaccaagtcctgctactgcggcccctgccctagggcttagagcatggacctcctgccctgggggtcatctggggccagggctctctggatgccttcctgctgccccagccagggttggagtcttagcctcgggatccagtgaagccagaagccaaataaactcaaaagctgtctccccacatgtagcctgtcacctttcttggaggtaaccaggtgacccaacctatcatacaaccctggtgtcctgatgccccaacaataggcagttggatgccttgtactgcatgcctctcctgggaccaaatccaccagccttggtcagtcattcaaggctcttctcggccaggtgcagtggctcactcctgtca

SEQ ID NO: 21355 - DNA, 1542 bp, Artificial sequence
  DNA replication origin
gtgggtatgtgatggggaggccatgggacctgtgggaccagggaagatgctagtagagggcagaactcagtccttgttccaagaccacggagaggtcttgggccctcacccggaatatgcaccagccacaccctcacctgtgccgcctctgcccgcaggtaaccccccgcggcctagcctggagcccgaggagcccaagaggcctgtccccgcagagcgcggtagcagctctgggacgcccaagctgatccagcgggcgctgctgcgcggcaccgccctgctcgcctcgctgggccttggccgcgacctgcagccgccgggaggcccaggacgcgagcgcggggagtccccgacaacaccccccacgccaacgcccgcgccctgcccgaccgagccgcccccttccccgctcatctgcttctcgctcaagacgcccgactccccgcccactcctgcacccctgttgctggacctgggtatccctgtgggccagcggtcagccaagagcccccgacgtgaggaggagccccgcggtgagtggcctgaagccggcctgcttcacatatgggagacgggggttcccagggagggaggagtggctggtggggacatgcaaggaggcaaggccgagaccacagtcatcagctggaccctgaaccaggcattcggggtactgaagacgcatgtagggagcagagttctaagttcagctatcaggtggtccaggcaggtgggggcgatgcctgctgtgaaataaaagaagtaatcgggccaggcagtggtgcacgcctgtgatcccagcactctgggaggatcacgtgagccttgaaaggttgaggctgcagtgagcggtgatcatgacactggactccagcctgggcgacacagcatacatgtaatcataatcgtagcaaactcctggctccttacttgtgccaagtactgtttgcaaggctttcccgagatggtctcatttagtcataacaaccagagaactaagcgctcctggatgcccatttttagatgaggaaatttaaggcacagagattaagggacccacagctcccacagctagtaagtggcagggccgggatccacatccaggccagcctgctgcagaggcctcactcctaactattacaaaaaacagaggcaccacggagcaggaagggcggtggaagttgagtcaagtaggtcactgtgcacatggggaaactgaggcccagagcaggacagtgtcttggggacctcagcagttgggggttgcttgaccctgtgcccctcctatatcctcacaggaggcactgtctcacccccaccggggacatcacgctctgctcctggcaccccaggcaccccacgttcaccacccctgggcctcatcagccgacctcggccctcgccccttcgcagccgcattgatccctggagctttgtgtcagctgggccacggccttctcccctgccatcaccacagcctgcaccccgccgagcaccctggaccttgttcccggactcagaccccttctgggactccccacc

SEQ ID NO: 21356 - DNA, 783 bp, Artificial sequence
  DNA replication origin
accccgaatgcctggttcagggtccagctgatgactgtggtctcggccttgcctccttgcatgtccccaccagccactcctccctccctgggaacccccgtctcccatatgtgaagcaggccggcttcaggccactcaccgcggggctcctcctcacgtcgggggctcttggctgaccgctggcccacagggatacccaggtccagcaacaggggtgcaggagtgggcggggagtcgggcgtcttgagcgagaagcagatgagcggggaagggggcggctcggtcgggcagggcgcgggcgttggcgtggggggtgttgtcggggactccccgcgctcgcgtcctgggcctcccggcggctgcaggtcgcggccaaggcccagcgaggcgagcagggcggtgccgcgcagcagcgcccgctggatcagcttgggcgtcccagagctgctaccgcgctctgcggggacaggcctcttgggctcctcgggctccaggctaggccgcggggggttacctgcgggcagaggcggcacaggtgagggtgtggctggtgcatattccgggtgagggcccaagacctctccgtggtcttggaacaaggactgagttctgccctctactagcatcttccctggtcccacaggtcccatggcctccccatcacatacccacattctggcctttcacaagatgggcactgggaggggagggcagtgcaggtggaggaagcggcagcaaagcccaatggcagccagcgaccccagacccgaaagatggatgggc

SEQ ID NO: 21357 - DNA, 1416 bp, Artificial sequence
  DNA replication origin
ctggctaattttttgtgtttttagtagagacagggtttcaccgtgttagccaggatggtctcgatctcctgacctcgtgatcatcccacctgggcctcccaaagtgctgggattgcagatgtgagccaccgcgcctggcccagggatttgcattttaagagccaggcatcaacatgttaaacactgccctgacctcatatgatgaagcaggcagactcataaacaagtccagtagcacctctatgaggcataacgtgagcaataactgtgtaggttcagggagattctgggagggcttcacagaggaagtgacatcccagttggtcttggatggtgcataagaggtcactgaaagccaaggtgggaaaggtcagccacccagagtgaatagtgtgtgcgcaggcatgcagctcaccatacccaaggaaaaggcaacctggctgaactccgagaagagttgagagccgaggagtctcaggactggggctgcggacaggggccaaggcacatgggtcagtagatgttgattgaatgaatgagtgaatgaagctggaagtgatgggtagtttttaagcagagacctgtctttaacaggtttgcattttagaaggattcccttgtcccttcagtggcagtggccggggtgggagttgggtgaggtaagaggcagagagtctgagtaagggttggggctgacagaagggactgtgagctaagtcctggttcatagtagaagctcatttttcccagccttgtatttctccctcccgacatccaacctgctgctgcactccaggcaggaggggaaaggcagagggacaaggccagggagggcttcagaggaccagccaaggaggccagactttctcctagtgacagtggagagccacagcagtttctagagccaaggagggatctgacaaaatcagggcttgtgagagcccatcctagagtcccttgtccttaatgaggggttccccatccctgcccaagtggtctagaatggagtcaggccaaccctagactggaaggtaggacactagtgtcttgaaatctagggcagagtctggctgggaaatggtggagagcaaaggttctactgcccttgcctggggtgaggccggctccacctttcactggctgtacagctccgcacaagccctcaacctctctgagcctggaacccctggggcatgagaatcagacaacataatgcccctatgccattcagctcaggcctggcacaaatacatactctgtaaattagctgtgaccttgggcaaggtactgacccctctgaacctcattttcctcctttctagaatagagacagggatttatgccctcagggctgccatgtaccttagagttgactgtgtgcatcttataagctacagctggagcgggggtgggtgg

SEQ ID NO: 21358 - DNA, 1206 bp, Artificial sequence
  DNA replication origin
cctacgggaaatgccgcgggactccttccattccatgcaggaaggctggaagcgcgagatccagggtctcttcgacgagctgcgagccaaggaaaaggtgcgaggaatcaagggacccagcgttggaacgagtgtctccccgatctccctggggcagagtcggggcgggcgctgccgggattggtgccaggctgacctctccaccatcgctgtctcgggcgcaggaactactgagccgcgaggaggagctgacgcgagcggcgcgcgagcagcggtcacaggcggagcagctgcggcggcgcgagcacctgctggcccagtgggagctagaggtgttcgagcgcgagctgacgctgctgctgcagcaggtggaccgcgagcgaccgcacgtgcgccgccgccgcgggacattcaagcgcagcaagctccgggcgcgcgacggcggcgagcgtatcagcatgccactcggtgagggccgggccccggggcgtcccccgccattggctgcgggggtgggggtggagccaggcctgtgtgctcaccgcgctgggattggtttagggtgttgtgggtgggcccgtgagatgaaggctgggaggggtggagccaggagtgttttttttctgtctgtgggcgggttctggcggaagtatttgcatgtcggtctgggagtgggaaggggtggggttcacgaaagttctgggaaggtctagtgggcggggccggccggcgccagggcatctccgactcagacgagtagctttccttatccagacccaggggctcaagaaagcagtgaggctggtcacagtctcacagccatcgtgccgctccctatgtggcctgggagctggccttgggcccctgcaggttggggtcctggctctacttcatcacaaacctgaaccctgctccccccaacccaaatcccagacttcaagcaccgcatcaccgtgcaggcctcacccggccttgaccggaggagaaacgtcttcgaggtcgggcctggggattcgcccacctttccccggttccgagccatccagtgtaagaaacttcacctctcatgcccctctccgccccccagctccttattctctgtcagaccttattcttggaggcggagcccactcactatcccctcttcctccccgcccccaggctccctgccttaggtctagcctgttacctctgaactccccaagc

SEQ ID NO: 21359 - DNA, 1381 bp, Artificial sequence
  DNA replication origin
ggagactcacagatctctcttgaaatcaaagccataaatgtccagagctgccaccttgccagttttgcttcagtgtaatattagggaaaagctagaacactggtttcagagccacacagaccaggttgtaatctctgctgtatttgttgtatgacctctgccaagtcatttccctgcttggtttcctcatctgtgaaacatgaaaaatattatttagctcataaatggttttgagtgctggggttgagtgtgaaatgtttggcctcggccaggtgcagtggcctgtaatcccagcactttgggaggccgaggcgggcagatcacctgaggttgggagttcgagaccagcctgaccaacatggagaaaccctgtctctactaaaaatgcaaaattagtcgggcgtggtggcacatgcccataatcccactactcgggaggctggggcaggacaatcgcttgaacccaggaggtggaggttgcagtgagccaagatcacgccattgcactccagcctgggcaacaagagcaaaactctatcttaagaaaaaaaaaaaaggaaaagaaaagaaatgtctgacctcaagtaggtcctcaagatctagaccaagtcacctctgtgcccccaggacccagccaggatgtccgtcagatgagtttgctcccagctcttaccctgtccccaccacctgatcctggagcatccacaatctggcccctcttctctagttttgctgctgcagcccattgagagtgacgacatggagcacaagaccctgaagatcaccgactttggcctggcccgagagtggcacaaaaccacacaaatgagtgccgcgggcacctacgcctggatggctcctgaggttatcaaggcctccaccttctctaagggcagtgacgtctggaggtgcggcccttggtggggctggacgggctgctacggggctgcagagggcagaggtggctgcctaaatctagggctgggccaagtccagggacagggacccaaaccacttggctcctagttgcttttgggtgaagtggcagtaagggggtgggggttgggagagaaaagggaacacagacctgttgtctcgcccacagttttggggtgctgctgtgggaactgctgaccggggaggtgccataccgtggcattgactgccttgctgtggcctatggcgtagctgttaacaagctcacactgcccatcccatccacctgccccgagcccttcgcacagcttatggccggtaagaggacggggagggcaggtgaggtacagagctccctggcccaggacacatccacccacggaccccttcttattctgtccccgctgcacgccgtgcccctagactgctgggcgcaggaccccca

SEQ ID NO: 21360 - DNA, 1580 bp, Artificial sequence
  DNA replication origin
aggaacaggcagtctcggcccaactgcggacgctccctccaccccctgcgcaaaaagacccaaccggagttgaggcgctgcccctgaaggccccaccttacacttggcgggggccggagccaggctcccaggactgctccagaaccgagggaagctcgggtccctccaagctagccatggtgaggcgccggaggccccggggccccacccccccggcctgaccacactgccctgggtgccctcctccagaagcccgagatgcggggggccgggagacaacactcctggctccccagagaggcgtgggtctggggctgagggccagggcccggatgcccaggttccgggactagggccttggcagccagcgggggtggggaccacgggcacccagagaaggtcctccacacatcccagcgccggctcccggccatggagcccttgaagagcctcttcctcaagagccctctagggtcatggaatggcagtggcagcgggggtggtgggggcggtggaggaggccggcctgaggggtctccaaaggcagcgggttatgccaacccggtgtggacagccctgttcgactacgagcccagtgggcaggatgagctggccctgaggaagggtgaccgtgtggaggtgctgtcccgggacgcagccatctcaggagacgagggctggtgggcgggccaggtgggtggccaggtgggcatcttcccgtccaactatgtgtctcggggtggcggcccgcccccctgcgaggtggccagcttccaggagctgcggctggaggaggtgatcggcattggaggctttggcaaggtgtacaggggcagctggcgaggtgagctggtggctgtgaaggcagctcgccaggaccccgatgaggacatcagtgtgacagccgagagcgttcgccaggaggcccggctcttcgccatgctggcacaccccaacatcattgccctcaaggctgtgtgcctggaggagcccaacctgtgcctggtgatggagtatgcagccggtgggcccctcagccgagctctggccgggcggcgcgtgcctccccatgtgctggtcaactgggctgtgcagattgcccgtgggatgcactacctgcactgcgaggccctggtgcccgtcatccaccgtgatctcaagtccaacaacagtgagtttctgggggcatggttgggggtggcatggctctggtacacacctgctcccaaccttccactgagcctagcttagggtctactgcaggtaggagctcccaccctagggggtcccagctgaccaggggtgcccatgggctcaagctagcccccaaacagagccccaggcacccagcagagtcttcctgcgccagcttcagaagtccttgaccccagcctgcagctgcggtttggacaagttaagaaattggtatctctcaggtgggccataagcatcctgcccagccatggctcccacctcaaggaagtcctctggaagctcgtgctcctcatcttctcctcccctaaattcatgttcgtggagttggtgctctgtcctcccctcccgtcgtcatgggcagctcc

SEQ ID NO: 21361 - DNA, 1485 bp, Artificial sequence
  DNA replication origin
aggtggccgtggcgtctcaccatgtacagtaagaagggaaagatgagcaggaagatccagacatagaggtggaagcagttggagaaggtgctctggtgcgggtcgaagaaccaaccgccggtgagcgaggcccacaccccctggcgcaggatctgcaacacctgcgaccccatggccccgccgctgctgcccgcgccccccctcccgggaccctcatgggggcggcccccggcccatgccccgtctggcgcctgagggccccggggcccggcctcacgctcacgccatggcctcccccagcgggggaggggggctcggccgcgcgagggtgcgagcagggggcggggccggccgggacagtcagtggtgcaaggcccggacgcgggggtggggctgcatcaggggcggggtccgggtccccactcctggcccagaattgctccgaggggccgagccggcaggcaggcgcggggcacgggccgggtacccgtcggcggcatccagaggtggtcgtggggtgggtgctcccggggtgcaggcgacagctccctagtctccggaccagggagaaccccaggatctggggtccactttcggggtcgcaggtcacttgcttggggctccgcgctcgcccggcttctgctggtgccggcctaaggaggaggccggaagaaggagccgcgaaccgccagcctgcagtggcgcatgcgcccaacgattccaattgggacccggaaaaggaaaacttgacggcatgaatgcgcaagcgcagaaaggtgatggcgcggtaggacgcgaggggtgccctttgggcgtgcgcagactccaggactaaagcaagttcgagcgtaaaagcgtttgggcgcatgcgtagacccaggcgttgccaacccagggtagacgactgggcggaaccaaagagacagttgagtagccattgggtaacggcaaagtaattggcgcacagctcttccaatgagttacaggaggcggggaaaaggtggaggcgtggactcccctagtagcagcgagagttctgcactaccgaagcacgcccctctcggcccgccccctttaatgctggacctcgtacgtcacgaccgatttcgctcccagcggcgtctacttccgggtcagagctcagacctagggtgtagagaacaaccttccgtaacaggcaggaatagtcgaaataggatagcgtcgtctttcttaaagtgacaggctcaaagcaattggggcagccctatccagaagttgtgagggcgactcagctattctgaatccaatcctgggcaaagttctggacaagtctcaggtttctgccaatggggaagggatatgaagaagcggattgtttcccaggtgaggagaagaagagagccttaggcaatccactccaagagcttgaggtgcagccagttccgtctgtcctccagtcttccccaccccatccaactagctctacgaggcagagctttctcg

SEQ ID NO: 21362 - DNA, 2154 bp, Artificial sequence
  DNA replication origin
ctccttcttccggcctcctccttaggccggcaccagcagaagccgggcgagcgcggagccccaagcaagtgacctgcgaccccgaaagtggaccccagatcctggggttctccctggtccggagactagggagctgtcgcctgcaccccgggagcacccaccccacgaccacctctggatgccgccgacgggtacccggcccgtgccccgcgcctgcctgccggctcggcccctcggagcaattctgggccaggagtggggacccggaccccgcccctgatgcagccccacccccgcgtccgggccttgcaccactgactgtcccggccggccccgccccctgctcgcaccctcgcgcggccgagcccccctcccccgctgggggaggccatggcgtgagcgtgaggccgggccccggggccctcaggcgccagacggggcatgggccgggggccgcccccatgagggtcccgggagggggggcgcgggcagcagcggcggggccatggggtcgcaggtgttgcagatcctgcgccagggggtgtgggcctcgctcaccggcggttggttcttcgacccgcaccagagcaccttctccaactgcttccacctctatgtctggatcttcctgctcatctttcccttcttactgtacatggtgagacgccacggccacctgtaactccagccgggagagggagggcagcctggcagggattcagggcagtgccctgggctctgggacgtggagagagaggaatcactgcagagtttgggtctgtgtggaagaggggccaaagtcttcctttcttggatcgagtgaccttgaaccctacacttaatctcatccagctaagcagaatacagagccctttgtcgaggtctgtgtactggttgtgtggagaggtgatgaaattttcttgtgagtctgtgaatcccagctatgatgttgatggcaggtacatcctgtgggggcgaggctttgtgaaaagggacctggcttactttcatcttcaggtcctgcctcccagcttgatggtggccggcgtgtactgcctcgtggtggctgtcatctttgctactatcaagactgtcaattatcggcttcatgccatgtttgaccagggcgagatcgtggagaagcgcagctctaccatgggggagctggaggaagagcctgcccagggggacagcaatccacccaggtgggtggggtaggggctgtgctggggattgagggtttttggtgcctgggccggaaccttgcagggtggagtaggggcttagggaacattggctctctgagtgattgtgaacacttgtcctgtgttagccctggaattgtaaagtgacttctgaaaaagaagcagtgacaaagatgggaggaagtagcatacacagaggagaggttagctcaaagctgctgctctttttcaccgccagggaccccggagtggagatgacagtgttccggaaagtcagttccacacccccggtgcgctgcagctcccagcactctgtgtttggcttcaaccaggtctcggtgagtgggcctggacctcagcttgtcctcctgtccctctgcgagccagtccctactgtgggtgcatcctgagcctacttcttgccttgtttgttccttcatggctctctgtctactcaggagctgctgccccgaatggaggactctgggccccttagaggtaggtggctgctcttcagggttggagcatagtgctgtggaacaggggctggcgtgctgtgccagggggtcctgctgacacctctggggccatggttgcagacatcaaggagctggtgcgggagcagggcagcaacaatgtgatcgtgacttctgccgaccgagagatgctgaagctcagctcgcaggagaaactgagtgcgtgggccttatggggccgaggcttgtgggctagaccagctgtttcgttgttgaatcccctcaactttggctccatcctgggtctcctctgtattcctctgtgggacctccccagtgtgctgctgtggctgggctctcagggaaagtacagggcataagacctcccttaaccactagtttgttttgcagaaaacccttttttcattttctgtttccctttattttggcagttggagaccttccccagacgc

SEQ ID NO: 21363 - DNA, 1063 bp, Artificial sequence
  DNA replication origin
acggcctagcaaacggcagccacccctgcgaagacactctccacctggccgtgcccctcgacggcccctgcttgaaggtgggggcttctttgaggatgaagacactagtgagggcagtgaactgagcccggcctccagtctccgatcgcagcgccgctacagtactgacagctcctcttctacttcctgctactcccctgagagctcccggggtgcagcagggggaccccggaagcggagggccccccatggggctgaggagggaactgctgtgccccccaagcggccatatgggacccagcggacgcctagtaccgccagcgctaaaacacatgcccgtgtgctgagcatggatggggctgggggtgatgttctgaggcccccactggctggctgcaaggcagagctggaggcccaggttggggtggagcaggctgctagtgagcctgttgtgctgcctgctgaggcgcgaaggggacccgctgccaaccagcccggctggcggggggagctgcaggaggaaggtgctgtggggggaggtgagtgcttgctctagaggcaggggctgggggacgtgagctacgggcttggggttgggcaaagggcaggtaagaatggacctggtcagtgtcagctcagcctcggttgtaggcagcagatggacgtgggcctggtggtgattgacattgtctgccaaacctcttagacatggggctcagccacctggctccacatccttgattagcacctgagtctctgtcccctgaggactctcatcatccacactcatcctcccaccaccagtggggtggggcagggccgatcagtgtcatccttgtttgcaagtaaggaaactgagcatggggctgtgtgacctggctgggcctcagagccggggcgtggttgtactaggcctttagctccctggcggaacaccgtccccaaccttactcccccagccttgtctgagcatctgtcacttacacttgggggcctctctctgggcagcggccgaggagactggcaggcgggaccgctcaagcagtgtgaggcggacccaggc

SEQ ID NO: 21364 - DNA, 866 bp, Artificial sequence
  DNA replication origin
gggcggggctgtgaactgggctcagcagtggcttctcacacgggggcagcccgggccccatgcttacctcacctcccctgaccagcatggattctctccgcagactccgtggccagagcagcacgtccctgtcctcttctcagtcttctgtggcctcctggtggcactgtcctaccacctgagccggcagagcagcgaccccaccgtgctctggtgggtgtgctccgggtcgtgtgtttgtgtctgcccagtaggggtttgtggtctgtgcatgtgcccgtgactggggccggggggaaggaggggcggcctcctcctgactcttcctcacccccaggtctctgatccggagcaagctgttccctgagctggaggagcgcagcttggagacagcccgggccgagcccccggaccccttgccggacaagatgcgccagtcggtggtgagggggcggggggtgggggtctgtggggaggtggtgacaggtcctggggttcctgggaggggcatgtccagcttgggctgctgggcagctgagtgtctctcctggccgggcagctgaatgtctctcctggccctgcagcgtgaggtcttgcactccgacctggtgatgtgtgtggtgatcgccgtgctcaccttcgccatcagcgccagcaccgtctttattgccctgaaggtttgtgtggcatgggccgctgctgcctctcgctgtcttggcgggagcctgctcaatctgagtgccgtgggcagcccctccccggcctgtgccaggtggccctctgtggtcccttggcctgctcccatcagctgagtctctggcctctccctcctgcagtcggtgctgggtttcgtgttgtacgcactg

SEQ ID NO: 21365 - DNA, 1164 bp, Artificial sequence
  DNA replication origin
gggtaaggtgacatctaggaggggcaggtcagctctgggagggggtcatctctcgggattcaagccctggctccagcacgtcctccctctgagacccaggagggacgtactgcacctcagcttcctcccgcgccacacgtcaccccttcccgaggcctcacctctcccaggtgcgcaggagccagtgggcaatggcacccaggctgatggggccaccccacagtgcccgtagctgggggtggctgccagccagcgaggtggtgagaggcgacacgtagatggggtagcccagcggctggtcacaggaggagttgatcatgttgcgaagcgcctgcttggcgttctggatgctgccacgctcggggttgcggttgcgcaggaacaccagctcctgctgctgcccggcccacaggccgcgcacgcactcccggttcacctgagagccacacgccagggtcagggggccggcccaagggggtttggggcagggcttagggcaggtggggccggcccaaccttgatgactcggaagctgaggtggcgccggttgagcatgatgatcttgtactcgtcggaggcatcatccaggacatggcgcagcgccagcagggagggcgtgttgctgaggatggcgctgcgccatgctgggtcaccctcatgtgagatgaccagccgctcctcgttggccgcaatggcatcgtatagggctgctggctcctcatattcatctggggacgtgaagtggtcctggtagagaagacgggaacaggggtcagtggcccctgccctggagagaggcttcatcccccacctgcccatgctgctgggcacacccctccccaacctggtgaagcttgagggccatgcgaaccccaggcgccacaacgcggtgaagcaggtccatgtcggcaaagacccactcgtcacgtggggaggtgatgcgaaaatcccccttgaacagggcgtgcaggccgtagaggaagggctccaggctaagtgggaggaaaaacagggaggggagagaggggtgtcgaggacccaggggtaaggcttcagagtgatccaagcagaggcctttcctcacgctgagcctcagtttccccatcttgacaaagaggccaatctctgcccatgtctctcacagagcactgaggagcaggcaag

SEQ ID NO: 21366 - DNA, 1183 bp, Artificial sequence
  DNA replication origin
acatgagggtgacccagcatggcgcagcgccatcctcagcaacacgccctccctgctggcgctgcgccatgtcctggatgatgcctccgacgagtacaagatcatcatgctcaaccggcgccacctcagcttccgagtcatcaaggttgggccggccccacctgccctaagccctgccccaaacccccttgggccggccccctgaccctggcgtgtggctctcaggtgaaccgggagtgcgtgcgcggcctgtgggccgggcagcagcaggagctggtgttcctgcgcaaccgcaaccccgagcgtggcagcatccagaacgccaagcaggcgcttcgcaacatgatcaactcctcctgtgaccagccgctgggctaccccatctacgtgtcgcctctcaccacctcgctggctggcagccacccccagctacgggcactgtggggtggccccatcagcctgggtgccattgcccactggctcctgcgcacctgggagaggtgaggcctcgggaaggggtgacgtgtggcgcgggaggaagctgaggtgcagtacgtccctcctgggtctcagagggaggacgtgctggagccagggcttgaatcccgagagatgaccccctcccagagctgacctgcccctcctagatgtcaccttacccccagagctgacagtggcctttagtcatcaagcactgttgacaacgcaccctcaaaagactctgcaaagtaggtggcagcttcttagaggggaggatcctggggctcagaggtgttagatgacttgtcctggggctgaggactcatgcttgtgaggcctctggcctcagccgtgtccctcctgatcccttttctacctctccacccccaggcttcacaagggctgtggcgccggctgcaatagtggcgggaacgtggatgattcagactgtagtgggggcggtggcctgacctccctcagcaataacccccccgtggcacaccccacacctgagaacacggcaggtgagcaggcgaggctgggctgaacccgtgggtgaggagtgcagcccagctgaggcctctgctgtcttatctgtctcctacaggcaatggtgaccaacccctcccaccaggccctggctgggggccgcggtcctccctgagtggctctggtgatgggcggcccccacctctgctgcagt

SEQ ID NO: 21367 - DNA, 1197 bp, Artificial sequence
  DNA replication origin
tggaggccgcctaagaagaagaggagcctcagaataagggggagccccgcacacacttgcagtgttgagggggagggggtcacagtgccgccaccaggagtcaggagccgccgcttccactcaccggctggctggccaggctaagccgtcacacagagagagtaggaacggctggtcagagacagggggctggacatattgactcgggactgagctggagcccggagggaagttgggagggtgctggcggcgaacgtggcgaggaccccactcccatacacatcacccgggcccacggctaggccacctctcccctgtcgggcccgacagtagtgcctcccgtcccctgctcccgccagtacctctggggctcccgcccagccgccgccgcccgcgctggggtcccgctgccgctctcccgctaccgctcccggcgccggctccgcctgggggcggggccatgctgggaggcggggccatgccgggaggcggggccggccgggagctgtctgcggcgggaagcgcagcagcggggattccaggcctggcggaggtcagcaccgagcagtgctcattctaaggccatttcctctcctgagaaacttgtgcctgccttccagaccaaccgggagggctagcggaggccacctagcgtccagctcccggccagcaggtgctcaagagtctgccactattttatggagcacttgctaagcactgggccctgggcaaccattccactagcgcgctctcatttattctaaaaacaccttagataggtgtcatctctttacgccctggagcagctgaggtgcagagaaaggctttggccaagaacaagcctgataaatgtaggagccaccagacctggaagtctgaccatatggtgggaaatggcagacaatacccttcagataaaggcttgaaaagggagcagccatgcggtgaagaggacccggttctacctgaaccccaccttggtctgcccttgatctctactagacttcagccccacatccttcacccctctgcgtgcttgtccatcccaacttagccgcctgtactatcatgtacccattcccaggtagaaaaagaaactgccaaccaaaatcaaaaatagtgttattaattctgatgtctccgaagcacaaaaaaaaaaaaaaaaaagaaaagaaaaaaaaggaaagaaagaaacca

SEQ ID NO: 21368 - DNA, 867 bp, Artificial sequence
  DNA replication origin
gacttccaggtctggtggctcctacatttatcaggcttgttcttggccaaagcctttctctgcacctcagctgctccagggcgtaaagagatgacacctatctaaggtgtttttagaataaatgagagcgcgctagtggaatggttgcccagggcccagtgcttagcaagtgctccataaaatagtggcagactcttgagcacctgctggccgggagctggacgctaggtggcctccgctagccctcccggttggtctggaaggcaggcacaagtttctcaggagaggaaatggccttagaatgagcactgctcggtgctgacctccgccaggcctggaatccccgctgctgcgcttcccgccgcagacagctcccggccggccccgcctcccggcatggccccgcctcccagcatggccccgcccccaggcggagccggcgccgggagcggtagcgggagagcggcagcgggaccccagcgcgggcggcggcggctgggcgggagccccagaggtactggcgggagcaggggacgggaggcactactgtcgggcccgacaggggagaggtggcctagccgtgggcccgggtgatgtgtatgggagtggggtcctcgccacgttcgccgccagcaccctcccaacttccctccgggctccagctcagtcccgagtcaatatgtccagccccctgtctctgaccagccgttcctactctctctgtgtgacggcttagcctggccagccagccggtgagtggaagcggcggctcctgactcctggtggcggcactgtgaccccctccccctcaacactgcaagtgtgtgcggggctcccccttattctgaggctcctcttcttcttagg

SEQ ID NO: 21369 - DNA, 1924 bp, Artificial sequence
  DNA replication origin
acaccttagctttggcctgggcccagagtaagggtcccaccaggacctagcccaaccggacagatgacttgtattggctgggacgggaaacccaggggccactggtgtctgggtcctgcccacttaacaaagggaggacgtcctgtccccagagaccttcctccttgcccctcccacttccttcagggtccctggagagctgatcacccagagaggtctgatctcagtgccctggacctcaaggcctcaataccacaaggacacatgggttcccagggaggcagcggcagggcagcaggaatggcaagaggacttccttcagcacaggaagtagccccaactgtgggcccagccctctgccaggcccccacatcctgaggaaggtgctggggtcacagcagctgtcatgggaccccagtcaccctgccctgaaggacaggccaactcaccttcttgcaggctactgtgcccaggcttgggggcaagaggagtcacaatgacagggacccatagggacctctgcctacctggtctcactgatgcagacagggaggtctgaaccccatgtgacagatggtcagatgaggtccagaggagatgctcttgcctgaagcaattccgtgtcagagctaggatgtgagcctgggtctgcccatctccaggccctaagcagggctgcacctgcccactgctgtctgtgtgcgtaggttttggggggtgggtgttgggctgaggttcaaggtctcacaggatgcaagattgagacacccaaagccccagggacctgctaagtgcggaaacgtgacgccagaggcaggtgcaaatggtggtgtgagaacttgagggaagccacacccaggcaagccctggatggagtaggcagtgaggacagggagctggggaacctccactgggggtacaggcatctaatggtgggtcttcatgcagcatccagcaacatcatgcggggctgggccggaggggggtggaggaggggctccacacacccttcgtctggggcctccagaaccaagcaagagtcggctccccagcccaggtgcttctaccttgatttctcctgaataaactcccatgctgaccttgagcctctgttttctcatctctaaaatggggttaactggccgggtgcggtggctgtggcctgtaatcccagcactttgggaggccaaggcggggggatcacctgaggtcaggagttcaagaccagcctagctaacatggtgaaaccctgtctctactaaaaacataaaaattagccgggtgtggtggtgcgcacctgtagtcccagccactcaggaggctgaggcaggagaatcgcttaaacctgggaggcagaggttgcagtgagccgagatcgcgccactgaactccagcctgcgggacagagtgagactgtctccaaaaaaacaaagaaaaaaattgggtttaattatttctgtcccctcccaaggctgctgagagactgagaagaatgaggtgagtgtcgctagctatgtgtgtgtgtgacgggtgtagcccctggctccatgagccaagctctgggcacattcagcgctcgggcctgggctatagtgtgtgaaggagtaggagggcatgagggagggggtctgtgcaagccccgctccttgtgggctgagctctgcacgcttggaagtgagatctgtgcatgtgtgcacccagcctgtgcgctgcctcttgctgtggcccagtgccaggctctggcgctgccttgaggggtgttctcgggctctgccccccaccctgaagcttcacacagggtccattgaggctaggacattcctccgggcctgtgtcactaggggtggggggaaagggccggccccgcccccacagatccggaaggcctggctgccccaggaggaggagctggccacttcccagc

SEQ ID NO: 21370 - DNA, 1280 bp, Artificial sequence
  DNA replication origin
cggttctgtggctcctccaggatggacacggccgcgttgggcagtgcagggggcacaggtggggatgctggtccacccaggcctagctcaccctcacccccgagctcacacacaaagccaggtgccccatgcagcaggtccgagctggcagcctggtcctcggctgaagccagggtcccagagctggcctctgagtggctccccatcccctgagacctcggagcccaatcaaagagcaggctttgcacgtcatagtgggcaaaccatcgaggctcaagcactggtgggaaggcaggctctggttcctctgctggcagccccagcagtgccagcgggtcagtgaagagccgggtggaagtggctgcaggtcggctggcctcttcgtggctgtgggcacgggcacgggggctggctggcgtggggggcctggcctcgcctgcatcgctgccgctgcgcaggagtgggccccggactggcctcggctcgaaggtgtgcggtgtcagcgggggccttgctggctggcgcagcttgcgggcaaagaggtcatctgtggacgcaggggccatgccccgccgagggctccccacaccgccggcccacatgggcatgctctgtgggcctgactctccgggggctgggccgcattggcgggcacgggtgtttggtgcccagcctgaggttgtggcagcagttcctgccctgaaggaggagggggctgctcagaggggcctgggcagaaaacaggaacccaggcccccagcctggtcctccaccacccgtgttggcttccggccccctccgagaccatcaaagctgcttccgctttccaggccacttccttgtctgcctagggctaaagtttccagccccctccccagcttagctgggcaaggctagaggctgggctgttgggtcttggtcctgagggtcctggagcctgggcagccctgggactgccagggtcccccagtcgccacccacacaccttagctttggcctgggcccagagtaagggtcccaccaggacctagcccaaccggacagatgacttgtattggctgggacgggaaacccaggggccactggtgtctgggtcctgcccacttaacaaagggaggacgtcctgtccccagagaccttcctccttgcccctcccacttccttcagggtccctggagagctgatcacccagagaggtctgatctcagtgccctggacctcaaggcctcaataccacaaggacacatgggttcccagggaggcagcggcagggcagcagg

SEQ ID NO: 21371 - DNA, 1798 bp, Artificial sequence
  DNA replication origin
cctggaaagcggaagcagctttgatggtctcggagggggccggaagccaacacgggtggtggaggaccaggctgggggcctgggttcctgttttctgcccaggcccctctgagcagccccctcctccttcagggcaggaactgctgccacaacctcaggctgggcaccaaacacccgtgcccgccaatgcggcccagcccccggagagtcaggcccacagagcatgcccatgtgggccggcggtgtggggagccctcggcggggcatggcccctgcgtccacagatgacctctttgcccgcaagctgcgccagccagcaaggcccccgctgacaccgcacaccttcgagccgaggccagtccggggcccactcctgcgcagcggcagcgatgcaggcgaggccaggccccccacgccagccagcccccgtgcccgtgcccacagccacgaagaggccagccgacctgcagccacttccacccggctcttcactgacccgctggcactgctggggctgccagcagaggaaccagagcctgccttcccaccagtgcttgagcctcgatggtttgcccactatgacgtgcaaagcctgctctttgattgggctccgaggtctcaggggatggggagccactcagaggccagctctgggaccctggcttcagccgaggaccaggctgccagctcggacctgctgcatggggcacctggctttgtgtgtgagctcgggggtgagggtgagctaggcctgggtggaccagcatccccacctgtgccccctgcactgcccaacgcggccgtgtccatcctggaggagccacagaaccgaacctcggcctacagcctggagcacgcagacctgggtgctggctactaccgcaaatacttctatggcaaaggtgaggaaaggcagttccagggagtggaggaggggggctgaagaagaggtccctgtcacctgcagtgcacacagtagggctcatgaactgtccatttcctgtaaagtccctggccctgggagggctcaagagctgagctggggtcctcctggacctactttcaaccaccttcttaaggctaatccctggctcctcacccccagccagggctggtccctctgcctccgtattggttcatcctccatctggttcaacctgccaggctggggagagattccctatgggcttttctgtggggtgaaaactcaggcctcaaatccctgcatccgtgaaccttgttcgcaccagcactgcggagagagggctccaggacatagaagggagaatgagggcgtggtgggtggagccaaggcaggatttaggcctgggagctggccgcgtgggtctaggtctgggtctgggtccacctctgggtcagggttgagatcaagatattgagctcggggctacagaggggcgggacttagtctagggtcaacatttggtggtgagatgaagcctagggcggggcttagtgatgcgcgtggtcgagcgggggcggggctgccagagggcgggaccaatcgttttcttcggcgcggtcccccagaacatcagaacttcttcgggatggacgagtcgctgggcccggtggcagtgagcctgcggcgggaggagaaggagggcagcggagggggcaccctgcacagctaccgcgtcatcgtgcggaccacgcaggtgggccgggatcgcgggatcaggacgtgggttgcctccccgacaccttgtatgcatcctgagtgcccttacaccccttcctcagctccggacactccgtggcaccatctcggaggacg

SEQ ID NO: 21372 - DNA, 1709 bp, Artificial sequence
  DNA replication origin
gatatttgcagccctagatgccctggtctgactcaccccactggtcctgcagttcccgcatcattcctggccaatttcccccacagcccctgctgggtttcctctaacatgtggtgctcacagcttcctggagcggctccttccatcccccactccatgctgaaagctgcccattggctgagtcttctcctctgtatcattcaacccatcagtcattcaacaaacatttcttagacctttttggtgccaggcctcagactggatgctggggacaggtctagaccaggtgctttgcttgagtagctcacagctgggtgggagaaagagacccacagagaactgctgaaacacaggagcagtactggaacactgaaagggaatgttgagggctgcctgggccacgacggtagtgatgagagcccttccttggccagggttttccagcatggagaacacaaaagggctcaggcccggataagcaggtgttttctggtcagaaggaataacttgtgcaaaggcttggagaatgagagcatggcacattaggcagtcagttcagcgtggctggggttgggattgtggggaggggcgggggagaagcttgcatttgttcccgtggacactggggagccatggagggatacggtgcagatctgagaggggcagctctctggctgcagcatggggactagactgtacggggcggggatgccaggctgaaggctattgcagttgcccaggctagacacagtggcagcgatagtggaggtgaagaggaggtgacagtccaggaaggactgggtagtcatgtggctgactggaaggggtgaagtgctaggatttcccagcttcttggcccccaggagtggtggtttaaggaggaggagcagggtgggggagtcacagcaaggtgagacattaggcagccggagaaaaaggcccggggtttggtaggccggtctgaatgggaggcggagatgggggtgtcatccttgctgcagccagggagggggaggagcatgggtggagaagaggcccaggcagaagagggcggggttcctggggccctaggcaaggtgagtttccagctatccccagtgccacctatggctgagagggtaccaggatgaggccacatctggggaccatatggggagtggggggtgcagggggttgggaggaatgaaatcgaagtggggactgtaagtgcagacaagtttagttgtagaaaagggaggtgaccgctggaggggagcctgtgctgtttggaggagttcagagcaccttgagctgggcatggttatccagttatccgcagagggaagagccgggaagagggcacagaaatgggagcatggggggcagaggtggtgcctggcctgcaggggctggggtgggggtgccttggattcaggggtgcagaggacagtccagccttgagataaggaggatgataatgtgtatgtttattggaagggtcctttctgtgaatcaccttctctactgccacatgggaaccagcctcctcccatcccttcctacctgtgcactcccaagcacgaggagcacaacagactgtactcacctgacaggcaagggcacaagtggctcagagagggctggtgctcagccccaggccagcgtcccatccattccctaagagctggtggggtggggctgcaggggactgagacctatgccttctgtct

SEQ ID NO: 21373 - DNA, 1835 bp, Artificial sequence
  DNA replication origin
cgtcgcgacaggcgcaattgaacactacgcggccgtcgcgcggcgccaccagcaccagagcctcggccgagatgcccagcaggcagggcacctcgatgccttcggggccgctcgcctgagccccggcggcgacccgcgccccgggcgccgcgcgcactccccacaccagtgagcccgctgcctgcagctcggcgcctgggccccgaggggccgcccggcgcctcccacccagggagggcaggccgaagcgtgaagccgagtccagcgacgtagtggtcacctcgttggtggccaggtcttgcaggtactgctggcgggtgcgcgtggccatggcgtggaactggcgcgcgtggccggccgcctgctcaccattcagcgctttggccagcaggaaggcccggaagtcggcgttggctgcgaaggggcctccgccagcaggcagagctggcccgaaggcaggggtgtcctgggtgcggctcacggccaccctgcggggagggaggcgttagtgaggggcggcaggactccatgcccacgggagacctgggaccactccggtgcccacctgtaggtggtgtgtggcgtgcagggtgtgtgtgcccgcaccactaggaacacgtgctggaagtgcgagcggatggtggtggggcagaagggcttgctgccaggctcctggaacacgatggtcacaatgtcgttgccaatgtggcgcttccggaggagctaggggttggatagtaggggctcgtgatgaggtcttctgtgccccaaacccctcctcattcaggcaggagaaagccaaggcaccaatggctcccccactgcccctggtgaagacctagggtgtttctgtctttgggaaggggccaccagaggggcgggctgttggggccaacagagctccggccaaagctcaaacgtcatgggccatgcagggccctccatggttcccggaagccccacccccacgttggtccccctcacacctgctgctggttattaggggtgtaaggcagcatcgtggacacgtggaacatgatctcgtggtcctggtatgtggtgtagagggagtgcgtgcctgtggaatccgctgtggccaggaagttagggacacagaaggagaaaacaaggggaatctaagtggcttgaacttgccattcctgcctgtacacaggagcctctgtgccccaaacagcaggtggacaaccagtcatgccaccagccaatgcccagccagcgagattcaagggcctcagccctgggtgcccctcctcctctccctccacaggctccagccccatgccagagtgaaggggggtcaggatgggagagttgaaatagaatgaagacagaaatgagaagtggtctcagagggagggcagggtcaggtgtcctaggaggacaggtgtcactccaggcccaagcatgtgtggcatgctgggaaagtgaaaagcaggcagggggtgctcagtacaacacctcccaggggtcctggggccccttccaccagggaggtaggggcacctctcttccacgaggctgagctgctggaatgtgtttggtggaggggtagtgcccccaaaccactttagccccagctcaggcagtagggtacttgggccttgagggacagtcccagcccctcttttcagcccatagcttggccctcatagccctgactcagatccttagctcacccaaagaactctccagtccccagccccaggattgtacggacaaaggagtgacaaggcaatttgtgctcaccccttcagcacagatctgctcccacccctcctgcccctgggcctcacttttggtgtctagctgggccc

SEQ ID NO: 21374 - DNA, 831 bp, Artificial sequence
  DNA replication origin
gccggaactggtgccctcgggtaagcgacttctggtcttcatccctcgggcggtggcacacgcggccctcggggactgtggaaagttccgtgtggcctgggacgcagtccagggggcgggcgctggggcggccccacctcccggcagccccgcccactcgtcccgccccgtccgcagctggtgagccgtggctgcgagacccgcgagctggcgctgccccgcgacggtcaaggccgcctgggcttcgaggtggacgccgagggattcgtcacgcacgtggagcgcttcacattcgccgagacggcggggctgcggcccggggcgcgcctcctgcgcgtgtgcggccagactctgcccagcctccggcccgaggccgctgcccagctcctgcgctcggcgcccaaggtctgcgtcaccgtcctgccccccgacgagagcggccggccccgcaggtcagggtgccggggacgcggggaggtgggagggccggcagttggccaccgcgcagtctgcgcctcccgggtcgccatcagcagtttcaggaacccagtgtggatacctttccttctggaaagaatctcccgtctcttagcccgtctgagcctgtctcttcctgtctctgtctctctctctttctctgtccttccttcctctctctctcctctctcttttttttttttttgagacgaagtatccctcttgttgcccgggctggagtgcaatggcgtgatttcggcttactgcaacatccgcctcccaggttcaagcagttctcctgcctcagcctcccttgtagctgggattacaggcatgcaccaccacggccggtta

SEQ ID NO: 21375 - DNA, 2033 bp, Artificial sequence
  DNA replication origin
ataggcatgagatgctgggcaagtctgccctatctgggcctcaggtccagaaaccaaaggatttagacaaagtcccaagtttggacttgatgatgccacttcggggaaaggcctggcctcgcgaggaacagagaggaccataggctggtgaggagggaagtgggtcaagggcccgtttcctccaggacatagaaacagccccagtcaactgaggcggagatgccaccgcctctggaattgggccctgcaagaagtggccaggtgggtagagagaggacaaggcctgggggctcagtggcttcagagagaagagtgaggcctgcactgaggcacagggccttgtgatgcacggccagggtagctgtggggtgtggccacctgcttccctgcagaaccaaataaacgttatgggagagaagccaagcagtggcctggcctcagggacccctcagtgagtgccagcccatctctgagccagtgttcccagggcctgtcctgactggtccgaggagtttggctggggcctctggaggcaaaaccccttgccctgccctgtcttggacacatgttcagacacagacatcagtggcttttttactccctgaagtcctcttttctccacagaatatttacaaacagggaaggggtggaggccacttccgccaccaaataaggggctagggaggggggcagtgctaagacacgcctctgcgcagggagagttcctgaggagggcccagtgtgaccacagtgccctcaggggcccaggtggttccagacggctcaggccaggtcggcggtgggtgagcccagctgcttggaggccaggaggaggcgtgtggctgcactctcagactccgcctgcagccgccggttgttgtgtctcaggctccgcacctcctcctccagggccgccctgtccgccttctcctggggtgccggggagacaggagtcagagccgccagcccctttcctggggcagccctgtgactccccccaagctcagcccacccctcaccttctgcaggtcctcctgcagcttcctgagcatggactccaagtgagagaccttctctgagaggttcccaggctctggcctgaagacatgggggtcaagactcagcaggaccaaggcagggggcagtgcaccagctgactcccagccccagctaatgagaggggccccgctggtcttctaggcatatgtggcagcagagcccaggacagagctccaccccagcagacaggcacgaagggggggtcatgtgggcaggtaaagcggctgtggggagttggggagcttactcagcatcagattttggagttcccttagggtctccactctctgggatgggctgtcctgtggggacaaagggatcaggtgggcaggtcagaaagggggcaagagcactgcccaggcttaccgcagcaccctggtggcctcaccctctcgggacagcgactccagaatggtgttgcaagtagaggcaatctccgagatggcctgccactcgtcctccagggtcccactgcccgcctccgacatgactgtgggcacaaggagcaggctgagctagggaagcccaggagcaccccccaacccctcccctgctctcctgggtccagactcactcctgctgatggagttccgcagagacaaggtacgtggcagaaaggaggccctcagctccggcgccgggttgcccttgtcctcagagccactgggactgcctggcctgtcctgtgccacagaagtggatacagattcagtgatgcccactgtcaccactgtgctgttgggctccagagcctggtttctgctcacctgggtcaggggtgtctcactgtcagcactgggtactgatggcttggctgtggtggccaggaggaggtccggggtggtgttgggcaggactggggcctcatccgacagagagctggggagagcaggggtggctcagaaagggaagccgctttcccagaggcctggaggagagggaaggccaagagtgtgcacctgcgtggtgacagc

SEQ ID NO: 21376 - DNA, 1305 bp, Artificial sequence
  DNA replication origin
gtgcatcacaaggccctgtgcctcagtgcaggcctcactcttctctctgaagccactgagcccccaggccttgtcctctctctacccacctggccacttcttgcagggcccaattccagaggcggtggcatctccgcctcagttgactggggctgtttctatgtcctggaggaaacgggcccttgacccacttccctcctcaccagcctatggtcctctctgttcctcgcgaggccaggcctttccccgaagtggcatcatcaagtccaaacttgggactttgtctaaatcctttggtttctggacctgaggcccagatagggcagacttgcccagcatctcatgcctattccagtcccttccctaggctggctgaagctccatggtgagacctaggccctgggtctgttaacttaggtgctggcaggatgagctaggctcggagaaacagagcatctgaggatcaggaaggcttcatggaggaggtaatatgagggctgagttttgaaggctgggtaggagttcaccaggcagagacgtcagaggtatcctggtaggaccagtctggctgaggcctgctggactagagccaaggcacacccaggaacccagcgtcaaagaagccagatcagaaagggttgtgaaggtgcactagggatcctgggttagcagttcccaagactgccactttttcctggttgtggactagtgtggaaggctgtggtcactgagggtgtgtctgcagaaaactcggatctggtcttgtggttgatgtttgaagggagattgatggggtgagatctggatgtcagagctctttggctgcagggaggcggctgtagccgcagtccagtgggaggtctagtggtgacttaaactcagtgatagcagtgacagtggggagaagtgggcagattttccaggacctcgtggaaggactggacgcaagttactaagggaagaggcggcatctacggtagtggccaggtttccggctggagcccttggaaggtggcagggccagggctgacagggaaaaggagaggcaggctggggatggctgaggtcatttggaacaggatgagtttgagaggcccgaggacgtcagagtggagatgtccaggggctggtgcgcaggggagagagatctgggttggatacgaggacttggagctgctgagccatgagcatgatggggtcattcacgaatgagagaagaaccaggagaggtcttcgtgggtcacgggaggtcgcgggaccgagaaagccaagaggagggaggcgcagcctgggctgcagggcctt

SEQ ID NO: 21377 - DNA, 1097 bp, Artificial sequence
  DNA replication origin
ctccccggcagcttcgcccgggtcctgacctggccaccgcgagcccgggctccgcccctcgcgtgggagttccgccgaggcccgccctcgctccaagccccgcccctggccgcccccccggagccggagccccgtggaaaacgccacttcctcgacggaattggcctgccgtctcgccggcgccgcccgtcggagcctgcacccagggccttttctgttcctaggagactcgctgaattttgggacgcgtcccgctgacgataactccttttcccctgctattgtcctcccgcgacggtgcgaagcccaaacgaagacgccatcggcctcggcggggattttccccagacgctggacccggcctccggttgctgcgggctccttgtgcgcctgcgcagtcgagaagggggcccacgccggccagcgctttttgctgctgcgcttgcgctggggcaaagcggaagtacgtccagctgtagcccttgtgggctgcggctgggcctttgttttggcttcctgaggctgtggattgaagatttcaccgttcctcccagaacagagtatcaaagcatcggtgggccgggtagatctttacctggcaccacacattccccaagagaagcacacactccctgggccacccaaggaatttggccccatcacatctttcgaacatcgtttctcttacctctgacgctggctagtccctctttgacatccactctcagctgatctaagacctggagctaatggggcctcttggaagactcctgaaactgctccatccccacagccagcgggctctactaggctctcagtgtgctaggactcttgccttagctgcccgttttcatccactggacggtaactcggggtttccaagggcattctcagactgcaagctctcagaggacagtgcacgcattcacccagctctctaccaccaatgtctggcctgatgtgactagcaaaatgtgtgctcagtgtttgctgaaaaaaagcggatctctagccagcttggcaacagatttattagttcagagtagaaagagcaagagtccaagtgctttgattgttcagtaaaaactatgcctcct

SEQ ID NO: 21378 - DNA, 755 bp, Artificial sequence
  DNA replication origin
gaagtccatgtccgcaatggaggagaagtcttcatctcctgaaaggaggccattggggagccccggggcccccagtggagcaggagctgggtcggggggcctctgggcccctgtcactaggcgagttatagcctcagggtactccatcagcatgggctcagttgtgtggggggccacaggtatgccctggttcagcagctgctgaaactcggagttgtcgacggatgccaggtctgtgaacacagctgggtctgtgctgttgccaagcaaggcccccaggtcttcatcatcaaactgcagctgcagcagggcctctgacagcgttccttccccagcctgggtgggcttgggggcaggtggggccacagcctgaggagggcctggggctaggactgggacaggggctggggcctgggccagagctgataccatggctggagcaggggcaggggctggagcctggggcaggacttggggaggggccggggccaaggccgaggcctggctgatctgcccagaaggaaacaccatggtgggaaactcatcatagttgatggtgctcagggatgacgtaaagggatagggctggggtgctggaggagagagacagagaggcaggggtcagagaaagccctagagatccaccccgtcctctgtaccccagcccctcttcatggtgctcaggctcaatccctctctagggagtcactgccaacaccctatctccttcctcttaccccatctgacccagcctg

SEQ ID NO: 21379 - DNA, 1885 bp, Artificial sequence
  DNA replication origin
taaaaacaaagtgagtaatcggcggacccaccctccaggcggggccgggacccgggagctagccgagccaccgggcacgccagcctcttcgtcctcggcgaggcgcgcacttggccccgacccccggcagcggctgtgcgtgcagcctcttcgtcctccgcgcggcgtgcacttgctcccggcccctgcgccgggcggcggcggggcagcgcgcaggcgcggccggattccgggcagtgacgcgacggcgggccgcgcggcgcatttccgcctctggcgaatggctcgtctgtagtgcacgccgcgggcccagctgcgaccccggccccgcccccgggaccccggccatggacggtgaggtcgccctctgaccccgcggggtggcatcgccggggccgccgcggctgtggcgggagcccccgcgccgctttccgccccttcctgcgccgacgggcgctgcgcagggagcggtcggcctgccggatggtggcgcggggcggggcaggcggggaggggtctgactcagtttcccctctgggtggagggggtggcccttgactcagcatcctccctgggtgggggagcagagggaaccttgactcagtttccctccacaccgtccatgggggcagctctggcttcgtttccctattaggggagaacgcatctgattcagtttcctctctggagggaggtggggcgtgccctccctcaattttccttaagaaagtacaacaggccctgattcagcttccctctggagaagaaggattccttaccccgttttccctcaagaagcaggtgtttctggttcctttcctccaccccttagtttcaccgcaggttctagggagcaggtcctgactcagttcccctgggagggagcctggcttctcctctccgtggagagcagattcctccttgtgagaatgggcattgggtgtgtgctgaccctgatctccctcccctttcagaactgttccccctcatcttcccggcaggtaagtggcccccgcggcggtcggggaggtgctccctggggtagggcagtgggggcagccgcctaatggggctgcggtgtcccctggcagagccagcccaggcctctggcccctatgtggagatcattgagcagcccaagcagcggggcatgcgcttccgctacaagtgcgaggggcgctccgcgggcagcatcccaggcgagaggagcacagataccaccaagacccaccccaccatcaaggtcagcactgcgccagggtgtgcggggaagggactgtggaaccccagccctctgtgtttgggagtcaggtttggatgtctgggcctctgtactttggacagatcaatggctacacaggaccagggacagtgcgcatctccctggtcaccaaggaccctcctcaccggcctcacccccacgagcttgtaggaaaggactgccgggatggcttctatgaggctgagctctgcccggaccgctgcatccacaggtgaggtccctgcaggctaggaggcccagcatgaggggacaggaggcgggctatgaagtagccgctacagtgttactcctttctggacccagggcagaattcctcactccttgccctgactcagctctgcaagtaaactgcctttgtcttgaaattatctatttgtacgtttactctagcagatgagttccaggggatacggatgggtccctaatcacttctgaattcctgacccctgtagctggaaggacaagtccctcagagtcacgtctcttgtttgaggaagaaaaccattgaaccagcactctcccctggagttgacattgcagttgacagagacaggctgtaaaaaaatatacaggccgggcatagtggctcatgcttataatcct

SEQ ID NO: 21380 - DNA, 1021 bp, Artificial sequence
  DNA replication origin
cggggtcccgggggcggggccggggtcgcagctgggcccgcggcgtgcactacagacgagccattcgccagaggcggaaatgcgccgcgcggcccgccgtcgcgtcactgcccggaatccggccgcgcctgcgcgctgccccgccgccgcccggcgcaggggccgggagcaagtgcacgccgcgcggaggacgaagaggctgcacgcacagccgctgccgggggtcggggccaagtgcgcgcctcgccgaggacgaagaggctggcgtgcccggtggctcggctagctcccgggtcccggccccgcctggagggtgggtccgccgattactcactttgtttttaggggatttcagggccccctcccgccgatcggcggagtttggtgatgtcactctgggccgggtctggagcaaagccagggctactgggctgcggccgcccgccccgcgcagggaaaagcccgaccgggccttctgctccgcagaggccgggtggttgaactccgcgcgggtttcctaaccgctaaaggtgcctttcggtggtggctgtctcagaagcacgttaaaatgtcctacccaccccaatctagatgcggctgtgggggaatgggagcggccggacctcccagcctgacagtgcatcaagagctttgcggagcctacagcccggatgggacgactgaggccctcccgctggcgagctggccgagggctcgtccctctccagctaaagcgccagcttacgatacagccaaactgccggctctcatcggctgtgggagcaggaggcccccaggggtaaatcccggagcctcgtctctgaagcctggcgcttgtgtctcagaaggtgcgggacccacagggacacttgaatcagcaggctcacgaccccccacccccctgcccccgcctgtgtttgccctggacctccagctagggctgaccactaattctgtcatgtgaccccacagtgcaggtagctcccccaagaccaagcccaaggcgcgtccgtgtggaggc

SEQ ID NO: 21381 - DNA, 844 bp, Artificial sequence
  DNA replication origin
ctccgcatacacgtgaccagcttcgcacccggtgggcgtcacgtgacggactcagtagaccgccactggctgtgcacgttatggggtttccacctagggctcggcctgaggcttgtaacactccgttttcccccgagtcacaggggcagtcttgcccctcgcagctgggtcgcggtgtctctcaaaggtccccctctacaggggcttcgtgaggcccgggcccacagggcgctcggtcccggaagtgacgtctcccagaggggccggaagtggcagtggagggagggaagatggcggaggtggtgagtccggtgcccggggcggggcggagggagccaggggaggtgggtagagcccgaggccccccagtagccgaccctggcgtcgcgctgtctccccagggggagataatcgagggctgccgcctacccgtgctgcggcggaaccaggacaacgaagatgagtggcgtgagtgacgttggggggcgggactaaggaacctgagggcgaggggcgggagtcaactgaaatcccgggatggggaggggcgtctggaattatggggcgggcgaggcgcagatactttgatgaaggggcgtggctcttagctgctccgagaggtacagggcggggcctggaaaggggtggcacttgtgactgaaggaggcttaggagagacctaagtgctggagcttagggatccggcctgggggtggagttcaggtcgtggaagggtggagtctcatagcctggcctgtctaaggcccctgtctatgctattctcatagccctggccgagatcctgagcgtgaaggacatcagtggccggaagcttttctacgtc

SEQ ID NO: 21382 - DNA, 1273 bp, Artificial sequence
  DNA replication origin
agggggtaaggggactacacttcccgtgaagctccgcggcggcttcccgtgaggccccgcggaggcttcctgagaggtcctgcgcgctttccgcgccagcttcagtgtcagctcgcgagccctggcgtcgcgtaggagggaggatggagagcggcgacgaagcggccatcgagaggcaccgcgtccacttgcgctccgccacattgcgcgacgccgtacccgccacactgcatctgctgccctgcgaggttgcggtggacgggcccgccccggtggggcgcttcttcacgcccgccatccgccagggccccgagggtgagccctgcggccggactacggctcccggcagcccccgcgccggcctgcgcgcttctcatcgcctgggctcctggggatcgtggtccgtccggaggtggcgggagggcagctccgggctcgacccagcgtgggtcctgcctgaggccctttgcgcctcccgctccaggactcgaagtgtcgtttcggggccgctgtctacggggagaggaggtggcggtgccgcctggcctcgtgggatacgtgatggtgacagaagagaagaaggtgtcgatggggaagccagaccccttgcgggattccgggactgacgaccaagaggaggagccgctggagcgggacttcgtgagcaaagggatagggttgaaagggggtgcgggcgggagctgtagtcccgatgctgagccaggccccttccccaggaccgcttcattggagccactgccaacttcagccgcttcaccctgtggggtctggagaccatccctggcccggatgccaaagtgcgtggggccttaacttggcccagccttgcggcagcggtgagtagacgaggagttccgtcttgcccccgggtggatgggctggggagcacaattgcgcagacggagcctggaggattctactgggtagtgtgtgggaagcgtagctccctgaccactcttcctagcatgtctagaagcggttattctgaacagctgggtccttcctcgggtatgggggccagcttgccgccctgtcttacaagtccaacagtagaggcgactcctgttgcagattcacgcacaggtgcccgaggactgagaaccagagcttgaaattcaaagctgcgatcccttcacagcagtaaaccagctctttggaaccgattccatcaccccaataaaggagctcttcacagcacctgtgagtctgggcgccttagagcccctaagccagcatgggccctttccccctc

SEQ ID NO: 21383 - DNA, 2085 bp, Artificial sequence
  DNA replication origin
ctgaggggagactgcaggcccgaacccagccccgccttggcctccctcccatgcttatcagtgcccaaaatctggaggtggccaaggtggcagggggctggcgtgtcaatgccaccttgagtgtgcacacacccagctgggttgcaacagcacccaggctgggccacaactttgctccaccccagagcgggtgccaggagtggggagaggccagggagcgggagcaggcacttttaagcctgtgggggcaaaaggcttcctgggccctgaagagcgcagggatgctggggtctggagctgcagctgggtggctgcggctgcaccaggggcactggctcctgccctgccaactcggcagggggtgaggctttcacctgttcccagctcccgctggccccttgggccacacagccccggctgtgcctcctcctctgcgactcccacgctgcagcctgcatcttggcagctgcagctcccgacgggctgccgctgccattaggagaagccaggtgaggaatatttaagaactctttgtactacttttgcaagttctctctaagtccaaaactatgttcaataagagttgagaaaagtaatgagatggtggtatggtctaaatgtttgtctccctaaaatttacaggttgaaatcccaaccgtaaaggcgatggaactaggagatagggcttggggtgagatgattagtcatgagggtggaactgtcatgaatgagatcagtgcccttattaaaaagggccaagagggtgcggtggctcacgcctgtaatcccagcactttgggaggctgaggcgggcggatcacaaggtcaggagatcgagaccatcctggctaacacggtgagaccccgtctctactaaaaatacaaaaaaatcagccgggcgtggtggcgggcgcctgtagttccagctgctccggaggctgaggcaggagaatggcatgaacccgggaggcagagcttgcagtgagccgagatcacgccactgcactctagcctgggtgacagagcgagactccgtctcaaaaaaaaaaaaaaaaaaaaaagggccaagaaagctgccttgccccttccaccatgcgaggatacggcaagaaggcgccatctgtgaaccaggaaatgggtccttggcagataccgaatctgatagtgtcttgatcttggacttcccagccttcagactgtgagaaataaacttctgttgtttataaactacccagtgtatggggttttgttttagcagcccaaacagactaagacagatggtcattatatataagtaagagaagccactcccacctctaacccttggttcctagactgttgtattgtgaccaaaagagaaaaaacatcacatataggtcattggttcagagcactgtactgtgattacttagattctgtatttgtctatttggcatccattaacctaagggccaaactaatggctaaagttgtttccatctttcctgtgatccagagcccatactctgaactactttcttatgtaaccctcaatcaccaaaccaatatttctcctgccctgaatcaaatcagggccaggtgctagacaacaagggacagcccctatgcccccaaacccaccagagttattcaaattagccaatcctatgctctttctgaggtaggagaccagtaggacttgttttctgatcacaacactgctgaccaaaacaggatctgatctagacaggataaagtgaggaaactggcaggaaccagcagatagcaaggaaagtgatccctggctgccctcattattcattagcataagacactcccacaagtactgtgaccatttagaaatgccatggcaatgacctggaagctaccacccctttccatgccaacaacttggaggttactgtctctttcctagaaagttctaaataactagcccctcaatttgaattgactcacgccttaatttgaatataattgaaaatgcatttaagtgaatataaacacagttgtcaagaccccatacatttctttttttttttcttctttttttgagataaagtctcaccatgtcatccaggctggagt

SEQ ID NO: 21384 - DNA, 952 bp, Artificial sequence
  DNA replication origin
cccagtctgggaagtgaggagcgcctcttcccagccgccatcccatctaggaagtgaggagcgtctctgcccggctgcccatcgtctgagatgtggggagcgccgccgccctgtctgggacttgaggagcgcctctgcccggccgccctgtctgggatgtgaggagcgcctctgcccggccgtgaccctgtctgggaggtgaggagcgtctctgcccggccgccccgtctgagaagtgaggagcccctccccccagcagccgccccgtctgagaagtgaggagcccctccgcccggcagccacccgatctgggaagtgaggagcgtctccgcccggcagccgccccgtccgggagggaggtggggggtcagcccccgcccggccagccgccccgtccgggaggtgggggcgcctctgcccggccaccccttctgggaagtgaggagcccctctgcccggccaccaccccgtctggaaggtgtacccaacagctcactgagaacgggccatgatgacaatggcggttttgtggaatagaaaagggggaaaggtggggaaaagattgagaaatcggatggtttctgtgtctgtgtagaaagaagtagacatgggagacttttcattttgttctgtactaagaaaaattcttctgccttgggatcctgttgatctatgaccttacccccaaccctgtgctctctgaaacatgtgctgtgtccactcagggttaaatggattaagggcggtgcaagatgtgctttgttaaacagatggtcgaaggcagcatgctcgttaagagtcatcaccactccctaatctcaagtacccagggacacaaacactgcggaaggccacagggtcctctgcctaggaaaaccagagacctttgttcacttgtttatctgctgaccttccctccactattgtcctatgaccctgccaaatcccctct

SEQ ID NO: 21385 - DNA, 1195 bp, Artificial sequence
  DNA replication origin
tgcaccgcccttaatccatttaaccctgagtggacacagcacatgtttcagagagcacagggttgggggtaaggtcatagatcaacaggatcccaaggcagaagaatttttcttagtacagaacaaaatgaaaagtctcccatgtctacttctttctacacagacacagaaaccatccgatttctcaatcttttccccacctttcccccttttctattccacaaaaccgccattgtcatcatggcccgttctcagtgagctgttgggtacaccttccagacggggtggtggccgggcagaggggctcctcacttcccagaaggggtggccgggcagaggcgcccccacctcccggacggggcggctggccgggcgggggctgaccccccacctccctcccggacggggcggctgccgggcggagacgctcctcacttcccagatcgggtggctgccgggcggaggggctcctcacttctcagacggggcggctgctggggggaggggctcctcacttctcagacggggcggccgggcagagacgctcctcacctcccagacagggtcacggccgggcagaggcgctcctcacatcccagacagggcggccgggcagaggcgctcctcaagtcccagacagggcggcggcgctccccacatctcagacgatgggcagccgggcagagacgctcctcacttcctagatgggatggcggctgggaagaggcgctcctcacttcccagactgggcagccaggcagaggggctcctcacatcccagacgatgggcggccaggcagagacgctcctcacttcccagatggcgtggcagccgggcagaggctgcaatctcggcactttgggaggccaaggcaggcggctgggaggtggaggttgtagcgagccgagatcaggccactgcactccagcctgggcaccattgagcactgagtgaacgagactctgtctgcaatcccagcacttcgggaggccgaggctggcggatcactcgcggttaggagctggagaccagcccggccaacacagcaaaaccctgtctccaccaaaaaaatacgaaaaccagtcaggcgtggcagtgcgcgcctgcaatcgcaggcactcggcaggctgaggcaggagaatcaggcagggaggttgcagtgagccgagatggcagcagtacagtccagcttca

SEQ ID NO: 21386 - DNA, 1127 bp, Artificial sequence
  DNA replication origin
ccgtgtggaaggacagctgtatgcacccctggaggctgtccatgtgccctgcctgtgtcctggccgccctgcccgccctctgctcctgcctctgcagccccgatgcccggcccccgcacggctggatgtccatgccctttacaccacatccactggtctcacgtgccatgcccacttgccacccctgttcgtgaactttgccgacctctttctgcctttcccgcagcctccagagggggccgggctgggcttctttgaggagctctgggattcctgcctgccagagggtgctgagagtcgtgtgtggtgtccacttgggccacagggcctggagggcttggtgtcccgccacctggagccttttgtggtggtggcccagcctcctaccagctactgtgtagcaatccacctgcccccggactcaaagctgctgctgcggctggaggcggccctggcagatggagtgcctgtggccctgcggaccgatgactgggccgtgctgcccctggcgggggactacctccgtgggctggcggctgctgtctgagccccgggagaccaggtgggggcaggactgtggcccttgtgggggccaaggcacactcctgtagctctgtcgccaaaaccctgcattccgcagtgccctcgctggcttgttttcttttgggccccggttgggagcaggctcctgggggtgagggtctgtctgagtctgtttttgctgctctagcaagatccctgagacggggtaagttataataaacagaaatgtattggctcagagctctggaggctgggaagtccatagtggagggcccagagcccagtgaggacccttctgcatcttcccatgacagaggacagagtgacaggagtgaggggagagagcgaacccactcccaagataacggcctgagtccacgcaggagggcagagccctcgtggcctgaccacctcttagggtctaatcttatactgttacagtggcaatcgcatttcaacgtgagcgtgggaggggacaaacattcaaaccatagcagggtcataggccccaagaaggcttccagacagaacccggcactgtagagctacagagttccttctcacccagacacactagtgctctc

SEQ ID NO: 21387 - DNA, 1103 bp, Artificial sequence
  DNA replication origin
gtggactcaggccgttatcttgggagtgggttcgctctctcccctcactcctgtcactctgtcctctgtcatgggaagatgcagaagggtcctcactgggctctgggccctccactatggacttcccagcctccagagctctgagccaatacatttctgtttattataacttaccccgtctcagggatcttgctagagcagcaaaaacagactcagacagaccctcacccccaggagcctgctcccaaccggggcccaaaagaaaacaagccagcgagggcactgcggaatgcagggttttggcgacagagctacaggagtgtgccttggcccccacaagggccacagtcctgcccccacctggtctcccggggctcagacagcagccgccagcccacggaggtagtcccccgccaggggcagcacggcccagtcatcggtccgcagggccacaggcactccatctgccagggccgcctccagccgcagcagcagctttgagtccgggggcaggtggattgctacacagtagctggtaggaggctgggccaccaccacaaaaggctccaggtggcgggacaccaagccctccaggccctgtggcccaagtggacaccacacacgactctcagcaccctctggcaggcaggaatcccagagctcctcaaagaagcccagcccggccccctctggaggctgcgggaaaggcagaaagaggtcggcaaagttcacgaacaggggtggcaagtgggcatggcacgtgagaccagtggatgtggtgtaaagggcatggacatccagccgtgcgggggccgggcatcggggctgcagaggcaggagcagagggcgggcagggcggccaggacacaggcagggcacatggacagcctccaggggtgcatacagctgtccttccacacggaagcgcagctccagagagtagatgggctccagcgcctccggctggagcttcaacactgggagtgggcccttgacccgatgggaccccaggctcagccgtaccagggccggtgcctcctgcaccatcagtgctgccacaaagccctggttctcggccaccagtgaagaggccagtgcaggtg

SEQ ID NO: 21388 - DNA, 1591 bp, Artificial sequence
  DNA replication origin
aacctcatcttcgtgattccctcctaatcccccatccaggtttccctgctggccctgagcatggagtaccctgcgcagctgtggcccgacgcctctgcggccgaagtggccgccacctccctgttggacaccttggtcctcctacccccgcggccctcagctctccgtcggccactgctgctggcggccaccactgccctggcggcgggcggcgcgctgggccccacctcgggcgcctcctgccggctcctgcccctactgctcggcctggccgcgggtagcgatctggggcgaggctttgtccccgcctcggaacagcgccccttgcaggccacggcctgcgagtgcctgcgagagctagagagctgcaagcccgggctgctggggggctccctggggttgctgcggggcctgctggggcaggaaggccctgtccagccactcagcctgttgctggccctcgctttgcgcaacaccttggtgctccagtcccgggttggggctggcctggggggactgctcacggataaggtctccccaactgggggtggtccctgggattggacactagtggaggagggcgatggacgccttcagccccaggcacccagctggccggcagctgaggagggagagggggagcgtagccttacagcacgagagcacagccctgaggaggcgcgggagctgcgggctgcggtgatccagcttctggacacctcctatctgctcactcctgtggcccaggcccagctcctgtggctgctgggctgggccctgcggggtctgcagggacagccaccggcactcttcaagccgcagctggtacggctgctaggcacagcacagctgacactgttgcacgccatgcttgcgctcaaggcggcctttggtgaggccttgttcacagcccaggatgaagcgttgctgctccgccggctcaccttggctgcccagcaccctgctctgcctccgcccacccatctcttttaccttcactgcgtcctgagcttccctgagaactggccgctgggccctgaaggtgaggaggctgccccactgctgctagggccccagctatgccgtggtctcctgcccagtctcctgcatgacccaatggccctcctggcccgcctgcatttactgtgcctgctctgtgccgaggaggaagaagaggagaaaggccagcttccaagcccacggcactacctggaagagctgctggctggcttgcggcagcgggcagccctggatgggggcccccgggccttggccactctctgcttccaggcctcgtatctggtggcctgctgcctggctgggcaacctacggtgctgacccccttgatccacggactggcccagctgtaccaagcccggcccatgctggctccccactttgtggacctcttggatcaggtggactctgagctgagggagcccctgaaggtggtgttgcggcaggtggtggtgtccaggccgggcagggatgaagctctttgctggcacctgcaaatgctggcaaaggtggcagatggagatgcccagagtgctaccctcaactttctacaggccgcggctgcccactgca

SEQ ID NO: 21389 - DNA, 826 bp, Artificial sequence
  DNA replication origin
tcgtgctgtaaggctacgctccccctctccctcctcagctgccggccagctgggtgcctggggctgaaggcgtccatcgccctcctccactagtgtccaatcccagggaccacccccagttggggagaccttatccgtgagcagtccccccaggccagccccaacccgggactggagcaccaaggtgttgcgcaaagcgagggccagcaacaggctgagtggctggacagggccttcctgccccagcaggccccgcagcaaccccagggagccccccagcagcccgggcttgcagctctctagctctcgcaggcactcgcaggccgtggcctgcaaggggcgctgttccgaggcggggacaaagcctcgccccagatcgctacccgcggccaggccgagcagtaggggcaggagccggcaggaggcgcccgaggtggggcccagcgcgccgcccgccgccagggcagtggtggccgccagcagcagtggccgacggagagctgagggccgcgggggtaggaggaccaaggtgtccaacagggaggtggcggccacttcggccgcagaggcgtcgggccacagctgcgcagggtactccatgctcagggccagcagggaaacctggatgggggattaggagggaatcacgaagatgaggttcatgacgcggcgggctggggtgaccctgcggaacggcgcaggggacgcgtgggggcctaccttggtctgttcgctcagcttctcacttctcaggtcgctcagcaggtcgcgacccaaatcctccccctcgggacctgccatgaaggcagacgggctggcccggaag

SEQ ID NO: 21390 - DNA, 2304 bp, Artificial sequence
  DNA replication origin
cgcgcaggcccccttccccgaaaccgccgcaggccggggcaggaaaggcggaggggagtgggtaggggtggcggagcggggtgggcctgggccccagatgccgggtaccgcggcgcagggctgcgatcccgcggccctcggcggacagcggcccggtcccaccagcgcccgccaagccgcgcagggcggcagccagcgcgccccccgccggcgcccgggcacaccgcaccctgcgccagacgcgcggccccggggggcgtgggtgcgggtcctggggctcccggagtggcccctgggggtgaccaaggtgcggtcgcagggcgcccgcaggaaaagcgccccagctgaaccggtccggcgggcgccgcagggcttggcttcgcttccctgacgcctgcccgggcccccagcccgctcggcttgggggcgaggagccggcgccgcggttgcggccagccaggagcttctgacctttgtttgcccgaggccgcgctggcggcccgcaggggtcgtgacggcgagggcggggcagggccctaagtcgaaaacaacgggatccatactcgggaagtgcgggctgtcagggcctggccggtcacggggctcgaggcatgcctagcgatggggaaaacaggcccaggaggagggcggccttgccaaccgagatctggggccaagccgggccggaacccagcactccagacttcagtgggctggattctggctgtttgggggcattcgggggtctgggcggcggtctctcccaggccagaggcccaggttgcaggtgccccacagaccaccggtttccagggcacagaaccgccggcgcccaaacctcaccacccctctggctccaattagccgctttgaagatgaaacaggcctgagcccccatgcaagccagtgccagctggcctctccctaccccatcctgctccagatgggaggtggtggagagttgaggggtggagagtgccaaaaaggaggctgtctgggtgcccttggggatggagagatagagacccactcggagggacaggtccagccagaaggcccggtcccggctcctctaggccctggctccacagttgactcacaggcagcagccccaaactacttccctctaggtgcctcagtttccccatctataaaatgggagtgataactcccacccaagaggctgtggggtgaggcagcctggctaattaaacccaagatgaaagaggcaggatgagagcagccctggggaggggaggcagcctgcagtaggagccagtctggtttctctgtctgagcccagagggtgctggtaactgcacatccccggccctcaccaccctcacggtgaggcaggaatgatcattaaacttcttgcagagttgagaagacaggtttccaaggatcagggggcctgacactggctctggccccggctcagcctctgacagcgtggcctctgcacacctcctgcctgagtcttgactccttgaggctgagggtctggagggagggaacccacttgtggtctccaatactgcagtggacgaatccgcatggacttactgaggctcacagcaaccccaggtaccgagagtgggtatcagatgaggaaagggaagcccacagaggtacggtctctcagtcacagagcccctcagaggtggagcctcgacttccacaaacagccccttgttgcatctgacctggtcctccccccacaccaggtaccctcggccctcttgggtgtccaggtccctggatgggccctgttctcacctgtctgctcccctattggcgggtggtgctggctctgtccctggcaaggccaggcatggagctgagctcagactgtcaccggactcacccgggacagcaacatcccagtcgagggcccaggtgtgggccactgccggatgctgagctgggaattccccactccacgccctccctcatttcttctcctgctgagtttctgtcctccccatgcagcccagttgtgggcagacactaaacacaaggcttgtaaaagggaaagtcagcttcccaaggggtcctgagcctcagttttctcatctgtaaaatcgggctacaacaaacacactctcgcagcactggctgctggggatacaggaaggcttaggaaagaacgagtcaataggcaaagccatggagatagagcagatagtgggtgctgggccagggggaagggagacacagtgacagctaatgagtacagggttttctttggggccatgaaaatgttctgagatttagtgatgatggttgtacagctctgtgagg

SEQ ID NO: 21391 - DNA, 1665 bp, Artificial sequence
  DNA replication origin
cggtgatctgatctaattagcttggggtggcccggggagcgacggcgcatgcgttgggaaataacggtgacaacccacctatttgttacctgtcgaaccggtttccattccgctgcgggtgaggtggcctcgcggcccgggcggggcggccgggcggggcggggtcggggggcgagcttcgggcactcagcccctggctgcccagccggcccggcccccgcgggacctcctagccaggcgtactggcgtttgcaaacaggagtttcggagcgagcggagccgggagggagggggcaacgttatttgcaccggcgctggcacgctccgcgggtgatgacacgaaactcgccccactggggccggcccaacccggcgcgcccgaggctcctggggaggcgcgaagccgccgggcgggaacgggcggcccggtccgcacttgttgaaccgggcctgggcccaggcggcgcgggatcccaaaggcttggctaagcaactcgtggctcagccggggaggtgtttgctgggcgccggctttgtgcgaaaaggcacgcagggccgcaggagcggccccggccggtgtgtggggaggcacggaccgcgcgaccgagtacccgtcggagaacccgccttctgcccggagggcttcacggaggaagtggcttcaactgcgcggagtgcgccgagagcccgacagacccccgtgtcttggccagtgggacttatgcatcctcaaaaaaactcctccttgtcccaaatgggtggatttcaggtgcagccaggctggtggagcgcggagggctggggacctcagaccgggaaaggctcagccgcctttgccctgctgcggccaccgcggagagcttcctacccacggcctgcccagggctgaggttcagcctgggacccgcgcccccagccactcttcatactctcctcaggccccaggcccacgtggagggatgcccccgctcctcagaggcctccatgaagcccacactctcatcgtgacacttgggcgctggctgggcttccttcactcgctgacctacttaagggcagggatggggcgttcgtgtttgcctcttcccctgcctttctaagggctgtgacctccactctgatcccagccagacctttgagttcaactgacattaagtgaacacctggtatgtgcctatcttttgaggtgaatccaggagaaacaaccttaaacacaatctgtctaggacagaggtgcagttagttcattcattcaacaaatattggttgagcagttttgttgtgccaagccctgatgggctggtacacagtgggtgctcggtggatactacggtgaagtcttcacagatgtccctagacacaaggggcagtcttccccatcaagggagcaactccaatgtccagagggacaggacactgggtagataaagtgaagccagccaggggaacccctccctgcacaagtgagttacaggatgtggaatggggccccaggtgggaggcggtgttgtctactgctatatctccagcatctacagctgtgcctggcacaaagtgggttatcaataaatgtttgttgaatgaatgaatatcctcttttcttgactcctgtgacccattcacctttcacagtccaacttttggtggagacatagatatgggaag

SEQ ID NO: 21392 - DNA, 1897 bp, Artificial sequence
  DNA replication origin
tccgggctcggaccttccccggaacgtgggggcgccttagcgactccttccctgttgtgcccccgttcccggcgttcagcccggccccgcaaaggtgggacggctcccggcttcagttacggaagcggcccgtgtccagcgacgagggttcgaaaatgccccgcgcgttcctggtgaagaagccgtgcgtctccacgtgcaagaggaactggagcgagctccccgacgaggagcgcggcgagatctacgtgccaggtgaggctccaaccgccctccggcctggggcacccgcggcggcgtcgaggctgcgggcgggcgggcgggcgcaggtccgcggagccaggcggcaggcgcggtgtgggcgccggggctgaatgcggccgcggcctgggctgggtgggcccgcggctctcgacccgggactcggggggcgggggcggggccggcggaagagcgctggtcggggcgggggctgcatggtggaaggggagccgctcccagggccagggggcgcggaaccgcctacccccaccccctgaaccgcggcacagaggaggcagcggggtgtgtcaccgctcaggcgaccctcggctccgacgtcgtaaatccagaaaaccgggactcgcatgaggcgggagaaggcactggagcgatgccactttggggggcggggagcgggctggagtttcggccgagatttgtgttaaaagctcagagcttcagccgctcgcacaggtccttcctcctcccccacaacactggtggccgggtcggagtgagggtcgggccggtggggggcgtgggcccccaaattttcgttgggctccggctgctagtcccgcgcagtgagccgagacggtgggacaggcgcccgctgcgccccgcttgcccttaaagcagaggtgggatcgggtctcacctctgctagaaacgcacttccttcaccttgcggagggcacaattgcatggaaagcagctgcagggagcccaccccacagcggagggccaggcccggggaagctggtgtacccagttatttttggcagacgcctagacagcgtcgactgtgagagttgcttcttcctccagcggcatcttcccctgaacgccccaagaacactcctaccccttctgtcctcccccacccccaacaaagtctttggtctggagaaagcctgcttccttccgaacgccccctccccaggccttgggggcggggcgtggacgctctgaacgcccagcccagcccctccgaggggggaggggaggagtaattaaccaactgactttgacccttgatctgcagactccctggcaccgccccaggccttgtaggaaagtggggaaatgagggcagcagtgaggggccccgtgagggctcttgctcagtttccctcctgaataagctgttggagacagtgtcctggtgaggtctttgtggcctgaccttccaggacccagtggcctgtggcgctggcaggatgtttcacagcttaacctgatctcaaggggacccctcttccaccgttccttaaaacaagggaatgtgccagaagaccctggtaaccccagtggggaaactgaggcaaaaagggaagtgagtggcctccccacctgaggcagattagggtgtgggctcagaattctgtgtatagcttcttgcttggccacactccctggtgagctggctggttctctacctgggggttggtgggggcacgcagagggccagagccccctccccgctccgccctccgccctccaccctcacctgtgtttgacttgctgcttagctgctccttgggatctgataaactgaacttggaccgtggtaaaggtgagctgagccctgagccaggctcagtgtgctgttatttttagttttatttcacatccc

SEQ ID NO: 21393 - DNA, 2374 bp, Artificial sequence
  DNA replication origin
ccccagcttttaagggacacgcggcacggagagtgggccggtgataggcgacagtgtgggagctggggtcagagttcatagggtcgcagaggccgcgtgccgcgtctccctccagtccccgggggactgacccccacaacaaccccgtgccgccgttccgggcccctccttccaacggccacgtgcggcctgcgcgtgcgcactcgcccagtttggcgcccaccaggcagtggggaaggggaaggggaaggggaagagggtgagggtggcagggtggggacagggaatgggaagcagtggtggggatgtgggtggtggaccaggggcgagggcaggggacaatgtctgtggagaaggggggtctgtttaggtttccgctcttggacgggagggagcggcggggtaagcagcctaggaggactagggagctccacaagtcccgcggccagggcgccccaagcgaggccggggtccgcgaacggtcgccactggagcggggctgcaagggggtgccgatgctgcgagagaaaacctggggaccttggaacgggctcatggtaattgggaagagagtggagctcctgactagaaacactcgaaagccgaagctggagtctgagtactggagactggaagatgtggaaaagacggtcttgaaagggaagtcaggcccgagtcaggaaaggatggatgtgaagctgctataccgtggagcaagtgcatcacaagcttcagcagatttggggaaagacagcccaaggggtatttggggaaagcaagaggtcaaacacgaaataaaggctaaatctaagagtgcagggatgacagcagggcctatgaaggggtctgggtttgaagagaggttgaggtctgctggggagaaggtagggaccagtggagaggacttgagatccaatggatataaactgggacaggatgagaaggggttgaggtctagtgtagacaagatgagatcaagtgtagagaagctgaggtctactagtgagaagctggtgtgcaggggagagaagcaggggtccagtggagtgaagctgaggtccagtggcagaaagctgagatcaagtggagagaatttgagatcaagtagagagaagctgagatggagtggagagaagctgggaactagtggagagaagctgggaaccagtgatgagaagctgaggttgagtggagagatgctgagatcaatcagagagaagctgaggttgagtggagagaagctgggaaccagtgatgagaagctgaggttgagtggagagaagctgaggttgagtggagagaagctgagatcaagcagagagaagctgaggttgagtggagagaagctgggaaccagtgatgagaagctgaggttgagtggagagaagctaagatcaagcagagagaagctgaggttgagtggagagaagctaagatcaagcagagagaagctgagattgagtggagagaagctgggaacaagtgatgagaagctgaggttgagtggagagaagctgagatcaagcagagagaagctgggaaccagtggagagaagctgagatcaagcagagagaagctgaggttgagtggagagaagctggggtcaagtgcggagaagctgagatctagtgaggagaagttagggaccagcggggagaaattggagggttcaagaatggggagcataaatgagaagaacattgaaaaagtggtagaagttactggcgatgaaagagtgatggcatttactcatgatgagatggaaattccttttgaaagtgtcaaagggagtgaggaactacaagggactgagaaaggagtgggagttgaggggggcatcttgagtgaagtgaaagatatcactgatgaatctgtttctatggaaaaaaaagatattataggtgaaggtaccagtgaatgaggcagatgaaggattgacaccaaagaaggaaagaggcagacaggagaagtactgaaagtcagaggagaaattagagccagacagaacattattgacactgaaggggtaaagttgagaaaggaaaggagagagtctgagcctaaaataaaagagagtggaagtgaggaaaagagcttctggggctgaaggcggaggccaggatcaaaggaagcaaagaggagtctctggttcagagggaagtgggaacatatggaggagaaagagaagacttggtaatgtgttgacagaggacacttggatattgggagaaaaggtgtgactgggagctcatagggaaatgtttgagaaaaggatggaggatgggctagaaggatttagtctgacactaaatggggtctatgagatggagaattgcagcaggataaagggtagattttgagagttgtggaaga

SEQ ID NO: 21394 - DNA, 1537 bp, Artificial sequence
  DNA replication origin
acgcggcctctgcgaccctatgaactctgaccccagctcccacactgtcgcctatcaccggcccactctccgtgccgcgtgtcccttaaaagctggggcctgggacaggaacgacagacaatgcagccaatggcgtcacgcgcggtgccccgctacccaatcgaaaggcgtggctgagggaaacgcggtgggaaccgcccccgactccaggcgactccttggccgggcgggggagagcgtccccgtcagctgagagcatcctcactcggtcagttcctcgggcgagttacggggacgacctgcgggagcacgcgggcagtggccggacgctgaagcccaggagagcgatggagacgtatgcggaggttgggaaggagggcaaggtagagaaaggatgaagacccccaccccagcctcccctcactccatgaaagcccgtgatgcccaatcatgcggtggtgtgtgtgtgtctgtgtgtgtgtggtctgcctctgtgtgtttctgtgtgtgtctgtgtgtgtatagtctgcatgtgtctgtttctctgtgtgtctgtgtgtatgtcgatgtgcctgcatatgtctgtgtgtgtgtgtatctgtgtatgtctgtatttgtgtctctgtgtgtctgtgtgtctgtgtgtgtctcagtgtgtgtctgtgtctttgtgtgtctctgtgtatctgtgtgtgtgtctgtgtgtctccgtgtctctgtgtgtgtgtgtatggcctgtgtgtgtctgtgtgtgtgcacgtatgcgtccatgtgggtgtttgtgcgtgcatgtctgtgtctgtctctgtgtgtgtctgtgcatgtctgtgtgtgtgtgtctgtgtgtctgtgtctgtgtatggtctgcgtgtgtctttgtgtctgtgtctgtctgtgtgtatggtctgcatgtgtgcatgtatgcatctgtgtgtgtctctgtgtgtatctgtgtgtgcacgcatgtgcctgtgtgtgtctgcgcaggtctgtgtctctttgtgtctgagtgtgtgtctgtctctgtgtctatgtatggtctgcgtgcatctttatgtctgtgtgtgtgtgtctctgtgtgtgtgtatggtctgcgtgtgtctgtgtgtgtgtgtctgtgtatttctgggtctgtgtgtgtgtttgcatgtgtctgtgtgtgtctgtatccgtgtgtctttgtatatctgtgtgtgtctatgtcagtgtgtctgtgtgtgcatctgtgtgtgtctgtgtgcctgtgtatgatctgtgtatgtcgttgtgtgtgtctgtgtgtgtgtttctctgtgcctgtgtgtttgtgtgtgtctgtgtatctgtgtgtgtttctatgtgtgtctgtgtgtgcgtgtgtctgtgtttgtctcgtgtgtctgtgtgtgtgtatgtgcccatgtgtctctgtgtgtatgtgtgtgtctgcgcaagtgagagaaaggagacttgagcaagggagtggggagcctctgtggcacctgtgtgcggactgatgaggatgccaagggaggcagggttttgcctttgtccttac

SEQ ID NO: 21395 - DNA, 1063 bp, Artificial sequence
  DNA replication origin
gtttaaccaaaagggtgttgccggtaccctgagccttttgccagcattgtcaagggctgtttccagcctgtactttgggctttttcctgcccagcaggcaaagacatacaagaaatctggccctagggtgaggtgaactgggagtggtaatgtggcatctatatttcccttatcaactgaactgaggaagagtcctcctggtgttacagttggctccataactcctgggaacttgtgagcggttctgggaggaagggctagatcccttttctggttaggaaataggtgtggagaacttgggattcatttttgtgctagggtttatgggggtaggggcaaacctggaagacttctggggttcctaggtcccagcttctgggtgtcgcgccttcccacagggagcctgctgtcactggagagagggctgaggatgctgcaggggtgccctccttggtgtctccaggatctgatcatactgccttggcagaaagtgtgcctggtggacctttgagctgtgggaagggaagtaaggacaacaggcctccttgctacaaaaccagggtttttatttgcgaaggagaacaggccgggatcaagtgagctatgattccttcagggctatgggtgagggtagaggctgttcctcagcttcctggggagaggtgtcagggtccctggggctctgctgactgtggccagttatgatgcccatgctgccctgtgtcttgcagggcctggcacctgtggtggtggtgatagggggtttgggctttccctgagaggatgtggggcagagtgagggtgtggctagtggcactgctagggaaggagacatcttgccggagagaggggtctgggataccctggtcactggagatcccagattagggtctggctgagctctggctactctaaggctccccctttagggcaacaagggtgttccggagaatcagggtgctggcctgcagaggagaaacaggtccttgaagtcccctgctccctgagtcaggctgccattctttctgcaccttagatgctccctcgctccccacacccctgc

SEQ ID NO: 21396 - DNA, 1436 bp, Artificial sequence
  DNA replication origin
cccctcgcggaacggccggcgtcgcgcctttcttcttaggggcgcgctctcgactggagcatgcggcgtccaaacccggcccgggggcggcgaggaaaaagcgcgcgagaggtctcggcgcgcgcgccccacccaaggctgttcctgtctgcgcgtcaccctccctcggcagccgggtccgtctcgggagcaggtggcagggatgcctgcgcccgggaggggcgggtgctggcgcggcgaggggtgatgctgggaagacggggtcccggttggggcgtgggtgcctgcgattaaggccttgcaccgcaaggcttggagggggcatcgcagagaccgcggcccgttcgggagcgcatctaacgagctgcgttctcacccgtgcatcgggcgagggctggaacggcgctgtctgtcggcgcgtgcgcgcacgctcaggcccggccgccggtgccgaagccctgggccagcgaggccttcccggatgggcctgagtgagggtggagccgagtttagggaagtgacccaggcgggcaccgcccggaaaccaccccgccccctgtatacggcccgagggctgagaaaaccgaaggttatgtagcttgcccaggctcctgcctgcaggagatgggtctgatacacccgttgttttagggcgattccacagggttagggacctggagatgctgctgcctctcggatacgcgtttctgcattggtgagggggccgggcccagccgatctcctgtccccgcccactccggatgcggccgagtcacgtggccggcttcttctgcagttccggggagtttgggggaccagatttaccttggattgcccctccctctcctggctcgggcaccccgaagcacgacgcagagtaggaagagtttaaagacctcgaggcctctgggcacttgagtttggcatgttaatttttatcagcgacttctggggcctagcaccattcccggaagaagggagttgtcgggcagggtccttaatgggggttgcaattcttgtcttggttgggaaagagcctagctgggaacaggggtcgtttgtgtagtaactgtattaagcagttctggtgggtttgttgtaactgttcggtgtccttggggtcccatctagcattgtggggtcttggctctttctgaagaggagtcttggctcaggtgtttgggtcctccatatccgaagttctaaatcaccagttttatccaaaggctgagagcaagtactgtgagtagcaaatgagtcagtagccggtggatcttttaattctgggttcacattttggtcaaggttctgcttttcacgagttttgcatttctatcctgtaaaatgagggaaggggttgttgaactaggtgatcagaggccatggctgccattctgaggttgtgtcccatctggttctttgacagtgacttgggt

SEQ ID NO: 21397 - DNA, 1020 bp, Artificial sequence
  DNA replication origin
cgcgcattccggcaccgcccgccccttcgtgcgagaccctcatcccgcccggggcgctgggggagggggtgcggacgtcgctccccagtcgcttcccgcgcgcaggcgaccgacccgcagccgcctccctcaggcgccgtggcctgccgctcaccatgtttccggaaacgaaaaggagagggcaccgagagccgcagaagacgagagcgctgcagccgctgccgggacccgactgaacgcggcctctcccggccccttccgtttagtaggagccgcacaatgaggggtggggcgggcttccggcgctcccaccgcgagccgacgggaaatggagtccgctggccctgcgccgccgcctcgctcgctgggtaacggagtcttcccgccggccggctccgagctgcagtgcatgtagggaaatgtaggcccaggtcctgggcggcaccgcagcgcgcagcgcgagcccattggtccaatttcccaggaaccgctctgagcccggcgaggcggcgctcagtaaaatgacccgaaaacgatccccgactaagcggctctttatcccacagcaaaacggctttcttaagacccatctggtattatctggatcccttggcctgaaatttttgagtgaggttagggttttgcatttctgaatcgaagcaactattgattagcctggaatcccgacctaaagcaaaggaaatcacaagtatgaaggcgtcgtcagtcggataaacactagtactctgcatgtgtaaagccactctcgtctcctgaaaaaaggccatgtccaacgtcagtaaaacaagaataggaggaaaaggcacaggggaaaggtacaaggaaatctctgagagctttgttcttgtttaaagatgtttggcaaagtcatgaggcgttaaagggtaaagacgagggtttgtgcattcaattcaaggcttctttacatgcctttacgtgccaatgagaagaaatagatattaaaccagacttgaacccagctctcgagttgatagccag

SEQ ID NO: 21398 - DNA, 1510 bp, Artificial sequence
  DNA replication origin
gagagtacggaggctccacctgggggaggtgggggatcaccgacccctttccgaggcgctcaccgcccgatgttcggtgccgctgcagccgctcgtccagcatccggcagagcccgtctccgaagtgctgtaggatcttagcttccttcccgctgcgcagcggcagtgggtaccgtcggagggaacgcagcgcctggccgggcaggggtagggtacctggtcagggcaggcctgacctggccagcagcttttcccatcgggccacgccaggacccaccttctgaaatacgaagcgcgtgcggcgcctgctgcgggtcgcctcgtcccgccactcggtcagccagcgaacgaagagcgggttgggacaggcaggcagcgggcgcttccggcccaggcggaccggggccgccatgagcccgagggcgggtcctccggcgctccacgcccgcgggactgggacgccgccagttctggagtcgggattcgaacacctggcccagggcggggcgggggaagagggagaccgagggcaggaccgttgagatcacggggccccaaacacagggggcactaacgagaggagagcctgcggccgccctcccacccctgcgctgctctaagtggttggtcaggggcgctgtctctaacgatcttttcccttggctccactccagccagcctttgagacgcgccctttcccagcccccggagcctggaccggctccttcctgtcaccccagattcgagagcggggtctttgtgtaggcgagaggaaggcggacagcgccccctgtgacggggaggactggctgggcggcgcttaacggactaacctgagcttggcggctctaaggtctcttaagattgtcagcttcagcctcaagcttgaaggaggctggagatggagactggtcttgaaaagagtccaggagaggcgggggctaggagacaaacgggtgcaaacgtattggtgggagggacacccagaaatgggtgccggggatgaggacacaaaggtaaggcaggaggagctgcaggacccttggaggaaatggtgatcctcatccccgggatacagggcaaagagtgtgtggtggagaggaagtcggggacgtgccgagaaggcccaaaatagaactcggaatgtcgggggtcagaggcctagaggaaggaggactgtaagtaagaggtgcttgggcatcctggcagttggggaggcctgagatgggcacgcggttgggtttgggagcggaggagcaggctgcgggttaagaagcccagacacaggtagaggggagaacacttcgtcatttttgtggctaatcggaagtgggagaccctcagggaggttgaagatggaaaccctacaaagggcttcaacctgagaagcctgaaagacacgtatagctgagttggacacaggcgacccgccagggtttgaagcagcacccggcctctagctgctatgccggaagtcgcaacacgcaggtctccagcctgcgaggaaggg

SEQ ID NO: 21399 - DNA, 1433 bp, Artificial sequence
  DNA replication origin
ctgtcttttctaccttggtttcagaatcctaatggtcaccacttcttaaccaaggaggagctgctgcagaggtgtgctcagaagtcccccagggtgagcacagggatcagggaggacaggcccaagtggctctggggcccaccaaagactgccttttcttgcagtgggcccatgtgtggcccatggctggggacacagggaacatggacttgtggtggtaccaggtgctctctgagggtctcttttctgatccacaggtagcccctgggagtgctcgaccctggccagccctccgctccctccttcacaggaacctggtcctcaggacacaccagccagccaggtggggccaactgcaggagatacaggagagcatgagtgaacttcttagtagggccttagagtcacccaacaactcccagagctgatgctgttgagattggggggggtgggcctttcctcaggagcccccactgttggaatacctggagggtgtgaaaccgcagcagcgggggtgggagggtgcggtggttattggaggaggagaaagccttttcagaggagatagcatttgacacgttttaggatttggcgggtagagatgcaggataagtattccgaggaggaggaaacagcattagtgaagacaggaggaaggaaattgtctgagacacacttcttgcagacctgagaatggcgctgagcaggcccaaggaactgctctaagagccaagaagaccaggaggagcaggagccactggggtcatttgtgcagggcgccaagggggtggtgaggccagcccagctgggggcaggcaggaaagcctgccaggaatgagtgaagaaggtagagctgtgttgtcccctctgcctcccaggtactcattgaccccagagggcctggagctggcccagaagttggccgagtcagaaggcctgagcttgctgaatgtgggcatcgggcccaaggagccccctggggaggagacagcagtgccaggagcagcttcagcagagctgtgaggaggagggcagaggagtggggaaaacagggaggaggggatgggaaatgaggccaaagccccgccccaacccatcacctgcagctgaactgtggctgcctccctactgtgggtgggtggtgggtgtcgggtggcatgggtgtggggcaactgccctggcacaaggggttctggcctcacataccaacaccccccacttagtgccagtgaagcaggggtccagcagcagccactggagctgaggcctggagagtacagggtgctgttgtgtgtggacattggcgagacccgggggtgagtgaggtggggagaaacgagggagatgatcagaggaggctggggggtaggcactgccctgctctgatctaggcttccctccttgccactccaggggcgggcacaggccggagc

SEQ ID NO: 21400 - DNA, 1111 bp, Artificial sequence
  DNA replication origin
agtacccaggaggcagctgggtgcacagtgacaggaggcggaggcctcaaatggagaactgtgtggcaggaggcacggcatagctagggcctgggggtccacagaggagtacacagcagggatggagctctcaccactgcaggagaagccatcccgatgcagctcatagccctggtggcagcgacacaggaaggtcccataggagttgaagcagcgctgctcgcatggggcccccatgtcacactcgttcacatctgggggtgccaggaaaaacaggagggatgaaagcggaggaggagcccagagcctccactctacctgggctggtcaagaagggagcgcccccacctcacacctccctgcccaggacccaggagcctggcccagcccagcctcaccaacacaggagcggttgttaggccccagctggaagcccggctcgcactggcagcggaaggagccaggcaggttcacgcagcggtgctggcagtagcggtagcggcactcgtctatgtctagggatagaggcaggagaaggagggcggagggcagagggcagagggcaggtgggctcgagccggctgggactcaaggcttcaccacccataatcctgtgtccgaggagctgaattaggcagggtcagccaggacacctcccaaacactccccgctacagtcctctgtgtctgatgacggagggtgaggtggcaggggccgggggtgaagcctggcttgaatgggggtcaggtgctagggcaagggccagaccagggacacaaagccgggactacagaagctgcttcctggactcacccacacactcgggcccgatcttgcggtaaccatcagggcaggtgcactgataggagccaggcaagttatggcagtcctggctggggcgacagtcgtgcagggcctgggcacactcgtccacatctgcgagagacaccactcagcccctgcctgggatcccgcacaccacccaacatgacagatagttccaacacttgtattcggttctctcaacagcacgcgtaagagttcaccagcctggagccatcaggaaaggcacccctaacctctaaaaccacatgttgggggttgcacagga

SEQ ID NO: 21401 - DNA, 1933 bp, Artificial sequence
  DNA replication origin
acactcgggcccgatcttgcggtaaccatcagggcaggtgcactgataggagccaggcaagttatggcagtcctggctggggcgacagtcgtgcagggcctgggcacactcgtccacatctgcgagagacaccactcagcccctgcctgggatcccgcacaccacccaacatgacagatagttccaacacttgtattcggttctctcaacagcacgcgtaagagttcaccagcctggagccatcaggaaaggcacccctaacctctaaaaccacatgttgggggttgcacaggaaataaggtcctgtccaaacatccccagcaacactgattcctggactgtccttcctccaaggcctgtggctcccaggggacagacactggaaggcagacttcctgcagtgtctctgcagcaaccgaggggaggggcccggagctggctggagcagtggcacacaagctggggccacctgcggcaggtcctaaacaacatgagtgtctggatgagggtgtggacatcaccagtggcccttttgagctggggaggaacatgaggtctgagtttaagacgcctggtgagaggactggaagccaggcaccagagcagtccccactcacccacacagctgtcctgatcgtcgggctcatagcctggtgggcaggggttggggtgttgagcgggaggcactggtggcgggggtccctcgccgtgtaggtcgttgatgacggcagcggagcggggcaggcacaagtagcccccgtagtggttgatgcacttcatttcccccttgcaggcctcagggatggtcagacactcgttgacatctgcagagaggggcctgctgggcacagccagtctcctgggctggccctggagggagcggaggcaggaacccagctcggccttctctgagatgtgtggccccagcaaagccttcccactctgctcaacaagctaagtctgcctgctcaggacccctccccagggttggccaaggctggagatggggcagctgttcccactgttgccctcattctcggcctgcaagtgggtctctatccctccccacggccctagccctagctcagcccaagatggggggcctccttacccacccctggggacgctaccctcccaggttgtgatgagacaaagagctgggacaggagagtggttcagagaaggcgtacaggatccagctcctctgaggggtagggacaaggtttcctgggtttctgggagaggatgaggccacccctagctcaactggcctccagagagccagagctggcctctgtgtagcagagctgggcatagaacgggctgctgggctcccacggcagttcttggaggtggggctgtcccttggaaagcagctatcaatccctttccgggttcctgggggtgtttggtcccccaggcacacacaccccggcagtgctggctgtctgggtcccactcatagccatctgtgcattcctggaagggaaccagaagtggccagtggtcaccctaagatctcctccaactggccaggccaagactagggcctgagcctggccaccctccggcctgctccaaacaatggcccccagctctccaccagccaggggaggaagacttccccggcagcagtcaccctgggtcccggtctcttcctccctacccttcctgtcccaggccagcggccctcactgtccccaccgtgtagctgtcgggctcttcagaatcctgaggagaagctgatcccaagagcaacagtagcagcgcccagagcagtagagacccgggtaggcaggaggcgcaggggagcatcctggggctgcgagatggtggacacgggtcaggggcctctgcccgcggcacctcaactccctgtaccgggagcccgagcccagcccccgccactgcccgctcaggaccgtgcttgggc

SEQ ID NO: 21402 - DNA, 1540 bp, Artificial sequence
  DNA replication origin
gtcgcccaggctggagtgcaatggcacaatctcggctcattgcaacaactgcctcccgggtttaagagattattctgcctcagactcccgagtagctgggattagaggcacgtgccactacaccagctaatttctttgtgtttttgtaaagacagggtttcaccatgttggccaggctggtcttgaactcctgaccttgtgatctgcccaccttggcctcccaaagtgttggggttacaggcgtgagccaccgcgtcgggcctattattattattattattttaagatggagtctccctctgtcacccatggagtgcagcagtgtgatctgggctctctgcaacctccacctcccgagttcaggtgattctcctgcctcaggctcctgagtagctgcgactacaggcacgcgccaccacgcctggctaatttttatatttttagtagagacggggtttcaccatgttgtccagactggtctcgaactcctgacctcaggtgatccacctgcctcggcctctcaaagtgctgggattacaggcttgagccaccgcgtccggcccctaaagagctattatttaaccttctgccccagcagctgggagggatggtggtggcagagtggcgaggagcgggcactgcgcagttcacctgagccccaggcgctcgccgcgggacccaccagcacgtcccctcctcggcagactccctccccggggtcacgtggagggcgactgcggggataagcagggatggcaaggggaaaggaagggcgggccccaggcgggggatccccggacacgcagtgctttcccgcctggccccgcccaaagacgtgggcaaacagaggccacgcccttcctgggagccagccccgcccatactccgccccaaggacacgcccccacttcgggcggaggcggaaaccgggcgggggacgctggtgcgaggaggtcgaggaggcgccttggcacccgactctggcatcccgcacgtccgacatcagccctgccctccttctcaggggcttccattcattttgtgccaaaagggaactgccgccctcgcccccaaacttgtagctttgtggatggagggtgtgggggaggccgtgtgtagtgaaaggaccacccggctgaagacggtcctgggggtggagggcaggagggagcgagaaggacagttctgctcctgggagcctctcgttcctgggcgagggtctggggaccctggatgaagttttaggatcttttacaatgacggtctggggcagagaataaaattttgcagggagcagattgagggtctggaggactgggttaggtgggctctaggtacccaggacgatctcgggaggcgcacaatgagaatctgggggctccaggattacggtgtgggtgcacaggatgaaattctgggggcgcagattaggtaggacctaggtgagcaggatgacatttttggtgagcgtctgggggcccccgggtgagtctgggggcctggcatcaaggtcggggccccaggatcgagcactggggga

SEQ ID NO: 21403 - DNA, 1352 bp, Artificial sequence
  DNA replication origin
caaagccaaggagtgcagctgctacccaggaggcagtgggagccaatgaaagtttatcaggggtctgataaaatttcaggtcattctgaaaggtcactctggccatacagtacaggatagcttggaaggcacaacagggagccaggcacggtggctcacgcctgtaatgtcagcactttgggaggccgaggcggatgatcacttgaggccaggagttcaagacaagcctggccaacatggtgaaaccctgtctctactaacaatacaaaaattagctgggtgtgggagcgggcgcctgtaatctcagctactgcagaggctgaggcacaagaattacctgaacccaggaggcggaggttgcagtgagctgaggtcgcgccactgcactccagcttgggccacagagcaagactccatctcgaaaaaaaaaaaaaaaaaggaggggaaaggggaagggaggagaagactaggtatgaagctgctgccacaatcagaggctggaactgggccagtggccaaagggagggagtgaagtgtagatgggatgctgtgtccgtgtggatgcagtgcatacctgtctccggcagctcttgagggtgatgcctgttttggtgctgatgtcatccaggtctttcttggtgcctttggacagcttcttgcccagcacctcccgaacaaaggcctcatcaaaggcatagtaccttgtggagtcagagaacaccattgaccctccataaaagacaggaaagggagtctggcggggcctagcagggcctaggtctgaccccttccactctcaactttctgatggctgggtaaatcccatccctccctgggcctgtttcagccggcaaaatgggtatacagtcagactggttgatgtctccaccatcccagagggtgagcacctctcgatgagtagtgcctgccgggagggcggaatctggaagatgagctggtgcagtagcttgggcggcgcatgcagcagccgctcgagcatgtggaaggtgcggtaatggtccatggtgtcgctctgcagcaccgctgccgtggcgccagtctgctccaggattcccgagcgcacccgcagggccaccgcgtcggtcactggaaagcggacgctagcatcaggccccgccccgccgacgccagaggcccttaagggtttccatcccagacccctataacacctcttattcccaggcgctcgcccacttccctaaaggatgcccaagtcttagccccgccccctctcccattcaacacaaccgctccgccgactggcttccccacacgcccctcacggacccgagtaaccatcgagccagaggcgatacacgtcctcgtcgata

SEQ ID NO: 21404 - DNA, 1185 bp, Artificial sequence
  DNA replication origin
tttcagggagagagaataacatagtgaaagacactggtgcccgaaagagcctagctgctttaggaacaatgaggatagcttggtttttgaaaagcagatgtgtcgagaaaatgctaagagagagagagcgaggcttcaaaggtaggtaaaagccagattcttaagaacttccagtaccaggttggagcatttccaaaggccactaaggatgttaagcaagagagtaacatttgtaaggatgttaagcaagggagtaacattttaaaatatgcctttaactggccaagatggtgaaaccccgtttctactaaaaatacaaaaattagccgggcgtggtgggaggagcctgtaatctcagctactcgggaggctgaggcagagaactgcttgaacccgggaggcggaggttgcagtgagccgagatcgcgccactgcactccagcctgggcgacagagcgagacgctgtctcgaaaaaaaaaatgtatttaaaaagattgggctgatctgtgtgggccggaccctgcggggaggggacataaacagggagattagtaacggtgtcaaagagcaagagcaaggagagctaagcagaaagacggctggggcagcatcagtgggggtggagaggacaaacagatactagaaatattcgggaggcaaatcagccgaactgaatgtggggagagaggagtctggaagaacgcccaggtttctcgtatgagaactggtggatgttagggctgtcactgagatagggacgcaggaaagaaacaaatggggagaggcagaggtctgtctagaatatgttgagcttttgaggggcttacgggaagagtgtggatagacttggccgataggcggcccctccggatgtggacttccaggcagagctcggaggggcagaattagagacgtcagtagctcgtggggctgggggtgggattaaaaccaaggtgggagcaggtgccccaaacccaggagaggtgctcatgcgcaggatggacaaaccagtctccagcaagagcccgaggaagtcgggtcataccccatttttgcggagatttaggatagagccctgtgaaacccctaagtttaggatacaggtcaaacttaggaggtcccgaagagggcagagaaggtgggagaaaagccaggaggaagtgaggggagaagttacggggacc

SEQ ID NO: 21405 - DNA, 1460 bp, Artificial sequence
  DNA replication origin
agtccaggaagcagcagaggtcgcgcagctcacggttctctgcctgcagacgccggttgagctgcttgagctcgcggatctcgcccaggtggccctgcagctgccgattcacctcctgcatgaggcggccgcgctgcaccagtgccgccaggcgcgccgcctcctcccgccgcaggcgccgcactagctcttccttgcctagcgccgccatctcctcgtccgtcagctcctccaggccgcctgcctcggcctccatggctggtcaggcctctggagcatcgcccgcccgccgccgcggcccaggagccccacgtcgggcccggcgccactcaggctcgggctccggctccgcacgcggcaggcagtggccgaggcagcgtaggctgcagcagctacccgggctgggcacgcggcggggcgcgcgccggggcggggccgcatgtcgttatggaaggacagccaatccggtgaaacgtccccggaaaggggcggggcctgagctcaggggccgcccccctcgttccccacccactccgggtgttactgatcctcgatgtcaaggaacccgcgcgtcatcgccctccacatcggtctcaacccgaaactaggagcttcgaacctccaagtaccggatcgccccaagcttgagcctaggcctctcggctcttctgagaaacaagattcaggcgtccgcccctgactcctgcccatcccccacagaagtcagatggaccgctctccagtccctctttacctttgatcaaattcggaagtctcggcccactaaggatcgctcctggttcctcggaaccctgagtccaaacgtcctagctcaccaatagactaccctccctcccagggagcgtttcctgcctggggggaggaacatacaggattcgtttgttcaataaacgttttttatgtgcaaggcccatgcagaaataaatttaaccaaaataccgattccatcctcaaggaggtcgcagtctgtccgggaagtcaagctgtgttaagcaagaaataaatccgggaggagtatggtctgagggtccttaagagggttcccaaaagagatgctatccaagaggctctggtagatccataggactttgccaagtaaagagctatttcagggagagagaataacatagtgaaagacactggtgcccgaaagagcctagctgctttaggaacaatgaggatagcttggtttttgaaaagcagatgtgtcgagaaaatgctaagagagagagagcgaggcttcaaaggtaggtaaaagccagattcttaagaacttccagtaccaggttggagcatttccaaaggccactaaggatgttaagcaagagagtaacatttgtaaggatgttaagcaagggagtaacattttaaaatatgcctttaactggccaagatggtgaaaccccgtttctactaaaaatacaaaaattagccgggcg

SEQ ID NO: 21406 - DNA, 1035 bp, Artificial sequence
  DNA replication origin
tgacggacgaggagatggcggcgctaggcaaggaagagctagtgcggcgcctgcggcgggaggaggcggcgcgcctggcggcactggtgcagcgcggccgcctcatgcaggaggtgaatcggcagctgcagggccacctgggcgagatccgcgagctcaagcagctcaaccggcgtctgcaggcagagaaccgtgagctgcgcgacctctgctgcttcctggactcggagcgccagcgcgggcggcgcgccgcacgccagtggcagctcttcgggacccaagcatcccgggccgtgcgcgaggacctgggcggctgttggcagaagctggccgagctggagggccgccaggaggagctgctgcgggagaacctagcgcttaaggagctctgcctggcgctgggcgaagaatggggcccccgcggcggccccagcggcgccgggggatcaggagccgggccagcacccgagcttgccttgcccccgtgcgggccccgcgacctaggcgatggaagctccagcactggcagcgtgggcagtccggatcagttgcccctggcctgttcccccgatgattgaaggcactgcttcctccacgccgacgcccgcccggattgctccccgagccccgggaccgctgtggacctcgggacctggacgccgtcctggctgcgcaggaggggccgctggcatggactaagaaatcctgacaccaagaagggcccctcgctcttgctggcagggcagcagggggactgaaggctggagcggagggacttgctgggggttggattgggggtaataaacccggacggaagcggagcccacggcctgggcagcgtctgtttggtactcgccggggttggggcgagggtggggtgctgatacagggtacaattcccatccagaaggactgcagaactaatgattcccccattacttcgagcctggggtgggatgcggggcagtggtaaaccagacttcccccatcgggcgccgggaccggccttaatccagcccctgaagtggctccagc

SEQ ID NO: 21407 - DNA, 956 bp, Artificial sequence
  DNA replication origin
ttttggtaggtttgtataaaaatactctctttaggaaaataaatagcagctgccctcgctgtggaggcttggattccctggagctgaaggcttctcaaagctgagatccgcagatcagctcatcacagaagccaagggcgcctcctgagctgtgcggttcaggagggggcggcagaatggcctggtccaatcacctgctgctgctggcagtggggctggtgagttagtgttctaggtgggtaaagtggcaccttctgtcaggagatagggttgggtggatcacaggaagagggtgatggagagtgtggcagtgatctggaaggggttagggctccagaggacctctaaggatctacaaagtctctgggctgccaggattcctctggcacaaatgggaaatattttgtctctgatttagtgcaaattgtgctagagaggccagctcaagagaaacagtgggcagctttggtggccccaagctggctctactgtgaagcacaatatggtcagtctcattagagggatggagaagaagttgctggagttggatgtgggatactgtccaggccagctggaccggtgggggaaggggaggagacattggctagggtggcatctgcagggagtagggctcaggcgcctcacaaagcgaggagggttggagagccaagggggtcagaggatgggtctccgctgctgctgctactcttgcgatgagctgaggcacaaggctcaggagtgctggggtaggtgaagaccaggctgggggtgaaaggagttagggagggtgtggtcatgagtgtgggggtgtgcagtgcctcaggttcaagcacaggccctggggaaagggagatacaaggtacagggcggcagggggctggtgggctgctggtgccactggtactgcctgtgtccccctccttggctccttccgggattttgcagatgggtcggtg

SEQ ID NO: 21408 - DNA, 1003 bp, Artificial sequence
  DNA replication origin
cccggtgaaaaggctgcagccggacttggggaggcgtcgccaagttcgggaccgacgggccaaggcggcgcgtctcgggggtggagcctggaggtgaccgcgccgctgcaacgcccccaccccccgcggtcgcagtggttcagcccgagaacttttcattcataaaaagaaaagactccgcacggcgcgggtgagtcagaacccagcagccgtgtaccccgcagagccgccagccccgggcatgttccgagacttcggggaacccggcccgagctccgggaacggcggcgggtacggcggccccgcgcagcccccggccgcagcgcaggcagcccagcaggtgagtggggcccgacgccggtggtcccacgggaggaccgcgcgtgggaggccggggtcaactcccgcacgctccgggactggagcggggaaccggagtcggggccgggctgggggctggggcgaggatcctgcccctcgccgtccggggccagttgcccccaccgcgcagcgggcagcagagacccgcgaactccccttctcccagccgcccccttctccctcgccgtccgcgtccgtccctccgtctccgtgcccgctttctctcctcctgcccacctctgacttctgcgtccaccctgcttcagaaggggcgtgggcgcctagggtggtcgcctcgaaggctaggagggtctctccgcttcgggctgaattcctgggatctggagtctgggctggggtgagggtccccacacgggagggaggcgggatccgtcgggagagcagctgggccagggtgggagtcccggcccggtctgcgaccctccgcgtgtccgtccgtctgtctgtccttcgcccctccgtcgccaagtccctatcgtttctcggcctggggagtccaggggggtccgggcagtggaacctgccaggtccccggagaccggccctcgatccctttgccgaatgcggcgaatagagacctcgaggttccgggacgtgcgcg

SEQ ID NO: 21409 - DNA, 1093 bp, Artificial sequence
  DNA replication origin
gcacccacaggcttctggcctgtgttcccaaggaaagtagcccagagggcaaagctagagctgatgaaatggaaggaccgatggagaagcaggagagcccagccctctcttgatctatttactttgagtcttgctctgtcccccaggctggactgcagtggcgcagtcacagctcaccgcagcctcaacctccctggcttaagccatcctcccgcctcagcctccagaacagctgggaccacaaggcaggcgtaccaccatgtccagaaaattttataattttttgtagagatggggtctcaaatggttctttctgccttggccttccaaagtgctaggattacaagcatgagccaccacacctggccccagccctctttctgtagtcgtgtgacaactgacagctcagtactccatctgggcctcagtttcctcatctatgatggaagtaatcagagagaagctttgggatggtgcccagcactaacattctggatgtgcgacaaggtgtctgtgaaggtgtaagggctttgaaaatcttggctgagcctgggcttggagtgcccacggctgtgacttggcaacctgtgccagctactcacttagcgacttcaagcaattcatttcagcatctcccagcctcagtttccccatctgtaaaacagagatgaggatgatacctgcctcacattcactcacctttgacatactctccaaacaagtctggtggccacaagcctccgaaaggcactgaccgtaatgaagatggcgtttatcagacctcaggacacctgtagtggccctgaattaaaactcgttatagctcctgaaattatcctgagtaatactattatattgcattttatgtggggttagttcaaagcattaccttatcgcaaacatttaaaatataccacccagcctgggcaatacggcgagacccaatccctacaaaaaacacaaaaattacctgggtgtggtgacgcgcgcctgtagtcccacttacttggagggggcgctgaggcaggagaatccctttagctcaggaagttgagcctgcagtgcgccgagatcgagccactgcactccagcc

SEQ ID NO: 21410 - DNA, 872 bp, Artificial sequence
  DNA replication origin
ttattgaaatgccaggagcaggcacatgtcaaagtagccaaggaaggggggacagtggtacaggctgtgtaagttggcagggatgggcaagcctcatgtccatggtcctggcatcccctctgccaggggataagtaggcacaactaccctcccctcaaaatggcatgctcaggccagtggggcccctacccctggaccatgaaggctccaagaagggctggaagcactaagttttctctctcctgagggggaaggaaagaaggggagatgcaggaggaaggggaggtatagcgggggatgagcgttccaagaagtctctccttctaggtgtctgcacccaactcatggtgctgggcagtggagaggagcagcattacaaagggaggctgaaggctcatccctcagggaaccggagccccccagcctgtggggcttgtgtcagccctgaacagagggcagaagttcaaggggactgaagatgcaggtagttcccaagtgacctaggagtccccagagctggggggtgtggccttcataggacaaggaggaagacaggaggatccaaccccagcatggaggggggagtgggcagtctccccaatttggcccccctaggtcagttccacgttgttggcacggtcaagcactcgggagccacgggcactacccccaagctggaaacggctctcatagagagtggggcagaggtgccagcgattggcccggtagatgcccaggtaggtgtagacatcaggcttgtaggtgagcaggcacttaatgcccgctgcacggatggctgaatccgcctccagtacacccaagcggtccgtgaagtcgtccgtgtaaacacagatgacctggcgcccaccctc

SEQ ID NO: 21411 - DNA, 1403 bp, Artificial sequence
  DNA replication origin
ctagcgccgccggttaagacgccgctcgcagggccctagtgccctcctcttgaagcctcctggccggtgcgcgtccctccccagtctggaccgccgctcccgcccgcccccaaggccagaagagcgaacgttggccccgccccccgcggcccgcccctcccggggttcccgcgatggccccgcccccgagtcagcacctccccgtcggccccgccccttcccctgccggccccgccccacagcgcggccgctgcggccgctgaggcccgcggctccgccctgtggctgcgcctgtctataaagttgttgttgaggtggcgcggcgctaagatggcggcggcggcggcggcggccgtggcgggggtggggcgcggtggcggtggcgcggagccacggcaggagcggagccgggcccggggctgggccggcgtcgaacgcagcgaaggccggaggtgactgcgggcggcgggaggggcagggcagggccggggcgggagcacagctcgggcccgtgggcgttaatggcggcgggcgcggcacggccggagcctggctctcctgcaggctctaacaagccctggttcgagtctgggaaccgccccattggcctcggaacggcctgtaacctctctggacttcagcgtcctcgtctgtaagtgggcccgataacgcctgcctgggaggcctggccttacagagccggcctcgggagctgcgcgaacgtgcgcttctttgcgttcctctattaaatgccagcgcaccggatacctgccaggaaaagggggccttggcagggccgggaggtgtagctggggctggttgctcccacgcctggattcacccttcggccctgccacgcactgcaggtgtgaccttgggcaagtcctttttctcagcctcagtttccttttctgtaagtcaaggagaatagtaataactgcagcaacccttctggagcgctgactcctcaggcatctaattttcatagcagatctacgggacaggaacagttgttatcccattgtaaagatgaggcaactgaggcgcatcgacagtaactcttactcaaggccacagtttaatccagtgcctggcatctgtagttattgtctcagaccctgccctgactcggttccctcacagcaggatggaaccaggtgaggagctggaagaggagggctctccaggtggccgtgaggatggcttcaccgccgagcacctggctgcagaggccatggcagctgacatggacccctggctagtgtttgatgcccgcacaacgcctgccactgagctggatgcctggctggccaagtacccaccatcccaagttacccgctatggggaccccggttcacccaactcagagcctgtgggctggattgcagtgtatgggcagggct

SEQ ID NO: 21412 - DNA, 1928 bp, Artificial sequence
  DNA replication origin
gggccatcgcgggaaccccgggaggggcgggccgcggggggcggggccaacgttcgctcttctggccttgggggcgggcgggagcggcggtccagactggggagggacgcgcaccggccaggaggcttcaagaggagggcactagggccctgcgagcggcgtcttaaccggcggcgctaggactccgcgggaaacggcgggggcggagcgggcggcaccaggacccaggggaaccgcgacgggcgggcggcgagcaggcccgggagccgggaggctgcgggcggcggcgctggacccgacgcggcgagagaggccccgagatgccgagcaagaagaagaagtacaacgcgcggttcccgccggtgagcacgtggcagagcccggcaggagtgggcccggctcccgggtggcttgggcccagttcccgctgggcaggcgggcgcgccgcggtgttcgggggcctggacgccccgccccctccatgccctccccgcgtccgtgtcccccgccccctttctccggggatgccccttcctcccccagcacccccttaggggacggtggcgacggggtctgaactctgctcccccacccgcaggcgcggatcaagaagatcatgcagacggacgaagagattgggaaggtggcggcggcggtgcctgtcatcatctgtatcctgccgggggcggaccgggtcgaggggcgtgggggagggaggcagcgggtcgccctctcctgccccggagttctccttgacgctcctcagcccgggcgctcgagctcttcctagagtcgctgttgaagaaggcctgccaggtgacccagtcgcggaacgcgaagaccatgaccacatcccacctgtgagcggcgaggagccgggaggggccggcgggtttggcgcggggagttcacacactgaggaaggcagagcctgggtggcgagggaggtgggcggcagccgggacaccagcaaggccacagactggcagaggagaggctgggcttccaggcagagggagccacctgagtaaagcagggcaggcccgggagcggagatcggcccgggctccagcctgacatctggggccccttgctgccacccactgcgggtttgggtgtctgggcccctcttgagtgccagcccctcctcacctcttccaggaagcagtgcatcgagctggagcagcagtttgacttcttgaaggacctggtggcatctgttcccgacatgcagggggacggggaagacaaccacatggatggggacaagggcgcccgcaggtggggccagggcctggcatacagtggggaaggccaaggccacagggcttgggggtggccaaggagtagggagcactccgggcagatggactgtaccttcccaaaggggccggaagccaggcagcggcggccggaagaacggtgggatgggaacgaaaagcaaggacaagaagctgtccgggacagactcggagcaggaggtgagtgaggccccagcccttcgccctgcccttggtgatgggacaggcagcctcgccccaggctgaactggcaggaggccagctctcatccttttctgcaacctgtttgctcactggtttatttgtaaattggggctatgagggtctactgctgtccctgccactcccagtgatgggttcgtgtcttttcttgtcaactctgacctctgcggtgctcacaggatgaatctgaggacacagatactgatggggaagaggagacatcacaacccccaccccaggccagccacccctctgcccactttcagaggtgagcagcccagaggcatgggagggtgctggcagactccccagagccaacttacccctcttgttctccctggccccttggtcttgttgattgtggcagatttgtggggtggaaggagaataactgaggagggcttg

SEQ ID NO: 21413 - DNA, 1008 bp, Artificial sequence
  DNA replication origin
ctgcgcgcacacccagacccacgcgttccgggacccccgcccgacccgccccctgcgcaggccccgcctcctcaccggcctcgtagccgtcatcgcgcttctcccgcttcacgcgccgctcggagggctctgcctggctgcgctcccgcccgtgcgtgctgctccgggcctcagcttcggccccgcgccgcccgctcccgcgctcgcccccacgttcccggctccgcttccgtcgttcgccaccgctaccgccactgccgccactccggtgcttgtgttttttgtgttcccggtgccgcggcggctgctcggtggcacccccggtgccggccgccgccgtcgtcccggccgcctccttctctccgcgatgcttcttggacgaccccatagtggcacgtccactccgagcccggctgccgccgagcccagacaacgcaaaatgggaatacttccgggtcgctcggcagccgctgtcgtgttgccggaaactaagagcggctgcttccgtcgctcgccttggagcctgccccagaggctcatgggaaggccgggatcagcgctcgactgcacattcgcgccgtctcgggtcgggtgggttctttgagcgagtggtcccattgcgcatgcgctcctcaagggaagcggaattaacccggaggtgggatcccagaactggaaggacttagagcccattaagtcagtgtcttcgtggctttaagttcctccccggcctccctgcgcttgcacttcaccggcaacggggtgttcactacctcacggtctttccgtagacacctccctcctacaatgggcgctcgcttagtggactcctagggtcgtggctccaacgggtgttgttttcccgagatctccaattccacagcccagcttcagacccgctataaccagtatcgtcagggaacgcttccttcccacgttccctgttttgttttgttttgttttttcccttgagataggatctcactctgttgctcaggctggagtgca

SEQ ID NO: 21414 - DNA, 1825 bp, Artificial sequence
  DNA replication origin
ccatgagcctctggggcaggctccaaggcgagcgacggaagcagccgctcttagtttccggcaacacgacagcggctgccgagcgacccggaagtattcccattttgcgttgtctgggctcggcggcagccgggctcggagtggacgtgccactatggggtcgtccaagaagcatcgcggagagaaggaggcggccgggacgacggcggcggccggcaccgggggtgccaccgagcagccgccgcggcaccgggaacacaaaaaacacaagcaccggagtggcggcagtggcggtagcggtggcgaacgacggaagcggagccgggaacgtgggggcgagcgcgggagcgggcggcgcggggccgaagctgaggcccggagcagcacgcacgggcgggagcgcagccaggcagagccctccgagcggcgcgtgaagcgggagaagcgcgatgacggctacgaggccggtgaggaggcggggcctgcgcagggggcgggtcgggcgggggtcccggaacgcgtgggtctgggtgtgcgcgcagtgtcagcgaagctcttcaggccaggaaacccccaagctgtttaccagctctattaaatagtctttctacgggatcccttgagcccaggagttagaggctgcagtgagctgcggtcccgccagtgtactccagcctgggcaacaaagcgagactctgtctcaaaaagaaaaaagtctttctacggttgtttaggattagaggttgactttctccactcagctgcttgaggacagagggcttctgttttcctcagttgtctggtacaatcagattctcaataaatatgttgaatgagtgaatgaagtagtgtcagcatatacagaggcaagaaaaacctggtattggacgaatcgtgtagggcgcatggtagagaaatgagggagtaagatagacagggatgtgaacacaaaggaccctgtactgtagtctctgttaagaactgtagattgtcttgaggatagtagggagccatggatgtgagttgaggagtgagttgctcagatccgtattttgtaaacatcactggattgagaatttagtcaaaggtagtcaggactggagaccaggaaaccaggagggctataggccaggggagggctgatggtggcctgcaccaaggcagcagcagtgggattgagagaagtggacaggttggagaggtgttttggaggaggaatgaacagaactcagcacttgtatgagggtgggaagaaggaatggaggatgactccttgaattttggcttgagcagccagataggtagtgggtgtcatttctactgaaattgaggagtagggaagagaagcagatttggagcgggggtggggggagatagttcacttttggggttgtcaaggttgatggtaatggggaaatccagagtttggactggataaagccattgggagtcagtatctgggtggccagtgaagcccctgaaagactgtgacatgagaagagggggtcaggactagaacctgagaaatgcccttatgttagtagtaggcagagaaagatgttaccaaaaaaaggagacagagtaaccaaaaaggcaggaaaacctttgtgtcatgggaactttgggaagagagtattgttagaaggagggagcgatcagcagtcccacataccacaggagatcaagcaaaaccagaaccgaaaagaacccactagatttagaaacgaggaggctggtgaccttggggagcctggagaggttgggatccatggcccaggtggagagagaagcctttaagataaaggagaaggtaggatgcaggatg

SEQ ID NO: 21415 - DNA, 2076 bp, Artificial sequence
  DNA replication origin
taaacatatgagccacaccccacacactgtgcaggcaaaaaagtggaaagcctatcacagtgaacacctttgtcctctagagtcagtaattataaacattgttacagttcttttctttctcttctttttttcctgaccactgggagttgcagatatcatgacactgcatccttaacgacttcagtaggcatctggcgaaatcagggccttctcccgcatagccacactgccctaacaagcccataaatgctgtaaaacagcagctcgcatgccaacattttccagttatcccccaaaatgtctttttagttttttgttgtaagcagcatccaatcaagtttcccacccgcaaaggagccttttctgactaccggagattctagagtatgtgggagacacatttatgacggaagaagaaaaagatctcggcaggcggtgctggggcctagagtgcaagtggagggtgggcttgagtgaagccagctcgtgtcatcatttatttcaggagggaaggtggggagggcacagcagctgtgggtgaccttgtttaggggaagtcaaggcagcccatggccgattgttctggtgtttttccagtgaagaggtggcagaggtggtggtgcaaagagatgggagatgctgttctggagagtggagagcagatacaccctgggagaagagcaggcctgccagtggcagtgtggatggtgggattcatgagctgaggagggggatggtggaattcatgagctgctgagggagggggatggtgggattcatgagctgaggagggggatggtgggattcatgagctgaggagggggatggtgggattcatgagctgctgaggagggggatggtgggattcaggagctgaggagggggatggtgggattcatgagctgaggagggggatggtgggattcatgagctgaggagggggatggtgggattcatgagctgctgaggagggggatggtgggattcatgaggtgctgaggaggggggtggtgggattcaggagctgaggagggggatggtgggattcatgagctgaggagggggatggtgggattcatgagctgctgaggagggggatgggattcatgagctgctgaggagggggatggtgggattcagaagctgaggagggggatggtgggattcatgagctgctgaggagggggatggtgggattcatgagctgaggagggggatggtgggattcatgagctgaggagggggatggtgggattcatgagctgctgaggagggggatggtgggattcaggagctgctgaggagggggatggtgggattcatgagctgaggagggggatggtgggattcatgagctgctgaggagggggatggtgggattcatgagctgctgaggagggggatggtgggattcatgagctgctgaggagggggatggtgggattcatgagctgaggagggggatggtgggattcatgagctgaggagggggatggtgggattcatgagctgaggagggggatggtgggattcatgagctgctgaagagggggatggtgggattcaggagctgctgaggagggggatggtgggattcaggagctgaggagggggatggtgggattaatgccctgaagcagtggatggtgggattgaggattgggttttctagggaggagggacaaggcagttaagggtttcacaaaggagaggttctgttgatttccccctgagtctaaactgggtaatgagggacataacagagaatgatgggtgtgaggacagggcctggagtcgtgatgtggttgaagaattactggattgaagttaatacagtcaatgagctagaaagaaaggctggagagaacagaaaggatccttggaattgaggggttgttttgttttgtgatagtgtctcactttgtcacccaggctggggtgcagtgactctatctcagctcactgcaatttccacctcctaaaggtgctctgtccacatacagtcattgggggttagggcttcccgatatgaatttaggggttacacaattcctagataggacaatatattgtcaa

SEQ ID NO: 21416 - DNA, 1610 bp, Artificial sequence
  DNA replication origin
agcgagaccttagaaggcagggcttcccgcgaaggaccggaaaggagcgcctactaaggacgccgtcgaggtccggggcgcctcaactctatagctctaactggctagaagtgcccaacgtggaatgtttcttttttaaaggcggctcttgaagcgacccggaagcggaagtggaagaaagttctagtggcttgaggtatccgcaggagcggccgggtggcgggaggaaccgttacgggaactgaagttgcgggtgagcgccagccgcggagcagggccctgattggaggccagaggggttgcggggagaaggggaggagaggggtcgcaggcgctgtggcgggccctgggggagagcttggccgcgctgcggggagggggcggggtgcagcgcgtgggagccgggccgcgggaaggggcgggccgcagcggcgcgcggtgggggcggagctggggcgcggcgtgaaccccgcgggcggggagcgggtgtgcgcagcgctaggtgtgcgcttcgccctgtaggtagagagaccctttggttagctttccacgccaagtggccgttccaggcaggcagtgtcgtcttggttcagccaaggtcacagagggagtgatagcttccgcgcagccctggctacggactctgggcatctttccactgccccgcttgcgccacctgttaggcaggatcgtttttcctctggggcaagatcaaaatccaggtcctgcaggaagaaactcctcttaaaaatagtagggaagagtctccctggaactgttttctcctttcaggatgagggggatcgagcaagccactgtaacccctggcttggcttcctcttactatgagattgctcgtgggcccttagaagttccaggtcttcagccctaatctgccttttttttgggattcctagattaagcctgatcaagatgacaacctcccaaaagcaccgagacttcgtggcagagcccatgggggagaagccagtggggagcctggctgggattggtgaagtcctgggcaagaagctggaggaaaggggttttgacaaggtgtggggtggctgcgtgtacctagtgcaagcggggggtggaagggaagtgattccatctgctgggggatggacagtaaggtataatctgaagaggctgccagagcctgggcacctggtggagaggagaggggggcaaaacccgcgctgcttcctgggcttgtgtgctctgaatggcacaggaatggctgtcttgctcttatctctcactgagcactgagcagcacgctccttccttttccctgttttgcaggcctatgttgtccttggccagtttctggtgctaaagaaagatgaagacctcttccgggaatggctgaaagacacttgtggcgccaacgccaagcagtcccgggactgcttcggatgccttcgagagtggtgcgacgccttcttgtgatgctctctgggaagctctcaatccccagccctcatccagagtttgcagccgagtagggactcctcccctgtcctctacgaaggaaaagattgctattgtcgtactcacctccgacgtactccggggtcttttgggagttttctcccctaaccatt

SEQ ID NO: 21417 - DNA, 1005 bp, Artificial sequence
  DNA replication origin
tcccccatctgggccgggtgtcccctcccagcaccccgcccgccgcacctggctctgcgccttgatgatgtgcgtgtctcggaagtagtagatgctgttgctgcccatgttgtagctggccacggccgcctgcgccgccttctgcacctgcgggtcgtcgggcgacaggtcccggagttctccgaccatgcgctcctgcggccgggcccgggcgtcgcgtggcagcgccaggaggcagaatgcgaccagggccaggcccagcgccagcgggaggttcgaacgcgccatggccgtcagtgccgtcggagccctcagagccgtgagtgccgagcttgcggccgcgcagcttttacccgctgggccgccccgcccgacgcccgcgatgcgcccccgcggcctggagctggggcggggctcgaagttgccggggtcctgcgaggttcagggagcccaggaggccgagggggcggcgcgcacccgcgtgccaagacgcttccctgccctccaggacacacctggcccggggagggagaggacagcgacagtccccagcaacaagtgccagtacagggacggttcacgggagggctgtccagaatgaactaccaaccgcagctcttcgtgggctcttactgttgccaccatttcctagctgtgtaacctcggagaagtcacttaaccactcgctgcctcagtttcctcttctgtacaatgggtgttgtgaggattcagtgagctgaaacaggtaaagttcttagaagaggtctggtgctggataaacagcaggtgagtaggacacattactgctcagcgctgcctgacaaccttcctggagcgcgagtgactaatgtttctacctggccaggcacctaggcatgcttgtaattccagcactttgagaggccaaggtgggaggaccacttgagccaaggagttcaagtcagtgaatcgtgatctcaccactgcagcattccagcctgggcgacagagctagacgctgactca

SEQ ID NO: 21418 - DNA, 833 bp, Artificial sequence
  DNA replication origin
atcttggtagccaacttccccattcccgagggaagccccagcttcctttctgcaccccatcttggcccagaggctgactcatccagaaggacgacaggttcagccagacatctagacatctacgtgtccagccaaaccagttcaggatggacaacctgagtgcctgaggctctggggagggctggggctggaggagcccagctgttacctcctgctgcgcccctgctgccagggggcaagtggtgaggtcgacgtggtctccagtgaccctggtcttgcggcagtctgtgctccccatctccatcgtcaggaagtacttgatgccggccaccagctgggggcatagggtaggggcaggtcaggggtcttgacccttgatcctcacttctcacctcttgatatattctcctgttgcccccaggcactcaggtggggagagagggagaggggatgattcagacggggtgggggggggtgggggggggtgggggggggagttctggtggggatggagggtggagaggcctggaggctgagccccaccagcagccttggcagacatcagacatgccccatctagggagctgcccactgtccccacctgccttccctcctccccgatccaccccatcagggcagagactaggaccaggcaagccaggaaggcaggtagtgcaatacagggtttaattatgtctttccttgaaatttagatggttgtccatcgtggagttttagcattaattcgatttttaaaatattgcatgaaaatatcccgattgcgcttttaggcccccttcatgcacgctggggcagcgcctgtggcctccccc

SEQ ID NO: 21419 - DNA, 1353 bp, Artificial sequence
  DNA replication origin
gacggggtttcaccgtgttacccaggatggtctcgatctgctgacctcgtgatctgcccgcctcggcctcccaaagtgctgggattacaggcgtgagtcaccgcgcccggccaccaggctggtcttgaacccctgacctcaggtgatccatccacctcagcctaccaaagtgctgggattacaggtgtgaggccggctgcaatgctgttttctttaaatgacattacattgaatctgtcccctcacccctcctgtgggcgctagacaatctctgtccctctgcggctcctagtctagcccctttcaggcgtcttgcccagggcaaggcaagagaggcgtccttgtggcgtggagcccacagtgtggactgagaggcactgtcctagccttcatggtctcttggcctgcagggactctgccatcgttgggccacatgcaggtggaggaatctttataggctgggagctcagtgtcctgggtgaggacactgcctgattgaagccccccatgccacccatgagctcctcctggggctgagtgggagcacagcacagactcctcctcagagtgctcccaggcagccggccctgttcttatctcaggccatcgcccctcctctgtgagtctgccgccacccctgacctctgagaatattgggagtctctggctgtgtgtgggggctctaaggtttgttcctctatgcctgtgatgctggggtgtttgggggctccacatttggaggctcagccctgcaccttcagcactgtctgggctgggacagcagcagctctgctgcaggtggcagggtgacctctcagcttgggctggggagctgggagctgccagaagtgggagtgggggatgggggcagaagcgaagcacttggaagaaaccaatgcaagaagcagcactggccatttattgtgacagatacggcccacggacctgaagtgccctccaccatggccccaaacccaatggccttcgccctcggggacttatcacatctgcacacagttgtgctttaggagctgagaggagttctgccagggaaccacaaggacctcaaagtcacagcgcagcttctgtggagggaatatgggggagaaggaggggtgagcccagcctcgacctgtctcctcccaacagccagccctctgcctgccaggctgctccaggccaagagagggacaatcactgacccaacggatgtcaagccgcatgtctggggctagactccagatcttggtagccaacttccccattcccgagggaagccccagcttcctttctgcaccccatcttggcccagaggctgactcatccagaaggacgacaggttcagccagacat

SEQ ID NO: 21420 - DNA, 1209 bp, Artificial sequence
  DNA replication origin
gggggtggctacagggaagagcaggtgggtggagggggaggtgagttgtgagtggctggagggccagatgggtgagtgactggataaggaggtgggtggatggatgggtggatggtcgagtgggcgtatggggaggaatggggctgacaaatgggtgggtggagggatgggtggttaggaagataaacaaagccagaagcctctgcgctacaggcagacttgggctctttctcatatctggaaaaggagacctcctggaaatgcaggtctgcagtcatataaattttgtggggaggaggcaggcaagaagagcctctgggtggttctggggtgcagtaggcccagccagcaggtcagcccagcccctgtctctgcgacccccccgcccacccgcaggcagcaggagctcctgttccattacctgcagctggtggcaagcgtggagcaggagcagcagaagttccgctcccaggcagccgtcatcgatgagattgtggacaccacatttgaggtgaaccaggcaggagcgggaaggggccggcgaggggaaccccaggggcttgtagccagaaatggctccaagtaactcccatggggatcggggaaggcaaagtctggctcattcacccaccagtgccccactcacccctgcaggctggagaagaggacttcaggaattgaccccaggaggacaccagatacagacttcagcccctggcagtctgcccacctgggtgcactgggacgggtccccagatctgctggaatgattgtccgggccctgcagagcaggggccccaacagagtttttaaaccccaggaggctccatgtcctcactgactaggccaaggcgcagggaagggaattggtgcacacacacgaacgagtgtgtgcccgtgttgcatgtgaaaggagctgctcttggatcccctccagccctaccagcgcccgcatgctagctcagcccagcagggcattagcagcagctggagggatgaagcagaacgtgggctgagctcaggtgccggcggtgccgggagggccgaggaggcagtaaccctgctttggggaggaaggcccatctggcccaagagtcaggagaaaaagaataggcctgaacaccccagggttaccagggcctgggggcccaataggctctaggaatggggactcagagcccaggaactcaatcctaccaggaccctcag

SEQ ID NO: 21421 - DNA, 791 bp, Artificial sequence
  DNA replication origin
atttgtgtgtgtgtatatttttttagtagagacagggtttcaccatgttggccagactggtctggaactcctgacctcaaatgatccacctgccttgacctcccaaagtgttgggattacaggcatgagccaccgcgcctgggctctcacttatctttcaaactcagctcattgacgctgcctccagaagtctttccaggtcgccagcatcaggcgaggtttccctcctctgggcccctcagaacccaatttcatgcctcaaagtgtcagcagctgtctggctctgagggcaagctgtctctcattcatctccatctcctcggagtaccttgctgtgttcattgtttccagtgttctttgatgaatgggttgacaagatggcggggagggtgtgaatgggacaatgggtaatgtggtgggcagatgagtgggtggagggacaggtgggtgactgactacacagcatgatgaaggtgtcaatgggtgggtggggggtggctacagggaagagcaggtgggtggagggggaggtgagttgtgagtggctggagggccagatgggtgagtgactggataaggaggtgggtggatggatgggtggatggtcgagtgggcgtatggggaggaatggggctgacaaatgggtgggtggagggatgggtggttaggaagataaacaaagccagaagcctctgcgctacaggcagacttgggctctttctcatatctggaaaaggagacctcctggaaatgcaggtctgcagtcatataaattttgtggggaggaggca

SEQ ID NO: 21422 - DNA, 1659 bp, Artificial sequence
  DNA replication origin
gcctggccgccatccccgcggcgctggcgcgggcggcgcgcacctggaacgccctggacgccggcctctacgaccacttcaacgccaccttctggcgccacgtggcgcgcgcgggccgcgcgtgcgtggagcgcgaggcgcgcgagctgcgcgaggcccgccagcgcctactgcggcgctgcttcggggacgagccactgctgcggcctgccgcgcagatccgcaccaagcagctgcagccgtggcagcccagccgcaaggtggacattatgggctatgacctgcccggcggcggcgccggcccggccaccgaggcctgcctcaagctggccatgcccgaggtccagtactcgaactacctgttgcgcaagcagaagcgccggggcggtgcgcgggctcggcccgagcccgtcctggacaatcccccgcctcggcccatccgagtgctgcctcgcggccctcaaggtccctgagctccgcaggcctccaggagtatgggtcctgccctgccctcccaggagtccagccaggggctgcctccatgtcctgcccccatgagagccctttcttttcaaggggcttgagtccctcgctgaactttggggtacgcctccctatctgagcccccgctcccgatcgtgggctgaaccttgccttcgggcacggcgctgataggctggatccagcgctgggccaccctctccttcccagctggttggtgattttgacaagaggcctgagggctgtccagaactgctcaccctgcctttttctgggggctgagcccccacaacctgtcttttccaagtggataagcccaggccccatggagagaggctcagccctagggaaaggctgctcttgctctccctcccagggcttgaggctccctatacttttctgtcttccaggttctaccctccccacagacctaagctgctcccagtctcccagaaccaagagttcttgggttgggatttttgtttggttggtttttcttttttttaataaaacatctttaaaatgtgcgagttgtatgtcagtcatagaagccggattccccacatttgaggatgaaacggatgcccaggaggagctgtggctggacccatgaggatgggggcctggactcaaggtcccccgccacctggcataggcctacaaccctcctcaaccgcttgaccgactgggcccccaacacagactggccaccttagccccactcactttccacatcgttctttttcacaaaattctgcgacatttactgagcatcatctctgtaacttggggatacaggtgaaccagatagatagggccttattttcatggagcttatggggaaacattggaacaggagcaagacaggtaagcaaagaggaaggactggaggggttagagcacaacacctctttgggtggaaggaggatcattttcagataaggagctgcctaactcagaatttgacctcctcctgtgaatcactgacttcactaatggcctgctttcctcacaagaagacaacttggactcagatgaagaccagtccctttctgcagtttcctttaacacagcaagatagccagcacttccaggtgaaatctcccttaagactagcagagaattggaactttttctgttactttcttcagagctata

SEQ ID NO: 21423 - DNA, 1287 bp, Artificial sequence
  DNA replication origin
ccaggcgcgagctggcggcgcgcgcgttgagcttggcgtagagcacgtcgtccaggtcccaggccagtaggcgccgcagcagcactagcgactcgtcgaagtactcggcgatcatgacgagcgagaaaacctcctccacctggcggatgaggcccgccaggtaggcggcgtcgtcgcgcgggctgcgctcattgtcgccgcccaggtcgtaggccagcgtgttgtgtgcgaacatggcgaagtgctcgccagcgcggtagtatgcctcgggcgcgcgcaggaaggcctcgagcgaggcgttgggtacgcgccggaaggccgggcagtactggttgtagtagctgaagagcgactcgaacatggcggccggctcgcgcaggatggtgacatagacggtgctgggcggcatgaggcgctccagctccgcacggtcgaagcgcaggtggctggccagcacgtgcggcggccgcgtggccgggtgcacgaagtgcgccgagaagttgcgggggtagcagaactggtgctcgcagctcgggtgcggcagggccaccgtcaggttgtggcgctcggcaaagcgaaacaggatgttctgcaccgtcgtgcctgccgtcttgtgagtcttcaggaaggccacagtcatgtgcttggggcgcggcggcgagttccgcagaggagggcagctcaaggggaacagcttggggtacctgccaggcccagggagtgtgcggagaggagggtgtgagggggctgccgcttgacccctgcccttacccaaggactgtgggatgccccacagcgcggccccgcctgggctgcactcatggaaaggtcgagggcggtgcttggtagcctctaagatgccctctatgatccctgctgccctcctggtattcatgcccttgagtattcccctcacctgagttaggctggacttatcattgcatctaaagaagagaagagggcagaaatgatgggatgtcacttcttaaatttcatcatagaaagactgtggctggctagtatcttggtgtctttcactcaatctgggatgacagatgatgggggaagcaagctgccatatagtgggcagccctatagggagctaccactaagtgggaaaagcccacaaggacctaaggccctcagtccaccagccggcttgaagacctgaagcctgtcaaaaccacgtgagtgagcttggaagctgatcccttccaatcaagccttcggatgagactgcatcaccagcaaacaccttggttgcaaccccatgaaagaccttggtcc

SEQ ID NO: 21424 - DNA, 994 bp, Artificial sequence
  DNA replication origin
gcctcagtttccctgcctgagtgagagaagggagctggccacattagtgtccaactctgcaaggttgccagagtaagacaactgcatctgaagatgccacccagagactgttcacggcagccagcgggcaagccagggaaccaccccccctcccccgtcccccttcctttcccctctctcccctctcccctacttgctcgtggcctggccccgcccctcgccttcctccggtgtgcgatggggggcggggggcggggggcgggcagagccgggaggagcgagcctagcggacgctgccacctgatcccatccaggcgctgagaggcaagccaccggcactcggcgcgcagggccccgggcaccctcggaccccgtgcggatttcgagacaagggtccagagatagcggcggccgcccccaacccgggccagaggcagagcccaggcgtgcggtgtgagtactgcagtggccggcatggggttggaggggtgggagtggaccagaccgggatgggggccgagaggcgggcgggagagtgtcttgggggcctagtggttggaaagcatgaggaggggggcgctctacccctggaaagtgggagaagatagggtgagcgggccaatctggcctatcccctatggtgatcagatcccactggcaggatccctgggggatgctgggatgaaattgagggagtgggaggtatggtgcgggtgggcagtaatggagacaggaggatggagggaattccaaggcagggatgatgcgggggtggatgagagagagaggaggctggggggccaggggcagacctggtgcaggctggggggtgggggaggaggaaaaagagggaggtggaaagatttgctctcccaggccagtactttgcagaccccctcagcccttcgcccctcctctggagcaccctgggtcagcgtccctcaacactgggctgtcccatccctcaagtcaggacaggatggagtctccgggc

SEQ ID NO: 21425 - DNA, 1478 bp, Artificial sequence
  DNA replication origin
ccgggtgcagtggctcacgcctgtaatcccagcactttgggaggctgaggcgggcggatcacgaggtcaggagatcgagaccatcctggctaacgcggtgaaaccccgtctctactaaaaaaaatacaaataaattagctgggcgtggtggcgggcgcctgtagtcgcagctactcgggaggctgaggcaggagaatggcgtgaacccaggaggcggagcttgcagtgagcgcagatagagccactgcactccagcctgggcaactgagactctgtctcaaaaaaaaaaaaaaataaataaataaataaaaaataaataaataaaatgagactccatcagcctttagtttatcctgcctcagagaccccgcccccttccctagcacctacacatgccttggggccctcagcctcagatgacctgccctgggctctccagttacagggagcagaagagccttcctttgggctagaaaggttctgcctgagtgggctgacaagctggagggaagggcgctgtttttctgtcttcgttactgtcctttccgggtttggcttctcctctgggagtgtggctgcaggagcctcccatagtgatattgatggaaaggggaaaggtcaaggtttgggtaggaggaagaggacttcccacccagtgctaggatgtgagccaacctttctcaacccagtccttttccctgtctctcccaaacctcaccttcccccgacctggtgccccattctttttttttccctgttcccagcttcttctccactgggggcagttggcaaaatggagctggagaaaagatctgaaggggatgtgtagggggaaaatgagaccatttcacttgagtctccccactccctttctcaacacacataaaaaacacacacaggctagctgttggtgagagggcagagctagtggcagaggtggggagagaaactgaattgatggtgtgggacagggagaggtggatgctaggcaggcaagaatccctgccagtctctgcctctgtctccaaaggccaaggggagttggggtggggagtgggaggcaaggtggggcccccagtgcaggtgcggctgagggaaaagggcctgagtttatttttgagactaaaaaagacacaaatgctttcaccagaaacattgttcctttttttccagtaatcatttattgggcgcctcttgaacgccaggcgatgcgagactgaaaatgatcaagtccctgctcacatttttgggatagaggtaggaagaaagggcaagaaagacttaacaaacggtggagattcgaacgtattatgggagctctaagaaaggaaaggaaagcgggaggaggcttagtggagaagacgacatttgagccggcctggaaggtggaaaagggggctttagagtcgcccttcccccaggtcggcagctggagctcagcccgggcaggcctgctgctctcccggcttggatcccct

SEQ ID NO: 21426 - DNA, 1089 bp, Artificial sequence
  DNA replication origin
cctcgcgaccagaccgccgaggggccactagagaaaggtgcgtctgcggcgaatcccgtcgcccagcgcacggcagcgggtgtgcctgagtgcgcgtcgcctcccaaccagagaggacgtggcatacggcgccaccggaagttccggcaagtgggccctgaggctggccccagcttccgggttggtcgcgcgccttcctgcggctaagatggcgacggagcatcccgagcctcccaaagcagaattgcagctgccgccgccgccacctccaggccactatggcgcctgggctgcccaggagcttcaggccaagttggcagagatcggagctccgatccagggtgaggaacacaggaagtcgaggggcctttacgggcctgcggagaagcggagcctggttacccgggagactcgggtgcgaggggcggaggcaggccgctggggcctgacctggccgggctggcctgccccattgatcgtgtactttgccctgcaggtaatcgcgaggagctggtggagcggctgcagagctacacccgccaggtaggtgttggcggcgggacgtcaggataggccgagcttctccaggagaccttatataccccatcacggctcggtcttcattctttctttatctcggcacagcaaggcggaggcttgccctttttagcttgttcttgcctttgccagcttagttgtaatttcttgtatccatcttggtcctcttcagtgcccagccagagcgctggcagacaggcactgggtacgttttgttgaatgaattgggagcgaacgtcgtttagtgaaacagctagttttggactgacctagagtcctttctcttttgcagactggcatcgtgctgaatcggccggttttgagaggggaagatggggacaaagccgctccacctcccatgtcggcacaggtagggagattcttctgttttttaagattccatctgctgatccttttgtagttcatgagcatgatgattgggtgttcacgtgcatgtgtgagatgtgacacccttgcacattactcgcctgacctgagtggggaaaaaaaaagattccatatgttcagggt

SEQ ID NO: 21427 - DNA, 1279 bp, Artificial sequence
  DNA replication origin
tttcccacagacttctatgtctatgtcaggctgcccacccttgttttgggggtccgggggtggttcaacctgtcttaacctgtgtctctttctccctatacagcaaaaaaaacggaaagctcagccccaggacagccgtgggggcagcaagaaatataaggagttcaagttttaggtcccctcacactagccctttttttggccctacgtctggatgcctgggcttcacacaagaaccacctctcccgcagttcccaaggacttgtcatttcatgttcttattttagacctgttttgtaaataaagctgtttcccaaggaaagagatgaatatttaacactcctgagcctccctcatctccttttagccccttcttgcaaaaggactaaaatagtctctttctacaatcactgggctgccccagtaaccacgaacataaactgggattagacggcgcatttgactggtggtgacgccaaccccaggctgaaatctgtgtttcaccactgccctgctttgtaggaaggcttgggggaagtacctctaggtctggtttgaccttactactttgtccttggggagtaaaaatagccagattagcgccctagcgcggcagaggaagtaacagtgggcttgggaagtaggccagggcaggccttcccaactgaccttgtgaccagaagttcaagtccttacctgtgcgacaacatagctcaaaagctaaattgtcttgagtccatatgaacccttgggttcaagcaacactagtcgctggggtttgggatttgtatgtgggatggggggacttactttctccaggttgtaatctggtcctgagcagcctttctgacagactagagcaggctggatcactggctcccatgggcatttgccagcctgtggggagggtagtcatgcgctgctgttgtactactgttggtgtttaagtgcaccagtggaggcgctcacttgccggagggttcaagatggtctcggggttgtggggggcatgatccagataggacgtggcagctgagctaggccttaggaggaatggaattttagaaatttggtaagcaacaaagcactggcactctaaagaggcatttggggggtagggaaagaagaggaaggttggctccagatgggccccggggtagcttgagaattcacttatgcgaagaaccttctggactccaggtccctgagcccccgcttgccctcggggcgggaacttcccggatcacaggcacccgcggtggcagcgggccccgggtct

SEQ ID NO: 21428 - DNA, 1208 bp, Artificial sequence
  DNA replication origin
cctcgtcgtcctcgtccacctcggcggcggctgcctcctcctcgtcctcgtctacctccacctccatggccgtggcggtggcctcgggctccgcgcctcccggtggcccggggccaggccgcacccccgccccggtgcagatgaacctgtacgccacctgggaggtggaccggagctcgtccagctgcgtgcctaggtgagcgcgggagggtgcggcggggcgccgggggagcggggtggccgccggggcccagccctccccgccccagcgcccatggggtccccgccctccatctccccgactgtcccgcggcccggcctggctccagccaggcctcccgggactcctgccacggggacccgccctctcctggcagccccaccttctgcctggggccgggaccacccttctgtcctccccgagggaccttctggcctcggccccgggctttctccgattgggctgaccgaatccggccttcctggcagtcagtttccctgagtaagtcactctcctgcctcgccggcgccgggagctgtacatacatggatgtggtatagatctcttgatattattatttcccaatagactcagcatgtgccaaactcgattgtcacctcttgcaggtaaagctcatataatcaccctaggggcttctcattagccttcggcacacatgttcatttgaacttcatattacacacgttctgtcccaagcgctaggctcttagttttggggccctatttaatgtgtcctcaagtgtatttttacctcccctcccccactaaaactggtcccagaatctcccagctctgcagggctgtatgaaattactgccttgttcctaaattcaatccattgctctctgtctgttggaaccatctggggactttccttccattggcaaaataggcctgagtttgggaatattttctgtttttgtattggcaaggcagtctgtctccaactctggggacagggtgctgtgtcttacagtttgccacttgaataagacggtgtgtggagctggtttcacccagaaagcccagagaagtgcctggaggtgttcttttttgtcaccttgtagctgagttgattctgttgccttgaagtcttgggctgtctcctcactgttggttaggcagacggatgtgtaagtcagagttagagaggattgctgggctcccccctcgactgtcttccttt

SEQ ID NO: 21429 - DNA, 967 bp, Artificial sequence
  DNA replication origin
ctggccttagcgttcctgtataggttgggacccaacctaggttcatgctgtacctaggacacgaactagtaggaagttaataaaagccagatgtatggatggttgggaagatgggatctgagtagggccctgagatatggcctgagtcagatgatggggtttagaaacctgacctcttctcagccgatatgtgtgcattggacgagtgacttaaccctcactcatgcactgaaccaacctttatcgagggtccgccgcatgccagggtgctggatactgcaacaatgagtccggcggctcgggtctttgtcctcctggagctctcattcgaatgtggtacagagacatttgctgcaggtaatagtgaactctatgactgaagagacagaggctaacaaccaggctttgggtggggtggttggggaaggctcttggaggaggtgatacaaaggccacatcttaaaggaaaaggagcttactctggggttggaagagggatgtgagcactgaaaggtcaggtgtggctcgagggtggtgagcatggcagggggaaagcaactagaagtgaaggtagtgagccagaccacgggcctggtggacggtggttggcctctattcagagggcactgggaggataggacgacaaaggatactctatgcgaggaaggtaccctggcttatagttggaaacagcgtttgggaggcagcatggacaagagttgctgatggattgggaggggcggcgcaggatgagtccgggtttctggctggagtaacaggatggaggctggtgccattgccgactggggaagatcaagggaaatcaggagtcttgctttggccatgtgaagtctgggatgactgtgagtgttcaggtcgcaacataagtggttagatgggaggctctagagttgggaggggaggctctgacctttggtttcctcctttgcaaaaggaagcatcagca

SEQ ID NO: 21430 - DNA, 1575 bp, Artificial sequence
  DNA replication origin
cccgccccgggccacccgggaccgcgccccctaccagggctggcccgatcctcccacaggccgcgcccatgacgaccccctcccctaggccgacccggagtctcctcccccgctttagggcctgaccccgtctcccggcccaatcggcccgcgccgacctgcgcctggtgctcgggcccggctccgactctggctgcctcccgcttcacccggacccgcacccgcgagccggtcccgccgcctccatcccgccggccttcccagcagcccccgcgccgccttaaaggtgaagccgctacctcggtggcgtcggagggggcgaaacacgcttctcttggcccgttcgctgccttaaaggagcgcgggccgggccggctccagcgggagggggacggggcggggccatcgaggcgggggcggtgcgaggacccgcccggggcgcagttcccagggcccgccagccccgaggggtgccctcggccgcaaaatgccgcggggcctcagcgtgtggagctgctcgggaggtcgaacccgaaggtacctagtgtggcgccatggcgccatcgaggacgtcgggagaaactgaggcgcagggagaaggttgggcttcctggagtacagagcgaggcgccactaactgagcgcctactgcgtgttgcgcgctttggtgccctgggttcattgacttaatgctcacgaagacccgagaagtgagtgccgctgttatctggctcgcagatctgaccccaggctccgcatcccggggtcacatccggtgggggatgcaccgtctctgacagaggtggttcagcgcccttagctcaagcacatccggtgacaggtagcttactacgtttggctctgagacaactcggaaggttagcaaaaatttcctctgatagaccccgaagtgccttcctgcagtgctcatccacagccctagctctgtcttcagaaagaaggctgctcccttgtgtcagttaaggtatttggagacagcgatggtgccccgcgtggtctcatctcttccctgggctgcccctggtcccttcactcagtcctaccgcagtttcctgacccttccccatcccaatttctcctttctgggtgtagtctagcttgtccgtctgggtcctgctcagaaggtggtgatcagcccagggcccagtgaccagagacaaggaatgaactgcaaagatcagagggacgtccccccataataaggatgccacctgtccacaaaaaaaaagctgtaaatcaggctgcctttgacacaagtgaagaccctctattttacacatctcagttacatccaaccaggttcttctcaaacctgtgctctgccaatggttttttttaagtgacaggttcttactttatcatccaagctggtgtgcactggtgtgatcatagctcactgtgaccttaaactcctttttttctttttgagatggagtctgtctcccaggctggagtgcagtggcacgatcttggctcactgcaacctctgcctccagggttcaagcaattctcctgcctcaacctctccagtagctgagattatagcacccacca

SEQ ID NO: 21431 - DNA, 1828 bp, Artificial sequence
  DNA replication origin
aaacccggacactgagccgcctaagtcggcctgagccggtggtctggggccgaagcaggatccggctgcaccgcattgcgtctcccaggcctagacaagctaggcgcgccctctgtaggccaagcgcgggcacggtgcgggctgccggctgggggacctgggcacacgggagactcaggcgtccggggaccgcctgtttacctaatccggggcggacggcggtgtggccccaggcccggcgcccgcctgcccgcaccctcgtcctcacagacgccacagccatggccatgatggtgtttccgcgggaggagaagctgagccaggatgagatcgtgctgggcaccaaggctgtcatccagggactggagactctgcgtggggagcatcgtgccctgctggctcctctggttgcacctgaggccggcgaagccgagcctggctcgcaggagcgctgcatcctcctgcgtcgctccctggaagccattgagcttgggctgggggaggcccaggtaggtcagtctggggcactgaggtgggaggtcactggagggatcgagccttcaagaggaatccggtaatgtaggagaagaatctgagcagggaaccgtctgtttcctggagccccatgttaggaccccagtaaataccttttgaagaaataaatgcactttggcgaccccagccctgccctaagagaccatgatcacccttgcccccacgcagagccccatttccggctcccctctacctaagggagactggatggcatatgagaacagaaagaaaatccttaaggaaacatagcctcccaccaattaattcttctattcactcgttaacagatgagttattgagggccagccagggtgttaggtggatacagggcccaacaaaatagacaagattcctgccctattagagacaaaaacacacatacagaaataattggttgttacaaattgtgatgagttctgcagagaaaagaacaagattttatgatagctcgcagcagcgagtcttgtctactggtcaggcaggacttctgtgaggaaatgacaaactgaaacctgagggaagaaatgaaccagcctccaggaaagggaggcaggggagaagttgcatgtgcaaaggtcctggggtaggaaagagcttgtggtggaggaactcagggaagaactgtgtgactggagcttcatggaagggagacagggacagaagaggcctggggagaagccaagaaccagatcatggcctggttggtttgggttttattctcaggaaatcagaaagcctctggagggctttaagcaggcaggcaacacagtctgacttgagtttctaaaaactctctctggctgagatgtggagaataaacctcagtgggtcgaggatggaatcactctccaatgagtggttaggaagccactgctggaattcaaatgagagctggtgcttggaattaaggggtggctatgacggtggagaaaagggaccagttctggatgttctggaggtaggtccagcaagacctgggggtggaataagggagagagagaggaaggcagcatcactcccaagtttgtgatttaagcaaattaagggaggagagggccttggtggatcagaactctgttttggcctcctttaattgaggctgccaggatgatatgcagttggagatgtccaggagccattgggatgtacaaggagttagacttgttttattcccctcagagcttggctgagcccctgcctggcacgtgaaccctggggaagttgtatcattttggtttccttgtctttaaaatagggatcatgccatctgctg

SEQ ID NO: 21432 - DNA, 904 bp, Artificial sequence
  DNA replication origin
ggtcaccagcctcaccctcagatggtgcccagccacctgtgctcacgtttgcacacatgagcacacacccaactcacgcagcccccttggcctgctagggcctcacacgcctttgcatcccccttctccactggcgattcttgctcaccttgagggcctgccccagtgtctcccactctgggaaaccacctctggccccggatggtcagtcatctgctcctgagtccctcggagcctggcccatcattcaggcctagcacatgtcttgggctgtggcctgaggtgcaagggtctgttctgctcatctctgtccagaagagggtcagcagtgttttgggtcttactcttgttcatgcattcaacgaagcccaaccgtggtctcccctcccctgaccccagtcctgtgtccagcccaaccaggtgagacctatatggtaggctggtgacagtcccctttctctccccaggggacaacaagcccatctggatgcacgcagaggagcgggaggaaagcaaggtagctctgtggggcaggctgggcggttgtcaggggaggctgggatgtgcagaggggggcctgctctcacttcttgtgaccattctttcctccaggataagcgccgggacagcgccccctatggggaatacggcagctggtacaaggcctgtaaagtagacaggtgagtggggcggggctgggctggggagcagggcacggcagggcgggctccacattccatactctcacccccaacacacccctcctctgctgctcatctggcaaggcccaactcacaggtcacctgtcccaagaaggctctgtctcccaattctcagcctaattctctggctctgggtctcccagcttttggtcctggtgacaacatcccatgagggccctggg

SEQ ID NO: 21433 - DNA, 1435 bp, Artificial sequence
  DNA replication origin
tagcccaccagggagcttcgtcgggagaggtccatggagctggagctgagagtgcggctgtcagagagacctgtgcctccaggctgtgggcagagggggcaggtggctcagccctgtgctgctgccagtctgtgcctccctggcctgaaggggtctgacctggcagaggcagccggaatccctgagctgggcagaggcaatggcagttctgacccaaggccacaccctggtgccctgacactcccgtccatctccacagtgacggtgttagcactggccgtttacacgtccacccccaggagaggctgggttcccctcgtgtctccccgttgtccagcccaaagtaggcctgagacagagccaggaactgttgctggatgaagaggcatgctggagggaagcttggcagcacgcatgcagccccggccgcagctgcccagtgcccagacacccgcctgcccctacctgggtcggctcttccacgctcttgttgaggaagttgagggaactggcccgcttcatcctgagggaaaaggacagcctgggatttgcccaaggaggaactcacgggagatgggggcagggagaagggtggggctggggagggaacagactggtgggtggtggagcctgagagggatggggaggttgcctggggtcagtggggcacactctgggtcaggagctcatccggggttgctgggtggttcttgaggctcaccttggtggggggctcacctggggttagggggctcctggggggtgcccccctgcagcttctttaccagcatctcactgctgcgcctcagggcatcccggagtttcccaaaggaaccgctgcgcctcaaggagccactgccatcctgcaggtggacaggcttgcctctaggccccgctggccacctaggctcccagcccgacccggcccaggccccggactcaccccattccactcagctgtaggtcccacgtcctcgaggtcagactcagaccgaggcccggcacccccagccatgtctcggctgctgcggcggtctccccgcctgccactgccatctttcagcagttctaccaccttggtctggcttgcggggtccaaaccctgagggaggggcaggggcatcaggcagtgaatggaccacacccagggccacacaggtgtctgcccaccccctcctgcatggagccccacctgcttgcggttacggctggcacagtcctctagtgtgtgcgcggcttccagcttgccctggcgccggtatagggcccccaagctgcgcagggtggtgttgactgtggggctgtggatgggacagtctcaaactccatgttcccccagacccagggcccatcctggcacccagcccacagtgggccctgaggaagcatggacctccggggtagccagaatccattccttcccatgtcaagccct

SEQ ID NO: 21434 - DNA, 1436 bp, Artificial sequence
  DNA replication origin
aaagcctgacttgtgggcccctcacgcaattccggggtggggcacaatatctgggcccagctgcgcggacagcggttgagcgagacacactgtcccccactcacgcacgacccttcccggctccaccccagtctagagacgctgggggcccccgacctccgtctcaaaacaagcccagctcagatttaaaccgtctttatttctacagcaacatctgaaaatatgagagcagccgcctcacccgcaacagggggagcccctcctgccaccaggggaccgtcgccgcccctcgcgagaagctgcaggcgtggggggaggcgaggcaggatggctcggtgggcggtgcccggggcggggtcggccgtgcctgggcggggccgggtgggaggggcagtgcataaggccgggatgcggggcagggcccggcggtgggaggacggactaaggggaggtccccgtcctgggccacggggcgatggcgcgggtaggacgcatccctcagaggccaggaggagcgcgagaaggtcccaggacccccttgggaggcgccgctcccgagaatgtagagcctgggagataccaccgcacggaatgggggtgattaaggcctgggcggtaccactagaagagggacgaggggaggcccgggtagtaccgtggactgaagggaggcgcgcggccaataacttatttctctatatacagaagcaacggccgggttgagtcgggagggagggcgagggtgccgaagggccggcgagtgcttagtgttcttggctctggggtctggggaggccaggccactgagtctatggtggagactccagccggcacctcctgctggcccgaacctagggaagagggccctgctggaaggaataaataagggatggagctggagtgggcaggcccagcctccagggctcaggctgagatgacaagggagaaggttaccctgagattgaacagaaaagacaggggctgtgggagagacaggcgggacaagcagcaggcccatgcgcagggctggggtgaggggggtgtgccaggtgggcgctctggtgactggctgccccttcagcattagcccaccagggagcttcgtcgggagaggtccatggagctggagctgagagtgcggctgtcagagagacctgtgcctccaggctgtgggcagagggggcaggtggctcagccctgtgctgctgccagtctgtgcctccctggcctgaaggggtctgacctggcagaggcagccggaatccctgagctgggcagaggcaatggcagttctgacccaaggccacaccctggtgccctgacactcccgtccatctccacagtgacggtgttagcactggccgtttacacgtccacccccaggagaggctgggttcccctcgtgtctccccgttgtccagcccaaagtaggcctg

SEQ ID NO: 21435 - DNA, 1346 bp, Artificial sequence
  DNA replication origin
cacttatactccttaggagccagaagcctggtcatatcacactggctcaaacttagacctcttgccatgttccaagttgggtcctgtgctaagtgctggggacaaagggggaaatcatacttgggccctgccctaacacattcacgggacagtagatgaatagaccaggccacacacaagggcaaaacaggttagaaggcaggggctggggagcccccagaccacctctgcttgaggtgggagcaacagtggacctaagcctgcaggtgggaactggccttgtgcaggagaggtgccagctggggagccagcatgtgccaggtcactgaacgggaggggcatggtgtgtctggggaatgggaggaaatggaatgttgctgggatgcagacactcaacagggaggggggacagggagggggaatgggggagtggggaggagaaaggcaagaggggagagggggaagaggggaggaaagaggggggattggggagaggccagagcacagactgtcttagcatggctaagtcttggacttagaccaggagccagtgggcgtttcttaggccagaagcaacaggatcacacctatgctagtcctgacaggaggcagagcccagatcagaatagcaagatagagaccaactgggaatggctggaataactcagggaagagaacgtgcactgagccagggaagcacacaggatttagtcagaccactgctgctgaaggcctggctcagccatttactgtgtgaccccaggtatgttacctgaccactctgagcctcagtttcctcatttctataaacagtacctcctagaagggctgattgtgagcatgaagagaatgaacacaggcttgtctcataacaagtgcttaattggcaagagctgctattatcctcatcactgctattattatgaggggacagatttcagaaagatgatggggagagaatagaggggactcgagactgactggatgggggagggaagagttttctggtcaggctgacaaggattgtgtcacaaagatggggatgcagctggggcatggtggtgtgtgtctatagtcccagtgacttaggagactgaagcaggaggatcccttaagcccaggaggttgaggttacaatgagctatgatcacaccactgcactgcagtctgggtgacagagtgagaccccatgtcttaaaataaataaaaatattaaaaatggggatagaggcgctggtttggggagagacagtgaggccagcgctggacatctgagttctgcagaggctgcttgagggtgggaaagggtgtgctcaaaagccaagagccctccaaaactggctttg

SEQ ID NO: 21436 - DNA, 924 bp, Artificial sequence
  DNA replication origin
aggtgcagtgggggccctctcagcggctgcgcgaccccacacctctgccgtgtgccccgcgggagttggcggcggcacgccaggtatgagctgatggccgcctgcctctttccctgacagaacggtgctgggcccttggggacagaccacagaagcacaagcagctttcctggcctcaggaaacggggtcaagggcttttgccagcagccttaggacacagaaaccaagccaggacccccgtgcaccccaccaagcccagggttccagttccatccccccaccccaaggctgggcttagaccacagaccacacttggccaccacaacttccttgcaaaaaccctcagctcacccgagggccaatggaaatttattaattttttttgtccttttccatctttccccaagtggcttttccttgcaaaatgcctgacatgacaccagaggggaacctgggagcggggggcaccccaagggggcagcccagggacttaaatacaagctggagggcagggcacaggtgggacaggcaagagacagcacgagggacatggcttctcagggagaccaaagacttgctttcttgcaggaagcagctgtgccagagggcaggggactaggatcctgggtgcagagtgggtgagcagagaggcccccaatcctggatggaacccacattccccagagaagtagcggcaggggatgagggccttccctggtgggctccagagacggagtggggagtgagccagatgtgctaccttggggaaagggaggaggtgctagcagagtgagggttaaggctggtgcccagcctctggcacggtgggccttccgcctccgcctgacatggggacaaaggggcacggtgggcaggcagcgcatgggtctgtctctggcagggcagagggcggcaggagcaga

SEQ ID NO: 21437 - DNA, 999 bp, Artificial sequence
  DNA replication origin
gccatggcccccgcgccgggcggcggcccggggggcgccagcgcggggcccgggcgcaaggggacgccccccggcccgcgcttagggccggccgggcatggcccgtggggctcgggggacgtgggtgatgcggccgggaccgggaccgcggggccgtggggggcgcggggcgcgggccggtgggctcggggggcgcgtccgctgccggctgcccgggccccgatcgctcatcctgcgatccctcgcccgcggctccctcgctctccagcccgcgaagccggcggggcggagccgggggcggggccgccgcgcgagcggcctcgggcggggctgggtctccgcgggcccctcgtctgcccgcccggctcgggcgccacccccagccccgacaagcccgcggccgttcaccctccggacagcgtagacgcggccgcccccggcaccccgcacccctcggcactccagccaccggcacagccgcactcggccccctcgggcgggcgctcagggcaaaggctgaagtgcgaggcacttgtcactgtcggagacggcagaagcacctggctgggacacacaatgacgccaggacaggggctgaatgggagcagtggggttttggggggcgctgaaggaggttgggccaggtgcagtgggggccctctcagcggctgcgcgaccccacacctctgccgtgtgccccgcgggagttggcggcggcacgccaggtatgagctgatggccgcctgcctctttccctgacagaacggtgctgggcccttggggacagaccacagaagcacaagcagctttcctggcctcaggaaacggggtcaagggcttttgccagcagccttaggacacagaaaccaagccaggacccccgtgcaccccaccaagcccagggttccagttccatccccccaccccaaggctgggcttagaccacagaccacacttggccaccacaacttccttgcaaaaaccctcagctcacccgag

SEQ ID NO: 21438 - DNA, 704 bp, Artificial sequence
  DNA replication origin
gatgaggaatggacattttgaagaaccaggtgtgaggctaggccagggcgagggacagaccaaggggtatgtgagagacaaaggggaagggggacaggaagaggagggaagctggaaaatggagaggaaacctggggggctgggaagcccccaacaggaggggtagggaaacccaaggtgagccggtggtgggggctaggtctctgggggctgatgagagccaactgctgcttggtcagggagggggctgggaaggcaaagggttaatggactctgagatctgtgggtcctgtaaacagatgcagttgccatagcaaccagctccatcactctggctggaaaaacccacaaaggcgggggggggggggcagcagacagacaaactgcccgacggactaatggaggcggctggatggtggtggggggggacatagaagataaagcaacaaaaatgccagaattccaccccccacctcacgggctgcatgggagcagaggacgagggcagaggagggggtcagagaccgactgacatacacacagacaggcgggggcggcggaggaaggggggccccgggaagaaagccgaccacggggggtgttaatgggggcgaagccgacaagccgacggctgggggatagcaagtttcccctgggctctgagaccacccgccctgggtccctccagctccgcgtggcccctg

SEQ ID NO: 21439 - DNA, 1523 bp, Artificial sequence
  DNA replication origin
gaggaccacgcctcctatcccctaccacccagcaggccgcactaggcactctgatgtgcacaggtccactttgccggcgaggaaccagacttgggacaaatgacttgctaagattgtccagctaaatggctgagtggacagagtacctcacacaggtgctcaatcaatatctgttgaatgaacaaagacatttcttcaaagcttgggcctttcctcccagcctgggcactccacaagggcaaagtctgggttttattcatccttgaccccctcaaagccacccagagcctgatctttgggaagcatcaatgcaggcgtggtggataaactgctgaggatcccctgaggacagggaccccacaggggctgtgggaaggccctgggtggggaaggccccaaaaagaggcttcttgaattccaggagcccttctcccaggagctggtcagctctgcattccctagcctgtggcccccagctccctccagtccttagaaccctagccctcctgcccctaccccacagaaagaaaaatagagtaactcggggtgcgggggagagggggaaagacaaagcaaccaagacccagagagagagcagagccaggccaaggagtgacagggctggagctggggtgtgtgctgaggtgcctttgggggctcactcttcacacagtaggggttcagtctatggattcccgatgtcaaagagcaaggtggcaggggatggcaaagggagcgcagggggaaccatggagcaggcggcaggtcccaggaagagaaaggagagaggaagtggagagcccgggaaagaagcaggtgaggcaccgggaggaaggagggaagggctatgggaaatgggattgagggagggataagaggacccctgaaagggaatgacaatcagggaggtgtgcgcgggaggtgtgagcagaggatgctgagctgagccagccagggccgagctgggcaggctgttacagaaacaggcacggggtttgggtgggggtggggacggagggcagtaaagtggggccaggggcccccaacaaccagctggaggctgattgatagttctgtagtgaggggacgggagccaggcagaggaggccctggaggagaggagcgggaggggaggaggagggagcctgggggaagcgatgggtcggatgcaggatgaggaatggacattttgaagaaccaggtgtgaggctaggccagggcgagggacagaccaaggggtatgtgagagacaaaggggaagggggacaggaagaggagggaagctggaaaatggagaggaaacctggggggctgggaagcccccaacaggaggggtagggaaacccaaggtgagccggtggtgggggctaggtctctgggggctgatgagagccaactgctgcttggtcagggagggggctgggaaggcaaagggttaatggactctgagatctgtgggtcctgtaaacagatgcagttgccatagcaaccagctccatcactctggctggaaaaacccacaa

SEQ ID NO: 21440 - DNA, 870 bp, Artificial sequence
  DNA replication origin
aggtactctgtccactcagccatttagctggacaatcttagcaagtcatttgtcccaagtctggttcctcgccggcaaagtggacctgtgcacatcagagtgcctagtgcggcctgctgggtggtaggggataggaggcgtggtcctcagtccacagctgctaagaactagactcttaacagggcgggaccccagatcccactccagaccctcagcccaggccccagtggttcctaggcaaccctggcggtgagtgacgcgtgtcagctgtcaccatgggggattgtttgttccggggggctgagtcagcgccaggcagcctggggggtgggaggggtgacgcccgccgcctgctggtggtgccagctctggggtacagacggcacccttctgctccctgtggaccctgttgctgtgcgtgccaagtggcgctgcccagagtcaatggggagctgggcggggaggggggatgatccagatggcctcagctccctccaggaagcccatgttctttctctctgagccgtctggggcctgggatgcctgggggtggtgggcctgctgcctcatcctagggctggagccgacaggaggggaccccagcaggctcctctgccagcccatttcccccaagtcacctgtcagctccttcccatcccatcatcccctcaaacacttgctcccctggagagtttccacccgtgaggacactgccgtctgccagacaccccaacacctgaagccaccttagatttctgccttcacttctcagccatttgaaccctctggagtctggctcctaaagagctgtagaatcccatgcacgccttccgtctccactacaactctcctcactcagaccaccatcag

SEQ ID NO: 21441 - DNA, 1708 bp, Artificial sequence
  DNA replication origin
ggattcagtttacaagtatccattgtgccctgcagtgacatgggaactgacttgcattagatgaccccctcccaggtacacgtggccccagtgctacctcctagccctccagggcctcagatcttcacatctgtgtctgggtctggctttgctcccaaactagacaatatgggcagaaaatgagctgcaatactggtgggttaattcatttttgtatgtgcgtgtgttcaggcaaagagcaactcaaagaccattcaattaaacatccttacccacttaaagattaggtaattgagatgtggacacaggaaaggactggtccagggttttatctatttattatgaatttcttggacacagatgtttattgggtgtcttccatatgcaagtattgtgcttggcactgggaagacaagggtggaagtggagaatgacaacagggcctgtcctcatggaacttacatgcagggcaaattgggtgcacccagagggggcctagaacccaacctatgacctccacccctgaccgggtcaggtctctgtcccctttgtccctctgagaggcacgagatgaactaactcttaaagataactaggcttatggacaagtggatatgagggggaagggcatcccaggtggaggggacctctgggcaatggcactgcaatcagaccacgtgggctgagtttggggagcaggaaggtcatctggtgtaactggatacctggtagctaattagagaggtcgcagagaacctgctcatgctctctagaaagcggtggctgaaggtctgtgagagggaggcccctgaagactgtctccgcggggttgggagtgatcagaacctgggtggagagaaaggaacccccgggactacaagtgaggcttaggggcctcacttcaagaagaccacaggcccggcgatgactcaggagtttaggctgcagcttcaggacgcaaatcagcacacctctgcccccaaatctgctggactacgggagagtctatgggacaggcccggggcaggatcctgccccacctataccacccaatctctcagacttcggatcctctgggccccagttttgcagtatgcgtgtatgtgtgcgtgcggccacgcgctcgctaggagcgtgtggttcgagaccccaaatcttcccatacgcaggcccccgggagtctacaggatggcggctgaggcgggaggacattttcagcaccggacgacggacagcacccgcgcggagaagaggagtgggaggcgggtggagtcagcatcctggggcttgcttggcagctctgtcactgataggtccggcctcccaccaccacctccgggtctgccggggctccgttccaagattgggtgaagtgtaggtgacgggggaggaaaacaagcccagagagggagaaacaggcgccccgaagggcagggcttggttggaactcgaccgccccgttccctcctggagtacgtcccaccaaggaagctttgctcctgactccggctgcaggttacctctcgactccctggtgtagtcgtggcagggtgcgtcaagtgcctcaccgcgcaggcgcgcaaataattctcgcccaccttctttcttaactcttctattggctgttcccaccgtgaactggcaagcccgtgatccaatcccaggcaccgcaagtcgctccgcctgtccctcacccggatgttgcctt

SEQ ID NO: 21442 - DNA, 1491 bp, Artificial sequence
  DNA replication origin
ttgcactggtccctctcacgccgccccaggcccggctccggcccccccagcgccggtacctcttcccgcagcggctcgccgtccgggatgagcgcgggcacctccccgccgtcgccagcgccgtcctcgggcatggtgtcctggctgcttgggcggccccagcctgggcaccgggcatgataggggggagcacggagggctgcgacgcggcccccgggggcgtccgctcggctcagcggccgcggagggagtgcgcggagctcgagcccgagcgcggcggcagcggcggcggcggcgttggcggcccgggtgccaggcgccccgccctccgctgaccccgcccccgcggcaccggcggcgccgccggcagcgcctggcaccgcgggcgctccgcccgtccccgagaagcccccgctgggcggctggacccctgggttctcctccggccgcgctcgcgctcgcgaccttgagctggtctaaccctctggcgcctgagcttcccgggctgtaaaaccctcgaggaaggagaatctccaaggtgggtgggcgctcgcggggtcccatctctaaggagtaggcccagagttaagcccacccagatcccatccctgaagcctcacttggagaagagggtagttacagctgagaaaagcgtgacgagtctcactggctgggcaggggtgctgggctcagcttaggacaggcaggctggggccaggacacaagggaccctaggctgcgtgaccttgggccagcatgctccactctcaacctcagttttcccatctgaaaaatggggataaaagctggactgagtggctcatgcctgtaatcccagcactttgggagaccgaggtgggaggatcactggagtccaggaattccagcagccttggaaacatggcgaaaccctgcctatacaaaaaattaaaaaatgagctgggcatgatggtgtggtgtgcacctgtattcccagctacttgggaggctaagacaggaggatcaattgagtctgggagtaagaggctgcagtgagctgtgtttgcaccactgttctccagctgcgtgataaagtgagaccctgcctagaaggagaagaagaatgagaaggagaaggagaagaagaagaagacagaaagaaagggagaaaaagaaataaagaaagaaagaaggaaaagaaaagacatagaaaggttttggattcagtttacaagtatccattgtgccctgcagtgacatgggaactgacttgcattagatgaccccctcccaggtacacgtggccccagtgctacctcctagccctccagggcctcagatcttcacatctgtgtctgggtctggctttgctcccaaactagacaatatgggcagaaaatgagctgcaatactggtgggttaattcatttttgtatgtgcgtgtgttcaggcaaagagcaactcaaagaccattcaattaaacatccttacccacttaaagattaggtaatt

SEQ ID NO: 21443 - DNA, 1342 bp, Artificial sequence
  DNA replication origin
ccgcgctcatcccggacggcgagccgctgcgggaagaggtaccggcgctgggggggccggagccgggcctggggcggcgtgagagggaccagtgcaaaaggcgaccccaagagaggggctgaggagggaagtcccagagcccctacggccaatgacgtcattggggtcacctgcgccctgccaagggtccaggggcccgcgttgggggtaggggtggggcggctggacagcaatatgcggggcgacttccgcccccggcgtcccctcatccagcctcgcccgtcctgtgacgtcagtgcctggcccccacgcgtcccagtgccgcagcgcagcgggggatgctgcccccacccccagggccgcggggtcaggtccccagcccggcccagccgctcacgaggtgtccgggcagcgcctgcaatgcagcagcagtcgcagagcctagaggggaggaggggaagaggaagggaggcgcctgggtaccccttctccttgtcctcgaggtgaggattgagggcccattctgctggctgggacccccgacggcccctcctcagccctagccaggaaggtctgcaggacctggggccccgagtgatgtgtggggtgatagggtggtgagtggggctgtgcatgcatttgggtgaatgtagcctgcttctgtgtgtgtgttgtgtgggtgtgtgaattgggtgtgtgcgccctgtagtcaggtgaggggcgagtgggtgcctggctcgggttgtcacccagtggtctaggtgtgcgcatgtgagtgagtccctttgtgggcaggtctctccctgtggagtctgaggagcctgggggtcagtttgcagtggggggtggggagatgtgcactgtggtcaggtgaaggtctggtatgtctctgggcttcactgcacgtgcaacgtgtatgtgcacgtgtgtgtcctgtggtggatgggtatgtggtgtgtgcgtgtgtgtgtgtatgtgtgtgtaccatgctacggttctgggagtctgtgccctggggacaggcgagggtctggagtttcctgggtgacaggcagtgtggccctccacggtgggtgggtctgtgatgagcatgtgttggaggggcgtggacaagtgtgtgtgcacctgacaggccttgcaggtcagctggcgctgtgctcccatgctgggtgatggggacaggctgtatctgggctgggctagggggtggttcctctcctcttgggcctctggaggcctggtaggtctggggtaggagaggtggccccttaaccccccttttgttgtttccacttttttcctcccctttttacccttcccctcgccccactttatccctacc

SEQ ID NO: 21444 - DNA, 1123 bp, Artificial sequence
  DNA replication origin
gccgcgtggccgcgtgctccgccagccccaccagctccttggagacgtcgcggacgccgtgcgccgagtagtcaaactcgccgcgggccgtgcggctgtcagcgcgctcatggtacacctgcgtggtggtgtaggcgtcgccgttgcggtagcgcgtgatctggcgtgtgcgccgcacgtagtgatagctggtggccttccaccagacgcacggcggcgcctgctgcagccggcggatcagcgccagcaccgtgtgggcgtcggtgcgtggcgcctggcaggaccgcacgtgacagtgccagcactcagccaggtagaggaggtagaggagggagacgaaggccagcgggatgtacaggtagccatcggagcaggggctggccgggtaggtcggtggcgggcccccggctccccgggccaaggcggcctcgggccccaggaccagccgcggcactgtggccaggcgacaccaggccaccacggccccgcaggcgtggatgagcagcgtgaggagcaggcacttccagtgcgactcgcggcacagggagcttcccagggactgtttcaggggccgctgctgcaggtgggcagagaaagggaagtctgtgtcaggtggggccatcagtggggcctgccactttgcttaacccggctgaggaaggtgataccgtgagccccattttacagaggaggaaactgaggcttagagggatgagcagcttgctccaggcttcacatttccagctcactcacagtggcgctgcatattcaaacccaggactcgctgccccaaacccatcctccactgtgccgtgctagcactcggcaaaccgcacacaggagacagcaggcccacctcagccaggagggatggatccttgcactggctattgtgggttctggtcctggctctgccctgatttgctgtgtggacttggctatatctctgccctctctgggccttgattcttggtcctgttggtttgggaagccagggtggaaggggtctgaggtgtaaacagcatgggctttggagttccactgcccaggagccagtgctggctccactacttactgtatgacttgggcaggtccctcatcctctctggacctcaatttcctc

SEQ ID NO: 21445 - DNA, 1836 bp, Artificial sequence
  DNA replication origin
ggtcccctttctccaagtggatgtagctccatgccagagtttggggagtggcctgtaggctggattccatgcacgcttgccccttagcccactgcccttgcacagtgaacaccctttactgctgcacatgtgacaatgccacgtccaggaatctttcagagctccatcagggagtcaggaccttccttttccctgatgttttctctgcctttggattccatgccagcctgccctggtttggggctgccctttccagctttgtgtcttctgacctgcttcatgccctttccctcagattgataatgtcagtagccgctgggggggcaccgaattcgagtcacagaccatagctctttctccccactttggggaccggccaccactcccttagccctcggcatgcccagcagcagagtggaatgtcccactgagctggaacaagggccaccttgacaatgccttagcagtgacccaggcccagataccggagtcaggggagccaggtgctcagagcgcctcacacttgagtctcagaggccccaggctaggcaggggaggtttcctctcctctgcttacttggttcctgggaacactggagcccaattctgagtcccttcccagaacccctcatcgtgccctgaaccatgggggcccataatgcttgcagtggaggccttagacccatgacccaggaatgcacaggccttccattccatacctttatttaatctgcatcttctcagcctcctcccttccccgccaccccttagagggcgtggaagccctcgttgaaagggaaggaactcctctctcctccctgggggagggtcagtgtcccctgggccaagactcgttgatgggagaagcaagggcctgcgtggtggagcaaggacatcatccaagaggctgtggccaaggcccagcccctcggatgccctctaggcctgggccccatggatcatcaggaaagtgaagagtagataagtccgggagggcaaggaacgggcgtccctgcgtgtgtgtggctgatggaggcagacatggactttgggaggcaggagcagaggccaggggatgtggggaccaggtgaggccctgagaaggaaccccaggttgtaggggtagctgcatgtggggggagtgactggccctgagcagcgggagagagggcaggcaaggaggaggggcctatcaggggaggatgggaatgttgggtgagtagcagggccaaggccatggtgccaccacagccagctcttcagccccagggaagccaacctggctgggcatggccccaagcctccaatttgtgcttctgcgtcactgggggggctcccagcatggcctcagccccggtagggaagtgtccacaggcagcctctgctgcaggcaacagctggccgcaggactcctcctccatcccagcctttctggaagcttcttctcctgccctttgtgagaggccttcaggccagatcatcggccatcttgggggatgaagccatgctgggggcgattcttaggcttccacttcctccaaaatgaccacaggtaactgcattttagtctgtttaaggacccccacccccaccctcacccctgccccttgtgtgtggctggtctgttttcccgcctgttttggacaacaatcactcgggcatctaagcccatggtggaatggtggggagggggccactctgggggccgtggggggtctcagagagcaccctgcccatccccctggcagccgctgtctccgtggacaatgagcaccgggaagtagagggcgtcctcatagcagggcgggctctccaggggttccgtgtcctctccac

SEQ ID NO: 21446 - DNA, 769 bp, Artificial sequence
  DNA replication origin
caggtggcgccaaaggcccatcgacgccatctgcccggctgtccgggcccagtctccgggctcgcccagagaacccgaaatctggacaaacggaaaccgtaggtggaggaagaagagggctccagggccaggttcaagggcatcgtggtgagagatgaggggttcggaggactggtggatctgggcatatcgcgaaggtggtaagggacccaggggtggagtgggcggtgcttgcgccaagagggtgagcctgagtgtgggcggggcgtgcgataagaggctcgctcggtagcgctcttcgcagagccgtatttgtgcgctacgccgcagccagggcgctctgggtgggcgggactccagggcccccaggggcgtggcttgcatctttcgtgggcggccccgggggcggggctccgtgtaggtgaaccgctacctccgctcgatgtgtgaggtgtgacagtcctacgagggcgcagttcttccacttttgtgagcttgagagggggcggagcttgtagctggggacggagcctgaagaggaggttgaggggaacttcacacgtttccctggagggcggagtttacatcatcccccaacagagttaagacctctgagggattccctgcagtgtccagggctctgtgaggcgaagcttgcagttgtgttgggcggggcctgtagcgccgcgtgaagagaatgtgtaaactcggggcgaagttcatacctcctagaagccgagactaatagttccgccaatctgcgcgcgcc

SEQ ID NO: 21447 - DNA, 1739 bp, Artificial sequence
  DNA replication origin
gctctgccctctctgggctcctgcttccctgagaatctctgaggcataccctcccttaaagggatcttaccttatctctttgaggactcagacaaactgaaggaagatcccctcctttttgctgagtcctcccagaacctcccttaagcaccagtgggggtcagaagccttgggtaaggttgacaccccatttattggagaagaccccagcacccgccccctgaggtcttaagggctttggtgtatccttggtcacgagcgctgggccaggaagcagagttcctgagagccaagtctagtggttgagagaggaccctggctgggcctggggagcaggaagccatctgtccagctgggcagcccccatgggtccctggtgcagccccggccatgtgtccagcgccccatactccatgaggggggtctgcaccccatcacacgctggttctgcaggtctgcacccctgtgaggctgcccctggggggcatgggttctgttgggctcttgctcccagcatggatgacccagcgatagcagtcagtgatgcgcttgttgggtgcatgggggccacagcgggtgcagtacacgatgcccagtgcaagcaggaccaccaaaaagacacacgttggcaccaggagtgccaccagcagccaccggtcatccctctggctgtgctcggcaagaccagcctcccccagggctgttggggctgctgtgggagctggtgagggcagccacagggccaacttgggactggggccatcttcccttgggatttggggggctttggaatggggatgtgtagggctgatgggtgaggtctggttagtggggctctgagagggcaggagggtggggagggctgcgggctgggtggcagcaggcacagagatttgatgggcaggagacacaggggacctggaggtggtggtcagagagggctgggcagttgggataatgggaagctgggtggcctgggttctgaggacaagggcatctggggcttgagggggtagctgggcaccgagggtggtgaccagaggggcatggttaggtgggattccaggcaaatgagtggtggtctgggtgccagcgacccgggtgtctggaaacatgggggactggtgggcagggaagagctccggatatttggttgagatcatagggggctggtgggcaggaggctgtgctgaatgagagacagagagaataccgggttggtaggcagaaggcagatctggatagttggctgcgatcacggggatctggtggtcacgggacaaagctgggtgtgtggcagggatcacaggaggctggtgggcagaaggcagtgtgggatgcgtggcagagaccaccacaggccgggtgacggagagcactgaggagtggtaggggaccctgggggcactgagcgggggtggccaggtgggctccgggtagggtatctgtggctctctgtcctctgggaagctcggtctataggccagggcaaagtcaggcggctgcgtaggctccatccacaggatcccaggcatctccgtccagccaccgttgaaggccttccaggcctcgtcttcatcttcctcatcctccccgtcatccagcaactcatctccgaggtcctgggaagcctgggcacccatggcccctgcagggctgcagctgatgccatcagcctccagctcatgtccctcgctacaataacactcgaagccaccaacgtagttgacacacatctg

SEQ ID NO: 21448 - DNA, 1093 bp, Artificial sequence
  DNA replication origin
cgcgcagtgggcgctgcagctggcattgccgggcctgccgctgcagcccgatccacagcagccggctggctgggcccgcacccaccaggctgtccacacgctgggcctcctcgggggtccgaggagtggccaggtcgccccccagctcgcggcaggcccgccaggcctccaggaaggtgcggcgccgtgggaagagagcgtagcagctgctggggccgcaggcggcacggggctcagcagcccaggggtcctggcccagtgtgggccctgcggccgcccaggccagcaacaggcgcagcagcatcgcgatgcccccggactggtccggccccgggctggcggcagctcttgacagggggagggcctggggcctcctgcgggcgggccgggggcgggcctggggccgggctcaggccttgtaaggagtgggctggggcggctgccagctccctgctccctcttccccgggggccgctagagcaggaagcagtggggtggggggctctaaggttgggggcggaggaggggagaaggcgcagttgacggctgccccaggccccatggggctgagagtcagggggtgggaaaagcctgcctgccgagctctgtgaccctcaagttggggctcggggctgtggggtgaggtcgcttcccagagactcagagacccaaatctggacacagcagccccatcacacccgggagcagtctcagcccagctgctcgccatgcacgggaacaccctcatgcccactcctttcttgccccacagacgcgcgcatgcgcctcccccacccccaaccccatgcaagagtgcactctctgccaagctgtttgtcccttcacctcaccgtggacctatgctggcttgcagatgactcccttgccacacgtacacacattctgacatgctgagaccctaggtgcacatacaaaaatggtgtggcattctacatggcctgacatatgaagacctccgattcggcctgaatggaaacagcttggtcacccaggcacaggcatcctcagcctctcatttatttactgagcccctgcgtcagcctctccccctatactcaagctttctggttcc

SEQ ID NO: 21449 - DNA, 1138 bp, Artificial sequence
  DNA replication origin
agagtttggaggcagatgacatagaccaggaggccatggcaaggactgtggcccttcctctaagcgagatggggggctcagagggttctgaatggagaagtgatcagatctgacttggattttgaaaggatccctctggcaggatggagagggcaagagagacaccacgggagaggctgttggggaaatctagattggcgttgctagccacctgggccgggggtgggtggcaaagaaggtgtccaggagtggtcagattctggatctcttttgaaagtgaagccaacaggatttgctgagagactggatgtgggctgtgggagaaagagaggagtcaagcatgacctcaaggtttggggcctgagccaacagaaggatgaactcctccatcttgacttttgtctcctgagaaggggagtcattctgtgtgcttcacatgtatagaccttgtaagaaggaacttccaggcatatggcaagaacttcctaagccctggttctcgaggggctggctgggtctgcagggccagcctaggcactgtaaggtggtttgcaaaaacgcaccctggtctccacccaccacatatgctcagaagacaggaacatttgcttcaggctccacagctgacaaagcacatttgcaaacactgagcgctgtgacgcaatatctcagccctgctgagctaaaaatcctggactcattgccctcatgttgcaactgagaaaaaaggagacccagagagggccagtgactcccctgcagtcacaaagtcgatccatctgtggcagagggggaagctgcatcagggcagtttactgaagggcggaacctctcccccacctccccacactgtttctaacttctgctaagagtgcagcgggtgtgcatgggttaatccgccagccagctccccagaggccatcctggatgatgggctcagtgcacatgcctccagaggcctccaggaagggcgggaagaggaccctggccaggccgaaacagcaggccccgggggcagggagggctccacacacgtgatgcctgtgtcacatatacacatatatgtcactgtgtgccccatgcccatacatggccttgcatgggtcccctcacagccttccacatcctgcgtgcagcc

SEQ ID NO: 21450 - DNA, 751 bp, Artificial sequence
  DNA replication origin
gtacaaggagtttcaaagagtgtcggtggcaggaatgggactagagccaaggtctccttattcttattccagttctctttttgctgtagcaccctcaggcatcatttgagcaaagttctgagagttaggcctcaagtcaaaaaccaaagacagggcagggcacagtggctcacgcctgtaatcccagcactttgggaggccaaggtgggccgatcacatgaggcccggagttcgagaccagcctggccaatatggtggaacctcgtctctattaaaaatacaaaaattagcccggcgtgttggcgggtacctgtggtcccagctactcgggagactgaagcacaagaatcgcttgaacctggaggcggaggctgcagtgagccgagatcaccccctgcagtccagcctgggtaacagagactccatctcgaaaaaacaaaaacaagatgggaggaaggcataccaggaagaaggcacagcctgggcaagactactgaggtggcagagctcaagatgggtttggagaatacaaaggactccaccaggctgaagtgagggacattgttagggacagtaaggagtggagaaaaggagtaggggcctgtcttgaaaggtgttgaagttgtccctaaaagtccggggctcccttctggaggccatggggaagagaggcatgatgagagatctctgtggcttgtgtgtggtgggtggagggggcttggaggccagggaccagttaggaggctgttgc

SEQ ID NO: 21451 - DNA, 2490 bp, Artificial sequence
  DNA replication origin
gcttgaacctggaggcggaggctgcagtgagccgagatcaccccctgcagtccagcctgggtaacagagactccatctcgaaaaaacaaaaacaagatgggaggaaggcataccaggaagaaggcacagcctgggcaagactactgaggtggcagagctcaagatgggtttggagaatacaaaggactccaccaggctgaagtgagggacattgttagggacagtaaggagtggagaaaaggagtaggggcctgtcttgaaaggtgttgaagttgtccctaaaagtccggggctcccttctggaggccatggggaagagaggcatgatgagagatctctgtggcttgtgtgtggtgggtggagggggcttggaggccagggaccagttaggaggctgttgcaatagtctgggaaaggggagggagctggctggagagcccggcggcagggcgggccgggctgggggaggcagcctccagaggctccttaggggcagtcctgagcctggtccaagggtgtggtgagcccagtcatgagtcgggcaatggccagtactagggcgtctaaggggacggatggctgcaggccgtctgacaagtgggtggatgggatcagaggtcaggagtccagcctctgtgggggtgaggggttggggggcaagcaggcaaagcaggagaagaaaggtcaaaggccaaattccagatgtcttggctgggcctacttgcaagtggaaggaggcctgagccagcatgagggatggagaaggcaggaaggggcacctctggcctctgtgaggctaagcgtctggtggattgggaatgagacttggagaggtatctggttgctcagttcgggagggtgcccagcactcagcagcctccccaaggttgtgtgaggtaaggttgaggctgcccaagaactgttttatctagtgaggctggaggatgtagcgggcatagcatcagggatctgggtttaaggggctggagaggggttggttggggtcttgttcttcctgctagtctttcagcctagcagagagaagatgctaattgatacaataaatgcttggaggatgggtgggtggatatatggatggatggatgcatggatggatggaggcatgcatgagtggatggactgatggacggatggatgaatgcatgcatggataatgaatgagtggggtggctggctgggtggatacatggatgttgatctggggtgggtgtgtgggtggatggatgcatggatgggtgaatgcatgggtgtgtgggtgggtggatacatgagtagatgggtagatggatgaatgcatgtatgcacagatgtatgagtgggtagaaggatgcttgggcagaagatggatggatgggtggatggatggatggatagatgtatgcatgcatagggctgtatgtggctggacagatgcatgggtgggtggctggacagatgcatgggtgggtggatgagtgggcagaggcatgcatagatgatgcatgggtgcgtggtgggtagatgcatgagtagatgggcaaatggatggatgcatgggtgggtgggtggatggatgcatgcatgcatgtatgaaggcatgggtgggtggatgcatgggtggatagatggatggatgcatgggtgggagagtgaatagatggatggatgcatggatgcatgggtgggtgggaggatgtttacgtggagaataggtggatgggtggttgggtggacgggaggctaaatggaaggatgtagaaatgagtaagtggatggatggatagatgggtaggtgggcaggtgtgtggatgagaagattttgagatgcatgtttggatatagggccacaggcagaagtgggaggtcctgagtcataactagcagccaccatgatgaatgacatgctcagaacagaactccgcggctctgcagaagtgcagcccaggacaggacaacttagactaccactggcagggatcaggtgtgatgcttctcgtggtaccaaacagcctgttttctgctgggttctgaggccaacatgtctccctggctgagggtagggacgatgtaccttccaagctcaggaggccaggctcagctcacatcaggggtcaggaggctggggttccctgctctgatcatggcccatatgaggggagctcatctgaagaacagcatgaacacagaggcccatggcctgagaaggagccttgtcttgcagctactgggacaggcaagaagcagatggtggttttggatgccatgtgtgggcctgtgggggtgagggtgagggcggcctgaagaagggctggcccagagagggcccagtggaacagccagggtggggtatcgagtgtgattaggggacgccccccaggcaggcgtcctggacggccttggcacgccaggccgctgagccagcacattgctttgtgtacaaatcacctccttttctccttttcttctgttcccatcccccacctccctcca

SEQ ID NO: 21452 - DNA, 738 bp, Artificial sequence
  DNA replication origin
gtgagggtgagggcggcctgaagaagggctggcccagagagggcccagtggaacagccagggtggggtatcgagtgtgattaggggacgccccccaggcaggcgtcctggacggccttggcacgccaggccgctgagccagcacattgctttgtgtacaaatcacctccttttctccttttcttctgttcccatcccccacctccctccacgcctaaattcttcccaaaccaccccagccttcggactgtcaggaggaagctttgatgtgtggtgggtgggaggccactggtcttgggtgggcgctggggggtccctgccacccaagtccaggcatctaccccaggcaggagttggggagggaagggagcgactgcagcctcctgctcctcccccccaacctgtgtgcttctggatgggagatccctgccggaaggggaggcagtggtgctggggagtgggccgggtgggaggaataggcttggggaagggggacccaggaaaagtgtggtccagaccaggcctagcccctgagggtaaaggatcttgccgaccgaagggggctgagggttgggggtgtatttaccatggtgagaggccatgttcgtgttcctggatgcttgcatgtgtgcatgtgtgtgtgcacgtgcatgtgtgtgtgcatgtgtgtgtgcgtgtgcatgtgtgtgcttgcaaaggcctgggactgctgtgagtgtacagctgggtgatgtgcgtg

SEQ ID NO: 21453 - DNA, 878 bp, Artificial sequence
  DNA replication origin
cccctgtctcccaggccaggctgatgctcagaggaggtggggcctgcagcgcccagacccagctgcagggtgacaggaagaaaggatggggctgggggcagggcgggggtgcaggaagtgcctttcttggaactctgcacaaaaatagtccattctgtccctacgccgagtctcagggtcccacagggaggtgtgtgtcaccaaggagaccctcagctgggaggggccggtgctgaccttagtctggcttctgctagcacctccctccctccctccaccctccgccctccacccctccacccccactgcggcctctgccccactttgaagtcctaacataaataccatgtctgcttgggttccccttcccggcctggtcacagcccccagacctggcttccaccccagccagccccgtgggagtgtggtgccagcagacaagagggaggtctggaccacccagggaaggtggcgagccagagaccctgagacagagacagggagacaccggtggtggagggggagaccaaagtgagcagagaatggagagacagaccccagaaaccaagcaggggacgatcctgagggcaggagaggagagagacagagactccagagacagagagggaagagaggggagcagagagaaagagacccctgcagccagagagagacggagtgagaccctggggacagtaaggggcaggaggaagagggcacaagacaggaagcaaaggggaaagtaagaaccttcagagaaggttccagagatggggtggggggaggcagggacaggggtagcagggggaaggatgtggtggaaagagaagtgtccctggcaagtgggaccagccatctcgatttcctgggattggcag

SEQ ID NO: 21454 - DNA, 1394 bp, Artificial sequence
  DNA replication origin
tcctggggttgaggtgaagattaaatgagttaatgcaggagagtgcttggggcacaaattactcactatcaaatcttcatctcaggcttgtgagcgccccactgggctgtccttgcacctgcggctgtggcccacaagccgacccctggagcacatagagcttttgccgcttggttctcccactggatctccacctacccaccctgtccctgcacagcccagaaagctgatgtctcagctttggagccagatgcatgccagccggggctgagtacttgtttttgcttctcctcctgcatagcacctcctccgagtagcctatcaggatcccagcagtggctgcacctccaagaccctggccgtgcccccagaagcctcgattgccaccctgaaccagctctgtgccaccaagttccgagtgacccagcccaacacttttggcctcttcctgtacaaggagcagggctaccaccgcctgccccctggggccctggcccacaggctgcccaccactggctacctcgtctaccgccgggcggagtggcctgagacccagggggctgtgacagaggaggagggcagtgggcagtcagaggcaagaagcagaggggaggagcaagggtgccagggagatggggatgctggggtcaaagccagccccagggacattcgggaacagtctgagacaactgctgaagggggccagggtcaagcccaggaaggccctgctcagccaggggaaccagaggcagagggaagccgggcagcagaggagtagcttgaagtggccagaagggtcattcggggcgggagaccctgagcctgctgagaaatccttttagcgccagcaagccccacccagggccctgtcctgtgtctgccaccacctttgtctgatacttgtttccagggaagctgggggaactgccacatctgaggaactggaataaagatgagggggcttcgggggcccccagactgtgtgcccaaggccccttgcctcttgttcttctcccccagctgagggtgagccagcctgcaatgagggtgtgccaagtgggggcgaatccgacagatgcccaacctctgacgtggggagggtgacggtctcagctccttttacccttcccctcatgggcatggctgaggcagggctccacccaagtatctcccaccaggctgggacttccagaccctaaaaggttccaatggctcttaggtgtcaggaggatttagagaggccacagaacagcagcaaaggcttggggcccacccctgtcctggacaccagaaggacctgcacctgcaagcctcagtactctcatctgtaaagtggggacactattgctgccctgctcggctcccagaagtgtcccagtgatcaaaatgggtga

SEQ ID NO: 21455 - DNA, 1154 bp, Artificial sequence
  DNA replication origin
ctcagatgtggcagttcccccagcttccctggaaacaagtatcagacaaaggtggtggcagacacaggacagggccctgggtggggcttgctggcgctaaaaggatttctcagcaggctcagggtctcccgccccgaatgacccttctggccacttcaagctactcctctgctgcccggcttccctctgcctctggttcccctggctgagcagggccttcctgggcttgaccctggcccccttcagcagttgtctcagactgttcccgaatgtccctggggctggctttgaccccagcatccccatctccctggcacccttgctcctcccctctgcttcttgcctctgactgcccactgccctcctcctctgtcacagccccctgggtctcaggccactccgcccggcggtagacgaggtagccagtggtgggcagcctgtgggccagggccccagggggcaggcggtggtagccctgctccttgtacaggaagaggccaaaagtgttgggctgggtcactcggaacttggtggcacagagctggttcagggtggcaatcgaggcttctgggggcacggccagggtcttggaggtgcagccactgctgggatcctgataggctactcggaggaggtgctatgcaggaggagaagcaaaaacaagtactcagccccggctggcatgcatctggctccaaagctgagacatcagctttctgggctgtgcagggacagggtgggtaggtggagatccagtgggagaaccaagcggcaaaagctctatgtgctccaggggtcggcttgtgggccacagccgcaggtgcaaggacagcccagtggggcgctcacaagcctgagatgaagatttgatagtgagtaatttgtgccccaagcactctcctgcattaactcatttaatcttcacctcaaccccaggaggtaggtcctattaccccattttactgatgagaaaactgaggcacgaagtagttaagtaactcgcccaagtccccacaacccagtggcagagccaggattagaacccaggatctgtctacagagtctggactcttcaccaaggacaggaaggtgaaaggcggggatggcgtctggctctgaggacacggtggagggcctgttacctggaagcagtg

SEQ ID NO: 21456 - DNA, 904 bp, Artificial sequence
  DNA replication origin
caggtacagtccttgctttaggcagtgacccctccccatgccctagcaaccattgaggggcttcagaaaggatgcgctcctctctaggcctcagtttcgccatctgcaagaggggagggtgggctcattctctcctgcagggctgttctagggtcctggggacctgccgctggggggcccgcctctgactcaaaggggcagggcagggtgaggtggtggcagggacataccttcctgggtcctcagggccatgtagagcagcttgcaggcctgcaggagccgcttgacctgggcgctgggtgagtaggtgcggagcagctgcagcagcttctggcgcacttgctccaactctactggggagggcaggctcaggtgggacccgaaggctccggggccctgggcccgggccaggcggaggccctcagctaggcggcccagggagccgtctgcggcaagccggcgccgcaggcgggctgccaggatgggccggagaggcttgagcacagagcaatgcaatgacttctccaggacatgttctgccggagggacagggaggggtcaggggaagactgggggtatggggggcagaggcaaggggagaagggagcaggggtagaatcggggaggagaggcaaggaaagcaggaggaggtagcctgggtgagacggaagagttgggggagagaggggatggaactctctcgaacagtggtaagacaagatggatttgtaaagcagcagaacagaatcagacaggctggcgctgtggaggggagcagagggtcggatggggcagtgctggagctatggagagacggagcctcacccagcctcttaggcgacagcagcttctcagggcccagctccgcactcagcatggcccgggcccggctcagcgcctgacg

SEQ ID NO: 21457 - DNA, 1592 bp, Artificial sequence
  DNA replication origin
agagaggggatggaactctctcgaacagtggtaagacaagatggatttgtaaagcagcagaacagaatcagacaggctggcgctgtggaggggagcagagggtcggatggggcagtgctggagctatggagagacggagcctcacccagcctcttaggcgacagcagcttctcagggcccagctccgcactcagcatggcccgggcccggctcagcgcctgacggatgccctgcagctcctggggctcgggcccagcccgcacctgggtcagtaggtcctgcaccagctggcccgcggctgtgtgtcggtcctgcatcagtgctgccgcagcccggcccacctgccgctccggtgccagtagggagcagaaggcggcgctcatggaccgaagcagaggtcgtcggcggcccaggtggggtgaggtcgctgggctcccccgggaccctggcaccccctcctcctcggagctgctgggggagccgcagtccacctcttggagggagggcataggcggaaggctagggccactgcctgctggcacgcggtaccccactgagctctccctccgtagcagctggcaagggggcagccgctctgtctggctggggactgcccctggcagcacggggacggggggaggtggcacggcaggtggagacagggggctggaggtctctgtggacacgcgcactttgaagcttctcttgaatttctcccgcttggtgggccctaggtcccccgggaacagggggttgaagaagcacaaggcggctccggtgccctggtccagctcttgaggggaccgggccttcagctggggcaacactgggcctccagccgggccccgctgagccttgatgttgagggaggagctccagaactctagggaacaagaaaccgactggggcctccgggactggttaggggaagtttcccaaccaaggcaaggcaggggcttcgggcggtgtgctgcgagccttgccttcccctcggcctcagcttgttcatctgtgcaatgggtggcaggaagcccttaccaatgcccagatgggagatggcctccagctctttgtgagtggctgcgtggtggatggctctggggagctgcagcgggaggagaaggatgtccctgaggccagagaggggagcagaagggagtgagggccgaagagggcgggaaggatgggctgtcccaaggagcagggcccgtggacaccaggcaccctgcgggcagactcaccgggtgtggcagtaggcacagatgagctggactaggtctgggaacatgagctccgagccctccaaggagacgcctgagagaggagggaagtgaggtgcttctctggggaacctccctgcttccagccccttcccgccaggccagcccctcaccgccagggctctccaggatgtagtggctggagacgaaggaggggccactggcttcaggcaaccgcatgcacagggcctggcactggcgggtgttagatttccgcacgaggaacgtctgcaagtggatagggctcaggcagctcaggaccttggcgtcccatccctctccctcccacccctggctggccagtccctggag

SEQ ID NO: 21458 - DNA, 1149 bp, Artificial sequence
  DNA replication origin
ccttgcaagagaatcagggctcccgtggggagcacctgaaccaggccgacttctagggtgcctgcagattgccactcctcacactacccagcagaggctagagcactgtgcgtggggccaggctggggagggggaggtgggcgctgggctgcctggcgctgggcagagtcaacatatggcaccgggagagtgcctcggcggggagggtggatgcgtgtgcttggagcctgggtcatgtctgcacctgtcccagttgcctggcagattggcaaggcaggctggcagagcctgcgtgcgtgggaggcagccggcagcaccgccatgtgctgacgacctcacagccagactccccctggttagcactgagtgtcagaaccacccccagaacctcagttaagcaaataggttggtttccatggagacatggcatattttctccatggcaacctaaaatcctaaaacccaggttcaggaatgagtcatctatggacagtagagggtgctctcccacaaggctgacctgaggccaggggcagatgagcaactgaccacagagccaaaggtgcccccagagcatggctggggcctgtggggactgaggccgcttaaccacttcccgcccacgtgtgcaatgtgagtagctggtgaggctgcaggaggccgtgtgtggaggtggcatcccccagctggggccctcagagcagggctagcatggaggggacccctgacccccaaagcagggtccagaacagaggaggcgggcactggccaggcagggtggacacacaagagttaactggcgggtgtgacaggcggaccgccctcaggaagtgttactcactggggatgtgcgtgccttgccttgggactggattctcttcctgaagcgaaggagctcccagccatggaaagccctggagagtcaggcgcgggctctcctggagcccccagcccgtccagcttcactactgggcacctggcgagagaaaagttagtgaagttggcagggcagccaggtggggcagggaggggctgcgagaggagggcctatccggggatagagaaagtgggaaacccgggagtggggaagaggagagcaagggtcccagcccctggctccctgctcagatctgggtgcctgcccccagg

SEQ ID NO: 21459 - DNA, 2160 bp, Artificial sequence
  DNA replication origin
gaagaagccgcggaaggaagggagcgttttgatttcctttctgctgagcccgcgccatcctttaccacgctgcagccgagctctgccgcggtttccctccgagtccggccgagcgcgccgcgcgttcagggcgcgcccggtccagggtgcgcgcgccggcggggagggagaggagtgcgtcccgggaagccggcggggcccgggcgggcgggcgtctgcacggcgcgcggccgagcggcggggccgtggctcctcctccctcgtagggggcgagccggcgcgccgggggctgggggcggtggcgggcggcgggcggcgggcggcgggcggcgggcggggcggcgctcggggctcggctggcctcggctcgcctcggctgcgctcggcaggctgcggtaaatccgggcttgcggccgctggcgtagtctgtggccgggtggtcgttgctgcgcgccccgagccccgagagccatgcagatgtcctacgccatccggtgcgccttctaccagctgctgctggccgcgctcatgctggtggcgatgctgcagctgctctacctgtcgctgctgtccggactgcacgggcaggaggagcaagaccaatattttgagttctttcccccgtccccacggtccgtggaccaggtcaaggcgcagctccgcaccgcgctggcctctggaggcgtcctggacgctagcggcgattaccgcgtctacaggggcctgctgaagaccaccatggaccccaacgatgtgatcctggccacgcacgccagcgtggacaacctgctgcacctgtcgggtctgctggagcgctgggagggcccgctgtccgtgtcggtgttcgcggccaccaaggaggaggcgcagctggccacggtgctggcctacgcgctgagcagccactgccccgacatgcgcgccagggtcgccatgcacctcgtgtgcccctcgcgttacgaggcagccgtgcccgacccccgggagccgggggagtttgccctgctgcggtcctgccaggaggtctttgacaagctagccagggtggcccagcccgggattaattatgcgctgggcaccaatgtctcctaccccaataacctgctgaggaatctggctcgtgagggggccaactatgccctggtgatcgatgtggacatggtgcccagcgaggggctgtggagaggcctgcgggaaatgctggatcagagcaaccagtggggaggcaccgcgctggtggtgcctgccttcgaaatccgaagagcccgccgcatgcccatgaacaaaaacgagctggtgcagctctaccaggttggcgaggtgcggcccttctattatgggttgtgcaccccctgccaggcacccaccaactattcccgctgggtcaacctgccggaagagagcttgctgcggcccgcctacgtggtaccttggcaggacccctgggagccattctacgtggcaggaggcaaggtgcccaccttcgacgagcgctttcggcagtacggcttcaaccgaatcagccaggtgctcataagggagagggcaggggtaatggggcaggaggggtggtgggatcagggagttatgaggagtggccctggatggaaaggaggcaatgaagcaggagggatcatagttcaggaggtgggtggatggtgtggaagatccaggatacttccagaggggtgaggacgctggactgtggctttagggaagtcagtctcaggcctgtcaatgtcatcaaactttgctaacctgtctttcctcctgcaggcctgcgagctgcatgtggcggggtttgattttgaggtcctgaacgaaggtttcttggttcataagggcttcaaagaagcgttgaagttccatccccaaaaggaggctgaaaatcagcacaataagatcctatatcgccagttcaaacaggagttgaaggccaagtaccccaactctccccgacgctgctgagcccttccctcccctaatctgagaagtcagcctcttggctcctcaggccaccatttaggcctgactggggtaagaaatgtcgctccactttacagaggtagctgtggtgttgaaacactggacttggatatggggtgctgggatcgattcctagctttaccactaactagctgtgtggccttgagtaaatcc

SEQ ID NO: 21460 - DNA, 1577 bp, Artificial sequence
  DNA replication origin
ctcctgcccgtgcagtccggacagcagcgacaggtagagcagctgcagcatcgccaccagcatgagcgcggccagcagcagctggtagaaggcgcaccggatggcgtaggacatctgcatggctctcggggctcggggcgcgcagcaacgaccacccggccacagactacgccagcggccgcaagcccggatttaccgcagcctgccgagcgcagccgaggcgagccgaggccagccgagccccgagcgccgccccgcccgccgcccgccgcccgccgcccgccgcccgccaccgcccccagcccccggcgcgccggctcgccccctacgagggaggaggagccacggccccgccgctcggccgcgcgccgtgcagacgcccgcccgcccgggccccgccggcttcccgggacgcactcctctccctccccgccggcgcgcgcaccctggaccgggcgcgccctgaacgcgcggcgcgctcggccggactcggagggaaaccgcggcagagctcggctgcagcgtggtaaaggatggcgcgggctcagcagaaaggaaatcaaaacgctcccttccttccgcggcttcttctttccctgtgtccgaagaggtctgcgttgcgacttacgtggtagtgcttggaaggtgcggagtagatgagagataagtgaatgtggacaaacctgtcacgtaggacgaggtggccgagtggttaaggcgatggactgctaatccattgtgctttgcacgcgtgggttcgaatcccatcctcgtcggccctgttttatagaggttgggggggaagcatctacattttcacatcctgcctatttggagcagcaagctggaggtgcgaggggtgaggcatctaaattttcacatcctgcctgtggagcagcaagctgaagaaaactgaactgggggtgagagtggaattcgatcccaagtctctctggtctttatccaccacgcatctcctgcctgctcctacttcaggtgtctgtagctctgggcagaggccaaaggtgttttctttccttctagaaagagggcccaggggttggtggcacggaaaagactagaaccgggattctggccagtgtgaagttgggggccaacgtatgatctgcaggaatcagggaagccccccattggaggcatcgccctccccgtccgaagtagtggtacttgtcctactctccagcacttctcctagggcggagaccttgtgtccacatgccctgctccccaacacacacaatctctttttttttttttttttttttttttgaggcggattctcgctctgtcgcccaggctggagcgcagtggcgcgatctcggctcactgcaacctctgccttccaggttcaagcgattctcctgcctcagccccgagtagctgggactactagcgcatgcagcacgcccggctaattttttgtatttttagcagagacggagtttcaccgtgttagccaggatggtctcggatctcctgacctcctgatccgcccacctcggcctcccaaagtgctgggattacaggtgtgagccaccgcgcccggccgcacacaa

SEQ ID NO: 21461 - DNA, 1228 bp, Artificial sequence
  DNA replication origin
taagcggtgaagcagattcaaacccaagactatctgaatcccaaacccatccccttatccttcaacttcaacctgctgccacatgccagtattagccccaggaatcctgcccctgtccctgagttaacccagtcctcacttggttattactcctcactgcagggcccatgagccccactccctagccccagacccaatccccatttccatatcacctgcttacctccatcttcacccagaacccatgtgtcttgctctcacatgccctctctcttccccaaacctcagaggccaccccagccctccagccacccaagtgcactcactggccatggacaggagcatggcaagggcagcaaagatcccagccaggccctggccgctgaggaagagggtgctgtaggtggagggcatggtgcccagctgcccgaagaggctgccctgtaggactgcactgaaggctgtggaggacagggatgggggctgctgctcaactaggcaagactcagaggctccctggaggaggtgccggcaggatacacaggggactctggacaaggttgcgcaggtgtgagcttccctagggactctgagcactcgggggcaacacccgctattcagtcctcttctgaggtgcagccattggtctgtggggctgttgaccaggaggcctgctcctaggtcaccggacaagtgactcttcccctccctgtgggcctcagtttcttcaccagggatatgagcgaccatgatgctgtctgcccttctcggatatgctgggccctttcaatgatgaggccaggctgaagccctgcataggctggctggagagggggtggaggtgctcacagttgatgaagcagacggaggccatggtgatggagaagaagggtccggggctcatgtccaccttgaccagcgctgctgtcagggcaaagagcagcagtatggccagcaggctgcccagaatgcgcaccgtctccgggacgctgctcagaagcaggcagagtgcatcagtggggcccaggccagagggggctggggaaggaggctcgacacctggggctgggcagtagggctggggggcagggggcgcaggggagggcctcaatgaagctgcctcggcagagggcgcaggagccagggcaggcctctcaccactggtacaggaaggagttgaggagggtgaagagcagcaggggcagctgggacagcagcgtcacccaat

SEQ ID NO: 21462 - DNA, 1697 bp, Artificial sequence
  DNA replication origin
attaggcaagaattgggaggccgcgggagactagctgcgagaagagcgcggacgtcacccggggcctccctctccctcccgctccccgcgcctgcatcacgtccccatggcaacggcgtgcctcggcggcgatgaatgagccactgcgaagaccggcgcgcgccgagatgcgcgccccctccgccaggcgtcacggccccgcggctgcccagggtaagggggtgcagcccggcgcccggaggaagggatgccccactcagattcccaaaagcccaggacccattcattcccagctgatcttgttgtgtcccgggagcccggggaatactccgtccaggggtccttgaccctctggttcagggctccctggctcccaaggccccccttacccggtctccgctctcccccggtcagccctctgctccccaaagcctgcggcaaaccaagcattgtgtggcttagcgccaccgcgtggccgattgtggggctgcggcgggcgtgcttggcggctggagtcccgccgtctatgtcgccctctggcgtctgcaagaggggaagagcataaaagaactcagcaattttcacaccagaaccctgattaacgcgggactcattcttaccacttaggattaacttgtgatcaatcacacttgtgattaacgttcagcgagcgcgctccatgtgttaggcacttgctacgtgctttcctcgtattactccattctcacagcaactctgtaatgcagaatattattatcattttattttacttattttttgagacagggtctcactctgtcatcaagactggagtgcagtggtgcgatctcagctcactccagcctctgtctcctgggttcaagcaatcctctcgctttagcctcctgagtagctgggattacaggcgcgcaccaccacacccagttaatttttgtatttttagtagagatggggtgttgccatgttgcccaggctggtctcgaactcctagactcaagcaatctgcctgcctcagcctcccaaagtgctgggattacagacgtgaaccaccgctcctggcctattatcattttaaagtgagaaaaactgaagccgaaagaagttgtggctttgcctaagatcccatagcagcacggggcagaacggcctcctgcactcaagactgtgaaaagtgctcttgggccctttcacttccacaccccttgtctcttttgaccagcctcacagtctcttgagataagcaggacagtgagcattaaaatcattcccatgtacagataaggagactgagactgggagaagtgaaatggttttccggaggtttcagacagccaagggtggaactcaggtctctgggcctctgacccagagctttttaggatgaggtagcagggtgaaagtgagtccaacacatctctgtgagcccctgctccttaggatgaacgaaggagcccatcctaagctactccaccgttaacaaaccaagcagcccacagtcaggagagggtcagggggtctccctatcttccagcgttttgggtgttcataggagctagatgctccagtctctccccctcctccccaattatcaatatctctaattttattttattttattttgagatggagttttgctcttgttgcccaggctggagtgcagtgatacaatctcggctcactcactgcaacctccacct

SEQ ID NO: 21463 - DNA, 679 bp, Artificial sequence
  DNA replication origin
agcagggcgggggcgaggggcaagggcaggacttcccttctccctggttgaaatgtctccatagagggtggggggcgctaagatgggggtggtgggggcgtgtggcgccggggactccccggcccggcgcggggctcgcggctcgggggcgggggcagctcccaggctctggtggagccgccactccgccagttgccttaaaaaggcgccagcgcgcgcgcatcagcagaagggctgcggctctcttccaaattaggcaagaattgggaggccgcgggagactagctgcgagaagagcgcggacgtcacccggggcctccctctccctcccgctccccgcgcctgcatcacgtccccatggcaacggcgtgcctcggcggcgatgaatgagccactgcgaagaccggcgcgcgccgagatgcgcgccccctccgccaggcgtcacggccccgcggctgcccagggtaagggggtgcagcccggcgcccggaggaagggatgccccactcagattcccaaaagcccaggacccattcattcccagctgatcttgttgtgtcccgggagcccggggaatactccgtccaggggtccttgaccctctggttcagggctccctggctcccaaggccccccttacccggtctccgctctcccccggtcagccctctgctcccca

SEQ ID NO: 21464 - DNA, 1966 bp, Artificial sequence
  DNA replication origin
ccttagcctcaaagggccctcccaacctctggcacttgagcatctctgagcctgctgggccacctgtcccagtgcctcttgggctttggaagttgaatgctgcaaccccaagccccagtttcaggtagggatgagcccattgcccaatgctggggtccgagtgggcctgaaggctcccagaggaccacgttctcagccctggatgggcagggaccctggagacctggcctgtgtggacacaggggagtaagtactgggactgagcctgtagttttgcttcttccacccaacccgttgggggtcgttctcacagcttggtgctgggtacaccaggggactcaccattggagggatccgatgggttccaaggtgcacaaaacagacccccaggtcatcctcaggtggtctacacagcctgtggctaaagcaactgctgtctccagcacttcttagcttcagtctggtgaaaggaagaaagtccccttggcagtgtcttacaggcagtcatagagggaccccacagcctggccaaaatgctcaatttcagaaaatcccagactcataattggagtgacggcccttgaaagatggtcttggatgactgagacctaatgcagagagtggagtgaccccagtgacacacggccagcacttggtggaggtggacccggaccaggtccttggttcatggtgcagtggccatgtgggcctcccacaggctgtcctctggggcccaggtgctgaggagcctgggccaggaggcagagctgtaggtcctagtcttagcggcaccctgacttgctgtgcgaccttggcgaattgtgtctgagggccgcctgagtctccccctctgcactgagggcttggcgctgggagcagacgctctgttaaagcaccattcaaggtcccagagctaggcgctgggagtggacgctctgttgaagcacctttcaaggtcccagggctgtaccagagcaggaacttctctccttgccaccctcggagccctcaagtgctgcttgtgtgttcggctccacctctgggtcccccatcccggtccagagaccagcccagagatgtctggaatccacgcagctccttgagaatggtcaggcacttctcagctgccctcccaggtcccggtcaaacgcctccaggaagtgctgcagggagagagcagaggtcaataggaccgggcagggggtccaaagggctgggtccacttgactctggggagccctgccggacccctgcaggccacacctacatccagaggccaattggtccttgtaggcagtctggggaaatgtttggttccagaaagttccagagctggtggctgcaggaatccttcaatggaggcgatgtttgcaagcagcagcaacctagttggttggtcgtggagtccgtggcatccagaagcttttccaaaaagtccgcccaggtccagactgtgctggggaaggagaggcagctggtgccatgacagaggtgtccagcccctctgcttggtgcagggcaggggctggatactggcacacggggctggctatgctcaaccataaggaatgccttgacctctggccaggaggtcagcatctgtgggttctggcccatgctcttcctctaggaacgtgccatgtggccctagtcaatcactacttttctctgggcctcagtttcccttccagtttaaggagggggttggagcaactggtaaggggctttcccaggatcctaactctgctccaggctgagctcagggagaaaaagtttaaggggtcgggggcgcctggagggaggcaaaggtctccagggtcccatggtggccccaagggtagtgaagtcctcacctggtgttttcaccctgtggccttgtccagagaggatccccgaaggcgctaggcctggcatctcgtttctttccaaggtttggacagaagtctcccctgttggaggagcaggg

SEQ ID NO: 21465 - DNA, 873 bp, Artificial sequence
  DNA replication origin
ccaagaatagaaaccaacatcagcgctgtagtctgcagtgattcgtggtttccctctcagctaattaaccttactgaaggggaaactgaggcagggacgtgggggcacggcgaggacctgggtctgcacttaggcatcccttccccccgttgccggcccccaagcgagcgcttccccccgccctgctgccagcctctgtctccccgcgggccgggggcgggggcggggccgggggaatcccagctccatattaggacaggaatcctccggcggctgccgcggctgcggcgggcggggcctggctgcctccgcaccgctccggagggctccccgccctgcctaggcgggcaagatgggggagcagctgagaagcgaaggggcagcgccggaccctccatgacccctgcacctaccagggaccctgtatttttgccaggttccctccacccctctccacatttgcgcctctaaggctcctggctctgcctctccaccttcagctctccactttccaccttcgtttctttttctgtcctttcatatccttttctatccttttcatatcctgtcacctttgccctatccccacccccccacacacccgctttttttctcttttcaccacagatgattgctctctacaggggcgaggatgtgccgttcttatcctgggattcaataatgcaagaagcaagtgggctagggaatgttcttatctgaaatctcgtttgatggagtagctgtgtgcgcatggaatcacttaagtggctggaaatgaggccacttaaaaattggagggtgggactgggaagtcccagtcacacaggaagcatggagatgaactttgacatcaaaaaggacaatttggggcca

SEQ ID NO: 21466 - DNA, 1125 bp, Artificial sequence
  DNA replication origin
tgtgcaggtaggacagccggaccttgtccgcttcggccagcggcagcagctccttgaggttccggatctcggcgttgatctggtcccggcgcgccttggaggcgcccttggtggagcggtacatgaccggcggctgcggagctccagctcgggtgcccgagcacctgcgctcccgtcccgacgcaccggcggcttcctcctccgtgcttccccgtctctcgctcaggctcgctctctgctctcctgggctccgctcggctgcgctgcccccctcgcctgcctcacgccgccttatatagctcctgccaggcgtggggggctcgttttagagccgggggggcgggagagcgggaggctgggctaagcaagctgcagcgggagccgctgactggggaggggggctcctcctcccgcccggcttccgacgtcatctcatgacgtagaatgagagagggagggaggcgggcgaggggggagcaggaggctgcggagggggccaagcctggcgggagctgagcggagaggaaggcgctgcgttaggaaagcttgaatggagtgtggggaccctggcgtctgaatgcgttcagttgagggaagcgacagggccaggtttagggcggcctgaagcccgcggcaggagtccgcagagggcagagaggggccggcactgacactaatttttctgaggagttgagggaatggggaagaacagggttgtctacaaatccccctcgttacttgacagacaaggtcacgttcacatgcagggaaggaggactttccttggcctccgtgggacaggtcactgctggggttcctctctggggactatttaacctgggattcccttggccatttttagagaacaaattcccgcccccgcttcccaaatcgggccttggcggcttatcagggggtgttcatgggggtctaagtcccgaggatgggtggaaagggagtccggtgggaaagggaccagctgaatttggcgttgatcctgttttcccacagccaagaatagaaaccaacatcagcgctgtagtctgcagtgattcgtggtttccctctcagctaattaaccttactgaaggggaaactgaggcagggacgtgggggcacggcgag

SEQ ID NO: 21467 - DNA, 978 bp, Artificial sequence
  DNA replication origin
ttgtccccagcctctctggacactcacacaggcggtagtgttgagcagaagcgtgggccaggtcctcggggtgcagcagtccataccatgatttacaaagcagttcactgcgctcaaagcccaggtagattaggacactgggaaggtggaaagggtgaggtcagctttctgttttccttgcttgatacccatgcatctcactccctcccagatcctctgcccccctaaaccccatcctccctgcccctgactccagaatctagggtcccttcatctctggcctgcctttctcttggaatctgaacactccaggcttacctctcggagatgtccagtagagccaggtctttagcatggcggctctggaacatggccaggaagagcgaggcagggccagggccagggccaggacctgggcggggtctcggctccagaggggcacagaaagctgtgaacacgggatttcctgcccagtaggctccaggtgggtgagcatggaatcggcctcgaataagcacgagtttgttgcctgcactctggcgcctgagggacttggaggtgttgaagcggcagcggaagaggcgatctagatagatgaagagaaaaacagataagagggtgagtggctgagagagagacagtggatggtggggagaagggcagcaggtgggaaattggaccgaggaagggagaagggagtccttaccagtgtccagggcagagggcagggtgagttgctggcgcacagtgaggtggtcagctgggtcaatgatgtcgtagatgctgtcaccctgggcaaccaggtccacctggagggaggaaaagaagagatgaccattagggagaacagcaggagccaatctttgatctacagtatcttgtagggtataacctctccctccatagtaattcccagttcctcaggagtggaaggctcacggcacccactccatgcccagcctcagctgaaaggaccct

SEQ ID NO: 21468 - DNA, 1290 bp, Artificial sequence
  DNA replication origin
caactcaccctgccctctgccctggacactggtaaggactcccttctcccttcctcggtccaatttcccacctgctgcccttctccccaccatccactgtctctctctcagccactcaccctcttatctgtttttctcttcatctatctagatcgcctcttccgctgccgcttcaacacctccaagtccctcaggcgccagagtgcaggcaacaaactcgtgcttattcgaggccgattccatgctcacccacctggagcctactgggcaggaaatcccgtgttcacagctttctgtgcccctctggagccgagaccccgcccaggtcctggccctggccctggccctgcctcgctcttcctggccatgttccagagccgccatgctaaagacctggctctactggacatctccgagaggtaagcctggagtgttcagattccaagagaaaggcaggccagagatgaagggaccctagattctggagtcaggggcagggaggatggggtttaggggggcagaggatctgggagggagtgagatgcatgggtatcaagcaaggaaaacagaaagctgacctcaccctttccaccttcccagtgtcctaatctacctgggctttgagcgcagtgaactgctttgtaaatcatggtatggactgctgcaccccgaggacctggcccacgcttctgctcaacactaccgcctgtgtgagtgtccagagaggctggggacaagatagcaagctgggaaagggcatgggagaccagacaaagaatgatctgtagtcaagagtgatgctggggagataacagaggccaacagtttcggatgctatagggtgaacatgaaggtgaggattcaaggcaataatcaaatcagaactgggggactctgagtggtgaggtcaaggtagagagctgagtggttcaggtgagggtagtcagaagagaggatgtcacggctatctcaattcagtggagaggtgaccaagggtggggagtaggtagaattgcctggtggacatcctaactctgcatcttctttctccccagtggctgagagtggagatattcaggcagagatggtggtgaggctacaggccaagactggaggctgggcatggatttactgcctgttatactcagaaggtccagagggacccattactgccaataactacccaatcaggtaagccacaagccaggggactagggggcagctgaggtcgtcatggaggagacacaaatcagggaactgctctggatatggacgtcggacccttaccag

SEQ ID NO: 21469 - DNA, 1083 bp, Artificial sequence
  DNA replication origin
gccgccgcgggccgggcccatcccgccgcagcggcccggggccgagcaggggctaggcggggagggagcggcgcccagcggggcccggagcgtggccaggtgaggccgccggggcggagggggcgggggctgcgccaggcgggccccggcgggcgcggggggcgtgtttgcgtgtctgggggtggtggagggagtgggtccgagggcgggcgccggtggctgctgcgcgcccgcgcgtccctgcggtcgcgggtgcgggtggtctctgcgccgtccgggcccggggcgtgcggggccgtgcacgcgcgcgtgttgtgcggaggggccgccgggtgtggacctgcgtaggtgctgggccgcggttcccgttctgcccgcccggggcgcagggcgcgggcctgccccggcgcggtccctctggcgcggggatgttttccaaacgggctgcctgcgggagacggctgtgctgcagcccgagctcgaggggggagcgccgcctccgcaggcctcctgagacccgggcggctggggacgcagacagacacctgagggagggaagagcgcgcacccaggaggagtctattggcctacccgcagggggaggccgagatggggagactgaggcagatggtgaggcggaggcgggcagacaggcagagatggggaatggggggagagagacggcaaaaaggacagcggctgggaggacagagagtcattgagaaagcagatggacagacagaggcctagacctcaaaggggcaagaaagattcagatggacaggtagattcaaagaacctgtcagagaggctaaatcagaggtccagaggctaagagctataagcaggaactgagtctgagatgaggggtaacggcccccaactcattgggtgccccgctttgaagcacatcccagactgggatcttggccaaaaagcagcctctggccaccccaagttggtccatctctttggcaccactgaatatcctgactctcttcactgtgccacccctccctggtatcccagcaacctcgggcagtttagaggaggcagaggggaagtggttgccatagcagtaga

SEQ ID NO: 21470 - DNA, 1304 bp, Artificial sequence
  DNA replication origin
gggcacagcccatccaacatgtccatctggtgtggctgtgccagcagggagtgtcccacatgcagagctccctctgggctgcaggaggtggggacctgggtgggcaggtgggcacagcagcagggggccccagggagcctaatccagcgggccctggaaaatgaggcggacgcagccatgctcgccggtaagccaggccccgcaaaaggggcaggcggcatggaaagcatgggtgccgtggggcagtggtgtctgggcccagtagcgggcagtcttctcagagcagacgtggccgcaaggtgcaaaggcatggctaggcggcccagggtccaggcagaggccggcctcctggccaagccatagaggcacataaggccccacaaggcggcagagaggacattcgcgctcctgggggccccgctcccgccggcagccccagccgtggtagccatggacgtgcccgcagcggacgtagacccagggctgctgtttgtcgggcgctgtgcggccacgggctgggctggggaaggccagagtgctgaggcccacggggcactggggccgcgctgcatttgcctcctgccgctgggcctccagttgcttcagtgtgggagcccgcagcagccccgccggtgtgcgccacagcagtgtggccccacacaggtcgatgagagagccgtcctgcagcacgttggactcgttttccacctgccagaggcagtagaagggccttactgcccaagaggcccctgctgagccgcgggtccatcccacagagcctccctggagaggacaccctggcgggcagggcaggcagggcagaggagcaaggcaggctaggaggccaagtgggcaggcaggtgcatcccaggcacatgctgatcccccctcccaacggggcatgggccttggtttccccatctgtctaatcaggaagtctgacccagacagggtttttctaaaataagatgttttctgaagtgccctcctcctgacagaggcaggaaaggcctctaatgaggaatgctgggtacttagctcaaagctaacggggaatgctgggtacttagcccaaagcagctgtcccagtagttacagttaaaagcaaaaactcaggagctaggctgcccaggctgaattctggcctcaccgttgactaactgtgtcccttgtcgagtaacttaacctctctccatctcagtttcctcatcctcaagatggactgcaccttctggcatctcaagtggttcttgtgaagattaaatgaatccatcaggccgggtgcggtggctcacgcctgtaat

SEQ ID NO: 21471 - DNA, 1546 bp, Artificial sequence
  DNA replication origin
caccgggctctgcttcttggaggttttgttatttaatcctcatagtaacccaagaagggaggtgttgccatttttgtctctgaggagatgagggcagatgcaccaagtcacacaactagaaagtggccaagccaggatttgaatccacagctgctcctctccatcacagtgttgctttccttcaacagaggtgggggtgaaccaagcagggttttggatactagattggtggacacccacctgcttcgtgcccagccctgcgcagggcccctgcagtgggcaaggccgggcctcttgcagcccatggtctgcagagggacctacccgtgcttgtgttggaagctggcccccacacctgtgctggccacctgtaccccaggccaggatgcagtgggctattagccaggctggaagtgttcagaggagtgagaaccaggggctctagaaggcccagggaggacctggagcctgagccaagtcttgaatggcagagcatctccagaggcagagaggagttgggagggcagcccaggtgaggggaacagcatggtgtggcagggaacatgcctggtgtggaggggggcagcaaaaaggaatggggggtagggaaggttgctggggcctggtgggccttgattgccatggaagccaagcctgaactggattcctattcatcctggccacaggtgggcgtgttgctggggttgccccagaccattcctgcagggagcgagccaggaagacaggcagacggctgttctggagatgaagagaagaaggctctgagtataggcctgacctgggcatcgtccccaatagatgacagagcctagggaagtacagattccaaggggagggatggacctgaccaaggccacacagctggttgcggccagggagatcagacctgggttattgagaagacagagggcacccgaatgtgatgagagaaggaggagggtgtgatcagattcttgcttccagagcatggcactgctgcagtgggggtgaaggggagggtggggatgctgcaggaggtgtgggagcattccaacttctctcccctcaacatacacacaacacacaaagcactcaaaatccaactcttccaagttctctcttctgaccctgttgggaaccaggcaggggaacattctgatcccatttccagtggggaacctcagaccctaggaggaaagaccagcaaagggcaccacagtagatgctggggaggattcagaggtattggtggaggaggtcagagccctggtcttgtcccagctctgcctttgccagctgttagagcctcagtttcctcagtgctaaaggggataacagtcactacctcgccaggtggttgtgaatatacagagagcacctgtaacacagttgattcgtaactgttgctcctcaccgaccccttttgcattcccatggggaagagccaaggctggggagttatgactccagtgatagactgctccatgtgagtgactgtgtgtgtgtatctctatgttggggccagggatatctgaactgtgtggtg

SEQ ID NO: 21472 - DNA, 1234 bp, Artificial sequence
  DNA replication origin
ggaccacctcagccctggcccgatcccactcaaccgtagccccgattcccggcaccgagagctttgcaacttccaagtctccacccccaggtcccgagtcccgagaggaaggtggagccacattactcctattgtgtaggttcccacctgcaagagtgctgtcgggtcctctgaggtgaaaccccaaaggaaagcgggatcgggactgggggagggggattcccaagtccctgacacccgcgccgtctcggcctgggcttggtgacctcgtcagtcccgtctgccgggactaggccgcggccaggccgggcacagcggtacccggtccggcgcgtgtgcggcctgctgacaaaaggccgagcccgcagggccaatccgcgcgccaccccgtagcgcctgggggcgggagcgggcgagccgagaagctcgtcttggcgcgtctattggctggtactgacgcccatccggaccccgaggccaggcagttggccaaggggggcggggttcgcagagccccaatgaatgggggagccggaagcaggaagtgagtttgcgaacggagcagctgctgcaggtgaggcgcggcgcctgggcttttggggtcaaagcgtgtcatcccgggggaccaaggcgaatccatactgagcgcaaaatcgttccctttctgcccactctccagtaccccctccaaattcaccccgccctcgaggccaaggagtgctccggggagcaaagagttaacagccctttccgaacctcgaggctgtgctattggggcggggcttctggaggccggggcagggcgaggaggctggacactctgtcccagccgggacggggcgtggcggggagaatgccccgggttggggaatccccgggttccaacggggctgtcagaccttcagtaaattgttgccctttccaagcctcagtttccctatctgtaaaatgggctttcttctggttgtgaacttctgtggcttccctggtggagcacagggagcgagcaggagaatggagggccaaggaaaaggcatttagagggatgagaatgggacagtttcaagcaaaatcatttattgctgtggatactttccgtccagggcgacttcatctgattagcgcacccacctggtaatattggggttattctctcttttatagaggaggaaacggaggtacagaaaagtgaagcaatggacttgacttttaggagtctggggccgagtcctgg

SEQ ID NO: 21473 - DNA, 1065 bp, Artificial sequence
  DNA replication origin
gcttgcgggtgaggccgggatggccccttccctgtacccagcagtcctaacacgttgggctgcccacagttaccaaagtgacagccttcttccttgtaccatagctgtaaggatcccttcaggttcttgggaagaaatgtcctaatatgactattctgggggcctatctgagctggagagtgtcccacggcatggccagccgaggggagaggtggcacaggagggtgggaaggtgagggctgctctcacaaaggaggacatgagactcggtccccaggtctgcgggaaggtgatggggagcacgggctgagttggcttggaattggctctggggcttagctgtgtggcagaggggttcctgcgcatcctggcctctgcccctctggccctgactctgccctcacccagatgctcaccacggcgtgcagcttgagtggctctcgggctgtcgtggacagggggctcaggctggactcgagggcctgcaggtaggcgcgggcagcacgtaggcgcagcaggtataggtctgtctggaaggcccggtgcatggctgtggagaagggtcccagaggctgacggtggaggtggggggtggcagggaggaggcagcaacggggcactcctgctcaggttggtgtggggagggtgcaagaggagggtgctgcaggaggagtctgcaggagctggggaggagggaaagagcccagccttctggcaaaactcgacgccgtggcctcgccctgcctcttctcactctcttaccacctccctgcctgcactatctagctccttcactggcttctctgtccggccctagaggctggtgttctcctgagtctggtccatggtcctcttctcatcctccatcttcttcccccagacaatccatgtcctgccacagctctgaccaccacaaagaggagtccttggtgtccacgctcgatattgtgcatgtgtctccagcagcttagtgagcaccctcgcctgcctcctgctcatctccacagggaggtcccatcaacacctcaggctcaatgctgcggaaaccagcctcatggtcctgcc

SEQ ID NO: 21474 - DNA, 842 bp, Artificial sequence
  DNA replication origin
cactgcactccagcctgggtgacagagcaagactccctccgtctcaaataaataaatacataaataaacaggtggtaaattctcatcacaaaaatatgagtgtttgaggtaatggctatcctaattagcttgatttattccaagctgtactgataaatcataacatcacttggtatcccataagtatatacaactggaatttgtcaatttataattagaaaaaaaaattacaccaggtacaggctctacacacacattttatgccaggcagaggcttttgctgagactgaggctgtagtgtgctatgatcacacctgtgaacaaccactacactccagcctgggtaatgtagcgagactctgtccctaaaaattttttttaattaatttttaaaataatatacataaatgtgtggtcaaggtagacctcatagagaaggaggcatttgagcaaaaaacttggagggcgtggggggcggttagccatgtgggaatctgagggaaaggtgttccaggcagaggtaacaagtggtgcaaaggctctgaggcagttgtgtacccagcatgtatgttcccagaacagcaagaaggccagtgtggctggagtgcagtaagagaggggaagagatgtcacagatagaaggatgttgtaggacactgaaggctttgctttttactagaaataaattggagaaccacaggagggttttaagcagaggagggtcagtttggttgctggggtgagaccgtacgaggtggggcaaaggtggaatcggagaccagtcaagaggctattgcagtaatccagagagttcctagtgacctggacaaaggggtgaccgt

SEQ ID NO: 21475 - DNA, 814 bp, Artificial sequence
  DNA replication origin
ccgttccctgagagtctgagcgctcgccgcacccccttccgagcttctattggccgtagcagacgtccgtctgccgctatctccgccccaatacggaagcggcctagtcctccggctccgacagctgggtgtccaggccatggggcagccctgggcggctgggagcacggacggggcgcccgcgcagctgcctctcgtgctcaccgcgctgtgggccgcggccgtgggcctggagctggcttacgtgctggtgctcggtcccgggccgccgccgctgggacccctggcccgggccttgcagctggcgctggccgccttccagctgctcaacctgctgggcaacgtggggctcttcctgcgctcggatcccagcatccgtggcgtgatgctggccggccgcggtctgggccagggctgggcgtgagtggggtgcgggatcgggcggggagaagtgggagccttggacaggggggaggggccccaagacctgagatgttagaaccgggttacattaggatccaggttgttagaatcagacatttttttagaacctgggatggaagagctagaattgagtgttatttatttactcgcaaatacttattgggagcctactaggtgcaaggttttgttacagggacgaagggtacaatagaacaaattcctgatttgaggggggtgcagatgagaaactagaggaataataagcaaatcatatagaatgctagaaggtgatagtagtttggaaacaagaagtagagcagggtaaaggggttgcaagtttcaatattaaataggtggttaggccgggtgc

SEQ ID NO: 21476 - DNA, 1803 bp, Artificial sequence
  DNA replication origin
ccctgagtgcccaacgggctgggcctgggtagcagctgcccctgtgcccctctttggcgcccccgaggtgctgcctcagcactaagtgtccatctggctggagagtcaggttacagcgtaaggggacccaggtctcccctcctccccgacctatggccttttcagcagactcagggccccatgcctggggtatcttgggaaagaatgggggtagggaaaagggtaaagatcctcaggttgcgggggtcctgatgtctgacagtctgtgatgtggggcctgtctgtgctctttctgggcttcagtttcttcaattgttaaatgagatacagcgactatggaccccaccctggagacgaggtggggtggggtctgagaggacccttctcactacccccacactcccaagtccactagttgcctgactgcaagccttcagggtggggtctgggaatatttaactagaagaagattcttctttctgaaccccccctaacttggatctcctggggtttgcccagcctgttttcagcagcagaagtggggcagtgggcccaggggaatgaaccctggtgggggtggggagcccagaaactctcttgtcattttaaacccctcttgagggctcccagccctctcctccagccctggggacagcaggcagctgatgggcagagcctgggctggggattagcactctaggttaaagacaagctctgcccctgcactgctgagatgcccaggacaaacagcccggcctctcaggcctcggttttgctgtcaggaaatgggcgagcactcactttccgctgctgcttctcccaggccgggtccagcagcaggtcgcggtcccagtcctcctcctgttccatgtactcgccgcccccgccgccgcccgcaaagcgcccctccccggcccccagaccctcgggctgcataaccatcatcatctcgatcgggctcctggcttcgctccgctcggcacgctctcggacacccgggccccattaagtagggcccagcccagccccagatcgaattcgcactaaatatgggggaggagggaggggccggatgggggtgaaggagctcgggttggacctggcaaggggttgtcctgaagccgggaactgcgggactcgggggcgccggggtggatctcgcggcggagatcctgggtttgcattcctgctccgctgctggggcgctgtgtgaccttgagaaatccacgggacctctctgagtctgtttactcctctccacaatagaaaggccgataataatagtggccgcgggccgctctagaggctgccctctggagctcctcgtgagcctcttccagcacctcgctggtgggacacagagccctatccccatttcacagtcaggaacacagaggcgccgagctgttttgcatgttttctggggtgatggagacacccgggcatggggaacggctctgagccagctggatgggctgcggcagggctattaatatcggggcggctgtggggagtaggggagaatgtgctgagccgggaaaccccgacaccaccccggctgcaactcaatcccccgggcactcctggcccccgcgccagcgggcggggctccgacgggatgggaggagcctccagggtgggcgggtcaatcactccgcggcgttatccgggctccagcgccgcgggattccgagcgcctccactgctggtccgttggccagatcaactcgccgcgtgggccggccgttccctgagagtctgagcgctcgccgcacccccttccgagcttctattggccgtagc

SEQ ID NO: 21477 - DNA, 1459 bp, Artificial sequence
  DNA replication origin
acgcagtcactgggatcagggcaagagaggaagggtgtcagtgtgggggacaaggcaggattggatggatgagacagaaatgttggaatgtaagctcccatggcaggggctttattttgtctgctgccgaattccagcacctgaaacagcgctggcacatggtaagacatcaggtgggaggaggcagcgtgctgctccaagactgtgtgaaggaagcccttggatggaggagtcactggggagaaagggagcatagagcaacagggaggggtcagggctaaagctgagcacaaggatgtttattaccaccttgcaataaacaacgctggacaagaaagaaatgagccaaatgtccaactacaagggatgctgattgattttcagatcctctatgctgtgccagccattgaatgagtagatgatgagatggtgactgcaagttgggatgaacagatgttcctgataatttgttaggtgacaaaggcaagttacagactggcacgtgtcatatggggggcacgcagacctggatctcggagaggcccgggtgggtgggggtagggataggagatgttgcagaacaggtggcagctggagccaaggacagggatgacaccaccgggaaattgccaaacctgggactgcagccgtgcttggagacaggtgcagggggagcctaaggggaggcctgtcacccggggcaccccagccgagtcagcggagcctctcggcccttggggtcatctcctgtcatctaacccagcagaagtactctgattctaaattctgggactctcaggtcatttaaattccactgagtaccccagtaccctgccctctcctggagtcatacagtgttggcacacgctgagcagggtccaatggcctcatagtgccctcctggttacccctggcctgccactctccaaagtattctccctctggcctggatcattttccctttgggaacccaggtgtcctgccccctctacttgggaaagtctgggagtgaaaatagctcagggagggaggggccctgagtgcccaacgggctgggcctgggtagcagctgcccctgtgcccctctttggcgcccccgaggtgctgcctcagcactaagtgtccatctggctggagagtcaggttacagcgtaaggggacccaggtctcccctcctccccgacctatggccttttcagcagactcagggccccatgcctggggtatcttgggaaagaatgggggtagggaaaagggtaaagatcctcaggttgcgggggtcctgatgtctgacagtctgtgatgtggggcctgtctgtgctctttctgggcttcagtttcttcaattgttaaatgagatacagcgactatggaccccaccctggagacgaggtggggtggggtctgagaggacccttctcactacccccacactcccaagtccactagttgcctgact

SEQ ID NO: 21478 - DNA, 1147 bp, Artificial sequence
  DNA replication origin
ctgggtggtgccaaacatgactctttttttttttttttttttttttggagacagagtttcgcgcttgttgcccagactggagtgcaatggtgcgatctctactcactgcaacctctgcctccctggttcaagcgattctcctgcctcagcctcccaagtagctgggattacaggcatgcgtcgccacgccctgctaattttgtatttttagtagagatggggtttctccatattggtcaggctgatcttgaatttacaacctcaggtgatccgcccccctccgtctcccaaagtgctgggattacaggcatgagccaccactcccagcccaaacaagactcttaatgagatgtggttcctgccctaagggagctcacagtccatccaagagtcattttggtctgagaagcgctgtaagaggttgccgaggaatttatgggagggacgctgcggatcagggtcccctcttggggaaggcgagtatttgatcagagctgtgatgggcaggaattattcaggaagggaagggcaggcaagggcatttcaggcaggggctgccatgcaggcaagtgctcggtggctgtgagaaacacttgctacatttgtcagactacaaggatctgggcactgctggaatggagctgggattgttggggtataagtggtgagaggcaggccggaggggcagcaggagccaggtcatgtgtgatcttgggtgctaagctggggagttaaaatttgatccggagggcaacagagagtcagggaagcctcaggcaggagggaggtgggcagaactgtccatgctggttgcagagtggagatgaatggcttggcgtggcagaaggcagaagtgaggacgcagtcactgggatcagggcaagagaggaagggtgtcagtgtgggggacaaggcaggattggatggatgagacagaaatgttggaatgtaagctcccatggcaggggctttattttgtctgctgccgaattccagcacctgaaacagcgctggcacatggtaagacatcaggtgggaggaggcagcgtgctgctccaagactgtgtgaaggaagcccttggatggaggagtcactggggagaaagggagcatagagcaacagggaggggtcagggctaaagctgag

SEQ ID NO: 21479 - DNA, 897 bp, Artificial sequence
  DNA replication origin
tgggtggagaggggtgggtgagctgggcaggtcagcgcagagctgtctgccttgcccctgcctggccctgtcagctgctggagtggatccgccgcactgtcccatggctggagaaccgtgtgggtgagcccagcatgagtgccatgcagcgcaaactagaggactttcgggactaccggcgtctgcacaagccgccccgcattcaggaaaagtgccagctggagatcaacttcaacacactgcagaccaagttgcggctcagccaccggcctgccttcatgccctccgagggcaagctggtctcggtgagctctacacacattccctaggtgaccttgaggtccgtatcccatctgtacaatgggcaaaccgtgatggagcgcacccctgcctgctccacaggacatcgccaacgcctggcgggggctggagcaggtggaaaagggctatgaggactggctgctctcggagatccggcgcctgcagcgactccagcacctggctgagaagttccggcagaaggcctccctgcacgaagcctggacccggggtaggtagacctacctcatggggctggactgtctcttggggtggagattggtgtgcaggggcaggaggggaggttcttggcaaaatgcacaggacaagggtaggtgctctgcaggaaagccagagactggatttctagtcccaccctgacttgctgtggtgcaacctaggcctctcttttggccactgcccctctgtggaccacagtttgttttgttttttgagacagagtcttgctctattgcccaggctagtacaatctcggctcactacaatctctgcctcccaggctcaagcgatcctcctgcctcagccacccaagtagctgggaccacaggcgtgcaccac

SEQ ID NO: 21480 - DNA, 772 bp, Artificial sequence
  DNA replication origin
gtggccaggccaaggctgatggggagggtttggagcagtaagccgggtgaagagagcgggcaggttagagggcaggtcacggagtgagacaggtcaagcgccagtgggaagagtgtgagcagcagagcggggtccggaggtgggggtggggttccaggaggggcggagcgaatgggacctgggtaccacggcggggttacagaacccaggagagcctagtgtcttgagaagggcaatggggatcagggtggggctcgccaccgggggcggggccgggggtgttgggggcgggccccgcgaggccccgcctacttgagctcctgggccagcgcggcaatgtgctccacgcggtcctggtgcgccgccaggtcgctctcaaaggcctcgtggcgccgcagcaacgcccgcacctcctgtagcaaagccgaatcgtagtcgcgctggctcagcatctcctcctttcctgctcaaagagatgccggctccggtcacccagtggcggcaggggcaggggtgcgcggcgggctgcgtgaccatgaagcctcatctgctaaggtggcgatcgcaccggcctagctcgtcctagggatttgctctgcggcgtcggtgtaataacgtaggtgaaagtcctcttccgtggcgtgatccgcaaatgacatcagcgtcccctgagcgagctacgtccagggggcccttggtacagttttagcataatttgaccttaaaatagctctcaacgattctgtaacccccatgagcccctgacccggcc

SEQ ID NO: 21481 - DNA, 948 bp, Artificial sequence
  DNA replication origin
taaagttgtgggtggcagaatttggggccagctttcctgtcatcctatccatcccctgcaaccctggcacccacctgggtctcctccacagagtgtaccagccacacgtcctgcaggtcctccacggcaccatccagccagttgttgaagggcgcggcccgccgggcaaactccagttgcagccggtcaatggtctccaggagcttctccatccgctagaggtgggaggcgtagtgggtcagaagcctgccctgcagacctggcctcacccacctacccaccccccagctccccggcccccagccccacctctagcgcatcccgcctcttctgggtcagggtgcccaggttgtcccactgatcgcagatggcctggcagcggctattcactgaggctgcctcgtggtagtccagctcactgggagcgagaagtagggcgagtgtggggccagccccagcccagatgtcctaactgcactcccagggctggaacctgctccccggatgggggtgaaggcgtgcgggagccagggcaggtggtgggtaaagctgggtgctttccaagaggggcggtaccagcgcatccctctgggcaggtgggcgcccgcgggtccttagctgcagtccatggaggtgcttgggtggaggggcggggttgcgcaagaaggggcgggttcatgggagggggtggccaggccaaggctgatggggagggtttggagcagtaagccgggtgaagagagcgggcaggttagagggcaggtcacggagtgagacaggtcaagcgccagtgggaagagtgtgagcagcagagcggggtccggaggtgggggtggggttccaggaggggcggagcgaatgggacctgggtaccacggcggggttacagaacccaggagagcctagtgtcttgagaagggcaatggggatcagggtggggctcgccac

SEQ ID NO: 21482 - DNA, 1239 bp, Artificial sequence
  DNA replication origin
tcttcccactggcgcttgacctgtctcactccgtgacctgccctctaacctgcccgctctcttcacccggcttactgctccaaaccctccccatcagccttggcctggccaccccctcccatgaacccgccccttcttgcgcaaccccgcccctccacccaagcacctccatggactgcagctaaggacccgcgggcgcccacctgcccagagggatgcgctggtaccgcccctcttggaaagcacccagctttacccaccacctgccctggctcccgcacgccttcacccccatccggggagcaggttccagccctgggagtgcagttaggacatctgggctggggctggccccacactcgccctacttctcgctcccagtgagctggactaccacgaggcagcctcagtgaatagccgctgccaggccatctgcgatcagtgggacaacctgggcaccctgacccagaagaggcgggatgcgctagaggtggggctgggggccggggagctggggggtgggtaggtgggtgaggccaggtctgcagggcaggcttctgacccactacgcctcccacctctagcggatggagaagctcctggagaccattgaccggctgcaactggagtttgcccggcgggccgcgcccttcaacaactggctggatggtgccgtggaggacctgcaggacgtgtggctggtacactctgtggaggagacccaggtgggtgccagggttgcaggggatggataggatgacaggaaagctggccccaaattctgccacccacaactttaggctcctggggcatagggatgggaggaaaaccccagttcccgagtgctgggctggaagacaggaggccggggttcttgtgtcaggactgcccaggactggtgggtggcctggggcacactgctgccctttctgttgcctgtggtaagtgggggacaccagctgacacttcctgcctgtcgtccccagagcctgctgacagcgcacgatcagttcaaggcaacactgcccgaggctgaccgagagcgaggtgccatcatgggcatccagggtgagatccagaagatctgccagacgtatgggctgcggccctgctccaccaatccctacatcaccctcagcccgcaggacatcaacaccaagtgggatatggtcagtgccacctgcagccttcctcccaccccctcctgcatactgtgaccaccctgaaatctcgggtggc

SEQ ID NO: 21483 - DNA, 1671 bp, Artificial sequence
  DNA replication origin
ctggagggaggactcaggccccgctggccgcgggctcggtacccggtgggtcggtggagcgtctgttgggtccgggccgccggcttcgccctcgccatggcgccctggctgcagctcctgtcgctgctggggctgctcccgggcgcagtggccgcccccgcccagccccgagccgccagctttcaggcctgggggccgccgtccccggagctgctggcgcccacccgcttcgcgctggagatgttcaaccgcggccgggctgcggggacgcgggccgtgctgggccttgtgcgcggccgcgtccgccgggtgaggacgcgccgggggcgggggcgccaggcccgggtccaagggataggagctttgacctaacattgggatggggcctgcccgctggacgaaccgatctctggtgatggggaatgggcagcgccgcacgggcggggccttgggcgccgtcaagggccgactgtgcccgcctcacctactcctctctccaggcgggtcaggggtcgctgtactccctggaggccaccctggaggagccaccctgcaacgaccccatggtgtgccggctccccgtgtccaagaaaaccctggtgagtgatgaggctcttggggttccccgccccgaggccgagtaaagcagcagttggatgatgacgggtcaggtcaagacgcagggatctgaggtagctgctgccccaccttgagccacttcccaggccccgagggctggaaaccaagatgctatgaaggggaggatgccccggtgcaggccgtgcctcactgtccactgtgatggggtgattgccttaggggtggctctcatctgaggagcctccagctccatcttggccagatcttgctccccagatccagatccaggcccccagagcagcttcttcctctccctccagctctgcagcttccaagtcctggatgagctcggaagacacgtgctgctgcggaaggactgtggcccagtggacaccaaggttccaggtgctggggagcccaagtcagccttcactcagggctcagccatgatttcttctctgtcccaaaaccatccagacaacagaaacgagactttcagctcagtcatttccctgttgaatgaggatcccctgtcccaggtgaggagccctcagcttgaggagccctcagcttgaggagccagccgctgcctcatcacccttctcccttccctctggagtgggtttctctggtcagcctaaagactggtctgcctatccaggacttgcctgtgaagatggcttcaatcttcaagaactttgtcattacctataaccggacatatgagtcaaaggaaggtgaggacccagccttggctgtacctgttcctatcagaacaggactttccccccaacttggcaccttggtgtgtgggaggagaaagacaagaggcagtgtacctgttcaaggaccccataattcctgagctctccctaagccttcccagcctggcagccaccctgagtacctggccccttctcctaccttatcttcccgctcagaagccatgggtcttggccgggcgtggtggctcacctctgtaatcgcagtactttgggaggccgaggtgggcagattacctgaggtcaggagttcaagaccagcctggccaacatggtgaaaccccatctc

SEQ ID NO: 21484 - DNA, 1398 bp, Artificial sequence
  DNA replication origin
gcacagtcggcccttgacggcgcccaaggccccgcccgtgcggcgctgcccattccccatcaccagagatcggttcgtccagcgggcaggccccatcccaatgttaggtcaaagctcctatcccttggacccgggcctggcgcccccgcccccggcgcgtcctcacccggcggacgcggccgcgcacaaggcccagcacggcccgcgtccccgcagcccggccgcggttgaacatctccagcgcgaagcgggtgggcgccagcagctccggggacggcggcccccaggcctgaaagctggcggctcggggctgggcgggggcggccactgcgcccgggagcagccccagcagcgacaggagctgcagccagggcgccatggcgagggcgaagccggcggcccggacccaacagacgctccaccgacccaccgggtaccgagcccgcggccagcggggcctgagtcctccctccagcggggcgacggcacgccgaccaatgggcgctggtttgcggcgcctgcgcgttctcttgtttacaggaggcacgtggggcgcgcagggtagggagagcgggaggctgctggcctgaggctaaagctagtcactgacctctatcacgtgcttgttatatgttaggcatgatatgccagctccttttattcggcgtagcaatctctgaagtaggtgctatccccatcgtacagtggaggaaacgaggcttggagagattaaatggcgtggccgggctctgtgactcagccctgtaatcccagcactttaggaggccaaagcgggtggatcacctgaggtcaggagtttgagaccagtctggcacacgtggtgaaaccctgtgtctactaaaaatacaaaaaagagctgggcgtggtggtgggcgcctgtaatcccagctacttgggaggctgagccaggagaatcacttgaacccaggaggcagaggttgcagtgagctcagatcgtgccattgcactccagcccaggcgacaagagcaaaactccgtctcaaaaaagagagagagagaaatattaagtggcttgccaaatatctggtaaggaattgagctaaacttaaatccaggcagttggcttctgagcctgggtttgcagcttgatcgcctctttcaggcccctcttctcaacagcgagatggcaggtaattttttgagtgctggcagcgtctcaggctgttgtgaggttcaaatgcaatcatgcaagcattcagtagccactaaggcagggtgcacagggttgagactgtcccttgaagcattcacctgctgtgttccagggtctaccaagggaaagcatgcacagatgcattacaggaatagtgctgcgttcttggagctcacagtctagagagaagaacgacagatggg

SEQ ID NO: 21485 - DNA, 1424 bp, Artificial sequence
  DNA replication origin
gggctgacccccccacctccctcccggacggggtggctggccgggcggggggctgaccaccccacctccctcccggactgggcggctggcagggcggggggctgacccccccacctccctcccggactgggcggctggccgggcggggggctgacccccccacctccctcccagacggggcgactggccgggcagaggggctcctcacttcccagtaggggcggccgggcagaggcaccccctcacctcccggatggggcggctggccgggcggggggctgacccccccacctccctcccagatggggtggctggccgggctgaggggctcctcacttcccagtaggggcggccgggcagaggtgcccctcacctcccggacggggcggctggccgggcggggggctgacccccccacctccctcccggacggggcggctggccgggcggggggctgaccccccacctccctcccggacggggtggctgccgggcggaggggctcctcacttcccagatggggtggctgccgggcggagaggctcctcacttctcagacggggcagctgccgggcggaggggctcctcacttctcagacggggtggttgccaggcagagggtctcctcacttctcagacggggtggccgggcagagacgctcctcacctcccagacggggtcgcggccgggcagaggtgctcctcacatcccagatggggccgcggggcagaggcactccccacatctcagacgatgggcggccgggcagagacgctcctcacttcctagatgtgatggcggctgggaagaggcgctcctcacttcctagatgggatggcggctgggaagaggcgctcctcactttccagactgggcagccaggcagaggggctcctcacatcccagacgatgggcggccaggcagagacactcctcacttcccagacggggtggcggccgggcagaggctgcaatctcggcactttaggaggccaaggcaggcggctgggaggtgtaggttgtagcgagccgagatcacgccactgcactccagcctgggcaccattgagcactgagtgaacgagactccgtctgcaatcctggcacctcgggaggccgaggctggcggatcactcgcggttaggggctggagaccggcccggccaacacagcgaaaccccgtctccaccaaaaccagtcaggcgtggcggcgcgtgcctgcaatcgcaggcactcggcaggctgaggcaggagaatcaggcagggaggttgcagtgagccgagatggcagcagtacagtccagtccggctccgcatgagagggagaccatggaaagagagggagaccgtggggagagggagagggagagggagagggagagccggggtttcactttgttagccaggatggtcttgatctcct

SEQ ID NO: 21486 - DNA, 987 bp, Artificial sequence
  DNA replication origin
caccccatctgggagggaggtgggggggtcagccccccgcccggccagccgccccatccgggaggtgagggggtgcctctgcccggccgcccctactgggaagtgaggagcccctctgcccggccagtcgccccgtctgggagggaggtgggggggtcagccccccgcccggccagccgcccagtccgggagggaggtgggggggtcagccccccgccctgccagccgcccagtccgggagggaggtggggtggtcagccccccgcccggccagccaccccgtccgggagggaggtgggggggtcagccccccgcccggccagccgccccgtccgggaggtgaggggcgcctctgcccggccgcccctactgggaagtgaggagcccctctgcccggccagccgccccgtccgggagggaggtggggggtcagccccccgcccagccagccgcgccatccgggaggtgaggggcgcctctgcccggccgcccctactgggaagtgaggagcccctctgcccggccaccaccccgtctgggaggtgtacccaacagctcattgagaacgggccaggatgacaatggcagctttgtggaatagaaaggcgggaaaggtggggaaaagattgagaaatcggatggttgccgtgtctgtgtagaaagaagtagacatgggagacttttcattttgttctgcactaagaaaaattcttctgccttgggatcctgttgatctgtgaccttacccccaaccctgtgctctctgaaacatgtgctgtgtccactcagggttaaatggattaagggcggtgcaagatgtgctttgttaaacagatgcttgaaggcagcatgctcgttaagagtcatcaccaatccctaatctcaagtaatcagggacacaaacactgcggaaggccgcagggtcctctgcctaggaaaaccagagacctttgttcacttgtttatctgctgaccttccctccactg

SEQ ID NO: 21487 - DNA, 1054 bp, Artificial sequence
  DNA replication origin
gcgacgccaccgtcagcttcgccagagggaaggactgcagaatccggccctcctgcggggggcgcttctgaggctctggggacgtcgtcctagtggggaagagcgacagcggacgcagcagccggtggtaaaaccgctggagctcaggctcgggcttcgggggctccatcatagagccggcggccgccaccgtccaggaacagaaagccgaggggttactaaggcaaccaggagcccgacggcccgagtgcgcctgcgcggccgccacccggtggctgacgaagcagggccttgcgtgcgcacgcactaggaggaggagttaagggtggctttagaggctcagtccccgcgacgccgcgctggttggtgctcctgcgccggaggagttctgcgtctcggggtggtgactgggtccagaatggcttcggattcggggaaccaggggaccctctgcacggtgagggtcgaggcttcgtgtggagcctcgccgggcagagagcctcggcccctgggatgatcgttaccttgggaagaggagaaggagtgggcacttgggttggggcctggggccatgggatgaaactagggtgcgagggtagcaggggccctgcgtgagtgttggggggtgactcccatggtcctggaatggtcatgagagatcatgaagaaggtgcttgaagaggggttaagtggggcttgttcccagacccttgcggtggtcatagggtaggtggtgaaacaaagtcataccaaggcacttccccagcgatcatcggttggtccctgccgcccttgcagttggagttcgcggtgcagatgacctgtcagagctgtgtggacgcggtgcgcaaatccctgcaaggggtggcaggtaagaacagggtaaacttttctgcagacagtccagaagcctctgggagggaccaggcgaatctattaggcgaaccctactcccattttacagatgcagaaagtgaaccccagagagtgaaaggcatgttctcagagttacacacagacctggaggcagagcctagagtacagctgtccagct

SEQ ID NO: 21488 - DNA, 865 bp, Artificial sequence
  DNA replication origin
gcaggacccattgtggtgagcgactccccaaggcctccgcttttctaggcagtggttgcgttcagagcccctctgacgcagcagtggcgaccctttccagggtggtgactggctggctggggctgggggtgggctgacctccgcggcgccgcgccaccaccaacaggccccgcccccgtgctgcgtggtcatttgtatgcagcctcgggattggtcactcggctcccgcgaggggaaggggagggaagcagcgcgcactcgcgcgtgcgtgagctggcgcgcgagaaagggcccggtcgcgtccaggctcgagcggccgtcgccattttgtaaggttctctctgacgtgggagccgccgtcgctgccgccacccggaggtgcgagggggtcgtgtgtgtgtgatgtggggagctcgggggcgggtcgggccgggcctccggcagactgcacggcccggatttgggtttctcattttgcagcgggaggtctgggaagacaacgggaggaggcggggccgggtctccggaaggaggcggggcaggggtcgggtcgagtctttgttggggcgaagaagctggagggtgggccgctgggggcgaggtggttggtccccggtttgggggaaaggggacttttttctttttagagtatcttgaaaggcgctagtgcgcgcaggagaggtacacagatttccctccaaaaccttgttaccaggcgcactgcgattgatgccccttgcctttgcttgggcttttctcttccctcattttaagacatgaagcagctaattctggtatttcattgcgctccacttcacggagatgatagactgggctatgcatgctgaccctcgacctcctgttt

SEQ ID NO: 21489 - DNA, 1101 bp, Artificial sequence
  DNA replication origin
cccatcagcccctgcctgaatccccttttcaggctaagtagcacgttctagcaatctccaaggtctatcacatcctagacaggcctctgaaagttcaactggccaatggctcttttccagatcctcccccagttaagcccaggtgtctagatgagacccaacagggcagagtgtggccagcccctgccttcatctttcccagcacccccactccctggctcctccccctgcttctttggctgtgagacaggcaggaggtgagagtggcagccaggactgaggcaggctgcggctccttggagtcccccgctctgcctgactctgacccggggctccgcaggtccagcaggtgcaggacgacggccaccggctccagaaggcctacgctggagacaaggctgaggagatcggccgccacatgcaggccgtggccgaggcctgggcccagcttcagggaagctctgccgcccgccggcagctgctgctggacaccacagacaagttccgcttcttcaaggctgtccgggaactgatgctctggatggatgaggtcaacctgcagatggatgcccaggagcgtccccggtgagaatcccagggctcagggcctccacgggttgtgtggctgggctgtgatggggctgtgggcagcaggtgatgctgtttctgcctccccccagggatgtgtcctccgcggatctagtcatcaagaaccagcaaggcatcaaggcagagatagaggcccgggcagaccgcttctcctcctgcatcgacatggggaaggagctgctggccaggagccactatgcggccgaggaggtgggtgaggcctgggtggccgggccattctcactgtgcagtgctgaacgctgacttcttggtggctttctgcttcctctcattctctctttgcaagaaacctttcattctctcccctcagtgccattcacgggtttctcgcattctggaaatctctccccagaaccgtctgcctcttgacatcagaaatcactggtcctgggccaggcatggtggctcacgcctgtaatcccagcactttgggaggcccaggcgggcagatcacctgaggtcacgagttcg

SEQ ID NO: 21490 - DNA, 1066 bp, Artificial sequence
  DNA replication origin
agccaccgcgcctggccaaacagagatgttttcttggagcaatttcctcatctcgaaatggccctcgaaagagtgccgtcctcccagcatttctgagctctaccctagctcctgggaactctccccggcatttcccccatggcctcctctaagcctcccccacctcctcatgcttgggtcagacctgggggctgagggcctgaatgtcatgctcgtaggcacagtgtcggcgctgcagggcctcggcagcgttgaggtcgcggccagtcccgtccggaagctgctgctgcttgtgctgcacccgcgccagggcttggcgtgccccgtgcaggaagcgctgcagctcgtacgccgcggccagcacctgaccccgtgtgtccagcagctcaagcaggtcagcccaggcctcgttgagactgtccttccactcggccacggtggcccgtgcagcatggcccccagcaatgagcccattggccagcgcattggcgctatctacgcgctcctgaccgatggtgcttgtgtcccgggagaactctcggaatttgtctcggagcatctggtagaggaagcagatggacagaccatgccgtgatgttaggggatgtggtccctgcctgatggagcgagtcctccactccaaactcagaacccacctctccccgctgcatgggggccgggacaggtttcttccctgtggttaaggagtaggtgcagctgcttcccactgaccctgtatttgacagactccctccacccccagcaaaggcgtttcaaggtgcttgggacccttaggcttcagacaaggataccctaactatggtccatatttctgtacgactgagggtccaagcccccaaactgtcgggggggtggatcatactccgttttgttgaattctgttgaaaagtgtgagtgataatttcctgtttgcccttgtctcagctcagcttcatgtcccctttctgtacaattcttcaaattgtgtgtgtgtgtatgtatttagagatgatagggtcttgctctggagtgcactagcgcaatcactgcagtgtcgacctcccag

SEQ ID NO: 21491 - DNA, 1376 bp, Artificial sequence
  DNA replication origin
gtcccagctactcaggaggctgagacagcagaatcgcttgaacccaggaggcggaggttgcagtgagccaagattgcaccactgcactccagcctaggtgatagagcaagactcagtcaaaaaaaaaaaaaaaaagcagctaggcaaggtggctcacgcctataatcctaagactttgggaggccgaggcgggcggatcacctgaggtcaggagtccaagaccagcctggccaacatggtgaaaccccatctctgctaaaaatacaaaaattagctgagtgtggtggcacacgcctgtaatcccagctagtcaggaggctgaggaaggagaattgcttggacctgggaggtggaggttgcagtgaactgagattgtgctactgcactccagcctgcactacaggagcgagactccatctcaaaataaataaataaataaagtgattagaaggttttgagagggggagagatttgattgtaccttatgtttgtaaaaaagtcactttggctactctgaagaaggcctgtgggcaggcagcatgacagcgagaccgttagaggttgctgccatcttccaggcgggcagcggctaggagggtggattggggagagatgtggaaggaaggctgctgggtgctggggcggagcggtggcggcaggagggtgtcgatgattctgaggctgagaagattagtcacagcaaagcttccaagagcaggagttagttagaacattgttccacagcaggggagttcaggataaggaggtcggggtgccagggcagaactggggtatctcaagtatgtgtgagcaagcaggtttctcacctgggtgcaacacctggggccgtggagaagttggaagaaaaacgcagccaggttagcgcgtctgtgctcaggcgggcatgtgcacttcatgtgtgcctggcagggccggctgcagtctcaggacctgggcaggcacctagcaggagtggaggacctgctgcagctgcacgagctggtggaggcagacatcgccgtgcaggccgagagggtgcgggccgtcagcgcctctgccctgcgcttctgcaacccagggaaaggtgagaagtcagcgaaggcactggagagggaggggctgggaaggagcacatcaagagccgaggtggaagggttgggaaacctggggacgggaaagatggtggccaaacgatggtgactgagctaaagccagggagggaagtccaagagagtgtggtggcagggagcagccggagggctgggttaaggctctgaccctctcctgtgactttctcagagtatagaccttgcgacccgcagctggtgtcggagcgggtggccaagctagagcagagctatgaggcactgtgcgag

SEQ ID NO: 21492 - DNA, 1109 bp, Artificial sequence
  DNA replication origin
gtggagagacaatgaaacacaaaatccgtcacctgggtaaaaaggcctagaggtccgggagccaggggccagagggtgggacaggagagagggttggtgagacaggatgggggtgggatagagagggaacttagagccaccgcatggagctgggatcttgcaggccaagtgccctgcaggacagaggagcaggcagaggcactgtcccttggtccccacacctcctctccctgcccccgacacaggacaactttgggctggagctggcagctgtcgaggcagcagtacggaagcacgaagccattgagacggacatcgtggcctacagcggccgggtgcaggcagtggacgccgtggctgcagagctggccgccgagcgctaccacgacatcaagcgcatcgccgctcggcagcacaacgtggcacggctctgggacttcttgcggcagatggtggccgcccggcgggagcggctcctcctcaacctggagctgcagaaggtgttccaggacctgctctacctcatggactggatggaagagatgaaggtaccagtgaggcgtgctgggtggggtaagagtgatcaagagtcgagggggccccacagtgggtgcgtccgcccgtctgctcggccgatctctgtggagtgtgaaccagcacagggccctgtccccagttgcagggaacaaagtaaacagggccctgtccacatggggttcgtgtccacatggaggaggctgatgacaaaacccacggacctttccgtaaacaaaagagcaggggccataaaaccactgatgaaactggaacagggtggtgtgaggggctggtcagacaaggcctctgagaaaataccatttaagccgagaccagaatagtgccaggagccagcacagagagctctcaggagagaatgttccgggcagaaggaacagccggcacaggccctcggcctggatcagcatggtgtgttcaggatcagaaggaaggccggtgggctgtgagcatgaggagtgggggccatggactgagatttgggagggcacggccagcccactagggccttacaggcctggtcagggagtttggattttattcaaagtaacatg

SEQ ID NO: 21493 - DNA, 871 bp, Artificial sequence
  DNA replication origin
ttttatttttttcacaatattgtaagattactaaaagtaaaaataaggttcgcacacagtcctgccaacacaaaggaatcagatggtttccactgttcgtgctccctccagtccttttccagaagcttctacatggcttcacagactcccagcgctgccctgtttcctgtttccacgcccaggcgtctcacccactgcattccacggatccaccagaccgagcttccatgggacttaccatgtgcctccagccccactgagccctccccaccctgtcccttccactaaccctgtccccaccccataggcttgggagcggctggagaaggcggagcacgagcgtgagctggccctgcgcaccgagctcatccgccaggagaagctggagcagctggccgcccgcttcgaccgcaaggctgccatgcgggagacctggctcagcgagaaccagcgcctcgtgtcccaggtaggacttgaggctcctaggatgcttaggctggtcagaactgggagagagacagggtggataagaagccccgcggggtggagagacaatgaaacacaaaatccgtcacctgggtaaaaaggcctagaggtccgggagccaggggccagagggtgggacaggagagagggttggtgagacaggatgggggtgggatagagagggaacttagagccaccgcatggagctgggatcttgcaggccaagtgccctgcaggacagaggagcaggcagaggcactgtcccttggtccccacacctcctctccctgcccccgacacaggacaactttgggctggagctggcagctgtcgaggcagcagtacggaagcacgaagccattgagacggacatcgtggcctacag

SEQ ID NO: 21494 - DNA, 1329 bp, Artificial sequence
  DNA replication origin
tcgggggcagggagaggaggtgtggggaccaagggacagtgcctctgcctgctcctctgtcctgcagggcacttggcctgcaagatcccagctccatgcggtggctctaagttccctctctatcccacccccatcctgtctcaccaaccctctctcctgtcccaccctctggcccctggctcccggacctctaggcctttttacccaggtgacggattttgtgtttcattgtctctccaccccgcggggcttcttatccaccctgtctctctcccagttctgaccagcctaagcatcctaggagcctcaagtcctacctgggacacgaggcgctggttctcgctgagccaggtctcccgcatggcagccttgcggtcgaagcgggcggccagctgctccagcttctcctggcggatgagctcggtgcgcagggccagctcacgctcgtgctccgccttctccagccgctcccaagcctatggggtggggacagggttagtggaagggacagggtggggagggctcagtggggctggaggcacatggtaagtcccatggaagctcggtctggtggatccgtggaatgcagtgggtgagacgcctgggcgtggaaacaggaaacagggcagcgctgggagtctgtgaagccatgtagaagcttctggaaaaggactggagggagcacgaacagtggaaaccatctgattcctttgtgttggcaggactgtgtgcgaaccttatttttacttttagtaatcttacaatattgtgaaaaaaataaaagaagggatagtgagttggggacaggtttaacaagctgaggaacttggggcataatttccttatgtgacctcgtatggagagtcagacaaagggacagggagccgtgtgcctgagaggatgggagaatcacatctggcacagtgtgggcagctgggcagagtgctcgagtttcaagttggggcagcagatagtagaacttggtgaaggtcgacatggccccgggtttggggatgtgtgcaaggcatctgggccagggcctgccctgagggtgggtggcctgtgggcagccacggaccttgttgatgtccgagatgagccggccctcgcggggcgtgtagaccttctggttgttggcccgaagcttgctctggatggtgaagagcagcacttccaagttccctttctcggtaaacctgaggcaggaggccgggttggggtcagaattaaagcccacgagggtcacaaggactctttactcttccaaatgggtgtcctgtgttgcttttcttcttacaaaagcaatataaactttttatgtggaagcca

SEQ ID NO: 21495 - DNA, 1627 bp, Artificial sequence
  DNA replication origin
cattacggttagttgtttacgtgtctctctgcccgctccacatttaactcattgaggacaagggctgtcttactcgttttggtgtttttccagactcagtacaacagatattcaataaagagatattgaatgacttgactataattcattttttttggccatggaattaatgtctttcttaggactagagagaagctcaaggaaagaatgaacacgggattggagaagacctgctcctgggctggaatactttcagggttgagctcaacagctcaggtctggggattctcaaacttccatgaatcacaacaacctggaggactgttaaatcacaggtcacccccccatcccccagtttacgattcagtacttctggggtggtacctgggaatgtgcatttctaacctgttcccgggtgacactgaagctaatggtctggggaccacactttgagggccacccttgtccaaagatgagaagcagctggaattggttagaggagccatgagtgttgagaagacacaaagtttcaggggtgagtgtgacccagggttagcttctaggtctgctcaggccctaccccacactaaactcaaatatcacttcccctcaggagctcaggcgatgggagaggaagatgaagatggagtaggtaccacaggtaatgaaagaaacagcacagcgaaccgcagatatgcgggaggagaacggcagagctagagaagtcacgggaaggcagagttgaacaaatgacagtgagatgaataatagattagaagaaatggggactttggcaaagttcaaatcttatttgcttctaagtataaatgggtggactggcagagagataaaacgaaaaagaagtcacaaatcagctcagggcctccaggaaggcaagagaaagatgggcccagggcagaaggaaggaacagcaaaaccccgacccacctctcagactgtgttcctgatcaattccctcggaggaagttaggaactgggctgaagagggggactgaaattttattttctcttctagaatcctccagttatggcagatttattcaaatattcagattcttcactcccttgctatctcccttccccaacccggggtcacatcaatttctctaagggaagaatgtaaactccatcctatcttctcctcggccaatcctttgcctttctgaataagccaagaggttgccccacacctcaagctaagacacatatttggaactcactctgcccctcttcaccttcaaggaaaactggtttgttgctacctctgcccatacctgaaacccccgggctctccagcgttggaactgtggctgctccgagagggggagggcagacgacatgtagcaggttaagaccggggcaaacctgcacctcacacaagcatgcaatgtcctggggtcaatggggtaaagttccaagcgagtggaaggtaaatcacgactgtggcaccggagccggaacacccccgcgagcaggccttgctgggtagttccgtgcggggcggaccgcacagccctatcagcttcctggccacagaaacgccgcacgcggccgcttccccgccgcccgaagcgtctgctttctccccgggccagttccggccacc

SEQ ID NO: 21496 - DNA, 1824 bp, Artificial sequence
  DNA replication origin
gttggccaggctggtcttgaactcctgacctcgcgatccacctgcctcggcctcccaaagtgctgggattacaagggtgagccactgcgcctggccatgggcagctgattctcatcccatcagctttaatgtccctgaccaagtgtccctgatgaccgtcatgcacaggttggtgcctccttcccccgaaccaaccaacacataatcctacctctgggaagagttgcagtttatgcccttgtttctttaatgccattgcctgaaagagtggctattaaaaataataaatagcctcaggcctggcacggcagctcacgtctgtaatcccagcactttgggaggctgaggcaggcagatcacctgaggtcaggagttcaagaacagcctggccaacatggcaaaactctgactctactaaagatacaaaaattagtcgggcatggtggcatgcacctgtaatcccagctactcgggaggctgaggcaggaaaattgcttgaacccgggaagaggaggttgcagtgagccgagatcaagccactgtactccagcctgggtgacagagcacgactccgtctcaaaataataataataataaatagcctcaaatgcagctaactgtgaggtacacaccagagagccagttccagtttcgtggtagaagcacagatatcagagctaggagagaacttcaaagtaatctttcaatggaactccccaaccctcctcccaacccattttatagactaggaaaaccaaggcgaggtagatgacaccactagttagggttgtcaaaaccatatctggaaagtacttcaattgcacatatttgtttcagtatgcataccttttcagaaaggagcaaaatcctaaattacccataaatctattataaaaccttaaatccaataattcactcaaagcccattctttgagtgcccttacttgaccatttcaggcattccctggatagaaacgggccctcatcttcaggggcagtacataacctaacggctctgtacaaagctcaccctgttaccactggctcatctctgagctgagttctctaatctggaagaacagcacctacttctcagagctggagtgggggtgggagtgtcacatgagatgatgcgcttttagcacccacctggcactctgtgagtttgtcatgatttgggcataattccttcctctcctaagcaggcagcagttcaccttggttaaggaccttggaccttagaccactcagacgctaacaaaccaaggagaaacccagccgtgtcaggcctagaaatgtctgcccccacccccacccccctcaagacggtgactaggccggaattctcctggttgataaatgagaggagctgagaagcgctgagatgcctgtttggagcatctgatctgtagaagacgaatcttcactgtgccatggagatgttctgggagggagagccggcccagctgcctgaaggaggacgcgagagcgaggggacgggtgagaggaatgcttagcggagacggactggaggtgcccggagaggaaaggggaacggaggctggatctcgggaaacctcgtcggcagtgtcattagaggaaggatcgcgtgtctcggggatacggattttggaggaaaagcagaatagggacaaaggtgaggtgtccgaaccggggagatcaagacctgtaagctgtggtgggggacccagggaccagcgaggacgggaaggcggggttttggggggaccccgcacggaaggtggctgggggtcggcagccggcctcggagctgctgccgcgttcgccccgaggcaggtcaac

SEQ ID NO: 21497 - DNA, 1188 bp, Artificial sequence
  DNA replication origin
tcagctcactgcaacctccacctcccgggttcaagcaattctcctgcctcagcctcccaggtagctgggactacaggcacatgccaacacgcctggctaatttttgtatttttagtagaggtggggtttcaccatgttggctgggctggtctcgaactcctgacctcaaatgatccacccacctgggcctcccaaagtgttgggattacaggcgtgagccactgcgcccggccacgatgggaaatattttaaagaaccatcctcaataccttggtttctcacccataaaatagtgacgataacaattttcttacaagatagttgagaggatgacatcatttatgtaaagagctagtggggtccgacaacaagcagtcattcaatgttactggtcccttccccttggcaactcctcttctgaaaaaggacaagagactgggggtggggatggggagctctgcggggggtgtggggggaatgaaaggaagactccaatgattcctcaaatgccagctgtttatcaagtttgatggttacgatggattttccagaaataaaagctaccttgctccaataggtctacctgtgagcaactgagatggggaggaatggggaggagcgctgagcatagactcgagaagggtatgattcaggtctcgatagacaatgttctttggagtagcaccaaggttgtgtactgggcaggcactctgccagctcgccagcctgttctgtccaatcctggcgtcttggagctggggtggaagaatttttcctgaaggaaagcagccaacaccctgtcccacccttctccttgggcaactctttgccaggcaggaatctctcatcagggttttcttttggctgtcagatcaccagcagttataggcttaagcccctgtcaccatgcccctcccggaacctggcagagagcagcagctgggactctgcaggacctccttattccagccaggaatgcacttggaaaaccccagagcttctcctgtcagccagagcccagaaaagccagctcctggtcttggcacattcagtgcagtcaaacgtggaaaggggcctggatagggaggggtcgactcccaggtcccacctttgcgggggaagctggtccccctggattaggctgggagatgcttggggctggttgtaaggtaaaagacggggggtcgt

SEQ ID NO: 21498 - DNA, 809 bp, Artificial sequence
  DNA replication origin
gtagccccgcgccgttaccgtcgcccctcccggccgagggaagggtcctggaaagcgcgaagggcggccaaagcccggattagggccaagggccgcatctcgccgccaccgtgggaaactatctttgagaggagggaggagtcgtggcctggcctcattcccgctcacctccagccttggccgcctctcgcgggctcttccccgccccgaacctcccacctgcgggcccactggcacccgcggcgctcagaggctctaggtggctcccggcggcggttcgcggtctcggggccctgcagcgtcgagtgcgcaggcgcggcgggcaggtgggcggggcgtgcgcgggcgcaggcgcgcgcgcgggaagggatgggctcgcgctgccgggcgtgggcgtggactcgggcgtgggcactggcggagttccaagcccgggctgaggagggggcggcggcggcggcggcggcggcgggcgggtacccttcgactgggcgttgccgctgttccctgcgcggcatggaggggacggccgtggccgtgttcgaggtgatgctgggaagggagagaaagcggaggacactttctgaggagacgggctttgtgaggagaccgcgaagtttgggcagaggggtcgggcgtcgcctaaggtgaaggaggaaggttcgggaatcgaggcccgtctcccacggggaagcgaggaagtaggagcagatgagggctctcgctcgcggggtactctgtgggggaacgacgccctctctccagcctacggctcagaaagctgcggcgtttgccgagcaccggcggac

SEQ ID NO: 21499 - DNA, 1097 bp, Artificial sequence
  DNA replication origin
ggcggcggcggcggcggcggcgggcgggtacccttcgactgggcgttgccgctgttccctgcgcggcatggaggggacggccgtggccgtgttcgaggtgatgctgggaagggagagaaagcggaggacactttctgaggagacgggctttgtgaggagaccgcgaagtttgggcagaggggtcgggcgtcgcctaaggtgaaggaggaaggttcgggaatcgaggcccgtctcccacggggaagcgaggaagtaggagcagatgagggctctcgctcgcggggtactctgtgggggaacgacgccctctctccagcctacggctcagaaagctgcggcgtttgccgagcaccggcggacacccaggggcagagcctgacgcagcctcggaggtgcctgccggagcccagcgccttccatgcaccgggtgctgggagggggcgcggaaagaaggaaaggaatggggcaagccctggcgttgcggggcggggtggggggagtcggggcgccaggacagaggcaaggagggacccagtgcagactgggagcgagggagagtttttttaggccccggtgcaggtgcaggtttctgggttcgaagcagctggacgtggaagggcgaggttcagaggccacacctgtgctcggggagctgctctggaagacggcactgagcgcctggcgccggccacgccccgtgtgctcatttcattacccactttcacggccggtgcccaatgggacgttgagctgctgtttgtgaggggtactgggcaggtgacagaagcacaggctctgagggcacctgagagagtacccccgggcgtcctgcctgtttgttgtcatcaaagaaggcggcgggattccattttacaaataaccgaacctaggctagaacccagggcgctgactcataggccagtgttcttttcccaactgcgctgtcataccgacatgagaatatctttagggtttgtttgtttgtttgtttgtttgtttgttttttgagacggagtctcgctctttcgcccaggctggagtgcagtggcgtgatcccggctcaccgcagtctccgcctctcgggttcaagggattct

SEQ ID NO: 21500 - DNA, 1560 bp, Artificial sequence
  DNA replication origin
aagaggacttggtgagcgcgcggcagctttattaaaccacgggataacggctgcccgcagcctccggatcggtgggcgcttgcggaaggggacccggctcagggcccagggctgggactcagccactctgacaggttggagacctcctgcagccacagcacgtcctgcgggaacaagggggcccggggtgaggacctctcagcagcggcccgtggcctgcacctcctgctgagcccttccctgcgcggccctcgcccagttacctccaggcggcttccgaggctcgccctgcccggcgccagggccctgccgtgagcctcgcggtgctcccttcctctaggagtgaggggggccgcggtggcttccgggcggcgcggggcggcctctgacgggctcggggccctggcagagcgcagagctcgcatctcctctatgcgggggctgcccctcttgagcctcttgttttctgcttgcccgctggtatctaggagaaaaacaagcctcttcatcttactttcatggccctgtgctaggagcacccttggccaaggggaagcctgggagaacgggcgccgaggggctcttcccaccgcatccctgtcagcaggtcccatccacaccaaaaccctgcagctgtgggcgcttctggagcagcccgaggctgcagagacgtttcagggtctccctattctctcacccaggcgggagattgtcccgagccctcacttgggggactcaggccgctcagtaactttctgtatagattcttcctggagtctgcactgacaagctcccctccctgccagcctctgtcccccctcacctttctggcctcagttctgtctccctttgttgctcacgttgcattgagcagtgcccataggcagctttcctactcttaactgattcatttgtcaaattaaagcgagtttagatggatagattcttccccagcaggtcttggggatgcagatcaatgagcttttccctgagagaagctcacagatgctaggaggggatgcagacctgtgtacaaagcccagggttagaatagagaaggaagccgaccacctctggatgtgaagaagggtttccatgaggagatacctgagctgaccttttgtttttttgagacaaggtcttgctctgttgcccaggctggagtgcagtggctcagtcctggctcactgcagcctcgacctcctgggctcaagcgatcctactgcctcagcttcagcttccagagtaccaggaaccacaggcgcatgccaccacaccggctaattttttttacttgtagagacaggggtctcaccgtgttgcccaggctagtctcaagctgtcctcccgccccagctccccaaagtgacggtattacaggcataagtcaccactcctgccccagagctgggttttgaaggatgaagagtgatatgccagacaagggagagaaagggaatttcttgctgaaagttaacacaaaccttatgcaaaggcataaaacaacttcctatgtaaatttttactttttaaagatgaggtctcgcctgtcacctaggc

SEQ ID NO: 21501 - DNA, 1449 bp, Artificial sequence
  DNA replication origin
caccgatccggaggctgcgggcagccgttatcccgtggtttaataaagctgccgcgcgctcaccaagtcctcttccgcgtctgcttccgcgtcgggcccgggcggggcggggcggggcgtggagccgcgccgcggcctgacgtcacccacacctccctgggactgcgtcactggtgcgcgccgcgggtcagggcgcaatggcggcgctgggcggggatgggctgcgactgctgtcggtgtcgcggccggagcggccgcccgagtcggcggcgctgggcggcctgggccccgggctgtgctgctgggtgtcagtgttctcctgcctcagcctcgcctgctcctacgtgggcagcctctacgtctggaagagcgaactgcccaggtgcgggggctgcgcgcgaccggaatccgcgccctgcgggcggagcttgggcgagccgggggcgggtccgtgctcatgggcagccgcgggccccctgaacttactgtcccctccgtagggaccatcccgcggtcatcaagcgacgcttcaccagcgtcctggtggtgtccagtctctcacccctgtgcgtgctgctctggagggaactcacaggcatccaggtgcgaaggaggcggggcaaagggcaacggcggtgagagctcaggggtctttaggggaggaagcaaaactgatgccccctttcctgtggctcagccaggcacatccctgctcaccctgatgggcttcaggctggagggcattttcccagcggcgctgctgcccctgttgctgaccatggtgagtgctcctgctgtattttttcttctggtctttgttatcagcctgatgggcagtgccgtggactcttgtttttggtttttggttgatgggagacaggacttttgagatggccccagggtcctccggtatgcatggtctggaaatcgtggctggagaggatttcaagcttggagtctcagggagcatgggcaaaggtctgggcaaaagcggtgggttatggtgaaagtgttttcttgccctcagattcttttcctgggcccactgatgcagctctctatggattgcccttgtgacctggcagatgggctgaaggttgtcctgggtgagtcttaaaggctgaagggaaaagtaggcacaggcagtccaggacattggggcagggagtcagcgggctcagggtgtgatctggacacgtgaaatgtcatctctctgggtgtgttttctcatcagtaaaatggaaacatagagctaggtggcctctaagggttgattgccaacgtccaaggagttccctgggaacccccagcagtatttggtgtggatcagagagcactgtcccctgcttccccaaccagagctagtcttgcttaaattttggtgtctccagagtttacttccaggatgcccttgcctcagctaatgccttccattcaggtcatctcaag

SEQ ID NO: 21502 - DNA, 1382 bp, Artificial sequence
  DNA replication origin
acacacccacacgtccctgcacccacgggcagggccgagcgcaaacccgcactgttgctgggacccttgcgttcacagacacacgctgaaggtcataaccgttctgcatcaccgagtcacgtggagggtccccaaccggcacggggttcggccgtggggggggctggggcggcgcccctggcagggctgctgcggggtggggccgagagggcttggcctccgggcaggcgccccgcccccgccgccccgccctgtccccagctgcctctcgcctctccctccctccccagctgccccgcccgccccgcgggccaggcgttccggagccaaccggcctccgcctcgggccggattggtctgcgcggcgcggcttcccaaccgccgggggcacgcattgggaagctgtgcgtcctcgcagcgcctgcggcccctccctcccgctctgtcgccgccgggccatttccctggaagagcggctcggaaccagctcctctcagagaaagggctcccggcgtgaggtgggggaggttctttgcttcctggttgagaaagctggggcttcggtggctcggcgagcctggtttccttccagctgtgcccgccaccaccagtggtctgcccagttgggaaacaggaagtcaccacctccccgtgtctcctggtccttaagccacctaaacctcagccatcctcgttctccctccagccctgatccccatgggccaggtggcaggaaactcggggaaacccaagattggaattctgatcctgtcagcacagcagtgtagtcctgggcacgttacctgaccactgaaaacaagttcctcctgtaggccaggagagttggatggtacatacataagcatttcctaggggcgagaggggaggacagctgcagcttgtgaggggcttacaggcagccagaagccattctgtcaccactcactgggcctcagctgtggcgtttgtaaaatgagggggattcagtcctggtgcaggtcaactctgatgtgcagtggcaccagctatgtctttgttcctcttctccccatcaaaaatgttttccaccgggtgcagtggttcatgcctgtaatcccagcagtttgggaggccgaggcgggtggatcacttgaggccaggagttccagaccagcctggcaaacatggcgaaaccccatctctattaaaaatacaaaaattagccgggcgtggtaccgcatgtctgttgggatgaggcacgagaatcgcattaaccagggagccacaggttgcagtgagctgagattgtgccactgaattccagcctgggcgacacactttgtctcaaaaaaaaagttttcattcactctaaatatagatgtttaccagcatccaccatggcc

SEQ ID NO: 21503 - DNA, 749 bp, Artificial sequence
  DNA replication origin
caactgggcagaccactggtggtggcgggcacagctggaaggaaaccaggctcgccgagccaccgaagccccagctttctcaaccaggaagcaaagaacctcccccacctcacgccgggagccctttctctgagaggagctggttccgagccgctcttccagggaaatggcccggcggcgacagagcgggagggaggggccgcaggcgctgcgaggacgcacagcttcccaatgcgtgcccccggcggttgggaagccgcgccgcgcagaccaatccggcccgaggcggaggccggttggctccggaacgcctggcccgcggggcgggcggggcagctggggagggagggagaggcgagaggcagctggggacagggcggggcggcgggggcggggcgcctgcccggaggccaagccctctcggccccaccccgcagcagccctgccaggggcgccgccccagccccccccacggccgaaccccgtgccggttggggaccctccacgtgactcggtgatgcagaacggttatgaccttcagcgtgtgtctgtgaacgcaagggtcccagcaacagtgcgggtttgcgctcggccctgcccgtgggtgcagggacgtgtgggtgtgtgggcatgtgtgggtgtgttggggagggtgcccagcgacatgtgacaaagacgcccgtctccgggagatggtgaaggggcccgcgagcaggcgctttgtctggctgtctgcagagtgaggttcg

SEQ ID NO: 21504 - DNA, 871 bp, Artificial sequence
  DNA replication origin
tggccgggggcgcgcgcgcctgtgccagggtgagtgcgctgcggcagcgccgggggacagcgcggagggcccgcgccggcccgggcctcgggcgtgactgggcgccacccgtgggcgctgcagcggccgcgtgtccccgtgacctcaggagccggcccgggcccgggtggatccccgcgcgcccctccccgtccgccctccacgtgcgtgtccgcggcgcgcgcgcccgccggcgcgcacccgctcgcctgtcgccgccgccaccgctaaccgcgccgggaaaaggtgccgggaaccgagcgagccggggccgcgggcccgagcgccatgggcccgagggtgggcggcgggcggccggtcatccccgggcctcgtccccgcgggagagcggccaggagtcggcgggggccggccgggctcgcagggaggccggcccgcgccccctgagcgacggacaccaggtgagggggccgccgggcgcagcgcgggggccggccagggaggggccacggactccacgggaggttcggggggcgccttctctggcgggggagggtatggcggggagtggggaggcggctggcgattcctggggacgcctgggaaaggaagttccgggaccctccctgctctcggtcctcctccgcttcctgcctcatgcctcaccttgtccccagcgcctggactcccccttaactgcttgggaaatgtgacctttgctctggggggcctggccctgcaggccccaaccttccctcatctctggcggccctcttgggcctctgacccagcccctccccgggccaggctcacagaagctggcttctgggactgtcctgggcccaagtgggcacctgcgccagccccacct

SEQ ID NO: 21505 - DNA, 1151 bp, Artificial sequence
  DNA replication origin
ctccagcgtcccctcaccctcggcagcagtgcgagcggaggcggcgatgtccgagggcccggggcggcccccctcggcactgctgttcccaccatggggcaaggccagcacccgcagttctactcgggctgtggcctcaccagcagggttggtggcgatgcaggtgtagcccccagcgtccccagcgccggtcaccccaatctctaaggtcccgttggggaaagcccgggctcgggaggagttgccaaccaaccggtcgtcaggaccgacccagtgcatggtaggcgcggggtcacccagggcccggcaccgcagcgtggcccgctggccttccagcacccagaggcgctgcgtgtggcgggcaatgaggggcggctcacaggagaactcgccctcgggcactgcccagaagtagcggccggccaggccgggcggggaggcgcacgtttccaggtcgtccggccgcgccagccgccgcagccacagcagctcacagttgcagtgcagggggttcccgctaaagctcagcaccaggggggcgggagaggcctctgcatcacgcccacgagagaaaagcgggtccggagccagcgtggccaggcggttggaggtgaggtccaggcgggagagctgaccgagctgggcgaaggcgcctgggggcagtgcgtcaataaggttatggtccaggttgagggtgtgcagggcaggcatggcgccgatgccggcccagggcacctgccggaggttgttgtaggacaggtccaggtcctccaggctctctaggaagtcgtcgaaggctcccggcgcgatgcggcccagctggttgccgctgaggatgaggtgctgcagattgacggggccccggaggctcccggtgcccagctccaccagcctgttgccgtcaaggtggagggaacgcaggctctcgaggtccccaaaggcgcgggccccaatgcgggtgatggcattgcgagacagtgtcaggtccaccagtcccgtcatgttgcggaagtcagggggccccagggcctggatgaagttgtcagccagccgcagctccactgtgcgccggtccacgttgggcggcacaaacagcaggcctcggtgggcacagagggtgctgagcgactcggacaggttctggcagacgc

SEQ ID NO: 21506 - DNA, 1298 bp, Artificial sequence
  DNA replication origin
accagggagggactcccaggccaggcggcggccccgggccctctgccccacgaggctcatcccttggagcacacaggaagctgcccgtccatcacaccacactctcttccagccgctcggcgctgcctcctaccccccggcaccctgccccgagcagccccccatgcacagagtggctccgtcgggcccaagctcctcccaggcgcctggcataaccgtagcacccggcatctcccaggtccagagagcagctgcgctgcggccggggcggggggctccgcggcgggtgggccttgggtgtggggctggggcctccattggtctgggactggacgtggctgagcttgagggggaggcggccatttccggccccccggccccgaaccagcaaggccacagtgaagaccagtaaggcagccaccagcacaccccccacggccacggtcagggtcccgcccagcacgtgggcctgcagggcgtggcacaggggcgaggccggcagcgtggagaaatgggcacagcccagcagcctggtggccgtgaggtcagagggcccagcggccggtgacaaggccagcaggcagaggtcatagtcagcgccggggacgaggtgcttcagcaggaagtggtggctggaggctgggacaatcctgcaggcaagggcaggtggtcagagcccggggctggggtctagccccatcctcacctccccactcccgtgctcccagctccaaacacccctccccctggggccactcgggctcttgggttcactcaggaaggtgaacaggctggagagtgtggccaggagatgggtgtgtgcactggcacaggacgcaggcaagcgaggggaatggggtggggggatggcaccagcagaggcagaaataacacgcgggcgcgggccatgtgcttcagacagacccaaccgccacctgctgccggggaggcctgcacagctcagtgacacctgggacatctcggggtggggtccttctgccgccccttgagctccagccccctcaggcagccaggccaggccaggccactgctcctccaagagtccagcagccatggtcggggagggggtgtcagccccagagagaggaggggtggaagcaaagccttgtggggagcagagggcggaggaagggcgccgggagtgcagccgggtgtggggcacgcatcctcaccggtagatgagggtctcatcttcgctgctgttgtactggatttggaacatccacactgggtcggctggccgcccgggaccccagctcaccagccctgaggtggcg

SEQ ID NO: 21507 - DNA, 1727 bp, Artificial sequence
  DNA replication origin
ccgtatccagtgtaaagcctggggagcacgtgtgagcgccttccccatggcacttcagggtctgcggggcggacacaggactggactaagcaacaggaggaggtgggggacggtacagccctctgggagaacggacctgggctgagcgtacagtgaaaagtcctcatggctccaggtgctgacagctgtgtctgccacctcccagggcatcttgtggactggtaaaacgccatcccaaagggactggaagggcagggaaccccactgctctgccatcagcccgtgatcctctggaaggttcctgtcagaactgtgggtccgagcaggaccgcagctgccagctcagatgtgctctgggccttcctgggaaggcggccttcgccctccctcgctgcagggaggcagccggatgggcacgagccctgctttctctgctaggacccctggccaggcccgggcagcctccgacctggcccagcccctgcagcctcctgaactatctgcttctaggcactggctggggggcatgggcagacgtggccctcagccctgcagagggtcaagctcccccaggtgctgtatgaaaactcagaaggcggccctggcaccccaggccacggcaaacacgctgcacagactccctggtgttttctgtgtgagggccaaggcgctgccaccgggcagccgaggtgaggcaggtgctctaaggcatacgtgtgttcacgtgtgcatggacctggctcacacgcgtgtgcctgccctcccagccccagaacatgcagctagaggtgggcttcgagagcctggtttagatgaatgggagcaaggtcctcgacagagaagggtgtggggagcgaacgccatggaggagtgggcgggggcgcgggacagggtgggtgggcacagacggcaaagggacaggagggccagggctgccacgctgggcgctagcatgaggctcaggaggcggctagagccagcggcctggtcttggtgcacatttggggaggacttggcacccccagacaccagagacacttatcctgctgctggccccgtggtcacggtctctagtgcccctttctccacctggggggcgggggacggtctaaagaggaagatctttccgggccctccagggtgcagaagcccacctctagctgcacccctagcaggcgcaaggttctagggcccagggaccagcttggcacgtggggagctgctgagggtgaggagggagcagaggaaccgggcacaaccccaggagccagccaggaccacagagcaacgggcaggggcaggcgagggggatggcctgggtcacccctgtgcatggccacgcatcccctcaacaccgaagcagccgcaggacatccccgccaggacaccaggagccgcagcaaggtgcagggggagcgcgtgatgtcgacagctgatgtcgcgacacacctctgcctatgtgcacgacagggacccccaacagggaggctgagaggctccccacggaagagtaacaccccctggcctctaggaagtgcgctgttccctcttaaggtgggagacaggctggccacacacacaggcataggcccagaagcctccaggggctcttgcgaccaagcagccatgtggacatgtgagaagtgattgcaggaccctgaggggacagcacggcccacatgcccccccatcccccaagcaactgcgcctcgatgacaggcagggct

SEQ ID NO: 21508 - DNA, 1004 bp, Artificial sequence
  DNA replication origin
aaacaggtgacattttgcgaatgatctggggcgggtgcaggggtttgggggctggatattagaaaaggcctctctgaggaggggacacagaagctgggacctggatggggagaagtcggccacgcacagatccgcagagaaagctccaggaagaagggatagcaattgtgaagttctcaggaagaacaggcttggtgctgtcctgagagagggaagtgtgagcccacggcctgaggtggggctgcagccacagacagggcccagtggttgaggcctcccttcagccatggacaggacaggagggacatgatcgatgcacagtggaaaggatctctctggactggcgagcagcaggggctgacagacgacgcatgtctggggcaattcagaggctgagctgagagacgcggagcctctgacagggggaagctatgggggtcggggtggggcttaggaaacatctgggctatgacagacaagattcgtcgagagaccccccatagaaagcaaggtagaggaagaaatcctgtatgggtgggtggagatgacttttcctgctataagaagggcaagacagaaaaggcagggctgggagtgaggcaagctcacagagggggaagagcagggacaagaacctgggcagcatcacaggggcggtggtgtctgaagccagggagagaacagcctgggagaagtgggtcaggcctgcgtcttcaggcccactggagttgagtctggccgaggaggaagagccaagaaggagcccaggggggatgcctggaggagggagggacgcacgggtcgctgggcagaagcgagcggctctcaggaggatggggcgcgagttgggcagagcatgactcccagaggcagggtaagatgggggctgggaaggggccactgcggtgaccaggaggcacccaggtcacacccggctatggtgaacgtgggtagagtaaccttgctggactctgggctcctcctctttctaaaatataccttgt

SEQ ID NO: 21509 - DNA, 705 bp, Artificial sequence
  DNA replication origin
acatacacttggagcaaacacacaggcccgaggacaccacgtgcttttgccaatgcagaaacctgtccccaacattcctctgcaaaggaagacccaccccaaacaaaagtagttgggagtgtcaggtgttgcagagaggggggcacctgtcccagagcactcaccctgtaccggccttcagtgcacagaggagggtgtctgaggagccacagacagctgctcttctgcctgaggttactggcccagaatacaaagttccccaacacaaggctgctggaggcctgggctgcaatcaggggaaggggcagcagtgagcctagaggctgtgaacctgaggcctagaagctggcatgggccgctggctgcagggaggcgggaggttgggtcacgcagagagtagctgatccacagcccacagcctgctccctcggccccctagggacctggcaagatgatgagggaggtggtctgagacaggaggcagtcagagacgggagggcaggtttctgtgatggatttgggatgtgctgccgagtgaggcggaagacacggaaatgttggccagcaggcagtgtggggctggggaaggctgtcaggagctgctgtgaatgacggagggtgagggctgcactgctccttagaacctagttatggccctgaaactaagctcaccgctgtggtcacacaagacccccaccaccaacc

SEQ ID NO: 21510 - DNA, 845 bp, Artificial sequence
  DNA replication origin
ctggagaagcacaatgatggtaaaaatacccccctctcatccgcacatcctgatgcaggccacagcggtggctttcagagcatgtcgctatttgggactgtgatcagctggctggggcaggctgagtgagaggcagcagagatgagaagtgaaggatgatgaggcgggccacgcctgcgtggagagcagggcagagttagcaagatggcctgaaggaaagactccagggtgggaggaggaagggacgtccagagggagaagaggggagggaggggggcaggcagaggaggggaggaggtccaggtgctggggcggctggagcaaaggcagataaggcaggaagcaaacagcctggcgtggcccgctgaggcagggagtgcaggcagggagaggagcctaagggctgagcctgagactcagtccagagctagtgggccccaccagcagcttgggcagtgtcctctatgtcgggatgctatggaaataccaggcagcagggagacagatttgcaactgagagctcaggaccactgtggcagctctggggaagctggatttgagaaggaaagatgagaagtagaaggtcagctaggaagatgttctaatgtgggcaagagacaatgaggacctgaaccacggtggtgggaataggaatgaagagggactgtgccaagaaatacttaggaggtggcatcaacagcacccattagatgggaggcagagaggcagcagggaagggtggccctgggttttaaggtgaacgatggcaacaccaaattaaagaacgcgaagccaatgtgggtagaaacagtgactcagctttgaacctgaagagtatccggctg

SEQ ID NO: 21511 - DNA, 1172 bp, Artificial sequence
  DNA replication origin
gccgcggcgtgtaaggcgagggctttccttgttccttgctctcgcactccgcctcccgtaggatcctctactttgtttcagacggggaagctccaggcgcccagacgcagtgattcgcccaaggccgctcattcaggaggtggggctgggctcagccccttatttctccagcttttagtagtttacaaagcgcatcagagtcggaagccaagtccctaggtccctggcaactttgagattcttttgttttcttttcttttttagacagggtcttgctgtcacccacccaggctggagtgcagtggcgcgatctcggctcactgcagtctcgacctcccgggctcaagcgaccctcctgccacagtcccccagtgctgggactacaggcgggcgccaccacgcctagctaatttttgtattttttggtagagacgaggttccgtcatgttgcccaggctggtctcgaactcctacgctcaagcgagcggcctgccctggcttcccaaagtgctgagattacaggcgtgcctcgtctgaaattctaaaaaatcagattgtgtctttattttgtgagaagaggtaggcctgggctccttacccgttctccagctgagaaaacaggctcagagaagtaccaacacttgctgatgacaaccagaacctccagagtgcctgccatctgcctccctattgctcccgtacccactgccaccatcagccctggctggcctcccccaaggcaccctttccctgtatgtgatgcaaacacttgtgctgggggtggatgtgctcagcatttctctcacttgcagctacagcttcctgcctgcaggctctccttaactgttgaactcttaatcacattcttttgcacacctacagtgttcctatccctacactgggccgagagacagcgtgggcgatgaggtcaatccttgtcctgcaactgctgacaaacccattgggggagagagaaaataaacaaaacctaagcagcaaggcagcctgctgcagatgtttgtagagagcctagtgggtgaggtattggccctaggaggacatggaagaggaagttcagtagaggccagtaaatcacagcaaaccacacactaaagcgagagagaggagaaatggcctggaaggggatgggcttgggaaggcttcgtggagga

SEQ ID NO: 21512 - DNA, 1051 bp, Artificial sequence
  DNA replication origin
ctgtctcctccagccgtcactcgcggagcccgcgccgcctttgcgcgcgcgacccttacataagcgtccctcgcagcggtgccggcgcacgtccacccgctccgacccgccgcgggaagaggaccgtgcggagcgcggcggacactcacctcctcgccgtcgccagtcctcgccgccgcctctaccgctgctgcctccactgacagagaacagctgcggtctccgtgcaaccgaacttgctgcagtcccggccccgccttacggacttcctattggcccagacagcccaacccctcccgttattgggcagtgttctccgtcactcctcgcccctaggctctggactcctccctgtgcccgcctgtccgtcacgtttaagccttggcgccccacgtcagccccgcccctcccgtccccggcgagcgcctggataagtggcgaggctgggagagcccgcccctggcgcaccaccgcctactcccttgtctccggagcctcacgtgggccgccggaccctagccgacgcccgcaataggcggaagtggccgggctgtggctcgcagttattggctgtcggcgggggtggggacgttcgattcattcacccgagtagcacgtgtctcccgaagctgcaagcacaacagttcgcactggggctcaggcatcccggctagacgcagatacgcgctggctagcggagaagaggtcgcaggaaaagctaacgttagcgaagggcaggaggaaggagaaggcgcttgtgccacacgggttacatgactatgtcctttaacagctgcgtagatgatgatgggggtctacagtacgtctgtgtgaccttgggcaagcaacttaacctctgagtctcggttttgtcatctgcagagcgaagctactcaggacctagggggtttggaagccttgtttgagacacaagacacttgacaagacccaagacacttgtcaaagaggaaagctttgacaagtggaacaagtgactgaggcataagtctctgtcatcgaggcttattaatccagtttgagggcgtgctcg

SEQ ID NO: 21513 - DNA, 1563 bp, Artificial sequence
  DNA replication origin
gggttcaagtgattctcctgcctcagcctcctgagtagctgggattacaggcgcccgccaccatgcccagctaattttttgtatttttagtagagacggggttttaccatgttggcaaggctggtctggaactcctgatctcaggcaatctgcctgcctcggcctctcaaagtgctaggattacaggcgtgagccaccgggcctggcccaattcttaaaaggctgtctctgtttggttgttaagccatggtgctcagtgtcaatggatgccggggccatagagattcagaggagaacaaactcttcagggatgaggtagtcagggaagctgcctagaggagaaggaggagaaggaggaggggggagggagaggggaggggaaggaagggggaggggaggggagaaggaggggggaggatgggggaggagggaggggggagaggaggggagggggaggggagggggaggggggaaggataggtgaaggagggagtggcaatttcctccccttggccttcactccttgacccagaaggtggggaggcagtggtgaggtgactcagggatgcttggccctgtggcctgccctttgatttatgaaagccaccttggcagcaccaacctttgcccccagtgatctcttgtcagatgggtggaggcactgggccacctcagagggccagtgtcttgctgaggggccggagcagtcctgtgcctgcagcctccggagccatgggaacagggctgcgaagtcagtccttgcgagagccccgaccctcctatggaaagctgcaggagccctgggggaggccccaggagggccaactccgcagggcgctaagcctcagacaggggcaagagaagtccaggtcccagggcctcgagagaggcacagaagggccagatgccactgcccaggagcgggtgccggggagcctgggggacacagagcagctgatccaagcccagcgaagaggcagccggtggtggctgaggcggtaccaacaggtatggctgtgggctgaaggatggagggtaccacagcaggtgggcagggattccagggcaggaaaggttcagagacagagccagcccaggctgtgtaccaagatgacaaccgagctgcctggagatgagggtgcagagagagacaccccagagccacgtttcagagggccctgaaggcatttgggatttatcccacaggcactggggagccactgaaggttttagaggaggagggtgatatggtaagcgctgtttttagctgattgatagtatgctggatgggggaatagagcaggaggcaaggagatcagccagtgcaacttcctgggaagtacactgtgtgaccctctcaccccagagaaaaaggggagatctggacccctttgtggggggctgcaggctccctcctctaagagacagggtctccaatgagcagtgcttctctacctggggtctacccccacctcgtggctatgggtggaacaacatctaagcccaccactcagcccatgggacctcccccacctctgtcttccagcaggtaagaagaaggtg

SEQ ID NO: 21514 - DNA, 963 bp, Artificial sequence
  DNA replication origin
gaggatgaggggaggagctcagagtgtggatatattttattttgaagatggggctgacaaggttagctggtggatgtggatgtacagtgccaggaaaagcgttccctgcttgcttcgctgcttcctccattagtgcaaccgagcagccccattttccctgcaagatgtttatttccatctctcaggctttttcctcgcaggaagctcacgggaagctgaggaaggtgtctggtcaggccgagagtcacactggtttaggaagtggggcctccgtttaatctccctcatctcactgccccagttagcacttaactctgttctgcttcgtggcagagcaaccagtctggaaagagtcaccgaccatggaggtttccatccttccaactgtctcttgtctgtggacatttaatgtcagcacactaactagacattgtctgttgtctatgttcaggaggtgacaaccatgagagtgagggtggggaggtgggacctgtggctccagcttgggcgcggggacagagcagggaaaggcccaggaggcatcccacacaggcacaggcagaagcaggggcgcaggcatgccaccaaccatcattgacacatccgcctcctgctgtcagggctgatggccttggcgggggaggggaggcccaagtgctcctggcctctgggagcagctactgggggaggtggaactcgggcagggggaaacaagacagaaggtaaagctatgccaaggaggccagatggggtgttgggtatagggcactcagctgtgtgtggcccagttaagcccgcccctccctctgagcctctgtctgcactcctcccagtggaccccacccaacctctgtgctcacatgaccacaaggaatctttctaagctgctgctctctctcttctactgaacactctgcaatggctccctcgtgctcctcaggccaagttcaaactcttgttctt

SEQ ID NO: 21515 - DNA, 1347 bp, Artificial sequence
  DNA replication origin
agcccttgggtggtcgatgggactgggcgccttggagcagggggtggtgctcgtcggggaggctgggccgcacaggagcccacggagggggtggcaggctcaggcatggcgggctgcaggtcccgagccctgccccgcgggaaggcagctaaggctcgtgagaaatcgagcgcagtgccggtgggctggcactgctgggggacccggtacaccctccgcagccgctggcccgggtgctaagtccctcattgctcggggccagcagggctggccggctgctccgagtggggggcccgccaagcccacgcccacccggaactccagctggcccgcaagagccccgttcccgctcgcgcctctccctccacacctccctgcaagctgagggagtgggctccagccttggccagcccagaaaggggctcccacagtgcagtggtgggctgaagggctcctcaaatgccgccaaagtgggagcccaggcagaggaggtgccgagagcaagcgagggctctgaggactgccagcacgctgtcacctctcaggattacagggatgagccacctcgctcagccaagacctgtttttggtagaggtcaaggaaggcctctgtgatgaggcaattaatgagcagagaggcaaggaagtgaggcaggcatttcggggaaggtatttcaggtagacggaagggcaagtgcaaaggtcctgaggtgggatgtgtgttgggttccgggaacaacaaggggccagggtgagtggagccgagggagaggcctcctgatgaatttggaggcacccagagggtagagtgtcatgggccgtggaatttactctgcatgaacagggaagccatttctgaattttgatcagaaaagtgcctggacatggcttttgttttggaccttgtgtggtaagtaaatggcagagggtgaagctgaacatgggccaccaggtaggaggctgcagaaattatcccagtgagagatgacggtggctcagcccagggctgtgtttctgaggatgaggggaggagctcagagtgtggatatattttattttgaagatggggctgacaaggttagctggtggatgtggatgtacagtgccaggaaaagcgttccctgcttgcttcgctgcttcctccattagtgcaaccgagcagccccattttccctgcaagatgtttatttccatctctcaggctttttcctcgcaggaagctcacgggaagctgaggaaggtgtctggtcaggccgagagtcacactggtttaggaagtggggcctccgtttaatctccctcatctcactgccccagttagcacttaactctgttctgcttcgtggc

SEQ ID NO: 21516 - DNA, 941 bp, Artificial sequence
  DNA replication origin
aaggctggagcccactccctcagcttgcagggaggtgtggagggagaggcgcgagcgggaacggggctcttgcgggccagctggagttccgggtgggcgtgggcttggcgggccccccactcggagcagccggccagccctgctggccccgagcaatgagggacttagcacccgggccagcggctgcggagggtgtaccgggtcccccagcagtgccagcccaccggcactgcgctcgatttctcacgagccttagctgccttcccgcggggcagggctcgggacctgcagcccgccatgcctgagcctgccaccccctccgtgggctcctgtgcggcccagcctccccgacgagcaccaccccctgctccaaggcgcccagtcccatcgaccacccaagggctgaggaatgcgagcgcacggcgcgggactggcaggcagctccacctgcagccccggtgcgggatccactaggtgaagccagctgggctcctgagtctggtggggacgtggagagtctttatgtctagctcagggattgtaaatacaccaatcagcaccctgtgtttagctcaaggtttgtgagtgcaccaatggacactctgtatctaactgctctggcggggccttggagaacctttacgtctagctcagggattgtaaatacaccaatcggcactctgtatctaactcaaggtttgtaaacacaccaatcagcaccctgtgtttagctcaaggtttgtgaatgcaccaattgacactctatctagctgatctggtggagccttggagaacctatgtgtcgaaactgtatctaactaatctgatggagacgtggagaacctttgtatctagctcagggattgtaaaggcaccaatcagcgccctgtcaaaacagaccactgggctctaccaatcagcaggatgtgggtggggccaga

SEQ ID NO: 21517 - DNA, 1455 bp, Artificial sequence
  DNA replication origin
gggacaggtccctccctgcccgcgcagtctggcagtgaggcacggcttgcactgggaggggctgggtgcgggggaaggtgccacatgttgtgggcacagtaaccaggggagcaggctgggtggacacctggggagacctctccaacggtctggggtgggggaggaagaggggcgaggatcccagatggggagcaagtgtgcaagggtggcagtgcttcctggctcatctacactctgggcctttagagctgagggcagcctgtgggcactgacctctcagtggaggctgggtctgtgctggcttggtgcagtgtgggcatccttggtctagaagacaggatgctggggagccctagaaagagagttgcatctggctaacacggtgaaaccccgtctctactaaaaatacaaaaaaattagccaggtgtggtggcgggcgcctgtagtcccagctactcgggaggctgaggcaagagaatggcgtgaacccaggaggcggagcttgcagtgagatcgcggcgactccgtctcaaaaaaaaaaaaagaaaagaaaaagaaaaaaagaaagagagctgcatcttaccttcacccacagggggcgcttttgtcttcatttcatttcctggacctggaacagaacaaagagaaagggcattatcatggggcggggggcctgggtaatgggccctgagctttcactgccatttcccatttaactcaaccttcacagccagctgcagctttggtacgattgagtccatttgagtccattttcttcgcaggacacccaggcctggggaatgaatggccgagtttctggtttggaagggagttgggagtcagacacatcatcagggcataaaaggggccagactctaatagggtattctacccaagcaacaaaagacaaagttgaggccaggcacagtggctcaagcctgtaatcccagcactttaggaggctgaggtagggcggatcacttgaggccaggagttcgagaccagcctggccaacatggtgaaaccccgtctccactaaaaatgcctgtagtcccagctactcaggaggctgagggaaaagaattgcttgaacctgggagcataggctgcagtgagccgagattggcctgggcagcagagcaagactccatctcaaacaaacaaaaaaaaaaagcaaagttgaggctggtccagttctggtgtcacactggggagctgatgcaggggcgggagtgagcttgaaatgagagatcttgtcaatttcatgttgaacacccttcaatgatcagaaaagcgtacacgggtgcaccaaaagacaaggatagaatgttgacagtagccccaaacaggagaccacaaatgcccattatgaatcaaatgcacagatgcattgtggtgtagtgacacaatggaagactgtgccactaagaagagaagcaaaactacaaccactaa

SEQ ID NO: 21518 - DNA, 1442 bp, Artificial sequence
  DNA replication origin
gtccgcgatcagggtgcgatcccggccgcgcacgggggtcggcggggtgcgtactcacccgggctccgcggaggggccgccgctccggctgggctccagctgccggcccgcctcccgcagcgcgcacgcacctgcgcctagcccggccgccggcggcaacgccacccctgcagtgtcgccgggctcccgcctccgaggagcgcggcgcgggccgggggctcggccgggccggggcggcggaccggagctgcgccgcagtccgggcacgctcccaggagcccgccgcgcgctccctcgcgctcgcccgcttgcccgcccgctccctcttgaatttaaagtgacaagctcgagcgctgtctctgctcctggggtccgagccggagatccccaagcgcgtccgggatccagggacgccctgaggccaagcccaacccctcgctcccacgcctggggacaggggtgggtggggacgtgcccacaggcctctgagaggcaggccaagcactggactcagagccagccggcctgggttctagccccagcctccgcgccctgggttatcctgttctctttctaggcctcagtttctttaccttaaaaacggacccgatactgcgcacctccgggagccaaggaaaacagcgacaggaggcgcagcggaaagtttccccttttctgaatggataattactccctcccaccacgattgagctgtaggtcagctctgtgctggtgccttacaacatcatctcagtcctcaccgtggcctaatctggtcgtggtgactccattttttacatgaagaaacaggctcagagaggtgaccaaggtcacagagccaaaggtcagagccagaattgaacccaggtctgtgtgacttcaaactccatacctttaaccactaaggggtcgtgctttctctcccaaaggaatgaatgaatcattcaggagatatttatgacgcccccgcaggggctgggcacagtgccaggtgtgggcgatcttccatcttccgggaacaggggacaggtccctccctgcccgcgcagtctggcagtgaggcacggcttgcactgggaggggctgggtgcgggggaaggtgccacatgttgtgggcacagtaaccaggggagcaggctgggtggacacctggggagacctctccaacggtctggggtgggggaggaagaggggcgaggatcccagatggggagcaagtgtgcaagggtggcagtgcttcctggctcatctacactctgggcctttagagctgagggcagcctgtgggcactgacctctcagtggaggctgggtctgtgctggcttggtgcagtgtgggcatccttggtctagaagacaggatgctggggagccctagaaagagagttgcatctggctaacacggtgaaaccccgtctctactaaaaatacaaaaaaattag

SEQ ID NO: 21519 - DNA, 2556 bp, Artificial sequence
  DNA replication origin
atatggggacaatgggtttgcatcccccgactccaacaggagttggagctaagtcggcattgccccttccctggctgctcccatccttccattcactgctagaacctgttgagccctggaagcatccctgctcataagcctggtaaagtgggctttgaatgagctactttttttttttaattaatttatttttttgagacggagtttcgctctttcacccaggctggaatgaagtggtgtgatctcaccacgcccagcaaagctgtgggagattaagagaggttaagtgacttgcccaaagccacacagccagcggtggtagagctgggcctggcagtcattcctgtagcccagtccagcccctcttccattagcagtgacaaccctcatgccgtcttccccatcacccgtaagacccatggggcaaatcctgttactaccccctcctccacggaggaggagagggaggctcagagaagggcagtgaattggcccgaggtcacccaaccagtgaggaggaagctcagaccaagccgcaagtgctgctgtgcagccagtgcccttctcaagggctttgctcactatccccgagaccccttgactctgtctcacctgggaccacctcagtgggctcccgctggcagcctggaggtctgccaggcagaaggactgtgtctttggctagaagaggatagcaatgaggtacagtgggaccagggcagcctgtgaccagagcatccccggtgtccagacacacagcaaagagcataacatgggggaccagagtggctccagaccctcactgagctcccagactgcacatccctacctctgcagcacccctccccatctgaccaattcgttcagtcccaaatccccagaccctaaactgcacagagcttactcattgaaaacagctctaggttcaaattccagctcgatcatacctacctagcaatatctccttactgctacatgcatgtggacataacatgtgctaagtgcttagcactgtgcctggttgtagtaggtacacaatgtggacatgatgattcagtggattaatggatcccccttttatagatgaggaagctggggccccaggtcacctagcatacaagtagcaacactgggattggtgccagggtgcaatggatctgggcctgggctcttggtcaccatgctgactcctgaacaggcaggccttttggggtggggagttggaagagccccccacttcccccagctttgctggaatcagaccatggcagaggcccctcctgggcttgtcagagaattggctttccatgaatgttgtgcctcggcgggggagaggggccctctgtccctgccttctgctccaccccacctccttgcccagtgtcctcacatcattctctggctagcaaggcaatgggaagggtcgggagttgggcccaggagagcctcatccttcaacctgtgagcctcttcaggatctttaggttgaaaccttttcaagtacccctcctccgctttctgagataaccacatcctgctgccatcccccaaacagcccacagaaaccgcaggacagactggctgggaggtgctggctggcatttattgggcacctactgtgtgacttgccctgtgttatctcagcaccgcagccctctgagggggctgctaccctgctccttgtactggagaggaaactgaggtgcagtgtgggcagcgctgccagcctacagatgtgttttatttgtcagtcagtcaccagagctgacaagtggcagagtccgggtttgaaacccaggctgggagcccccactctgcagagctgcttaggaaagctttcagacttcagagtagggaggctgggggcttggggacttgtcctaacccttcttcacactggctgtggtaacttcggtgggtctcctgccctctctgagcctcaatttccccatttctaataggaagcactattgctgctgctctctaaaactgtcatcccctgacggggagaaggagctgacattccatggtgcagctttcccaggcttttgggaatggaggagggtgcacacagtctctctgcagcccctggaagagagctcccaggatggccagctcagggccttccacccacaggccaggctcccggccccccacctccctcccccaacttcagcccaaatctacagccttgaggccctgagtctgggcaagcttcctcccctgccccgccatacccctctcctaagctctggaaagccccccactcaggctggtgccaccggcggctgagggtcatatctggctcttcacacggccagggcctcctcgggctggggtgcaacgttcccctccagattgggacggttcctgcagacccagcgctcctgcctcgggaacctccagggtgtatggggaccggagtgtcgggagggggtgcgaagccagagcagggacagtgaggacagtcagggcgctgaatgcgaaagtgaggggcgtgtgtgcagcgtgggcgcggggaggcgtgtaaatggccgggtgagccgcgtgtgtgca

SEQ ID NO: 21520 - DNA, 1134 bp, Artificial sequence
  DNA replication origin
tgaccctccgccccaggcaggaccctcccggtggaagggaggagtggggcatgctccatgcagtggcggggggtgggtggctgtccctttctccaggctgtccctgcctgcctggagccctgtggtaaggggcccccagtgcagccacttctctatggagaaggaagccccagcctttccctggcaaccaaggctttccctggacccctcaagtcgggtggggagaagccctctgagccacctgtctgtcccccaggccgccgatgctgtgggggagatcctgctctccctcagctacctccccacagccgagcgcctcaccgtggtcgtggttaaggccaagaacctcatctggaccaacgacaagaccacagcgggtaaggcccagccggcagcccggctcctccacgtagctcagtggaagctgtggcccagctgctgtgctgtgggcacccggaggcatcggcaggtgtgggacacagtgccaaggtccccctcagctttgctgagcccagaagtcatgcagatggatagggggtggcatggggacaattaatccagccggggaaacatgagatccctggagggtggcaggggcccctgtgagggcagagtgaagggggtcagagtgatgcgggggtctcagggcaggaggccgcactcagggctgggggcactgggcagggaaccaaggtgggcatctgttccctggaactggaattcatggtggagactccattcccagagacagggcagtatcccagactccaaaaagggaccagggccacggggttggggtgggtgccaggcaggacccgatgccttaggtctgcaggagtccccagtccctctcaaagcagtgaccgtggaggcagctgtattctagagaactgaagaccaggggctgggggagcctgatctattgggagttgcaagccttggggcgggggtaggtggggggggcagctccaggcaggtgcggcaaggacaccccgtgggcaataggtgatgggcagacggcaagttgttatttcagagccgcacacggttgagtcaggctctgctgtgcgggtgcccggtgactcagggctgacgtctgcactcgggccatttatagaaggaacacggtggggc

SEQ ID NO: 21521 - DNA, 1160 bp, Artificial sequence
  DNA replication origin
aatgtggaaggggcggggcggcgggaggaagtgcgagccgggcgccccgagagccaggtgagaggcccgggcggctgggctggggcccttcctctccaggccgtctaggtccctgaagaaacgctgcccgagcacctactgtgagctggccgcgctggggccacgggaggtcggaagggagaagacaaacagcgggaccatgacagtgggggcgggggtgtgctcaggggctgggtcccagatcccaggcaggagccagtgacctttagtgaatgaatgaatgaatgaatgaatggtgcatttccccaggggtctcaggacgcagcacaacacaggcgtttcatgccaggtgggaaggggatgacccccttcactggccccaccaggcctggcctgccccctcccgcagcaccaggaagctctgctgcaggtgggcagccacctgacaccgtggctggccacgatctagggaaagcgatagaaccttccctctgtaaagtgtgagtgtttcttattattgcaccatgagatgtccccctggtgcccaagggcccggggaccctgaactgtttaagacaaaatccaggccctgccttgagaagcccacggcttagaatggtagacacgcaggacatcagtgtgatcagaactacaacgggagtagggacaggcagcgggacgggagtaggggaaaagagctcctcgcccacgttgagggagtcaggaaacctttcagagtcttgaggaaaaagtgaaacacagtcagatgggggagggaaaaggtgttccaccggagacagcggcacgtgcgaagctgcggaggccggagcggaatgctgcccccccaccccgcccccgcagagggtgaggctcgcttgcacagtggtgcagcatgaggagctggtgcttgctcagtggagcacgttggatgccagcagtaaatccagcattgaactgggaactcattgtcacctgatctctccacttctcctaatggccagagttgaaatcttttaaaaatgggcacaagggtcttcccagatcttggactgagtgtttctattgaagcttaaaagaacaaggggcagacgtcattaggttccccctaatttatgctggtcatgacatcccccctcatggagttccaagtcaggcaggtg

SEQ ID NO: 21522 - DNA, 825 bp, Artificial sequence
  DNA replication origin
tttacagataacatcactgaggccttcattcccaatggctggggcggaagaactctgccctggaccccaggccccgctgggacacccctcggaggccgggttaggcgcacagcctgggccgctccggcacggacctgtacacccgggcgcgcgagcggaaccgggcgaggcggaggcgcggggcactcacctcggggaaggccccatcggcgaagaccatcagcagcgacgtcttcccgcagccgccgtcgcccaccaggaccaccttgacggaccgcacgcctggtggcgcctcctcacccgcggcctgggccgccgtcatcccggggccgggcgctgagcgggcgggcgggcggctgcggcgcagagacccagactgcgcggggcaggcccggcggggcaggaatgtggaaggggcggggcggcgggaggaagtgcgagccgggcgccccgagagccaggtgagaggcccgggcggctgggctggggcccttcctctccaggccgtctaggtccctgaagaaacgctgcccgagcacctactgtgagctggccgcgctggggccacgggaggtcggaagggagaagacaaacagcgggaccatgacagtgggggcgggggtgtgctcaggggctgggtcccagatcccaggcaggagccagtgacctttagtgaatgaatgaatgaatgaatgaatggtgcatttccccaggggtctcaggacgcagcacaacacaggcgtttcatgccaggtgggaaggggatgacccccttcactggccccaccaggcctggcctgccccctcccgcagcaccaggaagct

SEQ ID NO: 21523 - DNA, 984 bp, Artificial sequence
  DNA replication origin
gtaggtgctcgggcagcgtttcttcagggacctagacggcctggagaggaagggccccagcccagccgcccgggcctctcacctggctctcggggcgcccggctcgcacttcctcccgccgccccgccccttccacattcctgccccgccgggcctgccccgcgcagtctgggtctctgcgccgcagccgcccgcccgcccgctcagcgcccggccccgggatgacggcggcccaggccgcgggtgaggaggcgccaccaggcgtgcggtccgtcaaggtggtcctggtgggcgacggcggctgcgggaagacgtcgctgctgatggtcttcgccgatggggccttccccgaggtgagtgccccgcgcctccgcctcgcccggttccgctcgcgcgcccgggtgtacaggtccgtgccggagcggcccaggctgtgcgcctaacccggcctccgaggggtgtcccagcggggcctggggtccagggcagagttcttccgccccagccattgggaatgaaggcctcagtgatgttatctgtaaagccggaggaatggcatccaccggggagaggtgtcacaaggactgagtgaggcgacctgggtgcacacaagatcctaagacagcacttggccacacaattccgctgagggcctgagagcttggaagccagactgccgaggttcaaattatggctttgcctcttatagctgtgtgcccttgggtaagtcccctaaccctgctgtgcctgtgtccctcactacatcacaggtgagtgacagtgcccaccacacagggtcactgtgacagagagttaatagacctcaagcactcagccccggcctgtgcacaggaaggactcacggagagttggcacatgtcgctcctgggaaacattgtctcccttccagctcttgccgctggaaagcacatgccatgggctctgccttggagggtgggagcacgccagctgtagcctcagctg

SEQ ID NO: 21524 - DNA, 1404 bp, Artificial sequence
  DNA replication origin
ttaccctgcagagaggaaagattctagaacggcaggagcagggttctgagccccacccccaggctcaaatcctgccatttccagccaaggccaagttacatcgcctttctgtgcctcagttaccgcacctgtacagtgggattggttgtgaacttgctgccacggcctcggggaattaatgggtccatacgtgtaaattcttagatgaggttctggtaccaaatagtttctccctaggtgctggctttgctgattatccatatcagagctcaggctggggagcaagagagtggtccactgagagggccagaactctccagggctcacacatgccccccacatgccccctcgcccccctgcagtggtacccagaagtgaatcatttctgcaagaaggtacccatcatcgtcgtgggctgcaagactgacctgcgcaaggacaaatcactggtgaacaagctccgaagaaacggattggagcctgtgacctaccacagggtaggaaacccagcccgaggtgggagttggggaggactgagtgaggggacctctggatgcctctcagtggcaccaggtgtccagaacgctcagggtgtaggtcagagctgcggtcgtcttagaggctgtcagaggtcagaaacttccagcacttagaaatggtccctagaatattctgggagcctccacaggcaaaagggagaacaaggaagtaggcatatcagagtcagttccaccaccaacctgagacccagagagggggcccaggcaggcacccacatattcagaccgtgggtccctctctgctacacgtctgggttcatgggaagttcatttcttggtgccttgagaggcaaagaggcccagaacggaggttaaaaacaacgaaggctggcagggcgcaggggctcacgcctgtaatcccagcacttgggaggccgaggtgggtggatcacttgaagtcaggagttcgagaccagccagggcaaaatagcgagaccctgtctctaccaaaaatacaaaaaattagccaagtggtgtggtggcgggtgcctgtagtcctagctactctggaggcagaggcaggagaatcacttgaacccggttggaggagctgcagtgagctgagatcgcaccactgcactccagcctggacgacagagcaagactccgtctcaaaaaaataataataataaaaataaagaaaagaaaaacaaacatgatgaagtgcatgagggcgcttgggcaagcagggatacgggagccatgggtgctccgcagaccccaccttccactcttgtccgggaaaaggaagcgagaacgtgaggcctgcccagtgcccccttcaccgcagccccatccacctctccctctagggccaggagatggcgaggtccgtgggcgcggt

SEQ ID NO: 21525 - DNA, 1224 bp, Artificial sequence
  DNA replication origin
gcatgtctgtcctgggctcggctccccgggggtgctgcaggcgcttaacaagggcgtccacaggtaccaggcgcagaagcggtctccgcgacggcccgggggcggtggcggccggcgcgcccaccgccggccggaggcgcccggcgaggtggcccaggaagcccccgctcctcggccacgctcagctttccgccgcgccggtgcccccggcggcccgggtgggacgtgaccccgcccccggcgagtcggggcgccccccacggaggggtgcgcgggccgcccccggcccccggcccgaccctgccgccctgggccgtggcgggcgcgggaggcccggccgggaagatgtctcctgttggtgcgcgcagcttcgcgcgggggtcagcgacggggcagcagccgcccgagctgcgccggccctgcccacggaccgactcccgcggcccgacagctgcccgacgggccagcaggctccgaacgtcgacggagcccggccggaggtacccgagcagtgccatgcgagcagcccagccgcgatccgggcatttccccagccaatctcttgctctggggcccgtttaaattctaaatcccacaaaggacggtggctggggcgttacacatcggggttggcactattggctccactacgcccttgctgagcggtgtcacacaaatctttttctccctgccttggtttcccactctttaagctctgactcctggaagcagggaatggagcagagaggtagggcatggagtgaatcatataacctgcataaacagccatcaactctttcaggaggacgttagcgagacaattaaaataatgataccttctaattctatcaaggcttgaactccaaggtaaaagcgctacgtaaatgcaaggtattattatttattaccacagaaggtttttctgcatgcacaacttggggagtttgtacagacattctctgctttgtttcacaacatccttaggagacaagctaaagtgcctgttagcgctatattcattttaaagatagacaactgaagtatagaaaggttaaagagcttgcataattactccaacagccgactgaaacatctcacaaacagcaaaaaaggtttgttaataagatatcatcttcttgcgttctagtcactgggaaatattctttattttgataccagttttgttcagacttcttagattttcagagcactgatacgaagaag

SEQ ID NO: 21526 - DNA, 730 bp, Artificial sequence
  DNA replication origin
cggttgccctggcccaggcctcccggccctcaggttgtgtgactgtgacgggcagcctggggccaaaggcggttgaaggggaaggggacgcagatctcccactgcttggggggggtgatgtgctttgtggggggtcgggggtcaccaccctcccaggggggtgggggagggcggccagcacagctggccgcgaggggcggggtcgcagaggcgaagtgtgtgtgagggtgtgtggggggagggcgcgcggaggaggatcggtgccctgcgcgcaggcgcgagcagccagccaggcccgagccctggaagaacgccgacggggagcgggggcggcgggctggcgggagggagggagggcgggcggcctgacgcgagggggcgcagggagccgcgtcggcgtcgcggggcgcgggcgattcgaggccgacgcatccgcgcgtgcgcgcgccggcggtgtgtccgcgttagaggggagtgacgcgtgcgcgttcacgcgcgcccgggagagcggtaagaagcgcagggaggcctgaagggggtgggggggtggagaggcgagctggaggaggggtggggaggtggcgcctgcgcagtgcgcctcggaggagctgtgtgtatgtgagagtctgacgggttcaaaatggcggcggctgcttcagcggctcctcctgtgtgagggaaacaacacccctccccggcagcggcggcggcggcggcggctctcggagca

SEQ ID NO: 21527 - DNA, 918 bp, Artificial sequence
  DNA replication origin
ccggcagcggcggcggcggcggcggctctcggagcaccttcccagcggctgggcccgtggccgctctgtctttcctgggcaggggacgctccgggaggaggggcaacgccagggggcccatcccccggaatccctcttctgcgactggggagtagccggggggctcgtcccgcagcgcggagccagacctgagggggagacgcgaggggagccagggcccccatcccggcgcgccgcgccgctcccgccctgtccgccccccggggccggggcccgcgttccggggggccggggcggcgcggggagcctcgggccggccggtctcagctgatcggccgctgctcccgcaggcgaccagcccctgctggccgagggcacggcgaggagggcgctccctgcggccggggccggcccggggctcgggcccgggctgctgaccgctggcctgggggaggcgggggcgccccgggctcggcgccgaggggtcgcgctcctctctcctgacgcctccgactcccggtctccaaagccagaagagaaggtttgattcagcaactgtttgctcccttttcctggtcgctctgaccctctctggatactgggttgatccacggaaaaaccgaagacgacgtttgggatttaattattcctctcagctttggaatcttttacttctcacttggacaagaactcaagagcagaatctccggtgagtttccccctcccccccctcatttggaagtttggttgactgtgttatccaaagactgaatgcaaagtttctatctctttttccgatgggtgaaccattgaaacgccttttcctgggggagcccagcgagattcgccctttttcctctccggccctggctgctccatgcccaggcggtcgtcgcccagggggtgcaagcacggttt

SEQ ID NO: 21528 - DNA, 1017 bp, Artificial sequence
  DNA replication origin
caccgcgaccggcccgcttcacacatcttatctgagttaatcctcaaaacaatccagtgaggccacgcgtgggacgccctttgtacagatgaaaaaggctctgccctaagaagttaagtaacttgcctagggcacccagccgggttcctagaaggtggcactggcatcctaccccaagtctttcctaccccacccctcgacacatggcaagtaccagcggtcacaatgtgggcccagtgggagcgacgagaccgtgagtcggacactcacaagccggttaggagcgtcaaggggcaaagcggctctgggaacaagctgctcggcggcgccgaggcgcatgcgcgctgggcagggctcctggcgggccgggcggggctccgggatgaggatgaggatgagggcgagggcgggggcgggggttcggggacggggccgggcctggcagctcgctggggccccgtctcggcaaaaactctgaggtggaagaggaccttggatccggggacagtgcggggactgtgtgaactttccagagagttccaggaggaggcgatgctcctgggaggcgggtcgagagaagctaggggtctcgaaacccctgccatggttggtgggctggcgcctgcgggctaacaatccccacccaaggtccctgccctctgcagaaaggagcgaagggcccgggcgtcctggtgatgttggagcctcccggataaccagggccctttttccctcagggcctttgcatctactgttccgcatacctgaaaagctcttttctctgcccctaaaacaactgcttccctcccatcctctggctctgacaaaaacgccctgagttttccctgacttcacctgaagaggctcctgattcttagaacttgtcacgtgcctcacagggatgttcccgctttcaatgagatcagctgggctctgcagtgccctgcacataaggagaacccaacacttgtcagcggctgttatcacgtatggtttgcctctaagctcccctcctgt

SEQ ID NO: 21529 - DNA, 834 bp, Artificial sequence
  DNA replication origin
gactgggctaacactgagtcttgattctttatgcagcccttacccttactttgtgctggggatgaggggtgcagcagtgaccaggacagaaatgccaagggagagaccgctgagcaggatatcttccgcccacaaggtggcagcacgaggaggagcctgccactccggaagtggggaagggcagtccaggcaagggaactgtaaagttaaagccccagaggtggaaatggacttggcttgttctagtgacagaaggaagaccagagaggctggagactaagaggaaggggaagaatggaaattgctgagttagagagataggcaggcaccagtctgtgcgggtctcatgggccacaggaagtggggtggattttatcctaagtgcaggggcagtcgttgggggtgggctttgatggagatctatagaagctcaacccacaggaacggcagggcgcgcggagaggaggctggtgcaggcatgcaggcgagaggtgattgagactcgggccagggtttagcagggcacagtggacggatcaaggatgtacttcagagacagatacgccagagatgctgtatgacagcaggggtatacatcggggtgggggccaggtgaggaaagagaggaatcgaggacagctcctacattttgggaaaatggaggatccacgcctgagatggggaggcgggagaggagcaggttggacaggggctgggtagtgggagcaagagctcagtgtgggccgcgctaagtttgcaacatctattagtcatccagtggcgatgccaagtaatgatgtgtctgtggggctgccagctgagcagagatggggc

SEQ ID NO: 21530 - DNA, 1462 bp, Artificial sequence
  DNA replication origin
ccatgaggaccctgagaagtagacagattcacggagattctcaggaggccagacaggagactatggtgacaaattagattagagaaggggagagaatgaaggagcagttggggaaaagaaaactgaggctctgacatgggtatatgggtggcgagtgactcaccacccactgagaggagaacctcacaagctctgacatgctctggttccaggttctgttggggctgatccaagatggtagcctagaggtgcacagagatgggggccttgctttgcaaaaggatgctggctgctggcccacagcatggtaatgagatttgagctttatgtgcccagggctgggaggagggtcctgtcactttgaaagcaaagagaggctctagagaggggcatgttgagataggaatgctgccttgagacacctggctttccccactctgggtgggctctcagcagggtgggtttcccctgccaggcagcactgaaacctctgtgcgcttccgggctgggagagtttttaccgtaactacatgtggaaccatcctgaaggaacatctggatgggatggggtacagggaagggagctgccaagagtgctggccagggacctgggtctatgagctggttggggggtggggttgggtgcagggtacttgatcctgagtgggccttctgcggccaggattggttctagagtaggaggggtgggatcagggatgggggaagcctgtaactgcgctgcagttgtcaggtcccaggttctgggtgacctactaaggattctgggtccagtgtgggtcccaggttagacgtcctagtcctgagtccgtgtccacagttctgggtgttgagtctaggacagtgatctggagttgacagtccaatctaggtctgagtcctgaccccaagtctagagttcagggtcatggtagtagcctagggtcagaatcaaggttggggtcagtaaccaggatgggatcgaggtcatggtccaaaatctggatctggggacctgttgggggtctgaggtgagtgtcgcagtctgggtatggcgttggagacccagggctgtgatctgaggtcatggttagagtctgaggtggtgggccaaggtttgagtctggggtcctgtttggagtctggtgtcaggtcgtggactgcgtccaaggtcagggagtccggggttatagccagggtctgagatgaaagtcccaggatggtgttcagaggtctgaatctgtgtcttggtgagcgtccaggttccctgtgatcacgtttggtgtcagggctgcggcccgactggggagcctgggatccagagatgtgacccgaggttgtggtcagagaatgggtctcgggtcgtcttccgtgccgggtccctgtcgtgttccaggcccgggtctccgtccagcatcgagggccgaggtcacggccagggtctgagcccgcggtcgcaggtctg

SEQ ID NO: 21531 - DNA, 1452 bp, Artificial sequence
  DNA replication origin
cagtcagtctggttcctgttttgagaaatctgattgcaaatgtcttagaaaaaaaaaggccctaacggccttttcaaaatgcagaccaattttcctctcccaggcctgacgttcagtcaatccaaacacccagtgagcagggcatggcacaggggggcggtgagggccatgggcatggggcacccctgcagcgtcagccagagcttagacggctgcttcaaaggctgagggacaccgcagagtcacagctcttatttcacgccatccacatttcacagatgagaagaccgaggcccagtgagggaagagacttacccagagtcacaagataagaccacggcagtgtggacaggccccatccccagcccgctggggcaccaggaggaggccaactctcaggcatgcacaaggagttgccacacgacacaaagaatcgtggcgggcacgtctgctccctggcacaggccagggtagctgatgaaatgtagaaccagaagtctgaagccctgatctgttggccaggtgccacctgggactacctgtgtgactcggggcaggccactcacctctggagcttcagtttccccatctgttccacagggacaaaaccacacctgtcctcgccaccccatgcgctgctgagaggctcacacagtggagagatactctatcagccataaaatgctggacaaaccgcagcaatcgtccacatcctgtgtacttttgcacctacatcctgaacagtctaaactttgataccaggtgtgatgtcagttgtcttacagaggcggcagctaaggtccagccattgcaggtgtgctgggagggcccctggtcaacagcacccacggggcaccatatgcagggcctgccagaggagaaatgtaggggagagggcacaggggatgtttccccgacctgagcgcggtccgagggggagggtgcccgcagcaccctaggtcctgctcaccacgccgccctgaaagcactctcgagcccaactccaggacagcgaccccaccagagggtgggagaagagtccggaagactggctgtcccccaacacctcacacaagtgtagactggaggagagacgggtgggggtagtggaaaccctaaagcgagtgccgtgagcagggacagcaaaagggtgggtgacatcgtcaggcgaggtaaatggtggccagcggaggggaggggaccccacagggaccaagggctgctccgagaaggatgaaggggcgcgccgggcccccgtgggagaaggcgggagccaggggctgacagcgacttcggggggccggtggagcacgataaggaagcagcagggcggccagggggacccgactgggtccggggaccgatggggcagaggagctccggagttggggcgctccgggctcaggcgcccagggtctggggcttagggtctggacccgcaggcgccaaggc

SEQ ID NO: 21532 - DNA, 904 bp, Artificial sequence
  DNA replication origin
gactccactggaggcgccacgcggaggaagcccaggcagaggcaacacttgggcaggaagaaggggaagggggtgggtgggagaaggctcaggctgtcggggaccgggagaagggttatgaggccagccccgtgagggcttccaggctttgggcccgagggtctggaagaatggcagcttcagccagaagagccgtctgcggagagcagctccagacagtgcggacctggcctgtggaccctgcctggcctctgacctcggcctcgagagggggctcttatccgcttccactgggcactgtccttccaggaagggctgcagtggactcccgggcctcggcccctgatctcacttggttccagccttcctcaggaaaggccgagcgagatagcacgagcacagcagggctgccatgagcacggttccaaggccgcgaccccctggcctgctccccaccctcagaggctgggaggggccgcggcctcttccaaagttgtctccagcaggaagcagggcactgaagacaaggatgggcctaggtgaccctgagttcgcatcctatgactgctttggaacagaccctgcctggatgggaagaggggggcccatgccccccaccggggagtgaggatgccctctgagaactgacaggagctccgaggatgggccccgcgtccacaccagcacacccgccccttcgggccacacgccagctcatgtccaccagccaccgtcaaggacatgtttcccggcatgtgggactcccagggacacaggaaacggtggacggagattgtggtgtttcacacacagcaagggcttcataaaaatctcttgaattgagaaagacacggtccctgcccttggcacctgcagacaggaggcctgggccctgggcgaccct

SEQ ID NO: 21533 - DNA, 1224 bp, Artificial sequence
  DNA replication origin
tcaccccacactgagtgctgtctgggagcgccacaccaggctacactcccggcctcaaataccaccttactgtcccctcctgccctctcctggcccacctcaagcccagccctgccggtctgtcccaacagccagctgaggcctgcatctggtcctcactagtctgggctcctggggtaacgtgtagctgccatgctgagggcattgcaaggctgggggcctgaagggacaacacacctgagcccatgtcacgctcacatggccctgcaggtctatggggccaccagcaggcctcccgtgaaatgactgcagctggtggagatttggatccgcaagtccaggttctctgtgcttgccatggcccctgcctttctgcaccccggccctgcctgcccctaggagcccagcccagggctggtcggactggccacccaggctgtggtcacgaggacccgctgcacatctacccctgaggcactgtgtacctcatgccaaagccaccccctgctccaaacagccctgcccagggcatggttctgagcctgtgataccagacagcgtgtgcagaagccttgggaaggagaggaggcctctgggtctggaaagcctgtgtggagaaggtggaactccactgggttcctggagtgcaagtgggatctcggcagctggcgaagccaggggggtcggtagacgtgggaacaggcaggggacagtatgtccagggatgagcaaggggccaatggggcaggagagagggcacacaaaggccatggtgaggcggagggcagggccttgcaaaccagggggcttcacagccaaggagtgggcaggagagcaggactcaggaggcttggtccagggcggtgggtggcccgactccactggaggcgccacgcggaggaagcccaggcagaggcaacacttgggcaggaagaaggggaagggggtgggtgggagaaggctcaggctgtcggggaccgggagaagggttatgaggccagccccgtgagggcttccaggctttgggcccgagggtctggaagaatggcagcttcagccagaagagccgtctgcggagagcagctccagacagtgcggacctggcctgtggaccctgcctggcctctgacctcggcctcgagagggggctcttatccgcttccactgggcactgtccttccaggaagggctgcagtggactcccgggcctcggcccctgatctc

SEQ ID NO: 21534 - DNA, 1688 bp, Artificial sequence
  DNA replication origin
gcgccttgggcatgctgctggctgtgcccccatgaggacaagggctgtgtcccgtcacctggaaccccctccaaggtcccagcctccttggaggagctcataagttggggcatggccagccctgtccaatgttctcagagtggaggggctgccctgggagttggagctgctggaaccagctagtaactggcttccagaggggcccttgtcacagatgatgatgatagcagctttttatgtttatcaaacatttattaagcactgggcatagggttgcaaaatttaccagtgttaaaacccacaaccctacgatgtaggaacttctgttctcccatttgagagatgaggaaacagctcaggcttaaggaacttgcccaagttcacagagccagaaagtggctcaatcaggagttaagcccgggactcagggtggggctgagcccagatgactggcctctccccacagggctcaggaggtgaaagagagcccctttttccgctccctggactggcagatggtcttcttgcagaaggtaacagtctgcggcagggactgggggtgctctgcagccccacccccgagctaatgcccatgacccctgttctgctgcagtaccctcccccgctgatccccccacgaggggaggtgaacgcggccgacgccttcgacattggctccttcgatgaggaggacacaaaaggaatcaaggtactgggccttgcctggcctcttgtacctaggctgtgatcctggcctggggaaggatccctctcccttcttatcacctgtgagaccctgtgccagccctgccagcttgtaggcctcagttcctccttggccaacttccctggggggtggcagttgcactgaccatccctacccagggccctgggtctgggcagcctgtggctgatggtattccggcatctctgtccacccatgtgcccctgccccatccacctggtaaagttactggacagtgatcaggagctctaccgcaacttccccctcaccatctcggagcggtggcagcaggaggtggcagagactgtcttcgacaccatcaacgctgagacagaccggctggaggctcgcaagaaagccaagaacaagcagctgggccatgaggaaggtgagggtcgccggctgctgcggcaccaggcccctgcctgcttagaagtgagcagctggctcgggtttaaggaactcaccctggatcacagccagaaagtggcggctctgggattcaaactcaggctggggccgggcatggtggctcacgcctgtaatcccagcactttgggaggccaaggagcgcagatcacttgaggtcaggagtttgagaccagcctggccaacatggtgaaaccctgtctctaccaaaaaataccaaaaaaattagccgggcatggtggcacgcgcctgtactcccagctacccgggaggctgaggcgggaggatcgtttgaacctgggaggtggaggttgcagtgagccaagattgtgccacagccctccagcctgggcaacagagtggagaccctgtctcaaaacaaaaaagaaacccaggtggggccggctgagtctcctctgtctctcgcctcagactacgccctgggcaaggactgcatcatgcatggctacatgtccaagatgggcaaccccttcctgacccagtggcagcggcg

SEQ ID NO: 21535 - DNA, 1609 bp, Artificial sequence
  DNA replication origin
ggtcacaccgcagcctctgggcccttggccatctctggcttcagcctcctctctggcctcactgcacagccctagtaggggtccctgaggcctgaggggaaccccagcactaggcctctcctctacccagaggcttctggtcaacttccctttccccaggtccctgccctagccccgcgggtgactaaacagatacatgttgctgcccactccacacagggctttgctgggcatggctggggcccatggccaaagcacagcatgccaggcagagaagggaggcaggcagctgggcagggtactcagggctgaatacaagagtcaggggcaatggcctttgagccaggcctccagcattggtgtgggaaggagggaggacatttctgaggcagggaagagccagggactcatgagtggcccaggctggccggaggactataggaaggagccatgcctggaggcactgaatgccaggcttaacctatcccggagccaggtgtgtgctcagggcctgcagaatgaagatacaaacgacatggagtccagacctgccatgctcagggagcccttgaaggtgcggaacagggctgagagtggtgagagctggctctaaagtgattgcctggttactgagtacaggatgtggggagggaggtgaaggacaggaggcagggagacaaacctccgcagtgggagaggaagagatgaaaagaggccagacgggaagaacgtggtccagcagaaacaggctggacttggggctgagtgaggcgggagtctggggaagagggtaggtgtggttgggttggcttcggacatactgatgggatagcatgggatccctgggcacagagatgtcctggagtaagctgaaatgtggacctgggggtggcatcagggtgacaatgggaacggacagtctctctcccagggatgtgggggtcagggagagagaggaggccgtggaagagggttgagaaggcactgtcatggaattaagtgccagtggggagctgtgttcaagatggcagaaatcaggagaggctggaaccaagaaagtcctgtcggggttgagtttggagagggctcagggaagggaccgcctctgagaaaaggggtggccagggagggctgcagtagtggtgagcaggtgagctctgggcattcagaagccttcgggctgctaccaaccccaggacctcacagattgacaccatagcgtggggtggcaaagtgaccccagatggcacaggcgccatgtgactacagggagaaggcagggtaaaaatggcaatcaggccttccagcccagagtctcagaactgaggacgccctacagcaggaagtgatgctcaagctagctggccctcctcaatcatgttccacgtagggaaagggagaatagagggtcagccttggccacctagcaaaaccagggccccagaccccaggctgggcctccagtaatcaagggccggaactgagctgacggaggcctgcaccctagttccggtgtgggtggaggggccggccctgatttcgaaactcgccttcctctcctgacgctggcagccaaccgcagcctctgcaaaagggactcgtgcggcgg

SEQ ID NO: 21536 - DNA, 1236 bp, Artificial sequence
  DNA replication origin
ggctccctccgagcctgctcctggggtagggggtatgagatagtatgctctgccagccaggcccctccgtgtgcttccagaagggtgcgtagtagcaagtattccagggtttcaggccataatccaccgagtcaacctgaagtccctgctccaggtaatctgcattcttcaggaggcccaaagctggcaaggcttctcttccaaagggtccagtctctcccacgtgagcctggccgtctctctttcctacgtgaccctgggctggggtcaagatagacagacctccttgctggtggcaggaggcacactgcacaaactgggtgcctttccaaggccaggcctggcacagtaaccagggtggtgccctgccatggtaccccacctccataactgtgccctgctgtacctggcgaagtttgttgagcagttccggaatgcccgccagcctctgcgtggccctctggtagtcccgatactggagcaccagctgcaccatctcggggtctccagtgctgactgcctcctgcaggactgcgggcaccaggctgctgaggggagccctccagatgaccccaggcctggctgctcactgccccccgcctgccagcctcagggggagccccttgtcctctgcagtacctgcccagccctggcggttctctttgcccacgttggcattgtgtcgaaggagcactctcacagactccaggtttcccagagacacggccagctccagtggggtccgcccgcgggggtcctcctgttcaatgtcgtgctgggggagacgggacactcacaaagggcaggagagaagagggcaaggcagggaggctgccagggcgagcagggttgggaatcgctgtgggaaataaggacggcggactgaccagggagatggcagagggtggcctgcgtgtcctggcaggggagaggagggggcaggagggaaggcaggggcagagccggggtctggcggcggggcctggtcaggcagagctgcaggttgtcaggagtttggcggaacctggggaccaggaccagagttcttgttctcagcttgggtcagcaaggatgcggaagcgagttcgggcgagcagggcaaggcccagcgcaggggagaggaggccagaggctcaggcgcgaggggccggtgacctgggcttgggatcgtgcaggggaggaaggcccaggatgtggctgcggagctgagcgggcggggggggggggggggctcca

SEQ ID NO: 21537 - DNA, 1822 bp, Artificial sequence
  DNA replication origin
gccagctcctttcagccctgaggggcggagggtggggggtggtctcctcattttacaactgaagaaactgaggctcagataggctaaggggaccatgaccaggattcaagcccaggtctgaggccgccatccacagtgcctctccacagcgccccaccttcagggtccccaccgctccagcccagtgagcagagcagccctgctgcgacagtctctttatttccatctcagtctcccctgcctgctcattcctggggctccaggccccaagctcagcagcagagagtttataaataaataaattacaaaagcgggcagggagtggcctggccagccctcccggggctatggctcagtgctcagtgagtgacagctgcaggatccgctgtaagtcctcctcctcctgctgcccgcgccgctcccgctcctcctgctcccgtgaagacaactccagggccaggcgcagctgctcttcaaagctgggtggaccgggggctgggggtgtcctgggaggggatcctgggcccctgggctctgtggacagctgcaggctttcctggagggcccttccaggcagggcaggggagggaagaacaggccagtgagcgccaaggctggggcagaagccgaggggctggggaccggctttggaggacaaaggcaaagacagggtggcaagcagaggagacaaggcagggccctgcttccccacccctcacaccacctttggtggcagatagcgctgctgacagagggtggccttgcagagggcctggggtcctagcaccttcctgctatccccctccccgccaagccagggctggggggacagggacccagccagccccatgaggggctcaccgctccagctgaagctgttcctcataaaccgtggcctggggaggagggcgggcaccgggccgggtgttggtcagggcttcccagacggtcacctgcagccaccagagcccacagctgtcacttctgccgtgtggctgcagaggccagagcccaccccctgggcaagtcccacctgctccgcctcagtgcccgcttcaagcaggctctgctggatggcgaactgcaggaggtcatcgtcctcgtcccggaggggctcgttgcgctccatgcccagcacgctgtacccgttgggcacttcaaacacggtggggtccacctcgcacgggaaagggttccctaggcaggtggcagaggggccacgctcaacccgcggggcttggtgaccagaaagctgtgcaggctccctcttcctcccgttggggtacctgatgcggcaacagcagagctgggggccggcacccacacggagctcaggggctcatcacagccacacaggttgctgaaggtgatgcgggcattgagcacgtggaaaaggggaatctctgtgagaagacagccacgcctgagccctggcggagagccacctgtgcctccggcccctgcagctctccagggactgcgctgagggagggtgccatgcctgaggtcctcccgctgcctgtgcccagcctctcaccaattttgacggggaagccaggtggaaggcgcagagtgatgaagtcgcgcagcttggcaaagtgagcgttgctgatggccattaggtcgatgatgggggtcacctggtcacccagggagagcgggtgctcttcactcagccacagtgttgccttgaacctgcccagccgaccacaggacatgggtgaggcacggctggtggcccttccattgaggactgccctctggttcgtgggcagctgcctttacccaccttctgcctggcctggagtgccctgctctgctc

SEQ ID NO: 21538 - DNA, 1484 bp, Artificial sequence
  DNA replication origin
gagaggagcccgctggcgggcaggacgcgctcccaagccggggcagcaactgcgtgggcggcaccacggccggaccacactcacccagggccccacgggcgtggaggcgccgctgcccgggggcgaacggctcactgtgaccagggccatggagccaggccgcgagcacctgggctggcaccgggcacggccccttccctcaaccccgcggacagtcctggacccgcaggaccaggaaggacggacggcgccacccgggcctggcacctcctcgggggcggcccttaaagggccagacactcgcccagccgggcccgcggagcttctcagggcggccgggccccgcccctccggtctccgctgttcggcccgcccagcccctgggcacaggtcaggggcgaggccgggggcgggcgcaggtgcggagcccggagacccggagggcaagagctgaaggccgggagtttggtccccctcccaggaagcgcccggcccgggccggcccagcgggagcacctgagctgttctgggcctccagcgtcctgtgccctgcagaggcgggtcctagggaggcagagctgaggtggggaggtgggggacaggtctagagaggatcaggcacggcgcgccctcggccaagggcccccaccccaaacatttctccctgctggtcggccttctcgttcccactccgcaggaaccactggaagacaggcttccggggaaaacggcctggggtttacaaataacccaggaagcccatgaggggctctcaggtccacctcggaggcgagcagggcagggcttccagctacgcaggcggaagtgacttgcgcaaacccacccgcagagaacaagccgcagtcagggccagggcctgggcttggctgcaggggtcggcgtcggggctcttcccagctggaggtgaatggtgcctggggacccaggcttttcctccccagcaggcacgtgggccggtttccagaagactaggctgggtggcaggacgaaccgggtccccagcaggtgggacagggcacaggggatctgactttcacaggacgcctgcttggtaaggacacgtgactctcgccagctcctttcagccctgaggggcggagggtggggggtggtctcctcattttacaactgaagaaactgaggctcagataggctaaggggaccatgaccaggattcaagcccaggtctgaggccgccatccacagtgcctctccacagcgccccaccttcagggtccccaccgctccagcccagtgagcagagcagccctgctgcgacagtctctttatttccatctcagtctcccctgcctgctcattcctggggctccaggccccaagctcagcagcagagagtttataaataaataaattacaaaagcgggcagggagtggcctggccagccctcccggggctatggctcagtgctcagtgagtgacagctgcaggatccgctgtaagt

SEQ ID NO: 21539 - DNA, 1558 bp, Artificial sequence
  DNA replication origin
gccccggcttgggagcgcgtcctgcccgccagcgggctcctctcgaacggggacatgaggagggggccccggggctcgggctggagggcgctgggggcctcgagggtctctggtactggcgccggggcacaatccagagccctgcgcgccgcccgggctgcggaggccccgatctgagcgcgccccccgccacactcggcgcccacccagccgacctggccttgggccggggctccacggggcctcccggtggggcgtggactggggtgggaagacgattggcatctggcgccttttctggcctcccccaactctagaattcctgagagaggggaggggacagccctccccgccctcaccctgccctggggctgctctctccgcaggaccaggcggtccagcgaaggagtcgactccagcgaaggtgagcgccacctcccccacgcagacacttccgtctgccccgggcctggccacggccgtcctgggctccagctgcagggacagaaagctccccggaggacgcgcagcgaagcccactgccaaatttgtggggcagcgttcccggtggggccggctggtgggctcgcggtagggcggcctttgccttcaccctccccctggtcagctggggcttcctcatccactgccctgggctttggctcaggtggtggccacgggccgaacggcaggagggcatgatgggcctgaggactcctgggtccccgaccatgttcccagcagcacttgagttaaacaggtgggaggggaaaaggagcagccccctctccccacagatgagctagagtagaggggctgagagcttggaagcccccaagactggttctcagcaatattgccaaggggccgaggggttagaaatgcagatgctcaggcctccactctagacctatcgaccgcgtgggggcccatgaatccgtgtagacaagggctgcaggtgaatgtgatgcatgctagactttgagagcccctaccctaaggggaatgaggagccatgacagttgcccactgccctgccaggcagagctttgcggtgctccgtggggctgtcctgggactgcaggatggaggggacaatgatgatgcagcagaggccagttctgagccaacagagaaggccccgagtgaggaggagctccacggggaccagacagacttcgggcaaggatcccagagtccccagaagcaggaggagcagaggcagcacctgcacctcatggtacagctgctgaggccgcaggatgacatccgcctggtgagggcccatgtggagctccggggggtggggggaagagacacgcctgagggcagaatggagccctgtgtatgtgtctgcttggggagcaatggtgtgagggcagggggcagcctggggagtgttggggttacccatatcccagtgaccctgctgtttcaggcagagatgttttgttttttgtttgttttttttttgagatggagtctcgctctgttgcccaggctggagtgcagtggcgtgatctcggctcactgcaagttccacctcccgggttcacac

SEQ ID NO: 21540 - DNA, 1088 bp, Artificial sequence
  DNA replication origin
acggggaccagacagacttcgggcaaggatcccagagtccccagaagcaggaggagcagaggcagcacctgcacctcatggtacagctgctgaggccgcaggatgacatccgcctggtgagggcccatgtggagctccggggggtggggggaagagacacgcctgagggcagaatggagccctgtgtatgtgtctgcttggggagcaatggtgtgagggcagggggcagcctggggagtgttggggttacccatatcccagtgaccctgctgtttcaggcagagatgttttgttttttgtttgttttttttttgagatggagtctcgctctgttgcccaggctggagtgcagtggcgtgatctcggctcactgcaagttccacctcccgggttcacaccattctcctgcctcagcctcccgaggagctgggactacaggcacccgccactatgcctggctaattttttttgtatttttagtagagatgcggtttcaccgtgttagccagggtggtctcaatctcctgacctcgtgatccgcctgcctcggcctccctaagtgctgggattacaggcgtgagccaccgcgcccggcctgggcagagatattttgacagggcgaggtcatggctgcaggtctctggaagggaaagaacaggggaggtttgtcctgtgtgagccaatagggccaaattaggtccaaggggtgggaattccagaggcatgtttctcctcaaccagtagaagactttcctgatgatgtgagctgtccctaaatggaccagtgcacaaggcaggcttgctggacacacactgggggagggtgtgctagagggacccaggcagaggggaggaggactccagccccacggaggaagggagtccaggtggagctggagcgctcatgctcaaatacttgtggagacagctcgccgtcctcagcaagacgtggcaaacaagatgcagtgaatctttggtaaaactgaatttacaacagaagtatcatcccctatcgtgagattttgtccttaatatttctttggtgataaacatttctcaaatgaaatgatagcatttgcaagtgacag

SEQ ID NO: 21541 - DNA, 2307 bp, Artificial sequence
  DNA replication origin
cacactgggggagggtgtgctagagggacccaggcagaggggaggaggactccagccccacggaggaagggagtccaggtggagctggagcgctcatgctcaaatacttgtggagacagctcgccgtcctcagcaagacgtggcaaacaagatgcagtgaatctttggtaaaactgaatttacaacagaagtatcatcccctatcgtgagattttgtccttaatatttctttggtgataaacatttctcaaatgaaatgatagcatttgcaagtgacagggtaaaaaaaaaacaacaaaaaaaaactggccgggcgcggtggctcatgcctgtaatcccagcactttgggaggccgaggcgggcagatcacgaggtcaggagatcgagaccatcctggctaacacggtgaaaccccgtgtctactaaaaacacaaaaaattagccaggcgtggtggcgggtgcctgtagtcccagctactcgggaggctgaggcaggagaatggcgtgaacccgggagatggagtttgtagtgagctgagattgcgccactgcactccagcctgggtgacagagcaagactccattgcaaaaaaaaaaaaagaaaaaacctccttcttgctgggcacagtggctcacgcctgtaatcccagcactttgggaggctgagaagggaggattgcctgagtccaggagttcaagaccagcccaagaaacatagggaagatctcatctcaacaaaaaacttaaaaattatctgggcatggtggcatgggcctgatgtcccagcaacttgggaggctaaggtgggaggatcatgtgagcctcggagttcggggctacagtgagctgtgatggtgccactgtactccagcctgggcgacagagtgagaccctatctcaaaacaaaaacaaaaacaacctccttcctcagcagaaacaaaaaatgtgcaacctatgtcagtcccattccccgcttttttccacacagtccctctttacccactgattttacatctgggaagaggggggatgggagaggaaggagcagggtcagcactgttctgggcctggggtgtctaggtggggagcagggtccttggggccactgtgaccctgggttcctcatctccccccaggcagcccagctggaggcaccccggcctccccggctccgctacctgctggtagtttctacacgagaaggagaaggtctgagccaggatgagacggtcctcctgggcgtggatttccctgacagcaggttcgagcagggagaggaaaggaggggcaaagaggtgagggacaggggggacaatggctttccctctgtcccctgccagctcccccagctgcaccctgggcctggtcttgcccctctggagtgacacccaggtgtacttagatggagacgggtaagcaatggcaactggaggtgggggctggagggtggaataactgagtgtgacggatgtgacggggcctgggcaccagggtacagtagaactttaggctgggactctggggcctgctcccagctccacgtcagattcaccgtgatcctgagcaaggcacctgactcctgggtctcggcttcccgtatccagcaaaaggatgggttctctgtcgcagagcctggagtctggcctcacctgtgcctggtctcctgcaggggcttcagcgtgacgtctggtgggcaaagccggatcttcaagcccatctccatccagaccatgtggtaaggacagagactgcctggactcaggccagcctctccttcgaaggaggctgcagggcctggggaagggcagcaagggaacagtgtgacccagcctctcctcctgtctcagggccacactccaggtattgcaccaagcatgtgaggcagctctaggcagcggccttgtaccgggtggcagtgccctcacctgggccagccactaccaggagagactgaactccgaacagagctgcctcaatgagtggacggctatggccgacctggagtctctgcggcctcccagcgccgagcctggcgggtcagtgtgtggaggggagggactgggtggaggggaaggcaggataatgcagtggggggcatggtggagaggggaaagggccccttgactgaggggctctgctcccaggtcctcagaacaggagcagatggagcaggcgatccgtgctgagctgtggaaagtgttggatgtcagtgacctggagagtgtcacttccaaagaggtgggcagggggcccggggactgagtcccctctagcaggggctgcaagcttgcctttcctgggagccc

SEQ ID NO: 21542 - DNA, 1622 bp, Artificial sequence
  DNA replication origin
aagggggagcgaagaggagaaggtcagaagtcagaagccatgagcccccaggtgcagggtgactgcagctgctggaggctgcatcttcttcttgagccggttgaagtccttggccgagcgccacagccaggtctgcagctccttcagcagccagaagtcgtccatcttctggaggaagtcactgtgggcagggccaggagtccaagtgggttcagtcccaggcagcggctggggcagtgggtagcccagagctgccatgacgcccgcaatgctgcccagcaggccctggaggctggtgcagaagtgggccaggctgcggcgcagctcagcagtggcagcctgacggttgaggccacgcaagtaacacagaaggtggctgtaggcctcgtagttctgggtcagccgcagtttgtcattgaggcttcgccacacctccaagtcaacagtggccctgggcagagtctctgcccccaggcggggagggttgaagtctggctcgttgaaaggggggcccaggtagttcagctgtgaaaaggagagggtgatggggaaggaggagggcagagccgctggctcaccaccaaggagatacctgctcccaaagtttctattttttgtgtcccctgacactggccctgtctccatgctaggcttctttgttcatggcctccctgagtttttccaataaggatatcatttgtatgcaggtgacagttgaagcagtggcggtggtgagctctccaatggagaggcgtagaaaaaggaggaggaggagacgcacaagacgctcaggaaggacgtgctgattggctgggtgggcaaaccttgggagagtgcccgctgtgggggcaggacagagaggaagaggagcctggaggagctggagaggtagaaggtggcccaggagagtgcagagaccaaggaagaggagttcgagaaggcagcagcgctcagcagtgtggctgcaaaacagacagcaaggagaatgagccttcaaaacactgtcgggcttggcaaggaggtgcctgacgaccttggagagaaccattgctggggcctggaagccagattgcagggggttaagaagtgagtgggtggagaggaagtggaggcagagggtgtagaccactccttggagaaatttggcagggaaagccaggagagaaaaagggtcgggaactagagagggcagtggagtgaagcaaaggttttctgcacaaggaacaagagagagatgagagtggcccattggaaccagagccccatttgccgctgacacacccaggcccaccagctgaggggctggggagagacgggtactcactaacactccgaaagaagggttcagctgataggagcagggttgcagaaggaagaaatggaggcagtctcatgagtaggacaggaggaaggctatggaagacagcatggtatagggaagagggcagagccctttccaaccctcgggggagcggctggggcccagggaaagggatgagggagatgtataactgggaaagaagggagaagcaaggggagaggcctgggataggcaagggcccagggggaggttcacacgctgacaagcacagagacaaactaatttcctcggtgtatcctgg

SEQ ID NO: 21543 - DNA, 1237 bp, Artificial sequence
  DNA replication origin
ggatggacgagaagcatgagcgcggcccgggcccacacggggaagcagctggcagcccctcaggtgtctgtccccaccttgggctgggtggggggtgagggtgggacaccagatgggaggcagaggggatggaggaggggaaacactcctggcaagacgggagagaaagagaggcatgtgtatgtttgaggatgaggacttggcacgcatgagtgtctatcagtagatacttgagaatggatctgtgtgtcagctgagagagtctttggcatgtgtgccactgtgtgtgtgccaacatgtatatgtgtgtacatggagggacggggccaggcctagggactgcaggtcgacctgcctgtgttccagttgtaccctagcttcctgccagtcttcagtcccactgcagcttgaggggagtcagagggtgggagacagcacatgtcagagctggcaggctgagcacagtcagccctaagggaggaagcaggagagaggcggccgccaagaacagactcacccataggaagcaaggtatagggttagaccactagggtcgggctgccttatggggcttagttttgggtatattctaggatgtgattcctgagtgtgggaagtgtagggtggggttagattgaaggagatttagtgctcactctcagggaacggtggcagtgtggaggttcaccccgttcttggtgttaggtggggaaaagttggacttcaatgaggcctttccatcagcctgcaagggtggggacaggaagggagagaggtgcatttgacgagtcgggcttgttggctgatggcactgcagagtttggacatcccaggataccaggagtccagaggccagggttgggtgctgtaaggagggatgtgggcagtggggaaatatgcttttctgggattttaagtgaggaccaaggtgaggattcagtggacactttggactggcaaaggcagttagggtttggctagggtagatataattggcattgggctaggttaggtttaaggactgggttactttaaaagtttcagattagtttagacttgggatttggttgatttagtgcggttgaggtttgagtccagcaaggatgtggtgaggtctgggcaggcagagggtgagttggagggctgtgacttggtcggtttaggtatcagatggggcgctgcttgtcatgttatgaagagcagggctagtttgggttttcagcttgaataggtgtga

SEQ ID NO: 21544 - DNA, 1282 bp, Artificial sequence
  DNA replication origin
gaggttaggagaaaagaaagggggggtagaaggacagggctctgcccctgctatgacagcttccactctgggcaaagccatgcccgtgtctcaggcagcaggagggaaagcagcgtggggtgaacacctgcggtttagtcgtgagcttgggaacccaacacagctcgcctgcctcctgaggagagtgcgtggtgggcttcctggagccctcatccatcctccctcaggctcatgttgtgcaggtggaccccggccactggggctgtgtcctaggtccccctctccccctccccaccagtcctggcccccagcccggcccccgccccagctctgcctctggctgctgcccactgattgtttacatcccgtcttctctgtgtgtttataaatccggctgagcacgtgaggagctaacgagtacagctcacgtttcctgcaacagccccccacccccggccagcccctaattccatccagatccctgggccctaggaaccaaggctctcctcatgaacacacacacacacacacactctctctctcttagcccaaggaagtgactggccacccagacagctgcacaggcaggcgcacccgtgagcacatgtctttagccactttagccagctgcccctcagtccctggcctggacacccccaggctgacctttcccagtgagggtgagagttcagccatgcagatgtgccagggtgcttagggtggtaggacaagtcaatgggagtctctgcacctgggactataagagctacgctaagaactgtaagccctaaatgttgcagccagggaggcactgcagagctccagaggtggggcatggtggcctcaggctgggctgaatatgggagccaggaggaaaggccagaccaggaccagcgctggctgcggttggaggggtctgttgaggggaattgagggatggagtgggttaggcgggcagagtgggtgaggagtgggctagggatggagtgggtgaggtccaggcattgtgacggtaggaaactgccccaggggcgtgtcctgacctaccttcccaggcaaaggcccacagaaacccatcttccttccaccctctgggctgctgctttcccctctcttacttatctcccttctgccttttccttggttccttttaccccaggccactgagaagtagcttggtgagtggggacacatgggcctgggaattgggagacctagctttgccaccaattcgtctggtgactgtgggcttgcacaaggaggtcacattatgcaagctcaa

SEQ ID NO: 21545 - DNA, 1405 bp, Artificial sequence
  DNA replication origin
tagggatggagtgggtgaggtccaggcattgtgacggtaggaaactgccccaggggcgtgtcctgacctaccttcccaggcaaaggcccacagaaacccatcttccttccaccctctgggctgctgctttcccctctcttacttatctcccttctgccttttccttggttccttttaccccaggccactgagaagtagcttggtgagtggggacacatgggcctgggaattgggagacctagctttgccaccaattcgtctggtgactgtgggcttgcacaaggaggtcacattatgcaagctcaattcctcctagaggaaacacacggggcttcatctctcctctcctctccagcatccccctttgtgcccttctcctccagcctaaatgacagaggtcactgaggcccaggggaagaagctgagggtgggccagccccactgccttatgaagtcagtaaccaagcaagcgagacaggagttgggctttggctggagtgagagggttcctgattgtgccacaagagggccatgggtgtgctcagggaggccagcggggagccaggggggagcccagcagcccactgagagccagaggcaggaggagcagtgaaggaggagtccagggcagtggtgggtgaattggaaagggtgttgttatcaagaggggcgtggggggggaggagagtgcaggagccaggtgtgcacaagaggtgggacgtggggaggaatgtgaagtgtcagtgagccagtggctggtgtgcaggggtggcgtgcaggggtggtgtgcagaagtgtgacggacaagagtgtgggtctgtgaatgaaggggacagggagccattgcacccatcagcagtgtcacttctggggctgccgggtgacaattgccatctctgcttcctccccggtggagcgtgtggctccagggcagcgagggtgtctgagctggccaggagcgcgtctggtctgttaggggaatatgtactcgcatcctgtccggtgtgaggggcaacgtgtgctcccgagctgtggcggaggtcagtcggggtcagtgaaagcacagaggtgtccctgggttagggtcagagaaggaggacccagtagagcagcgtgcccagtgccccccacccctagcctctctccaaggcttagcctccacccgcccgtctcccctcctctcctggtagcccctcacaccccggggggagggccaggctgggagctgggggaacaggggtcctctgggattgggagggtctgtggggagggctccagaagcccagcacggagttgtggaaaggaaggcgggtggggagagcaagcatgaggggacctctggcgagccccggggactctttcgaaggtttccttcgaggggctcggccgggaagctgcacggcgg

SEQ ID NO: 21546 - DNA, 719 bp, Artificial sequence
  DNA replication origin
ctgctcggaggtccatggggctggggccgggccggccgggtgcggctcctctcccggaggctggcggagtgggagggcgagccgcggctccggcgaagctttaataatcccatccgccaggcccactcgcaggtttttttcgctcggtttcggattttttttttttttcggtgtgggacattctgcaaactttttttttttttttctgacgtgtaaagctgtaaccacaaattgtagcggccctccccggggtgggggtaggaggggggaggagggaagggagggcttctggggctccctctccctcccacagcaccgagggggggtgaggtgaggcgaggctgtggcggtaccaccctgggcctcctgggggagggggcggggaggccatcagtccgtctgaggactcccaggagccgggggacagcgccggcttcgggtgggcttctccccaggcgttggcctgggacaccgccccctgccccctgtcccctgccgatgcggggtccctgatccaacctacctctgcctgtgcgaggtccctgctcccaccctacctctgcctcctcatctctaaccttccctcctcctcccccttgagtaaatgcaatgacacattctcccaaatgccagcgagctggcctgggagcaagtgatggtgtttttcctgctgccctttgtctgggctgaccgccccccctgcctattgtcccgccgct

SEQ ID NO: 21547 - DNA, 1000 bp, Artificial sequence
  DNA replication origin
cctaaacaaggagaaaaagggctgggaaaggagagctggcttggggtggggggcaggggactttgagggacctcagtagcagctctgatgaaaactgcctggagggacccttgtgaaaagtgctcagggcctacctctgccccccccaccgcccccgcacctcctccctgcccccaccagccaggactctggagtttcagtgacattcctgatggatgaacccagtgatttcttgatgcccatgccaaggtcaagaaggcagatgcccatgggtgcatggcacggaggccagccaggaggtccccctagctgctaccctttcagagggagggggccaagaaggaggggagagggagaaggggagccgcttcagcctctccctccgcctcgaagccgctccttgtggagtctgcacaatgtggtttggatttggctgagcccctcagcaccttataaagcaccttgctgagtcagggagaaagcagccccagtgtcgggggagcggaggggagggggcgctgaagaaaggggcgggggcgagagaagaggggtgagaccagagaaggggcaagactgggaaggaaagaggagacacaaagaggcaaatgggtgggagtgagaaagaggggaggagggagctgggaggaagagggggaagcagcggatgcggggagaggaagacactgaagcagaaggtgggagtggacaacgccatccccagcacacatccacctggggcagccagaaagcactggtttgcaggaactgagggctgcagctctgaaacagggacccaggccaggtgggtacagggacaattggctttacacacagccccccagtccccagtttgtctttgaatcttaatgtagtgaccccgaaagctgggaaagttgtgttctccctctgcctcttggacttgcctccctgccctctcccctcacctagtgggggccaagcctctcccctcccctcccccaccttccacactgccaaaggg

SEQ ID NO: 21548 - DNA, 1477 bp, Artificial sequence
  DNA replication origin
ggtagagctcgtccccgatgcgggacagggagtggacggccttgccgagcactgcggggagaagagcggaagggggttaggctggcggctccgcggctgctgcaccgccgctgccaggccgacctgcactcacccttcacgttgccgcccgtgaccaggcacttcatgctgccccagcgctccgccagcggccaacactgcccagctctccgcgacctccgggtccggggtcccttcccgcgcaccgcccctgccggccccgcccccgcctccccattggtccacgtgcaggcgcctccgtcacgtgagaaaaacgctcacaggctctgccgtcacgtgacggcgcacgttgtccggggtgtcacgtgaccggggaggcccgcggcgcccgccagccagctgctcctggctcccccggcacgcctcggccttccgtgcccctggagatcggggcgttccgcgggccgcgcaccggattgcgaaggtcagagaggacgcagctgtggggcgcgaggtccctgtgcagtggaccgagtgctggactcggagtcggagtgtgggggcgagctctctggggtcacccacttagtagagttcccgggcgtctgccgggggatacagggtgcaagcaagaccatcgcacccactctgggcctgagactcggactccagcagcaatccccaactctagaaagaagtcaaagcagcttgcttgcagcagccgggagtgggaggtggctgctccttccggcttcgaggatcctttaaggaaaaacggcagtttctccaggcagaaaggggtagaacggtgcccctggcagagggaagaacaagagtaaatgctcagcggtgtgggctccgccccctggagaggggagtaggtctgtgagtctcagagaggcgtaggggccgccagatgatgaggggcaccgctgggacgctctggaaacgttttacgagggtagatcgtggttatgtgcctttttttgtttgtttgttttttgagacatattcttgctctgtcacccaggctggagtgcagtggcgcgaacacggctcactgccgcctggaactcctgggctcaagggatcctcccatctcagtctcctgagtatctgggaccacaggcacacccaccacgcccggccctttttttttttttttttttttgggtagagacggagtcttgccatgttgcccaggccggtctcaactgtggggttcaagctgtctttccgccttggcctctcaaagtggagtgagctactgcaccggcctgttttttgttttttgtgtgtgtgtgtggggtttttttgtttgtttgttttgagatagagcctcgctctgtcgcccaggctggagtacagtggcacgatcacgcctcccaggttcaagcgattctcctgcttcagcctcccaagtagctgggattacaggcgcctgccacaacgcctggctaatttttgtacttttagt

SEQ ID NO: 21549 - DNA, 1310 bp, Artificial sequence
  DNA replication origin
gtcctctctgaccttcgcaatccggtgcgcggcccgcggaacgccccgatctccaggggcacggaaggccgaggcgtgccgggggagccaggagcagctggctggcgggcgccgcgggcctccccggtcacgtgacaccccggacaacgtgcgccgtcacgtgacggcagagcctgtgagcgtttttctcacgtgacggaggcgcctgcacgtggaccaatggggaggcgggggcggggccggcaggggcggtgcgcgggaagggaccccggacccggaggtcgcggagagctgggcagtgttggccgctggcggagcgctggggcagcatgaagtgcctggtcacgggcggcaacgtgaagggtgagtgcaggtcggcctggcagcggcggtgcagcagccgcggagccgccagcctaacccccttccgctcttctccccgcagtgctcggcaaggccgtccactccctgtcccgcatcggggacgagctctacctggaacccttggaggacggggtgaggggctagggtgtggggggcgggtgggactccagccgggagcgggtaacccggactagagtctcgcccccactaggcgggatgaccgctggcagatttgtcggcaaagtttcagtttcttagtctggcggctgtcatcttcccaggccggtgtgtgaattgaggaaagctgtcctgcgagctcccagggggtgacgtgcacttagagaaactcggggaaggcctgggtgtgcgacccctcctctgcggcagcagcgccggggccgactctgaaggcttccatggggaaaggagggtttttcagcaggtggtggcggagcgggaggacgatagggcaagtgtgtgagcagaagcagccagagggctgggtctgtggctgccccctgaccacgtccctctccctgctcttcgtggcccagctctccctccggacggtgaactcctcccgctctgcctatgcctgctttctctttgccccgctcttcttccagcaataccaggcagccacccctggtcaggacctgctgcgctgtaagatcctgatgaaggtgaggcccttccctcagcagtggcactactccaccccaggaatctccaccagctgtgcctctgccctggggtactcagtagatgctaagtggggagagagacacgtgcaagcccaatccatgcaaaacacagggagggccatggtaaaagcatcacagcggggacctgagagggtggtgacgctcaagttcgtcaagaaaggtaagcacgtcttttggccgggcgcggtggctcacgcctgt

SEQ ID NO: 21550 - DNA, 885 bp, Artificial sequence
  DNA replication origin
tcttggttttatgacttcctgatttggctggagaggagaggatgcaggggttaagtggtgacttcctggagggggtgggccaggaatctctttgatcagaattcaggtaggggcctgagggaggcatcccgggggctaccttagctcagctaggagggaggagcagcaagtcttatgaactgggccacatggagcccaagcccccaccttcccaggggacaggagctggaaagcacaggagcccagggacaggctgggctgggggccagccccaacttcctgtgctgaaagtgcactgggccatcctccccagcccacctgcccttccagccacctgcttcccccagcccaggcagctcctgcctcccagcagccctttccctccttggcctgggaggaggctcagaggggcggcctcagccagagaaggaagctggcagggccttggggatgcttccctgggtgggaggggtctctgagtacagctaaccgagaaggctgagtctgcagggctggcagctgtgagcactatagggttaggggctggggcctgatagaaagagaaggggcgggagagaacacattgcggggaggtgcagaagctaggagttgcagtctcaggctggagtgcacagacatggagagaggaggagttggggggaggtgccctcacctgtgagcctggagctgaggcactggctggtgacgctctggggagcccaggtcctgggagtgcgagtcggtgtctgagagtgtggccaagacaaagtggccgtccagcaaagagtccttgatggtgaagatggcgggcctgggcaggggagggggcccaagctaggtcatcccattcagctcctgccatcccagagcccttccctgtcccaa

SEQ ID NO: 21551 - DNA, 1008 bp, Artificial sequence
  DNA replication origin
ttcagggccaagtctggaaagtcctgattggctgggggttgtggggagataacggcccaggcccgaccgctgtgggacagctttacagtgacagccagctggggcctgcgagaggcagtgaaacagctcagctccagcaagcccacctttctgatccccagggctgagagacccagttctgccactggctggggcttcgtctagtccaaggcctctgggtacaggcttcaggttcttggttcagccttcaccctcactgtcttccgccagcacagggctggggccctggggggagcgtacaggggccaggatggagccgaagaacagtgagcggaactggaaagagaacaagtgagttctggaggctgctcccttccctacctcccacccctgcctccacctccagtccctaccttcttgggtgggggagtcccaggcactgtactgggctcagcctcatcttcctcctcggagtggggaccggggctcttggggggctgggggccaggtgaaagggaaatggagggcagcacccgcgagccctcattgcctatagtggtttccatggcgatcatgtaagagtcaatgtcgtcattggcaaagtcgtccgggtggggtgtgctgtaggcagaatcggagtatcagggaggggactgggggagcagaggcagggccccaccttggagggctcgaagggagctctggggcccccgaccactggagatctcttggttttatgacttcctgatttggctggagaggagaggatgcaggggttaagtggtgacttcctggagggggtgggccaggaatctctttgatcagaattcaggtaggggcctgagggaggcatcccgggggctaccttagctcagctaggagggaggagcagcaagtcttatgaactgggccacatggagcccaagcccccaccttcccaggggacaggagctggaaagcacaggagcccagggacaggctgggctgggggccagccccaacttcctg

SEQ ID NO: 21552 - DNA, 1351 bp, Artificial sequence
  DNA replication origin
ttggaacttagtttccagtggactcgggtgctttagaattacttctggcaggaggccgaggcgggaagatcccttggacccagaagctccaagttacagtgagctatgatcttgccactgcactccagcctgggtgacagagcaagaccctgtttctttacttttttgagacggagtttcactcttgttgcccaggctagagtgcaatggtgtgatctcggctcaccacaacctccgtctcctgggttcaagcgattctcctgcctcagcctcccaagtagctgggattacaggcatgcgccaccacgcctggctgatttttttgtattttagtagagacgaggtttctccatgttggtcaggctggtctcgaacttctgacctcaggtgatccgcccgcctcggcctcccaaagtgctgggattacaggtcttagccactgcgcctggccagatcctgtcttctttaattaaaataaaaagtaactagaattgctcctggaaggctgacaggtggcaggggtggggggtggtttgcatcggtgcctgactctctcctcccagccacggctgaatagcccagggaccctggctgagggtggggtaggcaggcacctcacagccacctccccctgggcaggcaagagacgctacaacatcaaactgtggaaaaccttcactgactgcttcaactgcctgcccatcgcggccatagtggacgaaaagatcttctgctgccacggaggtgagggaggggatggctggggaggaggagcactggccgcatccctcagcacccggcagctctccttaggtctcatctgggaagtcactccttccaggaagtgtcccccataccccactgtgctgggctgcactcacttccttgatgtgtgtcctacatggagtgggcttgtctcctttctcccgggagctctgtgctcctgagggcagggatgcctttgtgcctgtttgggaacttgaaaaagctgaggggaaggggatgacttctgcctgtctaggcgcccaggagaccagtggcgggaccaggagggtggtgggaaaggtggggttcattggccaaggcttcctggagggaggatgtccttgtttgaggaagtgaccttcccccggccccccaggcctgtccccggacctgcagtctatggagcagattcggcggatcatgcggcccacagatgtgcctgaccagggcctgctgtgtgacctgctgtggtctgaccctgacaaggacgtgcagggctggggcgagaacgaccgtggcgtctcttttacctttggagccgaggtggtggccaagttcctccacaagcacgacttggacctcatct

SEQ ID NO: 21553 - DNA, 1747 bp, Artificial sequence
  DNA replication origin
gccgcgcctcacgtccagcgggggcgctagagggcgggggactgggcggggcgggcccgggaggcctggaggcggggccgcgggccgggggcggactggggcgggcggaaggagagccaggccggaaggaggctgccggagggcgggaggcaggagcgggccaggagctgctgggctggagcggcggcgccgccatgtccgacagcgagaagctcaacctggactcgatcatcgggcgcctgctggaaggttggtcggggcgggggaggcccgcgtccgccgcgccctggccccctgcccggcccggaagtggcgcgcgggcgggcccccggggccagcttagactgggcggggacgggcagcgaggttccgtggccgcagctgcccccccgcggacgcgcctgagaggtccggggccagctccgacgcgcggagcagctccccccctctcccgggctgggggcgcacgggttgcctgggctcttggggcgagggagaaacccgggaagcccggtccaggaaggggtcctgcgctgtgaggtttttggtggcagccccctgcgcacgacagtcgcctcccgaggcgctgagggtagctgggggcttcccctgggaggcttgaggccgcggtcccgggaggctcagcagcaacagctgcctgtgggcaaggaggggccgaggaggcctaggcgcccccggaggtatccatggggccacccgtgtcgcccaccctcctcctgtcagggtccagggtcctgacaccccattgcgccccagtgcagggctcgcggcctggcaagaatgtacagctgacagagaacgagatccgcggtctgtgcctgaaatcccgggagatttttctgagccagcccattcttctggagctggaggcacccctcaagatctgcggtgagcccccggcccaggtccccttgccttcctaaaagtggcactggaccccacagagttcctggagccctcctcccttgagcgcagtcctggccctgggttcaggtctagaccttgcatctagcttacccggttccctgggtcacaggtgacatacacggccagtactacgaccttctgcgactatttgagtatggcggtttccctcccgagagcaactacctctttctgggggactatgtggacaggggcaagcagtccttggagaccatctgcctgctgctggcctataagatcaagtaccccgagaacttcttcctgctccgtgggaaccacgagtgtgccagcatcaaccgcatctatggtttctacgatgagtgtgagtggtctgagcgtctggggctgcccgggtcctgaaccgcactctttgccattcagtgggaccttcacattggcctgatatctgacagacacttgatagactgtgcgctccacgaaggcggggcccaggtccgttctcgtgcctgccctgcccctcctggcatggggtctggggaatggttgctgactgaagggctgcccggattctagtgctttcccccagggccctgcctggtgacactccccctacatttgctactaagcacttaggatgtttgcagatgggctctgctgtccagaagctgagataaaccagacctggacttggcccggctcatgggtgggggcatgcgaggagtgccaaccctgaggctggtccagattggaacttagtttccagtggactcgggtgctttagaattacttctggcaggaggccgaggcgggaagatccctt

SEQ ID NO: 21554 - DNA, 1268 bp, Artificial sequence
  DNA replication origin
gcccgggagagggggggagctgctccgcgcgtcggagctggccccggacctctcaggcgcgtccgcgggggggcagctgcggccacggaacctcgctgcccgtccccgcccagtctaagctggccccgggggcccgcccgcgcgccacttccgggccgggcagggggccagggcgcggcggacgcgggcctcccccgccccgaccaaccttccagcaggcgcccgatgatcgagtccaggttgagcttctcgctgtcggacatggcggcgccgccgctccagcccagcagctcctggcccgctcctgcctcccgccctccggcagcctccttccggcctggctctccttccgcccgccccagtccgcccccggcccgcggccccgcctccaggcctcccgggcccgccccgcccagtcccccgccctctagcgcccccgctggacgtgaggcgcggcggcccggggggcggggcctcggcggcgggctgggggcggggtctgtcgggggcgtgaccaagctggttacgccccagaggaggcgcccagccctgttcagaggatgtggggccggaaggactgtggaagttgtttttctctttcaaaagcccaacagactttcccaccccttccctgggtggaaggtgttgtgaacatgttaataaccggctgctaggcactgagggttaactgctccaagtgcaggaaaggaaactgaggctcaagagataaaaacagcctggacctcgcattcacggaggaccccccacttcttcgtgggtctctgtggcgcccaggcggctgaccacactcaaagacagctacggctgaattcccagcgcactttggtccttggggcatgctaaattaatattttcttataagtcccataattcgctttttttttttgagacagagttttgctctgtcccccaggctggagtgcagtggcgcgactttggctcactgcaacattcacttcccgggttcaagcgattctcctgcctcagcctctggagtagctgggattacaggcgtgcgccactgtgcccagctaatttttgtatttttagcagaggtggggtttcgccatgttggccaggtggccttgaactcctaacctcaagtgatccaccccccttgacctcccaaagtgctaggattacaggcgtgagccaacaagcctggccccataattagcttttgagtagcacagtaatattgcagggtgtgcacataaaaataattactttatgagcagacgtggctg

SEQ ID NO: 21555 - DNA, 993 bp, Artificial sequence
  DNA replication origin
ggcacagctcatcagcaggcaggggcccactttgggtggcagggagcaaaggccggaggtgctgggacacagggtgggtacattttgccaagatgtgggctgaggcagagaggaatgagccatggaagccaagtggggcccctgcccccctcaccttcttgtaccgccgggacatggttttctcccagtgcgaggtcatctccacccacttcatctcccgttggcggatgaggtctgcaggtgggtggcccggcctgggggtgcatggcacaggtatccagacgctgggcagctgttacccaaggcccacactgccaccctccaggctacccaggtgaacccagctcctggccctagggatctctgggagccctgtggggtgacctgtgacccaggagctgccaatgcttgtcacggggacaggaaaggatgtggctccgacgtgggcagaagcaggagactgaaggggtgagtgggtgtgtattgggggagggactggttggctgtcacccaggacagggacacagacaattcataggggaagctggctggagagagccctggactggaagcccagagtcctgagtttgagtctgggtctgtgtctgatctgtgtgacctggggcaagtttctgtctatatctggacttgtgtttctgtctgtagcttggggaaagggggaaggaggaggtatgggttctgtgatttggatctgggattcctgagccagaggttcaaaggggaaggatgttctgccccagtagtgggtgcaaaccctcggaggctgggggtaagagacgtacagaggcctccccggacccttcccaccttagggttccacctggcacctgcagaggggtgctactggctgagtccccctcccaatccctaccaccagaccctcccggcctccctccagaattcagccctcagccccctgtcctctgtcccagcattccgccagccctcaccctgcccccttaccctggctct

SEQ ID NO: 21556 - DNA, 1193 bp, Artificial sequence
  DNA replication origin
tttggggttggggtcgcagtccccaagttcagaatcaggagtcgtggggtcaaggtgataacatccagattcctagatgactggggtcaaggctggggtcaagggtcccaggttcctggagtcaaggtcattaggcttgaaggtcactgaggctggcagtcatgaggacctgggtcactaggacagggtccaggaatcaaggattgcaggtttctgaggccacagttcctggggatggggttccctgggcctaggtcactagggttcccagagcagggtcaaggtcactcacctctgggggcaggtgcatgagcagcacagcagccacgggcccctgggcctggcagtagccctgctccggtcgatacagggtgtaggccttgagcacctgcaggagcccctgctgcctgtgccggaagaccccataaggggccagtcctgcaggcacccccttctccaccctctgggggcctctgcccaggcctcagcctccctgggccttcctgggtcccctgagatgcaagactgtagagctgggctagggaaagtgggctggagcacctggggcttgtggggctgggggtccctgggcatcaccggcctcgtacccgtggccctgaggcgacacaaacatctcgtgcagagggaattgacggtgcaggtccctgccaatggtctccatccactgtgggtctccaggggcctctgccagctcctgtgggtagccaggaaggtgggtgtgagggttcagtgtggtgaggggctctgggtaggggaattggggcccctgcccactccctcacctgataggtgccagggctgttcttctggcacacatgggccccacacaacaggggccagcatcgggcgcgcagggcagacgggatgcctttccggcactgcatctttacctgtgggtgaggccaagggctccactaggcagcctccatagctcctgctggcaggccccaggcacagctcatcagcaggcaggggcccactttgggtggcagggagcaaaggccggaggtgctgggacacagggtgggtacattttgccaagatgtgggctgaggcagagaggaatgagccatggaagccaagtggggcccctgcccccctcaccttcttgtaccgccgggacatggttttctcccagtgcgaggtcatctccacccacttcatctcccgtt

SEQ ID NO: 21557 - DNA, 1663 bp, Artificial sequence
  DNA replication origin
ggagggggcttttgggaagggcttccaggaactgcgcaggttaggagtggccctgagtgcaggcccctgtggtgcccaggccctccccttcactcctttcccctgtcctgccttctcctccacggtcccttccttggtgagcacttacaggcctgtgccctgccccttccccaggaggccttctggtgcctggtgcagatctgtgaggtctacctccctgggtactacgggccccacatggtgagaggctgacatgggggctggaggaaggaggggcaggggcccggtgagtgggtgggggtctggggactgagggaggttgagcctgggctctgggggtggcggtgctggcctgctgatggacgtggccacaggaggctgtgcggctggacgccgaggtgttcatggccctgctgcggcggctgcttccgcacgtgcacaagcacctgcagcaggtgggcgtcggacccctgctgtacctgcccgagtggttcctgtgcctcttcgcccgctccctgcccttccccacagtgctgcgtgtctgggatgccttcctcagtgagggtgagtggggcagccagtggctggggcaggagccttggggtgtgggtggggaggtagctcaccagctccagggttccctttttgagcctcaaatcacaggactgggtgtgccgaaggtgatggcctggtgcctggcgctacatcacccatcacccatcacccaggcaccgcctggtgcagagctgggccagggaggcttccagaggaggcagatggggcaggagcagggtgatcacagcacatggaggcctgagcttctcagggacagtaggaggcgttcctccccagagcccgcaggcacctgctgggtgctcactggctccagacgtggatctgcagctgggaatcaagtgatcgagaccttcaattctggcgggggtggggatgggtggcgacagtaaccaaattcacaagatatttatagattgtcagaagtgtcatgaagaaaataaaacaagggatgtgacagggagtgtcaggggagtgcaggggcgatggctgcatttaagctccttctggctgctctgtgcaggaggaggactcacaggggtggctgtggaggcctggggccagagaggccactgtccccaggggccaggctacagtctacgaagcagggagggcttggagccatgaagccagagaggtggaggctgggggccaggccaagaacaggaggggagtcggagcagagccaagctggactccctgtgtctttgggactctgccttgatactgccatcggtaacccacctgcattctgttctatatgtgaggtctggaggttgcaccttaaaacgtggtagaaatcagtcagcatatgcatactgtgcatactgaatgcctgtcgtgtgctcagccggcttcctgccctccgcacagcggaggaccactggctgacttagagttctggccacaggtgtccaagtcgctatccatgcggtcaccttccaaccagccttagacctcgagagcagggctgggcagagctgggcagggcctgacctgcccacctgggggcaaacactacacaggctccctttatcagaaggacgatagtatgaatagtgattgttcctaccatcatcactcaacctcg

SEQ ID NO: 21558 - DNA, 1575 bp, Artificial sequence
  DNA replication origin
gaaatcagtcagcatatgcatactgtgcatactgaatgcctgtcgtgtgctcagccggcttcctgccctccgcacagcggaggaccactggctgacttagagttctggccacaggtgtccaagtcgctatccatgcggtcaccttccaaccagccttagacctcgagagcagggctgggcagagctgggcagggcctgacctgcccacctgggggcaaacactacacaggctccctttatcagaaggacgatagtatgaatagtgattgttcctaccatcatcactcaacctcgctggtcccctggtggctcttctcagatcagaggctgccaggaaggaattttgaggctccaggactagcccaaactcacactgtggggagtgtgcactgagtgctatgctcctggcttagggaagagcagttctgcctaggatctttctagaatcagagggtcacagatccaagttggaaaggcccttaaagggctccacctgacctttcatcatggagatgagcaagctgaggcccagggagggcttggtgtgaaggcatcagtagccctgggctcctggcaggaagctggtggcttggaggggactggagccttggggtgtggacagggagctagctcaccagctccagggttcccttttggagcctcgagtcatgggaccaggtgtgctgaaggtgatggccctgtgcctggtggcacatcacctgtcacccggatgctgcctggggtaggagctgggtgatcatagcacatggaggcctgactggctcagggagggtaggaggtgctcctccccggagcccacaggcacctgctgggtgcttgctggctccagatatggatggcatctgagcatcaagtgatcaagaccttcattttggcgggggtggggatgggaggcgacagtaaccaaattcacaagatagtaactcttccccaaagcatctgtggctcttgaggctaacttggccagtacagcggcctgtgttacccgaaatgcaactccaccctctgtcattgttcctgaaccggggagggcagagctgcaggagagtgggaggcatatggctgagggcaggtttgggtgcagaactgtggaggggcagggccggcctcccagtgaataagcccccggcctgcaggtgccagagtactgttccgtgtggggctgacactggtgcgcctggcgctgggcactgcagagcagcgaggggcctgccctggcctcctggagacactgggagcccttcgagccatcccccccgcgcagctgcaggaggaggccttcatgtcacaggtgggtacccccacctctccttggacttgcccagcccctgctgcacgggggaaactgagtcccagagcaggaagccaaagcgagaatggggacttagttcctgtcccctgagcttcagagaacacaaaaacctgaggcctccagtggctttctgtggctccccagtgaggctgtcagcccctcagtcctcagccacttcctgggctggggacctcacagtttcctgttcctgccttgaggccgggcaaacgcagcaccaactg

SEQ ID NO: 21559 - DNA, 2075 bp, Artificial sequence
  DNA replication origin
ttagggctcccatgcaggtgactgataaggaaacctacagaagagctgcccagaaaacagtctcctgagtaggaaaggcaatgactgagccccagctggagggacgctgctggagaccaccggctcctagggtctgtgtccagggtgagccactgccaccgcgcccccgcaggctcatgacagaccctcggcccagggctgaggctgctgcaccttgctcctctattctcccaggcaaagagctgaactgtggagggcggggagctcccaagtggatttcagggacaagtgccccctgaccccggccaccctgcccgctacagtgcctgagattccaccaagacactcctcgtctaaggataaggcatagtctacacagcacagagccttgcctctgcattccagccggctctgcctttcactgtgggcctgggtgaggtccttgtcctcactaagcctgtgtctctaacagggatatcaggggccacctgcagagagagggcctaggggcggggggtctgggaaagggttttgtaaactacaggtaaggaggctattattaagttgcaggcaccccagcggggtaaggaggagtgggcagaggaggctctggagcgcgctctaaatcacgggagtctggctattgcctcattcacacactgaggggctggtgcaggattgggggtagagcggggaaggagcaggagaaagcactcccagggggctgcccaggggggagctgccagtggttggggcagggctaaaccttgggtctgctatggatagatagtaaggctttctgcaagttcctgctcctcctgagcctcagtttcccccggagaaacgacagataaggaagggtctgggccgccatgattccctcttccaggggttaggctccttgggagtaggacaagtctgcccaggacccaggacctggcacttgccacatagacgcagcctgtggccctgtcgcaagaacattccaaacccagagtctgacaggtgactccactgacaccccacccaatggccacccctggagcctgggcctgcagatgcctcccatccatatggagtcctgccgtgttccccatcgaagggagggcacttgggaatggacactgcgggacacacgcctgtgtcggaaccagccctgttgccctggcgatggctcaggtcctgggcacccacgggggctattagtgagtgtgggagggggtttccatggtggcggtcccgagggggcagacgcagggcccagggaggggtgagggctggcgggacctttctcctttgtccgaggcacactaggcctttgttcttgcctggatccctttgacagatgtgactagaaccatgggtgcggggaggacttgggttagagtcccccatcccagcgagtactgaaccaccctggagggaggggaaggagggcagaagagggggtagagcccctggactcgccatccactggggcgccctcctcctgcaggtgcaaaagccactcctgtccccagaggctgggcagggcaactttcaattggctcttattactgtaaacaccttccccagcggccagtgggcagcctcggtgtgtccccagggcaggaccaggagagggcggggctgggaagggcagatgagggaggaggggaaggggctgcctgtctggggttgggaggagggcatttgatccagcgccatccaaggcatctgttcaagaagattttattcctggtgccctctggggtcccttgactcagccaaccccttccctgactcctttggtgctggctttggtacttgtgagggcctgggcaccaggacggttccatgggtcctcacgtgccccactctgtgaccctcctccatgctagtgcctgacccagtatgtaccacggaggacctcctccttccccactgcctggtccttgccaggaaggaagccaagtccccgagtcccaagagtaaagtgcggtgcctatttgccgggccggcatcagccatcaggcaattgagactgggggacactaagtccatggtcctctcagaagcgggtgtccaggaaggag

SEQ ID NO: 21560 - DNA, 1582 bp, Artificial sequence
  DNA replication origin
gctgcccagaccgagtggctcctgccccagtgcggctcacaggtccttcctgccctggggtccgggcttggctctgcccctccagcgcgggggggagttgggggcaccgggtcccgggggtggggggcgtagcgtcgagggtcccgccgcggggagcgggcgcccggggtcctcgtccccgcgactcctgccccggccgcccccctccctggctctccccggggcggggccggagctggggtacctggcggcggcagcggctcggcgggcgtggcgggcggactcggaccgggcgggatgcagcggcggcggcggtggcagtggcacagcgcccggcccaagcggcgccgctttatatagaaacgcctggggcatgcccagtgcccagcgggggcggcgcggggcggacggaccgacagggaccgatagggacccgccggggacgcgcccccccccccccccgcccgtcagccacgaaaacgtcccagacctgggggcgtgtggcgggacacggacccagcaggaggagggcacggagcaggcagggagagacgggggtcttcagagacacagaggaagtcccgacagagggccaggtacagatggacagggactgtcgtcgagggtcacagacgtagggctgccatgaagaaagagggaggcccaccatggagaagagatggaaaggaggggcggggagagccggagcaggcagagactggtactagggcccgcccttaggggtggggtgcccgggagagcagcctggagcacacagccctgagccctacctttggatggaggccggaggtcccagccctgcagctttctgtcccagctgccagcgctttgccctattgcacgttctcccagagaggccctcctgggccagggtctccacacatctgtgcagccccctcctcacttctggacccagtggacttgcacacaggggccaggatgtctataagatccagcctctcctggtgcggtggctgcctataatcccagcactttgggagcctgaggcaggagaattgcttgaacccaggagtttgtgaccagcctgggcaacatagcaagaccctgtctctataaaaaaaaaaaatttaaactagctggttgaggtggtgtgggcctgtaatcccagctacttgggaggctgaggtgggaagatcacatgagccccgggggtcgagactgcagtgagtcctggttgtgccactgcactccagcctgggcaatacagtgagagcctatctctctcgctcgctccgctttttttttttttttttttttttttgagacagagtttcagtgtgtcggcccaggctggagtgcagtggtgtgatctcagctcactgcaacctctacctcccaggttcaagtgattctcctgcctcagcctcctgagtggctgggattacaggcacacgccaccacgcctggctaatttttgtgtgtttagtagagacagggtttcgccgtgttggccaggcttgtcttgaactcctgacctcaggtgctcctcctgcttcggcctcccaatgtcctgagaatacaggtgtaagccactgtaccc

SEQ ID NO: 21561 - DNA, 1947 bp, Artificial sequence
  DNA replication origin
gagggggtgagggcagggagcccaatccttgacctcactggtgccagatgcccttgcaaacaatgtccgcctaccctaggccaactggctgtgccttccctgccttcagatggaaccagagcctaggggaaggggccgaccttgacagggatgagcaagcagactgggctgagggcccctccctgcccccagaggtgcctccctccagggagcccttgggcacctgtgcggggcacctggccgcggtcctgagtctccggaaggccagcttgctgcagacagctctgcaggaggctgtagtagtagacagtccaagcccgggcctcggccccctcgggggatcccttgcagtccaggcccacgtcctggcgccaggagccagggaagcagcctgtgggcggcaggccagagccccctccccaggggccctcttcctccaggtccttggagcccagtgggcaatcccactcgggacccgatggatccagggagagctgagagggcagaagtggtaggtcttgggcagggtgggccagtgggcacattaagtcacccaagggtgtaagccccccactctcccagcctgggctatgttcagggctgacaccgtcccggggactaggagaggaaaggcttgtgttgggggcgaaggcttgttaatgggaacgcaaccgtgggagtgctttgtaaactgttctgtgtggtgcccctggggggagggcaggaagcaatgtcttgccagccagcccctcccgcccctgccatgctgggctccgccttagcttgcttcacagcagcagagttttctgcttgttttgttcatggaggcaaccccagcacctaaagcgtgcctggcacacagccacttctcagtaagtgtttgttgactgaagagtagatgaatgaacgaacccagccatcactctgaggtggcttatttctgtctcatgacccggcatggagtgtgctgacacctaaatgtgattccactgtcatccccacgtaggtcttgaagccctactgtgtgcccagccctgggctaaacattaggaggctagacagtatcccccctgcagatattttgagtcacggaaatgctttctttggatgaaacctaacgtccctcccctctctgaggctggcgcccccccaatatggggctgctgggaggcttcgtgtgaatggaattcttgttctttgcagtccccaggcctggacaggcctggcagctgagtctgtcctccaggggacaggctcggccaccttgagcaagtcgtgaggtctctttggaccttgttgcctggtgcctgccctctcccatcccctgggggctgatgaggctgggacgaagagaatctcttggttgttgggagatggtgtgctgtggcccagacggcagaggactgggcctcatgcctgggctcgaatcccagtttgccagggccagagcctctgtgccgtctcctagaaggtgagctccctgaggggccatggaatgaatgaatgtcacagggcactaagagtgcccacctcccaggatgcagccgcagggtgggggtgggggagctggtcgtgggtctaagctgtctgcagggggcaactcccaggcttaggtcctaggtgctgcctgctgtcctctgggcccactctctgcccagggacttgggccttgtgggggagggaccacagaagactcaccatctcgtgggtggagtggctgagagactgatggcagagacagagggacagagagacgaaggagtcagggcagccaagtccctgcctggccttccagcccctagactttgggagtggagaggtggccgacacctgtccctgcagagagaggccaaggcagccccacccccaccccgaaggtagggagggatttctgctgcccagaccgagtggctcctgccccagtgcggctcacaggtccttcctgcc

SEQ ID NO: 21562 - DNA, 1549 bp, Artificial sequence
  DNA replication origin
gggacacctttccagccagacttggtaaccgtgcctgggtcccatcctgctggcatctgtacagacctcagggtgggcgagagtctgttacctgcaggatatcacccagggcctcggagcgcagaaaagcctccacttcctctttcaccagcgtctcctggccctctttgccactcagctccaccagccgtagccctaggctggcatcccctccccgcagcagccccggcggcttgtaggtgaaagccagggttgctggcacagccacaccaccctgctgggccagcaactgccttgtcagcagccggtcctccagcagccgggccagctcagccgaagctcctgtggggcaggtcaggtcacgggcgagttctgctgcctctcggccccggccaggccccaggcccaggcctgccaaaaagtaggtggcacggcgcggggggacaaagtcatccaggaatgtcaggcccccagggtggaagctcacagccttggagactagcagggctgcctcacccggctgcccgggtgctggcaccttcatcagccaagcaggggacaggcaaaggagcatgtttcctgtgggcagagaaggcaagtggctggccagggaaggcttgatgccctatgcccgggcccccgggtagcggagtggaagcagctgatcccagaacccatccccattcagcatggcagctgctccggtggaatgcaggcagttgccagggttggcgggtattttgggatgtggctgggccagggcagggctgccctttctgtagaaggggatggggaaacttgagcatacactcacccgggctctggaccccaccctccagcagcacaggcagaaaggtgctgggggagcccagaacgcacaaggtcacctccgccccaggacagcctcgggaaagagaacatggcccagctcaccaggggcgcccttgctgtctctctgcccaccttccaccacctccacacccacggccccaccctgagcccccagagttttcccaggaatcggatgagacaggggacaggcagggaatggaggtgcccgccagtcctgccccgtgaagctggtttcccctttctgcagctgttccagaggtgctgtgggctaggtgactggagacctgagttctagcccgagctctgactttctgtgtaaccttggaggagtcagtgttcctccaagcctcagtttccaagtttgtacaatgggaccaagtctgtgattctcaggtattctgcctgtgaaccctctgtccacacaaagtctgatatatgtaacaggcgtggaggggcagaaggggaggagtctggggggtctcagctgctgagctgcctccaccacagctcccaagacctttctctagaagcttcggtgccacacaacgtggtttcccaatcccagggctgggtctttttggggagggggtgagggcagggagcccaatccttgacctcactggtgccagatgcccttgcaaacaatgtccgcctaccctaggccaactggctgtgccttccctgccttcagatggaa

SEQ ID NO: 21563 - DNA, 2100 bp, Artificial sequence
  DNA replication origin
ggcagccctgccctggcccagccacatcccaaaatacccgccaaccctggcaactgcctgcattccaccggagcagctgccatgctgaatggggatgggttctgggatcagctgcttccactccgctacccgggggcccgggcatagggcatcaagccttccctggccagccacttgccttctctgcccacaggaaacatgctcctttgcctgtcccctgcttggctgatgaaggtgccagcacccgggcagccgggtgaggcagccctgctagtctccaaggctgtgagcttccaccctgggggcctgacattcctggatgactttgtccccccgcgccgtgccacctactttttggcaggcctgggcctggggcctggccggggccgagaggcagcagaactcgcccgtgacctgacctgccccacaggagcttcggctgagctggcccggctgctggaggaccggctgctgacaaggcagttgctggcccagcagggtggtgtggctgtgccagcaaccctggctttcacctacaagccgccggggctgctgcggggaggggatgccagcctagggctacggctggtggagctgagtggcaaagagggccaggagacgctggtgaaagaggaagtggaggcttttctgcgctccgaggccctgggtgatatcctgcaggtaacagactctcgcccaccctgaggtctgtacagatgccagcaggatgggacccaggcacggttaccaagtctggctggaaaggtgtccctacctcttagccctgccgctgccctgccccatctctggggcaatcccctgcccttttgcctcagtttactcaccggctcctgtggcggaagtgccccaccctgcagtacctggggtggtgtccaggaggcccctttcccctccttgctgcaggtagctgtgaagctcagtggctggcgctggcgggggcggcaggcatggcgtctgcacccgcgggcagagctgggtgcagtggtggacacagtgctggcgctgctggagaagctggaggaggaggagagtgtcctggtggaggctgtgtacccacctgcccagctgccctgctcaggtgagagccacctgggctgaccagggatgggagtttggtgtggccttctggccactctgtgctggccttagacctccccgtcttcccccagatggtccttcacccggccccggcctggccgtgcgaatctgtgctgtggtgtgtcggacacagggtgataggccactgctgagcaaggtgagcgtggcccaggcccaggctgtgaccctgcctgccacacgccagcccagtcccagtagtggtttgccaagggcccctgagccgtctctgggcagagaggacaaaatccttaggggggtcgtagttgcctctggggaaactactgggtctgaccgtcttccctctcctgcaacccttccagaatccctcccacaccaagagcccctgcccctgtgctcagccccacgctgggtagtaccagggcccagggggctgaattgtcttcccagagagctcttgcccacgtagaggctgacccagggcctcctgataaacctctagtgcctggacgccttcaggaggggcctctaagctggagagtcaggaaggcttacggaccctcctgagtaccccgctctaggctacactgagagggagagattcgaccctgccctcagggagctccagtggggtagggaaaggtgcgccccagggagatgctagggtggggcacaccagggtggcccaggcccccagggctgcaggagccatcctggagggggaccccagctgggcctggaagcctgggtaggtagaatccctggagaggtctggggaccagatggggagtggcagggagagctcgtgtgcaatttaagacacgttggaggacggggcttcttgaatgtccagtgaggggtctggtctgaattttggcacaaggcggtgggggtgtgcgtggggggcagggagtgtgtgggcctccccctgagtctccccctgcccaggtggtgtgcggcgtgggccgcggggaccgccctctacggcaccacaactccctg

SEQ ID NO: 21564 - DNA, 1256 bp, Artificial sequence
  DNA replication origin
gagtgccgagcagcgcggcgggcgccgggcgcacacggacttcctgggtgagtgagggcggccggggccggggccgggagccgagggccaggggctggagggcggtggctgccgtagctgagctcgcgcctcccgcccggcgcaggcgtggatttcgcgctgacagcggccggcggcgtgctgaccccagtggccctggagctgaacggcggcctgtgtctggaggcgtgcggcgcgctggaggggctgtgggccgcgccgcggctggggccggcggccgacgaggcggtggcggcgccgctggtggagaccatgcttcggcggtcggcgcgctgcctcatggagggaaaacagctgctggtggtcggcgctggcggcgtcagcaagaagttcgtgtgggaggcggcgcgcgactacgggctccaggtgggcggggcgcggggcggggctgggccccaggtcctggcccgagtggtggaggcgggaccccggggcggggcctggagcaaaggggcgtccttggggcgggaccagccgcgctagaggcggtgcttgggcggggcatcctggccaggtacaagtaagcccaggagtaagggcggagtccgccgcccggtgagggtgaggggactccgctagttctggagtgagaggccctggggagggcagggagtcctccacagaaagaggagaggagcccgggtagatgggctgggcgagggacagcgttagcgccagagtgggggccttgaatgccaggctaaggagcctggctctgtcttggggaaagggcgggccctttgaggttgaattcctgacacttggcacccaggacccgcagagggtgctggggaaccgcatacagatcctgaatcaagttcatagcagggcatcactttacagaatctggagcgagccaggcaggtagacttgtttttgttttttcttttttgagacagggtctcaatctgttgaccagactggagtgcggtggtgcgatcacagctcactgcagcctcgacttcctgggctgaagcgatcctcccacctcagcctccctagtagctgagactacaggcacgtgccaccatgcccagctaattttttttttttgaaacggagtcttgctctgtcgcccaggctgggtgcagtggcgtgatctcggctcactgcaacctcccgggttcacgccattctcctgcctcaggctcccgagtacctgggactacaggcgcccgccaccacgcctggctaac

SEQ ID NO: 21565 - DNA, 959 bp, Artificial sequence
  DNA replication origin
tgcaagtctcgggtaatccgggaaaagtgctcatggcactgtggcgcatcctctaccagccggacacccactgcacctgccccgaactccagcttcatgacacctggcaggggtacctggtgcacggccctctccacatcagcctcactctccagtgggcagcagggcacagcatggagggagggcgcaggccagggtgggccatggtggtgcaacaggtgcagctgggtgaggctcttctgcttagccaggcgcatggcagctggggagctgcagggcagacctagctcctggcagagcagggctgtgagcaccaggcagtcatcccagtaggagaagcagccatctagcttgaggccgcgagcccgcaccaactctgccagcagccgtgcgttctcctcatccctccggtgctctgtcatgtcaaagtggatgaaggtctgtaccaactgggatgcaaagtggttggggtctgactccacgaggtgcagctgcagaagccacagggtggggcatatccaggtcagctagtactgggtgctagggggataggatggggcctaggatggccccttcaggggatacgagtacacaaacactaggtgctcaataaatgtgtgttgtggattgactgaataaatggaaggggcagaagtgggacacctgatacaggccggaggggagggaaggcatcctagaggaggcaatgcctaagctgggagctgaagaatatgagtcagccaggtggctgcaggaggaaaaggcatgttctgggtgggaggggctgcagcacagagaagagggtgtgagagagcgtggtggactctttcccacaggcagcctcactggccggggattgcagagaaactaccagggctggggcttgggacaagtggtttggtcacaattcaccccatgtgctctgacactgggaagtgtccacggaggaatccagtggg

SEQ ID NO: 21566 - DNA, 1738 bp, Artificial sequence
  DNA replication origin
ggtgagggcctgggcaagtactgctcatgtgtccccgggtcccagggctagctggagtaggggtcaggtgacatgggagagaatgcttttgggtgtggctcccacctatggataccctcagggctttcaaggtttggtcaatggagccaccttctccacaaaggctttgcagaggctcctgggccctggcattgccccagggcgcgttggtgaggcgccaactccccatgtggctgtccggcctccccctaacacctccgatgctcgcctttgacggaagtgtggccagctcatcacaagcgtgtcactggttaggactcagcctaaggactgggccagggcagcagctggtctgtgacagggctgagacctgggctcaatccctgacttcaagggaggggctcctttcattcccagaggcaaactgcacaggccggggtggccctggcttccccacagcccagagagactcaggaacacgtgcagaatggctggcagggccccggagaagagagaagggagctgcacctttttgacaaggtcccgggcatctggggtgaggtaggggggcagtgccagcttgcccctgatgatcttatccatggttttcttccggttctctgcggtgaagggcggctggaggaggaggaaggtgagaggagccttgtgggcctcccaccaggccctgcccttgccccaggaggggggctactcccacctctgcccctgcccctcctcctccccgggggctggacttgccgatccagtgagcatgtcgtacatcagggcccccaggctccaccagtccacagcccggttgtggccactgcgcaccagaatctcaggggccctggggtccaggtggaactgtcagtcaggccgtgccccttcgggctgtcctcccgacccctgggccagccaggtgccacttacatgtactcaatggtgccgcagaaggtgtgagtgacggcgccctcatggatagactccttgcagagtccaaagtcggtcagtttgatgtggcctgaggaagggtgttggagaggcgtgaccagggccccaccccacccacagaggtcctcagccctccccacagattgcagaccccgcctgcagctgcccgcacacacatgcgcaccctggctgctgagcatgatgttctcgggcttgaggtcccggtagatgatgccctgggagtggagatggcccagggccagcgtgatctcagccaggtagaagctgcagaaacaagacagggtgaaggcgggagtagagcagggacctggcagcctcaggaaagcggaggattaacacccaccaggccgtatcttccaggaagatgccctctcgctccagatgcgtgaagagctcgccacctgccacacaaacacgtcagcagccacgtgctgggtccaagcccctttgtgctttctgagtctttatttcttcttggggaaagaggggctcataattcccgccctacctgcctcacagagctgccgtggggattcaattcaattcagcaaacatctaccgacgcctactcggtgcctggccctgtgctgggtgaagctggggacaggatgaagagacccagccactgccctcaggacgctcagtctactggggagacagacatgtacacaacggctctaatacgccaggcccaggccacagctccaagagcttagcccaaaagatctcgcagagaagacagggaagacagagtgaatcccaa

SEQ ID NO: 21567 - DNA, 1784 bp, Artificial sequence
  DNA replication origin
gcctggtgggaggcccacaaggctcctctcaccttcctcctcctccagccgcccttcaccgcagagaaccggaagaaaaccatggataagatcatcaggggcaagctggcactgcccccctacctcaccccagatgcccgggaccttgtcaaaaaggtgcagctcccttctctcttctccggggccctgccagccattctgcacgtgttcctgagtctctctgggctgtggggaagccagggccaccccggcctgtgcagtttgcctctgggaatgaaaggagcccctcccttgaagtcagggattgagcccaggtctcagccctgtcacagaccagctgctgccctggcccagtccttaggctgagtcctaaccagtgacacgcttgtgatgagctggccacacttccgtcaaaggcgagcatcggaggtgttagggggaggccggacagccacatggggagttggcgcctcaccaacgcgccctggggcaatgccagggcccaggagcctctgcaaagcctttgtggagaaggtggctccattgaccaaaccttgaaagccctgagggtatccataggtgggagccacacccaaaagcattctctcccatgtcacctgacccctactccagctagccctgggacccggggacacatgagcagtacttgcccaggccctcaccctctctcctggtcccgcagtttctgaaacggaatcccagccagcggattgggggtggcccaggggatgctgctgatgtgcaggtgggtttgggaccaccaccaggggtagggctgagtctccaagggtgccgggaatgggggcagggccccagggcagagggagtgaccggggggcaagcagggtgagctgttagtgggtttggtgcattctctacctacagagacatccctttttccggcacatgaattgggacgaccttctggcctggcgtgtggacccccctttcaggccctgtctggtgagcagcagggctggtggccagtggccggtggcgggtggcaagtggagaacctgcatcttggtgccctctgacccctccccactctggtcggcccacagcagtcagaggaggacgtgagccagtttgatacccgcttcacacggcagacgccggtggacagtcctgatgacacagccctcagcgagagtgccaaccaggccttcctggtgagtgcgggggcctgaggcctgtgggaccagggcacggatcgtgactaaggatggcaggcactgagtgtcgcatggccctgcctccgccccccagggcttcacatacgtggcgccgtctgtcctggacagcatcaaggagggcttctccttccagcccaagctgcgctcacccaggcgcctcaacagtagcccccgggcccccgtcaggtactgagggacgtgggggtgtgtggctgggttagggacgctggcaggcaggatgccagctccagccttgggtgccttggccacgtctgtcggccagtgttggcttcggttgctgtgtctatcatggggacctcagttcctacaccccttgtggccaggctgcctggatgggagtttgtggagcccgcggcctgtgtgcctgggcaggtgggaaaggctgccttccctgactgagtgctgggagcctctggcagggcctaggaggctcttattctgccttggtttcccctgcagccccctcaagttctccccttttgaggggtttcggcccagccccagcctgccggagcccacggagctacctctacctccactcctgcc

SEQ ID NO: 21568 - DNA, 1366 bp, Artificial sequence
  DNA replication origin
ccccgggcccccgtcaggtactgagggacgtgggggtgtgtggctgggttagggacgctggcaggcaggatgccagctccagccttgggtgccttggccacgtctgtcggccagtgttggcttcggttgctgtgtctatcatggggacctcagttcctacaccccttgtggccaggctgcctggatgggagtttgtggagcccgcggcctgtgtgcctgggcaggtgggaaaggctgccttccctgactgagtgctgggagcctctggcagggcctaggaggctcttattctgccttggtttcccctgcagccccctcaagttctccccttttgaggggtttcggcccagccccagcctgccggagcccacggagctacctctacctccactcctgccaccgccgccgccctcgaccaccgcccctctccccatccgtcccccctcagggaccaagaagtccaagaggggccgtgggcgtccagggcgctaggaagccgggtgggggtgagggtagcccttgagccctgtccctgcggctgtgagagcagcaggaccctgggccagttccagagacctgggggtgtgtctgggggtggggtgtgagtgcgtatgaaagtgtgtgtctgctggggcagctgtgcccctgaatcatgggcacggagggccgcccgccacgccccgcgctcaactgctcccgtggaagattaaagggctgaatcatggtgctgacctggctctttgtgctgcatgcctaggggcagggttgggttggattgtgccaggaggagcccctggtccaggagggaggggtctctgtaggaccacagggccacaggctgaaggagttttatttcaaatggttgcctgatgcctgtggttggggggggccgttcccgtggtgagcggggtacacatggacttgggaactggtagggggtgacagtctgaggcatggtcatgtgggctgggggtccagtccagccatggcatcttgggaagcagaggcacggggagtgagcggctgtgacagggatgggacaccaagaccggcctctacagtgcggtgacatggaggccctggcccccagctgccctggcgctgtcatcccaggctgcgctgccagcaaaggcgtgcaggtcactcagcagggcctcagcactgccccctgcgctcgctggtcctggggagccgaggaccaggtcgccctccgtgtcactgtctctggcttcctcagcccgcacggggacctgctctgggctggacgcctctccacattgctgctcgccttccccagggtcagcctgcaggccaccatccgcgacgtggtcatagtctgtgtcctgctcatcctcctgtcgctcaa

SEQ ID NO: 21569 - DNA, 1257 bp, Artificial sequence
  DNA replication origin
ctcagcactgccccctgcgctcgctggtcctggggagccgaggaccaggtcgccctccgtgtcactgtctctggcttcctcagcccgcacggggacctgctctgggctggacgcctctccacattgctgctcgccttccccagggtcagcctgcaggccaccatccgcgacgtggtcatagtctgtgtcctgctcatcctcctgtcgctcaaggtcattgtctgtggaccccagctcagctcgggcctgcagccagcgacctggggggctggcccagagcaggcgccgcgtgcggccccacagcgcggcacctaggcgggccgggtggtagtagccccctgagtcacggctgaggcggcgccaggccagtgctaggccagtggccagcagtaggagcagcagcagcagcaggacaacggtgacagagctggagcccacgctgtcctccgcgctgccacccgagcccaaggcccctggcagggccagcagcatcccgagccctaaggtgcagggcagagcctgtgggagacaggcaggggctcagagggctcagcacctggggtggggcctggtgtggggcaggctgggtgaccaagaccactttcgtttttttctctttgggatcctcttgggacagccaagcagaaaaggccaaggccttatttggtcaaccaggctctggccctgtgagatcagcccccatccctccagcctcctccctaccactcacctcccccaacagctgcattaagccacctgcctggggccttcgcactggctgttccctctgcccggaaagctccacctcctcccatcctcccctcccccgggctgcatggcctgctcaccgtgctcaaacttcaccccagtgaggctgaacctgaccttaacctctaccctgatgtctatcactgcagcccaccccagcaccccccagcactcagtgcctttttccttccatgtcacctaacgcaggagataactgtactcattttttatgtctattgtcttatctaccccccacaataagctgctaggaaacgggggctttttgggtcaagcatgttagtaggtgctcaataagtatggattaaatgtgtctaggctgcctgggtgggtgggagaggagatgggagggagggaaggaggttgctagctggtgtcagggctggctctccctgaggcctgggatgggggatggaggggcctggatgcacccagaggcaactgctcatcttctgcttggccaggtcccca

SEQ ID NO: 21570 - DNA, 1201 bp, Artificial sequence
  DNA replication origin
ttatctaccccccacaataagctgctaggaaacgggggctttttgggtcaagcatgttagtaggtgctcaataagtatggattaaatgtgtctaggctgcctgggtgggtgggagaggagatgggagggagggaaggaggttgctagctggtgtcagggctggctctccctgaggcctgggatgggggatggaggggcctggatgcacccagaggcaactgctcatcttctgcttggccaggtccccaaacgggggtccgtgaggcccctcttcctccctccccaccacggggctgccccagcggcagggtttccgttccactcccagtccctgagggccacaggcgtgcagggccgggggctggggggggctgggggaggcgggcgcagctgccagaggaagtctgcggtcggaacaggctaggtggggggtgtcgggggaggggtgctgaggtgcagccagcctcccccaccaccccaggctgtccgcccaggctccaggaatgcaagttcccgctcacaggaagaccaggtaagggccttcccagggctcctgacaggggcctggtccggtatggggtgctgggggccaggcctggagtcccagggagcccagctcaggtgagagaaaggttcagcctctgccatactcctcttaggtctcacctcttccctggggccaatgtggggccctccttagctccacaggcccagacattctagccccgaccgcctgtggcccccatcccaagaacccggggggctccgaggcttaccattggtccgcaggcccctccgtgccgggcacccacctccagctctggctgtgtcgagcgagaagtgagctcagtgctcgtctgcagtgaagggtggcccaggcttccgcttcctgcccacataccccacctgcccctccctgctgcaggacccctggtccacaccagaccctccccagtctctctggaggaggctgggctgccgggcctgtcctccaaggaagaagcagcaccaacttgaagctggatgcagccttgcatgtgttctcaggtcttctgcctcagtttccctgcctgacaatccaggggagcaatgcctgtggggctgctcactgcccccagaccttctgcacatgtgtgactcctgtgacatcctctgtctccaggtttccagacttctcagccccacccttgcagcagcaggt

SEQ ID NO: 21571 - DNA, 2213 bp, Artificial sequence
  DNA replication origin
agcctgagggggcaaacttgagacttgggccccaccctgggccaggcaggcagggttcaccctggggaggcctgtggttcctagcttctctgcctggaacttgaggctctcagggcctaggactctgtcagactttcctctcctgccccctgctcgcccgactgccccaccactcccccatggcctcccactgcctctgtgtctttgcccatgttgttcatgccaacggaagggcccttctctcccttgcttgcctgtaccacccactgcctgcacagggctccccgctcctccagaaagcctcctcctccagcaagcctcctggccccagccctctctgcttctgcatagtgacctccagggcaccttgagcaggggctggtgccgctggcaccccagctccccacagtgaggtatgtttcagcacttgcttagtggcctgggcatagtcttaaggcctggaggaggctggaaaagagggaccctgggaataaagtgaagccaggagggccaggtgggggtcgtcatgtgggaaaaggcatagagatggcagagggcccacctgcatttaggggcagtgctggctggccttagtgaggccagctaaggcccgtcctggtttgggattagggggtgaggaggttctgcttggcctgactgcctgcaatgtgccaggaaaacctcgaggaacccatggccctgcaggaactggactcgagcaacggggccctgctgcccttctacgaccccgacaccagtgtggtctacgtctgcggcaaggtggggctgggcagggctggcgaggggcagggaagaggcgtgcccaggtgctgagccccctccccacacagggtgactccagcatccggtactttgagatcacagaggagcctccctacatccacttcctgaacacgttcaccagcaaggagccgcagcggggtatgggcagcatgcccaagcggggcctggaggtcagcaagtgcgagatcgcccggtaagagggctaccgaggccactcggggataggggcatctaaggtgagaggtcaggtcattggaggctgcttgggagcaggaaaccttgcgccagggaggcccggcgggccatgagaactgtcacgaggcagcccgtgtgggggtctagccaccttaggggtcggcctgcggaggtcctggggtgaggactggaagtggaggatgccaggagagctggcggtgggtggggggggcggtgagggttccacccgtggctcctccttgcatccccaggttctacaaactgcatgagcgcaagtgtgagcccatcgtcatgactgtgccaagaaaggtgaggccgcccgtccctcggctcacttggccctttctccagcaagcgggccatgcagttgtgaccagggcgaggcctgtgaatggaacatgacctagtatggtttgtgggcagtgagctggacagatgccagcttgcccttgtaccagccagctgttgggctgtgccagtcagggggcaagtggggatgagacagagggtgagcaggggccctgctctggatgagccacaggagaaggacaccaggcagtcagggagggagtggcagccacacagatcttcctgaaggaggcaggacccataacacagctggggtggcgccatccactgggggcaggccaggcgaagggcacagtggtgggaatggagagaggaacaaggagtctggctgcagtggggaatcccatgaagaggggaccgggccacatgtggcttggcctcagatgccaagagcctcggacacgcttccatgattctctggccagcatttgccgactgctctttcaacatgccaggcacattttggggagtggagctgagctgatagggcctgctccaggagctcacagtccatgggccccagaatcccataaagccacatagtggcccctgtgccttgcaggggaaggtgatgacaggggccttgctcagaagggtgggaaagcttccgagggagctgttgatggtgtccagaaaggaagttaaaggccagatttgagctttccaggccgtgggagaatgggttaacagagtgcaagcctggaggccaggggagggatgaggggaccctgatggggcctcctaactgatcctgacctccccggccccctgcccagtcggacctcttccaggatgatctgtaccccgacacagccgggcccgag

SEQ ID NO: 21572 - DNA, 1337 bp, Artificial sequence
  DNA replication origin
aaggcttcgggagggatggagcccactgactgccccctcgtgcccacagacgggccgcattgacaaggcctacccgacggtgtgtgggcacacgggacctgtcctggacatcgactggtgtcctcacaacgacgaagtcatagccagcggctcggaggactgcacggtcatggtgaggcacaggactggctgggccagggtcgtgggtgtggccgaagggggccagcaataggaccagcagaggactgagctcggtggccctgtccctaccacaggtgtggcagatcccagagaacgggctgacctccccgctgacagagccggtggtggtactggaggggcacaccaagcgagtgggcatcatcgcctggcaccccacggcccgaaacgtgctgctcagtgcaggtctgcaccgccccccgttttgtgctccccccccccacggacccctccatacatcccagcagcccctccagggcccacatgacaaatgggaaagctgaggccctcagagttggagagacccgtctgtcccagggtggtgggcagagtgggcctcagcctggtgagctaatggcctcctgccacccacccggcccgagctgacaaccctcacctgccaggctgcgacaacgtggtactcatctggaatgtgggcacagcggaggagctgtaccgcctggacagcctgcaccctgacctcatctacaatgtcagctggaaccacaatggcagcctgttttgctcagcatgcaaggacaagagcgtgcgcatcatcgacccccgtcggggcaccctggtggcagtacgtggctctggagggcaaggatggctgtggataggcccaggaccttgagcagggcgctgcactgaccagcctgtccccccgacaggagcgggagaaggctcatgagggggcccggcccatgcgggccatcttcctggcagatggcaaggtgttcaccacaggcttcagccgaatgagcgagcggcagctggcgctctgggacccagtgagtggccagcctgagggggcaaacttgagacttgggccccaccctgggccaggcaggcagggttcaccctggggaggcctgtggttcctagcttctctgcctggaacttgaggctctcagggcctaggactctgtcagactttcctctcctgccccctgctcgcccgactgccccaccactcccccatggcctcccactgcctctgtgtctttgcccatgttgttcatgccaacggaagggcccttctctcccttgcttgcctgtaccacccactgcctgcacagggctccccgctcctccagaaagcctcctcctccagc

SEQ ID NO: 21573 - DNA, 2097 bp, Artificial sequence
  DNA replication origin
caatcctggagactcctgcggatgccattatgaggagcaagaacgcgaaggggcctcgggtccgctgtaaggctgcacccgcacctgcggcgcctctgcggcggccgccgtcggccctgccccgccccgcccccttcttccggaggagctgcggtgggggcgctccaccgggtcctaggaaaggggctctctctggccccgtccccggcggccccgctcccggccccccggcgccgctcagcctcccgcccagcccctccgcgcgtgacctcggccccgcccccgcgagcccctgccccgcccccgctccgggtccctctgtcacttcctgaatcctgcttcctgcttcccagaggccgggatccggagccgcccgaagccggtgccgcagccccctgcgcccccggtgcccccggtgagcgcggcagggccggggctaggggcgcgggctgggggctgggcggggctgcaggggccgggctgagggggctgaggggggatcgcgggtcccaggagcctttcgcctcccctctaccccactcagtcccactccccttggccgcccagcctctcctctcctgggcggaggtccctggaagttgggctcctggttcaccctggaccccgattcgaggccgctctgggttgcttcgcggcccacagctgcgtcccgaccccgtcccttcctgggggccatgccggggctccctggacattccctgggactcagaactgggcactcactcggccccacagtagagagacttttcctgcttcctctctccttcttccccattacctagcctccaaatctctgggagcaggaaggaggctgctcccgactggctgggacctacagtagagctgagagctctccaaccccggcacctcccacctcctgcccccgacacacaccagagccagggaggggccctgcgtcctgcaaagcccctcaggactcagcagtggtcagggccggagcatttacctctcagatcactgcctgcggggtgacaggcggccaggctctgcacctgtgaccccattctgtaactgggtaaaccgagacccaggagggttacggtggcctggcccccggttgcatcctcccggctcaccttcagcagcctggggagggctggagttgttgggatgggccggactgacccaggcctctctgtcccgcagacatgtccttccgcaaagtggtccggcagagcaaattccggcatgtgttcgggcagccggtcaagaacgaccagtgctatgaggacattcgcgtgtcccgtgttacctgggacagcaccttctgcgccgtcaaccccaagttcctggcggtgattgtggaggccagtggagggggtgcctttctggtgctccccctaagcaaggtgggtcctgtcagggttgggggaagaggaggcacctcggccacccctactgggcctttctgcacaccttgaatccctcatcttgccgtttctcacactgctgggcaggtgttataacccagatttatcgccccaagtgttagcacagatggaaagtagcctgttgccatagaggcagggttagaggcagcaaacatttcctgctcacctggcaagtggggcacagtcacatctgggccacctgtgagccgggacgtgcatgtcattcccactccatggaggggaagaccaaggcttcgggagggatggagcccactgactgccccctcgtgcccacagacgggccgcattgacaaggcctacccgacggtgtgtgggcacacgggacctgtcctggacatcgactggtgtcctcacaacgacgaagtcatagccagcggctcggaggactgcacggtcatggtgaggcacaggactggctgggccagggtcgtgggtgtggccgaagggggccagcaataggaccagcagaggactgagctcggtggccctgtccctaccacaggtgtggcagatcccagagaacgggctgacctccccgctgacagagccggtggtggtactggaggggcacaccaagcgagtgggcatcatcgcctggcaccccacggcccgaaacgtgctgctcagtgcaggtctgcaccgc

SEQ ID NO: 21574 - DNA, 1465 bp, Artificial sequence
  DNA replication origin
tcccccgcttcgtcctccatccatctctttctgggaaagggagggtgccatcggtcagccagggcagtggatgctcaaggaaagaataagggaagtagccggtgccccagagccgctggcctaagggaacgggggtacattccacctgtggaacgggatggggtgggtctggagaggccagtctgggctccttgtcacaggcgctggctagagaaagagagaggcctgtgaatggatctccaggccttcgagggagatggtggagaaaagaaggcaaggtgcaagggactcactggccatggccccctttcaaattgtaataagaaagctcagcagaatgcacaggtgtttaccctgaaaaatgggactcctgggtcttccactcgctccataaacactgctattttctggatgggcacggtggctcacaactgtaatcccagcactctgggaggctaaggcaggaggattgcttgagcccgggagttcaagagcagcctggccaacatggtgaaaccctatctctactaaaaatacaaaaaaaatagcagggtatggtagcaggcacctgtaatcccagcgaattgggaggctgaggcaggagaattgcttgaacacgggaggcagaagttgcagtgagccgagatcgcgccattgcactataggctgggagacagagcgagactccatctcaaaacaaaacaaaaaacacaccagcctgggcgacagagcaagagaccccatctctacaaaaagtaaaagaaaaattagccaggcgtggtggtgtgtgtctgtagtcccagctacttgggaggctgaggcaggaggatcccttgagcctaggaggtcgagcctgtagtgagccatgatcatggcactacattctagcccggtagtgacagaccttgcctcaaaaaaaaaaaaaaaaaccaccccaacacctgctgttgttttctttacattgttaaccaagagcatgaaatttaggccgggcatggtgtctcacgcctgtaatcccagcactttgggaggccgaggcgggcggatcacgaggtcgggaaatcgagaccatcctggctaacatggtgaaaccccgtctctactaaacatacaaaaaattagccgggcgtggtagtataagcctgtagtcccagctactggggtgaatttcttgaacctgggagggcggaggttgcagtgggccgagatcgcgccactgcactccagcctgggtgacaaaaactccgtctcaaaaaaaaaaaaaaaaaaaaaaaaagagcattaactttgataacttaaaaagagtcacgtgaacatatccactgtccgtgtagattctacatttatttgttgggggcggtaatggggccccttggaggtgtgcgttccgtcgggggccgggaaggcggggcctcacccaatcctggagactcctgcggatgccattatgaggagcaagaacgcg

SEQ ID NO: 21575 - DNA, 1617 bp, Artificial sequence
  DNA replication origin
cgagaataagttaaggcacagagcaggcgacgggcggctttcccagggccaggcctgcatgccccgaacttcctgagcaaactccctaggggctggggtttcgagggtcctggagggcctcttcccttgagatgaggggaacggaacagggcaagaggggcgcccccatgggcgcaaggggtccacgctgcgccgcgatcacttctcgaagtagggcaggtagaagaactggaagccccggtggcccttgaccgcgcagtagatgaagatcacgtgatagactgcggggcggggcctgtcagcgcagaagccccgcccctccccgcaacaccgcccccagtgccgccccacagcccccgccccttccgccccggtgcccgctcgcacctccaggcaccaacaacaggaagcccggcacgaagaagatggcgctggagacacctgcgggagggaccagagcccggtcagggcgagggggcggaggcttcgaggccttccgggctgccgctgactgcccgggcaagcctcactcccagctgaaaaggagccgtgtactgccgggaggtgggagggcttgccgtggacccgtggacacaagacaggggtgtcctctgcctgtgggggcgggagggtcgctcacctggagagggggtcgcctccagtcccacgccgaccaggatcagcactgcacacagacggagccgcgggggtgggggcaggagcagtggtgagggcgggggctcccacccccagcccggctcacccaccacctgagctgaaggtgccctaggcagagaccctccccaggaagctcaccaagctctgtttccagagcaaggcactgagcaggccctgggaagtgtgtgaaaggagagatttttctttgttccttggggtgggcttttagtcattcagcaaacatttatggaacacctactgcgtgcctggtactgggaattccgccctgaagggcagataaggtccctgccctcatggcccgtccttagtggaggaaccaataagaacctgaaagctaacagtacaggtgattgggatatagggggtaagaacagggcagtgcaggagtcctgggtccccagttagaagagtgatgggggaatgaggagctggactttgggctctgcaacaaggggggtagtaagcctgggggactggggggccaccatggactgctttgtgcattgcccagactacttcaaaaagggtgggccaggtgtggtggctcatgcctgtaatcccagtgcttcagggagccaaggcaggaagatcgcttgaggccaggagtttgaagccagcctgggcaacataccaagatccccatctctataaaaggttaaaaaaaaattagcccagcccaggcgtggtgactcatggctgtaatcctagcactttgggaggctgaggcaggaggatcacttgagttcaggagttcaagaccagcctgggcaacatagtgagaccttgtctctattattattttaaaaaaaaaaaaattagctgagcatggtggtacatgcctgtagtcccagctactagggaggctcagctgggaggatggcttgagtccaagagtttgaggctgcagtgatcatacca

SEQ ID NO: 21576 - DNA, 1923 bp, Artificial sequence
  DNA replication origin
agaataaatggtagctgctactcttctgtcctctaatggatttaaacaggttaaattttttaaaaaaggaaaagtctttgcagtgataagccaggttccattttcagctatgtgtgatttcctggctgtgtgcccaggtcacaaggcctctgtctcctcacctgtaaaatgggagtgtgatgatggcagccagctgcctcctcaggatgctgggaggctcagtgtcaagggggaggcagagcctgtacaaaaggagggcagagcctcccacggggcccctcttgaccccaaccctcagggccactcacccagccccagcagcaggagcaggaaggaggccagcaccactcggcggttcttctggatcaaagggtgttgggtccagctgggtggcaggagagcagggtgaatgtgaaggaggtggagggagggggtgcaggaggctgtgggggtggagccagggctgctcggctgggggcttaggcgggcaggctcacctgcagcaggtgttgtaggagcgctgggtgctgctgctgatggtgctgaaggaccactgggagctgcggatggaagttcggctggaatccctgccaggacaggcgcccagtgaggggcagggaggcaaggacggggttgctttgggacaggagtcctgatgaagtgcagggcatggtgcagggactggggctggccccttgcaggatagtgggccctgagaggcctcggtgggtgagcatgaattcaggggctggggatgagctaggggattctgtaggacaggtgacctgtatgaaggtgggggccagaccagactgggggtttctgaaagaggtgagtacagctgggcactagggtagggtgaccctacagtgtaggagaccctgtgaggaaagtgagggtcaggctaggaatcaataggacgggatggaagagagtgagtgaagtggggtgggtgactgagcagggtccctggggataggagctggggctggggtacagggttgggtccccacctggccctaacctggtgccgactcccccatccggctccggagaggcctgggctccatcctcatcgttctccaggttctgttgcagaacacaggtctcaggggggttgctgggctggggcccttcctcactccctcccgggaagagaaaagcaggcctacacaaccatttgcctggccgcctggcagctgttcacctggccctctgccctccccgcagaacgggtttggtgattcacagaaaccaggtaggaggtgggtggatgccagggctttggggagcaggagcctgcatagatcccagggaaaggagagctcccaactttgggttagggtggagctctcattcagtggcctagaatgggagcttgggaattggggtgccaggaaaggccaggcccagagttcccaggttcaaggcacagggttctggtccaggtctccaagaaaagcagcctagggttggtggaggttttctgggaaaatgggtttttctggtttagtgggagccaaagggtgggcaaggactggtcatgtgagaggagctccagctcttaggggtggtggtgggattagggagagggctttcagaatagagaaaggcgtgcgggttcccatcagcttagctggcctggggcacaggggatgctcctgcgtgtggggcaaggtctggttcagatacagaggagctcccccaacccagcgggggccaggtgcgagtagccaggatgagtggggaatccggttgggttccccagctggagctgagggatgagctcccgggcccgggcactgggctcttcccggctggctggggcccggtatgggaaccgggagggcctgggcagggctctggatcaagagtcacgtccgcggggcgggggggcggtctcgcgcttcagctggggcctct

SEQ ID NO: 21577 - DNA, 841 bp, Artificial sequence
  DNA replication origin
tgcctgccagtcccgcaccgtgcgcccgcactcctcagcccttgggtggtcgatgggactgggcgccctggagcagggggcgtcgctcgtcgcggaggctcaggctgcgcaggagcccacggcggggctgtggggaggctcaggcatggcgggctgcaggtccccgagccctgccccgcggggaggcagctaaggcccagcgagaagtcgagcacagcagctgctggcccaggtgctaagcccctcactgcccagggccggcgggcgggccggccgctcggagtgcggggcctgccgagcccacgcccacccggaactcgcgctggcccgcaagcaccgcgcgcggccccggttcccgcccgcgcttctccctccagacctccccgcaagctgagggagccagctctggccttggccagcccagaaaggggctcccacagtgcagcggcgggctgaagggctcctcaagcgcagccagagtgggcaccaaggccgaggaggcgccgagagcgagcaagggctgtgagggctgccagcaggctgtcacctctcaaaaggaaccaaaaagagagcttagaacatacatatgtgtaggcagctctacaactgctgtatgataaagatggcaccacagtccagagggaaaaagaactggttgtttggagcggccagtggtagtggctcacacctaatcccagtactttgggaggccggggcaggcagatcacatgaggtcaggagtgcaagaccagcctggccaacatggtgaaaccccgtctgtactaaaaatataaaaattggccgggcgcagtggctcacacctgtaatcccagcactttgg

SEQ ID NO: 21578 - DNA, 1240 bp, Artificial sequence
  DNA replication origin
ctctggctgcgcttgaggagcccttcagcccgccgctgcactgtgggagcccctttctgggctggccaaggccagagctggctccctcagcttgcggggaggtctggagggagaagcgcgggcgggaaccggggccgcgcgcggtgcttgcgggccagcgcgagttccgggtgggcgtgggctcggcaggccccgcactccgagcggccggcccgcccgccggccctgggcagtgaggggcttagcacctgggccagcagctgctgtgctcgacttctcgctgggccttagctgcctccccgcggggcagggctcggggacctgcagcccgccatgcctgagcctccccacagccccgccgtgggctcctgcgcagcctgagcctccgcgacgagcgacgccccctgctccagggcgcccagtcccatcgaccacccaagggctgaggagtgcgggcgcacggtgcgggactggcaggcagctccacctgcagccacggtgcgcgatccactgggtgaagccaacagagctcctgagtctggtggggacttggagaacctttacgtctagctaagggattgtaaatacaccaatgggcactctgtatctagctcaaggtttgtaaacacaccaatcagcaccctgtgtctagctcagggtttgtgaatgcaccagtcaacactctgtatccagctgctctggtggggacttggagaacctttgtgtggatactctgtatctagctaatctagtggggacgtggagaacttttttgtctagctcagggattgtaaacgcaccaatcagcaccctgtcaaaacggaccaatcagctctctggaaaatggatcaattggctctctgtaaagtggcccaatcagcaggatgtgggtggggctagataagagaataaaagcaggctgcccgagctatcggtggcaactggctcgggttgttttgcacactgtggaagctttattcttttgctctttgcaatagctcttgctgctgctcatactttgggtcaacactgcgtttgtgagctgtaacactgaccgcgaaggtctgcagcttcactcctgaagctagcgagaccctgaacccaccagaaggaagaaactccgaaaacatccgaaaataagaaggaacaaactccggacacgcctcctttaagaactgtaatactcactgcgagggtctgcagtttcattcttgaagtcagtgagaccaagaacccacca

SEQ ID NO: 21579 - DNA, 1796 bp, Artificial sequence
  DNA replication origin
tacgaggtgctggaccactgctcttccatcctcaacaagtacgacggtgagcaccgggccctgggctgccgggggctgcgagtggtcagagagtggcctttctcctgtcactgctggggtcaagacctagcctttcacaacccccattctgagctcccacgggggcctgactaaatgcctctactcggcagggctgtgggccccattgtgccaatgaagcatgaatggtgtattgggggtggggtggcatcctcaggtcagggagggctctctctcccctgtgggcccatggtgccaggagacatgagggcaggcagctggccaggatcccccctcatgcccttgcatgcccactgcccactggcctcccctgcagacaacgtcaaggcctacttcaagcggggcaaggcccacgcggccgtgtggaatgcccaggaggcccaggctgactttgccaaagtgctggagctggacccagccctggcgcctgtggtgagccgagagctgcgggccctggaggcacggatccggcagaaggacgaagaggacaaagcccggttccgggggatcttctcccattgacaggagcacttggccctgccttacctgccaagcccactgctgcagctgccagcccccctgcccgtgctgcgtcatgcttctgtgtatataaaggcctttatttatctctctctgagtctgctgagctgctccactgggagagccgggtcatcacctggcattcctggtacttgggtggctgttgggaggcaaagaatcagggttcaaatcctagcccctccacccaccagctctgaggctctggtgtccctgttagagaaattacgatgagctctttcaccaaggaagtgtctctcgctggccagggctggggcgccccaggagcccacagtcttaagggggagatgaagtgggtacaagctaggtagctgggcacctgagggaggtagtctcctggtgctgccctcccactccagcctcggatcccatggtctcctggcctcggtgtctgggggcagggtttccatgagaagctacgctggggctgaggtgagccgggttgggctggggtgggctgactgtccagaaagaggagagggccgagcgcttcgtgagaccttttgaggcccaggcccccatcctgacctgcctgtgacatggatggccctgggcgtgggtttcgtgcgaccttttgaggcccaggcccccatcctgaccctgcctgtgagctggatggccctgggtgtgtgttggcctctctgtgcacatcagtgtcccctgttgaactggaaactgggctggctgccctgtgatgccaggcatggggtgagtgggtggggtgcaggtggcgtttattttcatggatttatacacactggaaaagcctctgcgcccatgcccacgccctcctccctccccccggcgctgggtcccctcatatgaaagggaagtaacaccgaggagcacacggagatatagggtgtggggctgggggggccagcgctggggccaaaagtctgggtccccagcctcccacacgcagcccctcgggccccttgggtgtgtcaataaataacccaggtccaggctggtgtgggcctcactcctcgctgtccagcttcaggctgatgctccgtgctttgccccgtgccagggtggtgggtggtgttcccgggccctcacgctccgcctggctggggcccctcgagcgaagcagctggctctgtttgcgcaggaagtccacgggggcagccacaccatagctgctcttgccc

SEQ ID NO: 21580 - DNA, 1492 bp, Artificial sequence
  DNA replication origin
cacgccctcctccctccccccggcgctgggtcccctcatatgaaagggaagtaacaccgaggagcacacggagatatagggtgtggggctgggggggccagcgctggggccaaaagtctgggtccccagcctcccacacgcagcccctcgggccccttgggtgtgtcaataaataacccaggtccaggctggtgtgggcctcactcctcgctgtccagcttcaggctgatgctccgtgctttgccccgtgccagggtggtgggtggtgttcccgggccctcacgctccgcctggctggggcccctcgagcgaagcagctggctctgtttgcgcaggaagtccacgggggcagccacaccatagctgctcttgcccaaggcagctctcgggggtcccgaggaggcatgcgagtgcgagcccgcttccagctggcccaggtgggccacatagccgtctgacaggaactgtgggcagaggtaggcagcgatgagggggtgctggccaagggcccacacgctgccctccacggtcctccagaggcacctgaggcaggctgggggactggtggcaggcttggcacagcctgagctgaagccttctcaatagataggaccccaggctgggagccagggcaccttggctgtgctcctagctctgcccttctctgggcctcagtctcctcatctggaaaatggggtcttagaggaaaaataacagcagccaatgtttagccagcacttgctttgtgcccagccctgtgcctgttgatgtgatcttcataagctgacatgggcagtgccatgatcatttccatttacagatgggaagctgaggctcagaaaggtcacagtggaaagccatggccgagtggaaccagcgcctagggtcttgagcactttccagtgtgggctgtcccctctggcttgcctggcagctggcagctcaagctgctcatggcccttgtcctcggaggatcccaggttccctggaggccggttaggccttctcacatcttccccagagtccgtggttcccaaggcctgggactgagggccctgccccctggtggggtcctgttcctggccttcacttgggcctcacctggcactgcgcctgtagcttccgcacggcacggcccacgatgtaggtctggctcggggacagccccagcgccgcgtatacagccacatctttgggagacccataaccggccacgatgttcagttctacctgtggcgggagatgccaatcagccgccccaggggtggagccgtgcagctgggggcggggcctgttgggcttccccagattgttctgggggtgggtccaggcagacggaggcgaagacaggtcccagtcccacggggacaggggcgggaccagctgcatctccctagttgcccctaagtacacggggcccctcaaactaggggagcaggaccgtagcgggccgctgcagtcaggcagggcccgggccgatccagttgggaac

SEQ ID NO: 21581 - DNA, 1874 bp, Artificial sequence
  DNA replication origin
tcgtgggtgaggccgtcgcagaaggagacgacgccgtgggggaagttgtgctgcgacagccatgccaccacgcggtgcttctgcatatccggccggcctgtgacatacacgatcaggtagccggagtcctgccagtgcctgtggggcgggggcagcggtcagctccgctggccaggggtgaggggccggtcaccccggtgaaatgggtggtggtggcagtggcaactcctacctgaccacgtccacggcgccagctcgcaccttggggtcgctgcccatgatggagacgctggcggtgaaggagccgtcgatgctgaagaccacagcctccgtgccgcgggccaccacagtcaggcagcattcggcataggtgtggtcgcccctgcggcccacggggcggggcgtgagtggcgcggggcgaggcctggcggagccctcccgcagaggcccggccagccgcgctcacctgaccaccatgcgcacggggtagacaccaatgcccagcgcgcgttctgggggaactgggaaggtgaggcggcccgagctattggtgacttcggtgccaaagtggatccacttgcccgacagcggctgcgtcatgatgtagacatccacctggaggggagaaggggcgggaggtaaatgggggccctgcgtggaggtgggcagaggcggggctgtcgtcggggatgggtgggtctaggggcacaaccaccagggaccaggagctgttccgaggacaggagatggggccatgggaccaggcgacagggcctctgggtcctgaccttctctccagtgagcgtgacgacgtccaggggcccgtacatgaagcgcccgcttagcacctgggggcggccctcgcacaccaccgtgtcgctcgcccggtggttggaagtgacgttctagagggaggagagggcgtgagtccgcggccagcaaaggatggggatgcttggggagggggagcgggtgaggatccacacgcaaacaccggggtgggggcctagaggcggcggggcattgagggaaaagggcaagcccggggggcgcacttttgtggaccccggcctgagagcctgtgtgtgggccgcgcctccaggggcagagctgtgacaggacgggatgcagaggatgaggcgaggtggggaccagcgcagatccagaccctagacccaaacttcccgcagagggcggggagaccagcggttcccaggggcggggctggggcaatgaggtggggccaggaccccaggggcggggcaggactgggagagagttggatcggctaggacccgaggaggggggtgctggggggaggggcggggcctctctggtgagtgggcgagagtgggcgagtgggcgagggggcgaggggcagggcacctacccggatcttgacctgcgtgcgttttcgctgccacttctccctggggaaggccgggctgtagatggacggctcctcgcattccgccagctgtggccgctccttctcgatcacctgcacgggacagggggcgaggcctctgtctcttaggggagggagggctgcccctcccccggcccaaagcagcccatccccgtcccattctcatctcccattccatattcccaggcccacctggcgcaggatgaacgccaccacgtcggcggactcccagtagctggcgtggaagaggtggggcagcgtgacggtgggaaaggcggtgagcgcctcggggcagtacagcgagtagtcgatccgcttggtcccccaccagcgctccaggactgcgcggccatggcagcgagtcaggatggcctcctgccccacacccatctgcctgggcgctgggtgctcttccctccccccttttcacccagcctgctctttg

SEQ ID NO: 21582 - DNA, 1272 bp, Artificial sequence
  DNA replication origin
cagggggcgaggcctctgtctcttaggggagggagggctgcccctcccccggcccaaagcagcccatccccgtcccattctcatctcccattccatattcccaggcccacctggcgcaggatgaacgccaccacgtcggcggactcccagtagctggcgtggaagaggtggggcagcgtgacggtgggaaaggcggtgagcgcctcggggcagtacagcgagtagtcgatccgcttggtcccccaccagcgctccaggactgcgcggccatggcagcgagtcaggatggcctcctgccccacacccatctgcctgggcgctgggtgctcttccctccccccttttcacccagcctgctctttgccaagtccaggctgtgtgctgggggaaagggtttctcagctgggcttcggaggtggaatacgggcctcccccacccccaggctggactgcctaggctggctgacttactcttaaccacctcactggtggtgctgggggcggctggctgggccggggggtcagtggccaactcactgcccttccagaaggcaccgctagtagaggtgggtgttgagggcaccagcatctccagctcctccagaaagaggctggagtgcgtctgcagagtgtcggctgggggaaggagggcaaggtcagcaggggccggccaggtggctctcctgtcttctcacccagggctccccgcacctctgccatcttcctgtggcccctctggtcaggtcctggctgaggctgcactgtggcattctctcctctcagcccagtggccagctgcactcctgccagaatgcctgttgccaccgccccaaacgctgcacacctgtgcccaacacaggcccgcttggcccatacatacctgggcatgccccgcaataaatgtctgcagcacaccccacacagatgcagcagcgcacacatgctggctgcttgtatggcagcacaccagcatcatgctgccagggggcaccctctctagcttggctaaccacccccacccaacttctaggcccaggaggtcagagggtcctggggatccagacccccccagggggaaggagcgcctggtcctgggagtggtggcctgagaggttttccatcgtctgggagcctcctcatgtcttctgctacctcctcccttcctgtgtgtgccctcctccttctcccctttatcttgtttgggggcgtacccagcagcagggatgagccatctcccagggggaacttctggtagcggggcacggtcagtgg

SEQ ID NO: 21583 - DNA, 862 bp, Artificial sequence
  DNA replication origin
tctggatggaacaggagacagaaacattcttaggcctggggaccattcgaattctacttacttagaagtgaggagcgaggcttgggggttgggcagagcagaattccagagaagacatgaactggcagggcagcagggggcctgcctgctggcagaggggtggcattccagggggcagagacctagagccagagagggcctttccgctcctgaggaggccgggtttggctatactgaccatgctcccacggcggctgctgccccgactcccggtgcccgcgttagcactgtggcagagtgcatcaaagcccaggatgccaccaacaccatctccaatcagtgcgacctgggtgggagcaggggcaccatcaggagaggccttgtcctcacccaggccagactacagtgggggctgcagtggagggcagcagatggactgtccctaaccgctgacctgcccacagaagccggcaccctcaggtgagcgcaggaaggctgagtaggcctggttggtgcgggcaatgacggtggccacggcgccctggtagcgggaggatgaggtggccagcagtggcagggcagccagtggaatgtggtcttgggagcgagacaggctgtccccatcgtggctgtaagggctcaggctgtaggagggggaaatgtgcgtgggtgaggggcttccagacccactcctgccatccaagtcccctgggcctgctggcaggccctggctctgtgggtcctctgtggggagcgttagccccaagaggcaactgaaatggagccattctccagaacaggtccagccatgccagtgaccgacccaggtgtctggcttcctgaccccttccccgctccctgc

SEQ ID NO: 21584 - DNA, 1098 bp, Artificial sequence
  DNA replication origin
cgggcaatgacggtggccacggcgccctggtagcgggaggatgaggtggccagcagtggcagggcagccagtggaatgtggtcttgggagcgagacaggctgtccccatcgtggctgtaagggctcaggctgtaggagggggaaatgtgcgtgggtgaggggcttccagacccactcctgccatccaagtcccctgggcctgctggcaggccctggctctgtgggtcctctgtggggagcgttagccccaagaggcaactgaaatggagccattctccagaacaggtccagccatgccagtgaccgacccaggtgtctggcttcctgaccccttccccgctccctgccccgctccctggcctgatcctacgagttccctgcccttccacccgtggctagtacttggagacaagggcataggcggcggcgcagatgggtggacagggcaccagtcgcagcgccacgtggcccaaggcctcagggaagtggatgcgggtgacggcctcgaaggcggagctcagcgtctgcacatccgcctgcttggagttggcgtctccagggcctgagtccaggatgttgccgctgtgcaggataaggaagagggcgtggactgcgcatgcctcagcccccagctccccggctccatccaggccctggggggaacaatggggtgcagtgggtgtcacagcagtggccgggccagtgagtagggggagctttgacatggggtggctgaccatactcgcctctgagtccctgggtgcttgggccccatcctcaatgcctttagctgcctcggctccaggctctgcagggcaacgaagccagtgagagggacggagaggaccactgggatcccctcatctggcacttcaggcaccccagttctggcatctgcctgaggcccccagtccctaccttcctccaaacttctcctcccaccaactctcccaggtcagtttgtatttccaggcctttgctcctactggtcttattgcagtcagggctgcctctccacacaatgcctgtttgcctggcaaacttctctaaccctgccctgtccaatgtggtggccattagctacaagtggccatttaa

SEQ ID NO: 21585 - DNA, 1476 bp, Artificial sequence
  DNA replication origin
cctcccgcccgccggccggagcctggcgctccggggggcccgcgtcagcgcgcggttgccatggcgacgggcgggcggggggcgggggctgcgcggaaaagaggtcagcgctcagcctcgctgcggctcccggccccggcggcgcgggcggcggtgctaggctcgcctctgcctccctcgtggcgggcccggacatggggtcccgtggcctgagtccctcggccggcgcgcagggctcggggccgcgcgcagcctccccgcactgactgtcgcgccgtgccctgcgccaggaggagcggaggccgcgcgcggcccgccgagcgccttcaggatgctcatcaaggaataccacattctgctgcccatgagcctggacgagtaccaggtggcccagctctacatgatccaggtgagggcggcggggagagggcacccgggcaaggggtggagccctgccgaccccgccagccctgccccggggctgggaccggctgggagcccggaggaggcaagagaggccccccttcagatgtgggaatggggaaggactgtgggaagaggggcaggagggccgagtggtgcttcccatccgctaagtgcccagccctcctctgatctcctgtaatcctcctcaggatctgtaatcccatcggggaaggaaaaagcgcccaggaggcggcaagaatgaggaggggggcctccgcggcagaggaaggcgggagggggtctggagaagtggagggtcctggccatccctggaggtcagggagatgtggtgaggaccaggtgtcaaacctggagcagggacagggcagcaaggatgggagggcgaggaggctctggtgtagggcagtgagaagagtgggccagggcaggccctcagcagtggccgggttggtgcggggcctgggggagtctgctccagatctgtccccagcacagcaggaccagaatctcataaagcaagagggcccggaccccgcctcgggcttgaaagggccatctgagccccggagcaatagaaggcaggatctgggggctctcaagctctgaggggtgtggcggagctgggattgggaggcggccagggcctcccagagagggagggggccagggtcagggcctctgagagctggaggccccttttcctctcctagtcccttcttccttgccagccaccccggcctccttgccacctgccagcacatccagtatgctcccaccttggggctgcactggcttcccccggccttgagcacctcctcctacctcacctccttaaagtcatgttcaagccatggtcacattgtgttattagcaaggccttccctgactatcagatcaaaactgcagcccccaaccctcatcacctataccctactctaggctttcttttcctatagcacctagcgccttctaacacaccacataatttgctttttccttttgtctgtctccttccactagaatgtaagt

SEQ ID NO: 21586 - DNA, 976 bp, Artificial sequence
  DNA replication origin
gaactaagagtctttggggaccccaatcagcacagagggactaggaagagccagaatttaggcaatggcctttttcccactgcccgggggaaggaaggcaggggcctccctccctgcctcctccgctgcaggcggggctgcccggaccccgccggggtggggagggccagccgggcccaggaagggggcggggcggccgcagtgacgcggcgggcgtcggggagggactgcaggggcgccggcgggcggatcgagaggaaggtcggggccatgggccggcactgcgcctcgggagggtccggccaccgctggaacccgaggccggggctgggggcgctccgggctccgacccacgggccggccggccctgcccgggctgggtgaggggcgcccgcctcaagctagaggtgagccggggcgtcggcaggcgggccaagagcgcggcaggggaccgggacgccggcgagcagagggaagtggggacaacggggcctctcgcttgctcgcggggtgcgagtgggggatggaggggtgcctgcagcggaacctcggtgccagtctggggcgcaggtggacggagcgggtctccagggccatggcccgtgggataccaagtggagccactctggcctcagcctgaggagggctcaccccctgggaagaggacggagtggctgcctaggcgcgtggagagccggcgagggccaggggtccaggaaggatgctgggagggggaggtcgaggacccggctgcccaagaaggcagatctggagggcggaggagattaccggtcccggaaggtaggttcgggtgcagggcgtggggaaccctggcagagatgctgggcgcactgggccactccgcgcagagacactcggggaacaaagctctaggtggacgtccgagagtgggggacttgggaccccgccgactccgggaaggggatgcaaggggcgggtccccgaggggccggtc

SEQ ID NO: 21587 - DNA, 2073 bp, Artificial sequence
  DNA replication origin
gctagcccctgcatggtgccacaaagcctcccccacctctgccttccgggtccacaagtccggtcacccagccacccggagtctgggcaaaggcctcacgaggcaccccaaggctgggttcatgggatcccacccagcctgctacaaggtgctggggcagtgacggcagcaccccgccagcccctccccttgacactgaggccaagtgctggaagcagcagtgccctttctctctgagaagtcagagaccttcagggctgattcagaggctggggtgttgtcagggcattagggcgtgtgagggagtggcttacgtgaactggcatttccatgctgccaggcatcaccgccaatccagaggaagcgccctccaggcccaggctgcccacagcgccaagggctgtggaagcagccaggccctgtgctgccccctggtggcaccacaggaaggcccagggctctcagcgccacggctggggcggagagggcccaggtcccaccaaaggctgatggcctacagaggcaagtcaaacctcatttaatcacaccctccccatccatagtctcctcttcccctgtctctgcctggcccacccaggcttagctgaagaaccagacccagaaaggctcagagctgagagcacaactccaaatcatcttttattaatataaaaagggcatatttagcaaaagacacacagataaaagagtcactatggctcaggacacaaggcagggaggtgccaggcctgtgcccctgctgggggagaaggaggctcgggacaaagtgggagaagtgctgggaagggctgagcggtaggggccacaaaagttccggtgggcaacactgtcggcaggtcatgggtgggactcatggggacctcgctgctaactcttgttgtgggggggtgtccttagtgctgccacctggagggccactccttggttcctggaggggacccaccaagggacacaggacaggaagcccaggatggttagtgcaactcgggatgaaggccagggagaagcgggtgctctgcagtggccggataggtccagacgctgaggccgaggcgcttcctgttacgtgcgggcgttccgctctgtctctgccaggcactctctgactagggcccgggcatggatgatacctgggggtggggtggggtctcagcaaccctccacagccccacccactgccctccagaggaggacccctgcctccccactccctttccactttcggcaaaagaaattcaaatctaatgacggctagatgaaattagaggtttggttaatcctcaaggttgccctgttgaaatacaaattcccatgctcttccctggaaatggactcaatttcaattcgattcaaaacacctctctggtagtaatactggacatcctctaggcttggctcaggtggcctccagatgtccttccttccctcatgaaggatagtccagtgtcggtttcctgagcagggcggcctggcctcacttacctctcttcaggcgctccatggcgctcttgctgccagcataggtaggccggatctctttgcccatctcctctatgactgacagcaggtccgtgtaggtgctctgggagccctgggcgccgggtggcttcatcgcctatgtcaaaagagaacagggcagtgagctcaggcacctggcggggagggggactccagtccgcatccataagcaaggctttggccccactcacctgcacgtagcccatggaaggcggtccaaagtcgttaaacagcggtctgaaaggagcgccggctcctggcactgagcccgacggcgacgggacgcttcctgcagcaacaggcgcgagtaagaggtcagcgcggggcagggacgccgcctcccagcttttccaagcccaggaccgggttcgcccgattccctccaaaggatgcttcattccatgctgatcaacttcagggacaaatccctcccactgcgctccacctacaagcccttacgtgaccacgcccacttcacaggccagcaaactgaggctcagcgagggtaggcggcaggcccagtattgcagaact

SEQ ID NO: 21588 - DNA, 1108 bp, Artificial sequence
  DNA replication origin
gttatcccttgtggccattgacttactgcaatgtaaagaagacgttgcttccctgtctcagagtataaggcctccttgagtacagaggccatggcctgttcatttctgtaacctcagcgttcagcacaaggcatgggacggaggagggagtcagaacatggtttttgtgtgttttttttggggggggggtttgagaccgagtcttgccctgtcgctcaggctggagtgcaatggcacgatctcggctcactgcaacctctgttcaaacgattctcctgcctcagcctcccaagtagctgggattacaggcgcccgccaccacaccgctaatttttgtatttttagtagagatgggggtttcaccatgttggccaggctagtctcgaactcctgacctcgtgatccgcccgcctcggcctcccaaagtgctgggattacaggcgtgagccaccgcgctcagccagaacatgcttgttggatgaatgaatgaatgaatgaatgaatgactgtcctagagatgaagatctacaaagctgggagcatgaagatacacaaggccagagaagtttgagtttggagaaggagcctgggagaaagggttagggagtggaggagggtctgaggtctaactctgtggggagtgagacttgaggggaggggtctgagtggtggagtggaaaggtatgggggccctgtgggacaggaaggcggagaatgaaacaacaagcactttatgactattcatttaatccacacaacccaatgagatcgtcattttccccattttacggatggggaaactgaggcatactgaggtgagaaacttgcctgggggaaatcgctagtgggggtggtgctgagatttgaacccagacggttggctccagtcggtgctcttgaccagtttggtccggggcccggcacgcaagtaatcccgaaggtttgccctacggccattgtcactaacttaggcagcagcgcggggccttgggggtgcgggtaaaggggtctttgaggtcgcccttagacctgaggacgagccaagccgcaggaagaacggtacgtggcggcatccatgaggggcctgttgccatgggaacaaacgcag

SEQ ID NO: 21589 - DNA, 1287 bp, Artificial sequence
  DNA replication origin
caaggagcagggggaccccgcgccaggcgtccagggctactcggtgctcaacagcctggtggggcctgcctgcatcttcctgcggcccagcattgccgccacccaactcgtatgtacggccacccgcccgccagcctgcctgcccttgcccctctcccaccagctcacctgcccttgcccctcgcactccagcccacctacccttgcccctcgctttgcctctcctggagctagggggaagaggattgagtggggacatcagagcaaaggtacacagatctggggtgggggtgcagagaggggagagagcaatgactctagaaatggaagagagatcaacagtgacattgaggctggcgggaccaagtctgaggttctgcccaaaccccagatccaccaccagcaaagggagccccctgccccagaagagggtgatggagtaggtgaggacggcccaaggagtgacctaggccagaagcagggaagggggcacccggttacccaggccagtgagtaggatggggtgggaaccagggccgagcaatcagacagacacaggccctgcgtgtgcgtgttggattgtggggctgggtggggagccccgggaagcaagaaggaagggcacagtcatcagtaggagcagggaattcctaacccctctgtgcccttcaggaccgggagctgcggcccgaggagattgaaggtaaagggttggagaaggaactggttccctgaaggggaggtggcatggggggcatggggtggggacacagggttgggggggcatcgggtgggggcctcagtgtttccaggaggaagtgggagcaagaaggctgcaggggaccagtttagggaaatggggacaagactgagcagggaggggatgacagacccccacccagctgtcattccttggtctcactcaccaggcaggtgacagggccccttttatatttgttcattcagctgacacttcctgggtgcccactgtgtgcctggccctggctgagcactgggaaacatggccagctagacagatatggcccgtgccctctggagaccaacgtcaattagtcagctacaagtacaaatggtgcatgtgctctccaggaaagggacaaatgggccgggggaggccacatgtagagggatggcttcctttagtaggtgacataggaccaaagaggaaggggaagagtgaggaaatctccaagaggtcagaatttgtttcccccactttctttctttcttcctttttgaaaaatttcactgctgtatccccagtgc

SEQ ID NO: 21590 - DNA, 1249 bp, Artificial sequence
  DNA replication origin
cttttcctggttagacatgcctgagagtgggcttctctggacagatggggtctgtcacatagccccagaagctggcccagccagcctcagctgtttgctgagggaatacatgaatagatggccgcatgtggctgagagaggccagagccaccagctcaggtggcagcacctagtgggatctggttcccttagacaaaggccagtgtgggggacagatgaataaatcatgaggggcctggaatggagccggggcaggatgatgacctcattctgggagttgaagagcgggcagctgggtggggagtgggctggggtcatggcaaggaagcctgagaggccagcaggggctgcccggcccacctccaccccttttccttgagaagcaagaggttgaaggtcagcaggaccaggtggaggtcctggcagaacgcagggaggtgggcaatgcagagggaccctggggaggagagggggctagcacagagggaccctggggaggagggagggaaggagggggctagcacagagggaccctggggaggagggagggaaggagggggcagcacagagggaccctggggaggagggagggaggcagggaggtgggcagcacagacggaccctagggctctgggctggggagatggggaaggcctttccagaattctggagctctcctgggagcgggatggtggggagaataggaagagcaaggaaggacagacagaaagaccaatgcaagaaaggaccttgcagcaacagagggaaggagccagcagagagatgggctgagtgggtcagagacggcagagacaccactggatccagactgacagagatggcggcgagtcagaggggatggagacggggctgcaggcaaaacagacacagaggcagagggggcacagaggggcaggcggtgagatggaaactgagcaaggaggtgtgtggggcatcaggtgcgcgtgagccagagagatgcaggcagaacactgcgggggaggaggccaaaggcaggcaggagggccgaccactggggccacaaggatgatcaggtggagccccgggcacagtctgtgaccagcatgaggggcttcaccaggctgacagggccacacgaggggccacggggagctagggaggatacaagactctggggacacggggctctcccagtttatggaggaagggacagaaagaagagtagcagggacccaggccacacctgtggctgcccacaagaccactc

SEQ ID NO: 21591 - DNA, 1756 bp, Artificial sequence
  DNA replication origin
ttcagacttctcaatggcccccattgcccttaggagactccaaaccagtgggttcaaggccttcgggacctgggcctactgcccgcccatctctatctccttacccacccgacacaaatgcaagcgtacacacacacacgcacacacatgcacacgcacgcgcacacacgctgcctctgctgaactggtcccaggtccccaaatgtgctctgtgtctgcatattttcctcagctaaaagtgccagcacctccatccagaaactggcgacaaatcctcctccacctctggctactccaggaagccctcgccaccccaggagatcagaaaccaccagttgctggaggtctctgtccttgcactcgcccccatgacccgttacttggctggttgatgtcccaggcaataagggtgcaggttgtgtcttgtcccaggcccctgggcccctggcccagagctgacccagcccctgcaccctgacccaagaaggggtcagcccaagccacctgaggggtaaggggggtgagggcacaagaagcccctttctttgttcagcccccagtgcccaaccctggtgcagatgctcacatagttggtgtagatgagggagatgtatttgcagcggaggtcctccacgccgtcattcaccatgtccaccagggctgcctcctgctggtccttcccatagagccctggggttgggtggaggggagcaggccgcgtgactgggcgcctgatcaacacacagtcactggggatgggccaaccagggggctgtctgtgagccccagcctgggaggaggggaagaggatgtgcgtggaaggatgagagactgccacacagcaggtgctcagagctcacctgacacctgggaggcagcctggcacagggcaaggattgcaggcacccaggcttgaccttgggcaaactacgtaacctcagtgggtctcagtttcctccactccagagggctgcggggcagctgatttaaacaaaagggctccgggggcagaggcttgcccatgcctgccctggacttggaggttcaagactcaccaagggtgcggcccaggtgacgcaggatggtattggactggtacagggtgaggtctccgtcctggaacttggggagctgcccgtatagctgttgggggaggcatggctcagggaggggcactgagcttgggcgtcccccgatcctagtcacagccccctaaggcccagcaccccctccccttgcccgggcatggtcacttacgcaggaggctttgagtgagccctcctgccacgtctccacggtcaccacctcctccttccagctctggccctgatctgccagcagcatgcgcagggccgcgcagcggcctgcggggagggagaagtacgagatgtggggaccgggccgactccgcctcgcagcaacccggggaggggtcaggagtgcagggagggaacagggaaacaggttcctccgaagatttcacacaacactggggcggggagcaggcatggcgggagaggcggggaacaggaaggaggcccggggtaaaagccacacgacggagggataagggggttcggatctctccgggtgggcgaggggctgtgggctgcagccccagcccctgcctcccttccctgccagacacatgctcctacctcgaactgggaaatagaccacggtgtagggcggcactgcagcgaacaaagaaaagtttgctggagcccgggggaggatgccaaggcgcggtgagcgc

SEQ ID NO: 21592 - DNA, 2151 bp, Artificial sequence
  DNA replication origin
tcacagacagccccctggttggcccatccccagtgactgtgtgttgatcaggcgcccagtcacgcggcctgctcccctccacccaaccccagggctctatgggaaggaccagcaggaggcagccctggtggacatggtgaatgacggcgtggaggacctccgctgcaaatacatctccctcatctacaccaactatgtgagcatctgcaccagggttgggcactgggggctgaacaaagaaaggggcttcttgtgccctcaccccccttacccctcaggtggcttgggctgaccccttcttgggtcagggtgcaggggctgggtcagctctgggccaggggcccaggggcctgggacaagacacaacctgcacccttattgcctgggacatcaaccagccaagtaacgggtcatgggggcgagtgcaaggacagagacctccagcaactggtggtttctgatctcctggggtggcgagggcttcctggagtagccagaggtggaggaggatttgtcgccagtttctggatggaggtgctggcacttttagctgaggaaaatatgcagacacagagcacatttggggacctgggaccagttcagcagaggcagcgtgtgtgcgcgtgcgtgtgcatgtgtgtgcgtgtgtgtgtgtacgcttgcatttgtgtcgggtgggtaaggagatagagatgggcgggcagtaggcccaggtcccgaaggccttgaacccactggtttggagtctcctaagggcaatgggggccattgagaagtctgaacagggctgtgtctgaatgtgaggtctagaaggatcctccagagaagccagctctaaagcttttgcaatcatctggtgagagaacccagcaaggatggacaggcagaatggaatagagatgagttggcagctgaagtggacaggatttggtactagcctggttgtggggagcaagcagaggagaatctgggactctggtgtctggcctggggcagacgggggtgtctcaggggctgggagggatgagagtaggatgatacatggtggtgtctggcaggaggcgggcaaggatgactatgtgaaggcactgcccgggcaactgaagccttttgagaccctgctgtcccagaaccagggaggcaagaccttcattgtgggagaccaggtgagcatctggccccatgctgttccttcctcgccaccctctgcttccagatggacacaggtgtgagccatttgtttagcaaagcagagcagacctaggggatgggcttaggccctctgcccccaattcctccagcctgctcccgctggctgagtccctggcccccctgccctgcagatctccttcgctgactacaacctgctggacttgctgctgatccatgaggtcctagcccctggctgcctggatgcgttccccctgctctcagcatatgtggggcgcctcagtgcccggcccaagctcaaggccttcctggcctcccctgagtacgtgaacctccccatcaatggcaacgggaaacagtgagggttggggggactctgagcgggaggcagagtttgccttcctttctccaggaccaataaaatttctaagagagctactatgagcactgtgtttcctgggacggggcttaggggttctcagcctcgaggtcggtgggagggcagagcagaggactagaaaacagctcctccagcacagtcagtggcttcctggagccctcagcctggctgtgtttactgaacctcacaaactagaagaggaagaaaaaaaaagagagagagaaacaaagagaaataaccatggtcactgtcctggagcaccacacagtgtatatagaaggagaaaagtctcatagaaacatgctttctaggcacagcacgtgcctgtcagatggacagactccaggatggagggaaatgagggattctgggaaggagggatgtgaggagttccctgtcctgggggattagctgagtagctctgagcagcccaggttggtgggagggtcattctgcttggatgggggctttcctggcttcctgctgacttgtgagttttggtgcatcctaggcaagcaatgacactactgtattaggattctccagagaagctaagccagtaagatgctgtagggcaggca

SEQ ID NO: 21593 - DNA, 1638 bp, Artificial sequence
  DNA replication origin
ttggctcctccccatcctgcaaggcctaggtctcagttgctgggatgtgcaaatagtggggggtcctaccagggaggtagggttgggggttacaggacggtcttagccctaggaggccctgacccacccggcttgggccctaggccagccagcttcggacacacaccgttcggggcacgagggtacctgtctgggaggagacactcacctatcacggcttcacccgccaggatgctgagtgcaagacccttaggtgaggatctggcctgggccacctgggggtggagcagagggatggggctggcctggccaggtctgacctgggcggccaccaggctgtgtgtgtgcgaggacccatggtacagcgacagtggcaggcaccttccctgggggagctgcgggtgcccctgaggaagctggtgccaaaccgagccaggagctttgacatctgtctggagaagcggaggctggtgagtggggctggagcacaggtgggactgcagaggccaggaacctgtgatggggggagctggaggggaggaacagggagggggatctgggcagcatctggccaggatgaccgggctctctgccctttcaggccaagaggcccaagagcctggacacagcctgtggcatgtccctctatgaggtgggtaggacaactgggctgagcagagatgagggggcaggcctggtggcaggggcgtaggggacttggaggaacctgaggccagctctcataggccctgtgagccctcattgtcacaggggacagccaggtgacaaagtgagggtgactcccttgccagggcagcccagaggagctgtggggcactgggacaagcagagtccctgggggcgcagctgggcagagacctgccttgaggcagaggctgaaactggcggcatttgtccacggcccgagatgggaggctgggcgaggtggaagagaggacagatgggtggggctccctggctggggtctggcctgaggggagtgtgggggccactcctggggcaggctgtcctagacaggcccttgtccggaggcagtgagggtgactggcaggggtttgacgccactagagaccaaagacctagttagaacccctgtggtcggtgggggaggcagctgggaggctgagagcggggccctctaccagctcctccccaaagtgccgggtgccccgccccctggtggagccacaagttgctgcagctgtcgattagctaagcccaagtggctgaagcccaccaaggtggcatggacaggccacttcacccagcgccagccccgtgtaccctccgccccagatcccaagcacaacagcgcccggagcatggtgggtgcccacagagcacttccgcattcctgagaaccgcctgtgagcaaggtggtggggctttccgcaaatggaaacctaccctgcgggtgagagcagtgcatcctccccgggcttcctccctgagcctgttcagaagcaccagggcccagagtgtgacaaacgacactcagcatctggtccccagggaaatagggggtgaagagggtggggttttgaagagatctgcttctccttgggaagtgaacatcctctcagagccgcttgcctacaggggtggctacacacactg

SEQ ID NO: 21594 - DNA, 1038 bp, Artificial sequence
  DNA replication origin
gtgtccggaattggtgggttcttggtctctcactgacttcaagaatgaagccgtggaccctcgcggtgagtgttacagctcttaaggtggcgcatctggagtttgttccttctaatgttcagatgtgtttggagtttcttccttctggtgggttcgtggtctcgctggcttaggagtgaaactgcagaccttcgcggtgagtgttacagctcttaaggcggcgcgcctggagttgttcattgcgcgcctggagttgttcgttcctcccagtgggcttgtggtctcgctggcttcaggagtgaagctgcagacctttgcggtgagtgttatagctcataaaagcagtgtggacccaaagagtgaacagtagcaagatttattgcaaagagtgaaagaacaaagcttccacagtgtggaaggggacccaagcgggttgccactgctggcttgggcagcctgcttttattctcttatctggccccacccacgtcctgctgattggtagagacaagtggtttgttttgacagggcgctgattggtgcgtttacaatccctgagctagacacaaaggttctccaagtccccaccagattagttagatacagagtgtcgacacaacggttctccaagtccccaccagggtagctagatacagagtgtccgttggtgcattcacaaaccctgagctagacacagggtgctgattggtgtatttacaaaccttgagttagatacagagtgccgattggtgtatttacaatccctgagctagacataaaggttctccaaggccccaccagagtagctagatacagattgtccactggtgcattcacaaaccctgagctagacacagggtgctgattggtgtatttacaatccctgagctagatacaaaggttccccatatcctcaccagactcaggagctcagctggcttcacccagtggatcctgcaccggtgctgcagatggagctgcctgccagtcccgcgccatgcacccgcactcctcaccccttgggtggtcgatgggact

SEQ ID NO: 21595 - DNA, 1338 bp, Artificial sequence
  DNA replication origin
gggcagtgcagtgcctaagagtctgggctgtggagtctgagagctctggttccaatcccagcgtggggcccttaggcaaggtgtctctcctccctgaaagcagtctcaccagccagagacagtgttggccctgccttatgggctgttgtgagggtgagatgaattgactccaagtacttggcacccaggaagtgtccattgctgtggggcatggcgtgactggaaggaggagccccagccagcgacctggagtggtctgcccaaggtcaaggccccagtacagcagaagcaagagctctagagctgtcaaagacctttattcagtcctggagtggagctggcctgacagggtgaagccaggggctgcttagggcgggccagaccctcagcccctgagcaggtcaggccggccaggcggggctggtaggtaccaggtgccagcagctgcagggcaaactcagtgatgacagctgtgaggccccagacccggtgtggtccatgcaggaagacgggtagtgtgtagcggaagtggccaccccggcagaagtgggtatagccctgattctgcgtctgcagcaggtgggccagcggcagtgcaaacacctcatctacctgcaggcaggaggcagagagggtagacagaggactggaacagcccaaccccctcatatcccccagctcacctcctccgagttgggcctgaggctctggggatccagtgggcctacaccagcaagcactggcaccacggtggccttttgctggggaagagggcaggtggtcagggaagcatggccttcgctgggtttgaaggctggggaggggagtgtgagaggaagacccctttgccatgcataggcctttggtagtcatgttcgggtccacctgcctgtgtcctccagccatgctgactgactcaggtcccctcaaatgcactagacctgttccctctgcttaggacaatctcccacttggcattcaagcctgggttcaatccctgcctaccccatgaagcttccctgaccctaatccaccaaactgagtggagctggcccaccccatcgccctgggccacctctactcaggacaccagagcctccccaatcccttcccgagggggtgtgtggggtggtgcatgtgaccaggcaggttaggggcacccttccacactttgtgcccgtgggggtccatgaccactctcctggtccctggtagcccagctccagggcaggcacagagtgagtgaatggggtggggtggcctcagccaagtggcttaccggatcatacacaggccgcagcaggccccacacgtgctcctcgggcactgccaggccca

SEQ ID NO: 21596 - DNA, 784 bp, Artificial sequence
  DNA replication origin
tgtcggccgagggcgagctgcgctgccgccggctgctggcaggggccacggcccggctccgcgcgcggcccgcgtcggccgcggtgctcgtgccgctctgctcagtgcgtggggtcccggcgctgctgtacacgctgcggtccagccgcctgaccgggaggcacaagggcgacgtcaggtacagcggccgggaactcctcgccctttgccggaggctacaggagcccggggctggcagggacctctggcagggcacttagccccttcgagcctcggtttccgcctccgtaaaatgggtctggggagagtccctccgcccaagggctgcagcgagaggtcagcgatccgtgtccgtcggccccggtgcacctgccggggcgccacgtcctcgccgcgtgggcccctcgtacgcgtccttgcgcgcacgcctgggccgggacacccctttgagctgtttcccgcttagagggcggacgccgccccctgccggcgactacggagaggttcgggccccgcccggcgggaattaagaacatcctgaggacaatgtcagtgttgctggggccaccataggccgaatttgggtatctgagccccaggatcttcttgcccctgctgcagaccctcttatcctgcgctgtcccgggcctctcttccttatccccattgctcagggaggtaaactggcctccagaggtcgcatggcttgcctggggcctcccagtaaactaggggcagaggcaggcgacacttcggtgggccagtggccccccccgcactgccg

SEQ ID NO: 21597 - DNA, 1207 bp, Artificial sequence
  DNA replication origin
gggcggggcctgcgcgggagccggactcggacgttactgccaaagggcggcggggcctagtaggcaatcgaggttggggcgggctgggggcggggcctggaccggagcttttgctacgaaggactggggggcgtggccaggaggactgtgcttccggcagggccgggccgtggccgggggtgtggccgcggggagggagatgggcgcggagctgcaggacctgccggttgtgttctccgagatcctgaaaccacgcgaaccgtgaagcgcccggcgaccgtcctcggtcccgttgggtcctggcgttggggtgtctgatgaggccccgccggcccccactggtccgtccctcccctaggggctccaggatgtacggagccgggatcccacggggacgcccctccaggaacccgaggtcgatcggtgcgcgagaggagcgtccggcccagccctccctccggtcctccctcccgataccgctgggtggcgcgcgccgcccccagtcttgtcttcccctctggctccgtcggactccagccccaggcctttgacctccttgtcccagcgtccagagctcttctcccttcctgccttgagtcttgaccggattcccaaatccctccccctttcctacctcggcccctgtggtcactgaccaccgtggttctgcgcccttccaccagaccctgggcttggggaccagatgaccccagccttgcgcacagcatttaaacgtggggtggcgggtgtccgccatgctctgctgtgtgacgttgagcaggtcccgcgcctctctgagcgccagtttcgatcctcatctgggcaagtgcagccctgccactgggctggagtcaccacttttaatattactgtgtgctcccagggatgcggacggcactgggcagagcttcgggatgcctacagggctgatgtggggactatgatgggtctgggagttcctgaggcccccacccaccctgaccacgacgacagaagtgctctgaccactcatgccaaatagtttaatgttagggggaagggagaggtaaggcagggttttcgggagttacccccaaagcaagagggcacagtattcaggctgctggggttgggagatagaagtcctggttccaagcttgccatggtcccagccttgctgtgaccctgggcaggtagcctctttctctagactttcacctaccctgct

SEQ ID NO: 21598 - DNA, 962 bp, Artificial sequence
  DNA replication origin
ggactatgatgggtctgggagttcctgaggcccccacccaccctgaccacgacgacagaagtgctctgaccactcatgccaaatagtttaatgttagggggaagggagaggtaaggcagggttttcgggagttacccccaaagcaagagggcacagtattcaggctgctggggttgggagatagaagtcctggttccaagcttgccatggtcccagccttgctgtgaccctgggcaggtagcctctttctctagactttcacctaccctgctctccttgagacagagatggggctggagggggcggggcagaggctgattcccacacccggtgtaaggtccagggtagcagggcttccccccagggcttctggcatcactgggagtcctggccaggccccaggcacaccacagtgggggacaggagccccagcccagctgggagaggcaggcctccttgatccctatcagcccggatgttggggagggggtatggtgctggtcgggtccttgggatccctaggtggctcggggctccagagtacaggctctgatacgtgacaggcctgtaggtggccggggccagcaggacctcaggtgggggcagcagctgatgatggagccaagcaggggtcttggaggtggaagctgaagctttgttggggtctgagggaggaaatgagtggactctgggcctcccatcgcatcctcatccctcatcccaggcctgccctggtcccttcctgctcctccttcccaagttacctacctctcagccttcgcctttgcttttccctctgcctggaatttcttcttcaccttctccctctgtccaaacccttcccagtcctccaaggcccagcttgagagccacctcctgcaggaagcctgcctggcaccccctgcctgtgctctttgccctgagccccatattgtcttaggcatgtctgcttccccctccgt

SEQ ID NO: 21599 - DNA, 1240 bp, Artificial sequence
  DNA replication origin
ggtggggtgagcagtgttggagtcggcagcagccccttcaccccgcctgtattgttcaggcgtgactctggttggggaagccctcaccacctcgctgtgctccccaggtatgccttccacagctcggcctggctggtggcgggcaaggcagacccagccacacctggccgcgtgcacttccaccccgactcgccagccaagggtgcccagtggatgcgccagattgtgtcctttgacaagctcaagctgaccaacaacctgctggatgacaatggccacgtgaggccggggccacggtggggacggaagggcctggggtcagggctggtagggactttggtgtccaatggccttggtgcccagcacctctgcctgctgctgatggtcaaggcagggcggggagccggggtggcgagctcacctggctgggggtggcacagcaggaagggctgtccaggcaggtggaaaagggggtgggggcgggggaatgttccagcatacgttgtcccccgcaaggagagggaggacaaggtatggaacgcccagcctaggccgggcccgctttatgtgtggacacagcatcattaacacttggtcaaacagccaacgatccctgccctcacagaggtcacttcctggggcaaaggcagggtccagaagacactgtccccagcgtctcagatagggacaaatgccaaagaggaagcagaggtacggaaggggggcggagaaagggtgctgctgctctcagggggcgcagggagctgaagacctgaaggaggtggaggatgcagcggcccatgcccgtcagaggggacagtaggtgcaaaggccctgaggccagagaatcctgggccggcagaattgcaagacgcatccatggggccggagtggagccaggaggggaagccaaggaggcgaatgcctgaggggtcgggctgacttcggggggctctggcttttaccgtgtggggtggaagtcgctggacggttaggagcagggggcatatgatgtggcttcccgggcagctgtgtggagaaggaacagaggggtaaggcggggacaggggacaggccaggaggcaaccgaggaaactggtgaacgcgacagtgacgggccagcacacaggcagtgggtggcagctgggatgtggggtgtgagaggacatggaggcaaggatccatgatccaaaggggcctttgacacggaactgcagcctctccagctcagaccctgtgc

SEQ ID NO: 21600 - DNA, 1963 bp, Artificial sequence
  DNA replication origin
ctgggcctccctcccttctgggactaaacgagggactcggagggttctttgcttcagagatcacagagctttgaggtcgcagatggggaaactgaagccataggcatgccctagccctgaggagggtttggcacctgctctggggagggggtggcactctgctggtcgtagaaggaagcagaagcagaggagagagctccggggctggtatgggtgggcacaggtgcaggtgggggtaggttggcagagctgagactgccccagggcatgaacccctctgggctttagcctgagggcccaagggaaccccagtggggtctggagaggaggaaggatcaggaccctgggggtgggggaaggggctcagggggacactcaagaggattgccaggcacctagcaacgggattctgagcatcccagcccaggggctcaagaatggtgcgcaaatcctgtgtctttgtgtatccgtgtgtctgtgtgtgtctttgtgtatccgtgtgtctgtgtgtttctttgtgtctgtgtgtctttgtatagctttgtgtctttgtgtgtctatgtgtgtgtgtgtgtatggctgtctgtctttgtgtgtgtatgggtgtctgtgtgtgtctgtgtatgtatgggtactgtgtgtctttgtgtgtatgggtgtctgtgtgtgtctgtgtatgtatgggtgctgtgtgtctttgtgtgtatgggtgtctgtgtgtgtctgtgtatgtatgggtgctgtgtgtctttgtgtgtatgggtgtctgtgtgtgtctgtgtatgtatgggtgctgtgtgtctttgtgtgtatgggtgtctgtgtgtgtatgggtgctgtgtgtctgtatgtgtatgggagtctgtgtgtatgggtgtgtgtatgtgtgtatgggtgtctgtgtctctttgtgtgtatgggtgtctgtgtgtgtatgtgtatatgggtgtctgtgtctctttgtgtgtatggatgtctgtgtctctgcgtgtatgggtgtctgtgtgtcttcgtgtgtccgtgtgtctttgtgtgtctgtgtgtctttgtgtgggtgtctgtgtttctttgtgtgtctgtgtgtctttgtgttctgtgcatcttcatgtgtatggctatgtgtgtgtctgtgtctttgtgtgcctttctgtgtatgggtgtctgtgtgtgtgtgtctgtgtgtgtatggatgtctgtgtgtgtgtatgggtgtttgtgtatggatgtctgtgtgtctgtgtctgtatgggtgtctgtgtatgtatcagtgtctgtgtgtctatgggtgtctgtgtgtctgtgtgtgtatgggtgctgtgtccatgtgtgtctgtgtatgggtgctgtatgtgtgtgggtgtgtgtgtccatgtgtgtctgtgtgtgtatggatgtctgtgtgtgtatgggtgtttgtgtatggatgtctgtgtgtctgcgtgtgtatgggtgtctgtgtatgtatcagtgcctgtgtgtctatgggtgtctgtgtgtctgtgtgtctgtgtgtgtatgggtgctgtgtccatgtgtatctgtgtatgggtgttatatgtgtatgggtgtgtgtgtccatgtgtgtctatgtgtgtatgggtgtgtctgtatgtgtatgggtgtctgtgtgtgtatgggtgtctgtgtgcgtatgggtgtctgtgtgtgtatgggtgtctgtgtccacgtgtgtctgtgtgtgtatgggtgtctgtgtgtgtatgggtgtgtgtgtccacgtgtgtctgtgtgtgtatgggtgtctgtgtgtgtatgggtgtgtgtgtccacgtgtgtctgtgtgtgtatgggtgtctgcgtatgggtgtgtgtgtccacgtgtgtctgtgtgtgtatgggtgtctgcgtatgggtgtgtgtgtccacgtgtgtctgtgtgtgtatgggtgtctgtatgtgtatgggtgtgtgtgtccacgtgtgtctgtgtgtgtatgggtgt

SEQ ID NO: 21601 - DNA, 1272 bp, Artificial sequence
  DNA replication origin
tttcccggctacagcctcagctgcgatgcccacgagaaacaggctggtggaggggcagaccccctacaaggcctgaaggtgccgttcctccacccgctcctcttgtggccagaggagagggacacccccgccatgaagagctctgaacggttgggtgaggacaagtgggggccgtgggagggccatggagcccccagctgcacgccagcaggcccggggctggcccacaccattcctcactccccacagcctctttacccctgagtttggcgagaccctcgtccgtacctccaggctccatgcctgcctcagcatcgctctatggattctcccagccctaaactggccccatctctcctctctgccctcatgtgagtttggttcttgaagcctctagtggtccctggggccagactctgtggccttggacagggagtctgccatctgagccacagtttccttctctgttgagtgtgtgagggaacatgttggagcccttagtgtggcggcagcaagctccccaggccctgtaagaaacacaaaagggtgcggcgggagacttgacattttctaaatctgggagggaacgctgcctgcctcacgccgaccttcagtgacaagcagactcagaagcggtcccaaggtgccaccataacctgggtgaaggccagcactgtgtgcttccagttccccctcggcatctgtagactgagtgttctctggaggtgtctggtgacatcctccatggaggctccagcaaaaccagtcggagttgggcaacctgacgctcggatgattcacctctgaatggagggcaagatgatatttggaagggtgtgggcccctgggatgctgggcaaacggagagcgggtgcctggatagtgggtctacagctcttcccagttccgagtcaattccaatgtccatggtgccaaggaacagaggctctggtgttgagcagacttgaaggtgatccaggcacatggagtggccactcaggggcttggctcctggctgtgctcttcctatctgggcatttcccatgagaaggcttcacaggccacctggctgctcctggcacacggagaatgcccagatgctgacatgtgccagacaacacatatttacacctgataggccacacacatgcaacatgcaaacacacatgacgggtaacacctgtgacagacactacatgacaacacacatgcacacatgatgggaaacatatatcacaggccgtgtgacgggaaacacatatcacaggctgt

SEQ ID NO: 21602 - DNA, 1174 bp, Artificial sequence
  DNA replication origin
agccccctccaaggcggagtggagccttgggaacccctcggccaagcacaggggttcgaaaatacagctgaaaccctgcgggcccttagcacgcgccccagcgcgggagcagggtcagggtcttcttgcgacccggccccgctccagatcctcccagctgtcggccgcggacccgggccgcgtgtgaccgcgctttgcacctcctatccccagggtccgccgagagccacgatttttttacagaaaatgagcaataaagagattttgtactgtccttactggggagtcccaggccgcgggggacggagcgcccctgggatgcacgcccggctggcccggcctctgggcgcggtggtgacaggccctgacctagggggaccgcagggtgtggggagtgcggcgccctactgggggcggggcgaggtgtccgtaggccccgcccaccagcccttcctccctcctgaggccccgccccccatacctgcctgcctttgccagccccagccaggagaagggagcggcggagcggctggcagagacagaggagggtgtgacggcgttgctggtcccccatgggtccagagggcgagacagactcccgaggcacaccctccaggggcctgtgtaggcatcctcggccctccagcgaccatccccgcgtcggacagggtctacttccgagccacggtggggtcaccctgtgcccagtaggggccttggaagtggtggttggaggccaggtacgctcggtgactaccctttcccggctacagcctcagctgcgatgcccacgagaaacaggctggtggaggggcagaccccctacaaggcctgaaggtgccgttcctccacccgctcctcttgtggccagaggagagggacacccccgccatgaagagctctgaacggttgggtgaggacaagtgggggccgtgggagggccatggagcccccagctgcacgccagcaggcccggggctggcccacaccattcctcactccccacagcctctttacccctgagtttggcgagaccctcgtccgtacctccaggctccatgcctgcctcagcatcgctctatggattctcccagccctaaactggccccatctctcctctctgccctcatgtgagtttggttcttgaagcctctagtggtccctggggccagac

SEQ ID NO: 21603 - DNA, 1271 bp, Artificial sequence
  DNA replication origin
gaactgtaccccacaacgagtgcgcctctgccccccaagatggtggagaggcccccagcttacgccgccagcacgcggggcaggaggggtgcgagcgactctggccaggccccagggacgggaaacgggtcgcgcggacctgaccggcgggagcccaggcactcacgtggcgtgagcgccgggggcttcagcacagagacccatcccatctgcccctggactcccgcgagccccgcgggcctctccgctcgccccgccgcccacctgccaggggaaggagcgcagtgcacgcgccgccaggaagcggcgctccaaactctgcagcaagagttcggtccccgcgttctcctcgggcgccatgacgtgggcggggccgcagcgttgcccggagaccgggcggaagccaggcctggactgaagagggggcgggcccagggcagtgggcgggggcagagagggggcggggcctgggggtagggtgaggaggagagtcgtgggggcggctctagggcggggccaggatgagcgttatgaggcgggacctggggtggggccaggatgagcgtcatgagggcgaggcctggggtagggccaggataagcgtcgttggggcaggtcctggggagagttctggttggcgggtcctggggcggggccaggacagggcgatcctggaagcggggcttcggaagcgtccaggttggaggcgtcctggagtcggggccttgcgtgggggcaggataagggtcctggaggcggggcgttagggtgggggtaaacgatgattgggttcaggaggcgagactcggagcagagcccaggagacaggtcttagggcggggctaagggcagacccggagaagggctcaggaggcggggccagggcggggcgttgactatgtcgtagcacgtggccaggcgctgctcggactctgggaggcggagcttaggacgggccgacatggggaggggcccagggtccgggaggcggggcagagtccgggctgcgggctgcgctcaggaggcgggccctgggaggcggagcttagggaggggcaggtgtcggtagggaccaagggactgggaggcgggtcggggctgggctcaggggccgagagggagctgggcttggggtggggccgagacggagcgaggggtccagggtgtgagaaacggggaggggtttgaggaggggtttggagtgtggctcaagttcgggaggcgttacctgcggagggtttgaggcaggcccaggagcgagcccacggtct

SEQ ID NO: 21604 - DNA, 1105 bp, Artificial sequence
  DNA replication origin
tcttagggcggggctaagggcagacccggagaagggctcaggaggcggggccagggcggggcgttgactatgtcgtagcacgtggccaggcgctgctcggactctgggaggcggagcttaggacgggccgacatggggaggggcccagggtccgggaggcggggcagagtccgggctgcgggctgcgctcaggaggcgggccctgggaggcggagcttagggaggggcaggtgtcggtagggaccaagggactgggaggcgggtcggggctgggctcaggggccgagagggagctgggcttggggtggggccgagacggagcgaggggtccagggtgtgagaaacggggaggggtttgaggaggggtttggagtgtggctcaagttcgggaggcgttacctgcggagggtttgaggcaggcccaggagcgagcccacggtctgccgaagcggggccaggggcgggccccaggatccggagctttgggcggggccgagtccgggttaggggcccgggaggcggggccggttagggcgagggtccccgggatcgtcgggtcaggccttgggccaacgtaggcactctcgcagttcctccgccttcaggaaggtctttttggcaggggccttaggggtgcgcgcttctgtcctggaggcgttatcctagcctcctctccatcagcgccacacatctggagcccgataggaaggagctttccctctgtcccccagcctttggactgtcaccaaacaagccatccgttcaccaaatacttatgaagctcctaccatgtgtctggcaagggagatgtaacagtgagaaaaactaggtgtggtccaggccctccaggggctcagggggtcgtggaagaagtggacattgaagtacttatcacacaaatgagtataaaagtacaatagcgatatctgccacgaaggcgagcagacagagctagcggggcttccaggaggagttttaatcttgcagggacaggaaggaggagttagctcctggggggcggaattgggggtggtggtgatatagacgtggggacagagtggaaaacaacaaaaatataattattttagttcaaagttattgtgtc

SEQ ID NO: 21605 - DNA, 946 bp, Artificial sequence
  DNA replication origin
ttcaaacatgtgcctttcgtatgctctccacgttatctgcagcatctgccaagaataataatgaatggtaaaacctaatctctattgagtgtcgatgatgcacttttaacgtgacatcttatttaaccctcactatatctgcaagagtagaagctattaatagccaattttcagataagaaaatcaaagcacagtttctataacttacccaagcagctagctaggaggcagctcaatttgagctcagggaatcagattccagaaaccatgttctcaattactacagcagatacctccccagaatctagtaggtggttaatgagtctttgtggaataaatgaacagaaggacaagcagtggatggatacataggtgggtgggtggatagatgggtggatggaaagataggtgggtgggcaggtggatgaatgaatgggtggttgagttggtgaagggatggctgagtgggtggagaaatggatgagtggttgagggggtggagggatagataaatgggtggacgggtgggtggatagatgggtagatgagtgaatgggtggatagatgcatggatgagtggatggatagatgggttggtgggtgggtaggtggatgatagctgggtgcataagagagtgcattggatgtatagatgggtgggtgggcgggtggataggtgggtaggtgggtggatggatgtatgcatgtctggatggatggatggatggatggatggatggatggaaggaatgatggatggatggacggacagatgaacagatggacttgagcatttattcagggtcctctaaagaattgagtgatttcctagggtgtgtcatcacctgcatgtgggtgggcaagggggcttgcctctgtaatactcatgattatgggtagtgctcagccttagtcaccactctcagaacactttattgactaggaa

SEQ ID NO: 21606 - DNA, 1389 bp, Artificial sequence
  DNA replication origin
ttagtcattgctgaatctgttacagacagtgtctcaatttcttgcaactcctgtatgaggtgggtgctgtgattatccacatgttcacttgttctccctggcctctttcaggctcttgcacttcctttgctcttttcctgccacggggcctttgcacatcctgctctttctgcctggaaagattttccctctccttacctgttcacctggtcatagtctcatctgacagtggagtcactacatcctcagggacgcctggccacactgactcagtcacagcaaccccctcttgtctgctttcatgacaccaggtgtcatgagctcagctacggcttcctatttctgtgcatgtcatccttccccttcaagactgtggtcaccgtgaggaccagggccatgcctgttcctgattctcatttgtgtctctggtgtttagtatatgcttacctagaatttgattaatgaatgacgacatacccattttacagatgagaaagttgaggctcaggaacattatgtaacttgctcagtattagatggtgatggtttgaagccatctggctggtcactgggtgcacactcttaaccacttcactatggttcttctctcatggtagttctccaacagcaggagtgagaggcaactttaggacaggcgtaaccagaatcccaggggttatcctagaaggtggtgtcaggaacatgcttgcctatgggccttcttactgtattgcataaaataccctgtttttctgagtcgcctttagtaaagaccttagcaatatttgaagcacagttgtcagtaggaaagggtgggtgtttatacttttttaaaaaggagtctatatcatatttatcttgtggtctgccatgccccctgatcttcttcagcttcagttatgcaaaattcacacttcttctcttgactgcctctctcttacctgttcagtttcttttctgtgttcgagattgcttagaatttttcccattactacagcctgcttcccacctgtatcccccagccagcttgttctggattttgtcaacaagagtttcagcgtttagtgagggctggactgaaggaaagccttggaaaaggctgtgtgatgaaaggtgagatacctaatgggcaggcagtcatcagggttaattcaaaggctggaagaagggctgacctggatgactggaaatgtctttgagctgaaggtcatgtgcaggtggaacgaagagggtgagccttttggggtgaactgcaagtatttgataagatccttgtccccatggttggggaagtcttgataagcatcctcaatgtgatggagggattagggaacccatggctctacctgtccagcatggcagcaacatgacacagccaagttattgatt

SEQ ID NO: 21607 - DNA, 1251 bp, Artificial sequence
  DNA replication origin
tccccaggtgcaggcagagcccccggagccatggccagcccttccggcagctccaaagccactggcaagccccgaggcagggatggccggcccaggagagaggaggacgacgtcactcccgaagagaagaggctgcggctgttgctggaggagggaagcgcacagcccgatgacggggaggacgcaccgcggccaggcaggaaggagaccggcacccagacaggtggcgacggcagaggagtaagtgacgcgggcgcgggggtccgggggtgccgggggtgccggggacgcggggtaggggcggcgggaggctccgtggccggccccgggttgaagttggtaactgagcgacaactccggcgggcgcggagtgacagctcgcgacggcctccgagacgccagctgccccttctcggctgtgtggcttcgacttcctgattctcccacgacgtccctggactagagacccgctggactctgcggctagccaaaaggggagggggagccccgcgtcctgggggcccctagcaggggaaggggcgggggttgcgctgagcgtcctgtctggggcatctgtctgggactctgtcagtgcctctcacctggcgaggggcttgtggcgggggtaggggggaagtccctggcgccaggcttggccaagccctgctctgctgggctgcgggctggcggtgctcacccagctcctcacctgccccgcatcttcctgtttttcttccctttctggttgggcagcgagagttgagaggaggcagatggcttacatcccagaaatcgctctcctctttccatccctacagagagggacagagagggaaagttccttgcatcccccgggacgctgtccctgtgagctcccggtgtcctgcacacgtgagcccctgagttaccgggcctgtgtgtgtgggatggggctccgtggccagcctggcctcctggagttcactttctgctttcctacaccaactcttcctgtgtggctttgctggccttccactgaggaggcacatgggtttggagggcagatgagggcccactggagagctgtacccctcagtgagggccgccaccttgatggtttttgatggataatggggttgacctctttgttctttccacatgtttttatgtttgaccatttgctcagctgagcttgtcttaataattggattcgtggttaatgagccccacatgggcgagagggcggccttcattcggaacccatttaggcag

SEQ ID NO: 21608 - DNA, 1806 bp, Artificial sequence
  DNA replication origin
cggtctccttcctgcctggccgcggtgcgtcctccccgtcatcgggctgtgcgcttccctcctccagcaacagccgcagcctcttctcttcgggagtgacgtcgtcctcctctctcctgggccggccatccctgcctcggggcttgccagtggctttggagctgccggaagggctggccatggctccgggggctctgcctgcacctggggaagaggaaggacccggcgcgagcggcctgtcggcggagctggggcgtctgagcgcgggctcggtgggtccgcgcggcgcggagctaggcatcggggcgggcgtgggctcctccgcgggccgctcgttgctctctggcgccctctgctggccgctcgcgcccaccgcggacacgccgggccctggcctgcgctgagctcgcctgccctggcccaagcagtcgctgtcccctgcctgcggccatgcccgctctggccaggccctgcacctcctccccgccccaaccaggttgcaccccgatggtctccctgcccaaggaggagagaagggacgccccgagagggtggacatcagccacagccaccttgtctttgctcttaccctgtgtcttgcatgatttggaggtggtgggaaaaccgaggctgctcaaaattcgtggagaattccgcctgcaggatgacatgaatgcaccttcgcgttgcctaccaacagatcttttttgagcatctctgtggaccaggcgtggtgatgggggaggggatattgtggtgaacatgacaggcatggccttcacacagtagggctcagccctgggtgagaaggcattgagaatggacattgtcaattgggcaaaaggaggccaagaagaagtgctgggggcatgggaactgaaaaagacaggaggctcagcatgtcttggcgctgggagattgacagcaacagcggctgttccaaaggaagcaacagctgagagacgtctcagagagttgttctcagcccagtggaggttgttcaggcagagggaacagcgtgtgcaaaagcccagaggctgggaaagaagcagaaagaggactgtggggctggagcgtggtgggcaagaggagaaaggtgtggtgggcagacagattgcctgggacccagccgtgcaggggcagaggagataggggatccttgcaggcccctagccggggctgaggcacagagacaatgcaggtgggcaaagggaggagacgtggagaaatattctggaggcacgccctgatgaatgagcccaggatgcactcttagtgtcagtgtggagctccttccttggctgtgtgatgagctgaactcgggggtattttctggacattgaggtgctacaccaagagtccaggacaggctgagcaccagcagctcctggcccacctcaaaagcaggagagacaggggagactggggatgctggggtggaaggggaagccaggaaggcaggagaggccagggaagcagaggaggccagggaggcagtggaggcaggagaggctggggaggctgtgtcctttccatgattctgcccaggatcctaggcccctgaactccctgagcttctccaccccaagcactggaaccatgttgcacaatggtctctccactaagctcctgatggcggaccctaccctgctgtgctccctatttcaaccctaacagctctcacagtgggcagcacatagtaggtgctcaggaaacactggtgggagagcacatgggtctgctcagcaccttcctctctcctccagctctcccctgtcatgaaataattctgataacgacacatgg

SEQ ID NO: 21609 - DNA, 2240 bp, Artificial sequence
  DNA replication origin
aggggggagacgggccggaggagcagtgaggggccgcctggtccccggactcagcctccctcctcgccggcctcagtttaccacgtctgaggtcggggggaccccctccgagtcccgcgctgtcttcaaaggcccctgtctcccctcccccacgttggggacgcccctcccagagcccaggtcacctccgggcttccgcagccccctccaaggcggagtggagccttgggaacccctcggccaagcacaggggttcgaaaatacagctgaaaccccgcgggcccttagcacgcgccccagcgccggagcacggtcagggtcttcttgcgacccggcccgctccagatccccacagctctcggccgcggacccgggccgcgtgtgagcgcactttgcacctcctatccccagggtccgccgagagccacgattttttacagaaaatgagcaataaagagattttgtactgtcctgactggggagtcccaggccgcgggggacggatgcacggatgccctgggatgcacgcacggctggcccggcctctgggcgcagtggtgacaggccctgacctagggggaccgcgtggtgtggggagtgccgcgccctactgggggcggggcgaggtgtccgtaggccccgcccaccagcccttcctccctcctgaggccccgcccccccatacctgcctgcctttgccagccccagccaggagaagggagcggcggagcggctggcagagacagaggagggtgtgacggcgttgctggtcccccatgggtccagagggcgagacagactcccgagacacaccctccagaggcctgtgtaggcatcctccgccctccagcgaccacccccgcgtcggacagggtccacttccgagccacggtggggtcaccctgtgcccagtaggggccttggaagtggtggttggaggccaggtacgctcggtgactaccctttcccggctacagcctcagctgcgatgcccacgagaaacaggctggtggaggggcagaccccctacaaggcctgaaggtgccgttcctccacccgctcctcttgtggccagaggagaggacacccccgccatgaagagctctgaacggttgggtgaggacaagtgggggccgtgggagggccatggagcccccagctgcaccccagcaggcccggggctggcccacaccattcctcactccccacagcctctttacccctgactttggcgagaccctcgtccgtacctccaggctccatgcctgcctcagcatcgctctatggattctcccagccctaaactggccccatctctcctctctgccctcatgtgagtttggttcttgaagcctctagtggtccctggggccagactctgtggccttggacagggagtctgccatctgagccacaggttccttctctgttgagtgtgtgagggaacatgttggagcccttagtgtggcggcagcaagcgcaccaggccctgtaagaaacacaaaagggtgcggcgggagacttgacattttctaaatctgggagggaacgctgcctgcctcacgccgaccttcagtgacaagcagactcagaagcggtcccgaggtgccaccataacctgggtgaaggccagcactgtgtgcttccagttccccctcggcatctgtagactgagtgttctctggaggtggctggcgacatcctctaggcaggctccagcaaaaccagtcggagttgggcaacctgacgctcagatgattcacctctgaatggagggcaaggtgatatttggaagggtgtgggcccctgggatgctgggcaaacggggagcaggtgcctggatagtgggcctacagctcttcccagttccgagtcaattccaatgtccatggtgccaaggaacagaggctgtgatgttgagcagacttgaaggtgatccaggcacatggagtggccactcaggggcttggctcctggctgtgctcttcctatctgggcatttcccatgagaaggcttcacaggccacctggctgctcctggcacacggagaatgcccagatgctgacatgtgccagacaacacatatttacacctgataggccacacacatgcaacatgcaaacacacgtgacgggtaacacctgtgacagacactacatgacaacacacatgcacacatgatgggaaacacatatcacaggctgtgcgacgggcaacacagcgcaggcagtgcgacggg

SEQ ID NO: 21610 - DNA, 1174 bp, Artificial sequence
  DNA replication origin
gcactccatccagcctaagcaacaagagcgaaactccgtctcaaaataaaaataaaaatagaactaaaaatagcagggagtgggctggcagtagtggctcacgcctgtaatcccagcattttgagacgctgaggtgggggttctgagatctggagttcgagaccagcctgggtaacaggctgtgaaactctgtctctactaaaaacacaaaaattagctgggcatggtggcacgtccctgtgatcccagctactctggaggctgaggcacaagaatggcttgaacctgggagatggaggttgcagtgagccaagatcgcgccaccgcacttcagcctggaggacagagcgagactctgtcttccaaaaaaaaaaaaaaggaaaaaaaaaaaagaaaagcagtgagtgggctgggcatggtggctcacgcctgtaatcccaacactttgggaggctgaggcaggaggattgcttgaggccaggagttcaagaccagcctgggcaacataggagaccctgtctctacaaaaaatttaaaaaatagctgggcgtagtggcgtgtgcctgtagttccagctacttgggagactgaagtgggaggatggcttgagcctggaagattgaggctgaagtgagcgtgccactgcgctccagcagtgggtgggggaagggagggagggggcgcggtggggaaacggagcgaccgtgtctggaaaaaagaaaagagcaggaagtatgcatacagatatgtgtgtatgtactgggctatggtgtgaaatcattcctgactgcgggttatagtcaaaaccccatgaaaagcatcactacagcccacgggtgtgtcagggacacagtgttgtgagccctgggaaggcagggcctgtggccagcactttatcaacactggcgcatgcaccctatgaggcaaagggatttgcattgtccccttacagtgtgggacactgaggtcgccaggggcgtggcgactgtaagggacagtgctggatgtgagcctcgcctgcaggaggcggtccaggaagcatgggtggaggggctggagaagttgagggccgcgtggcccgggaggctcccggaggagggaagggcctatctcagcgaggggcataggcggggaaggtgcggggcgaggcggccgcgggtccctggcatccctc

SEQ ID NO: 21611 - DNA, 821 bp, Artificial sequence
  DNA replication origin
gagggctgagactgtggtctgggctgttccagacttcaacactcaccccttgtccccccgcagggctatggcgtgtgctcggtggggctggagcggctggcttacctcctcgtggcttacagcctgggcgcctcagccgcctcactcctgggcctgctgggcctgtggctgccacgcccggtgcccctggtggccggagcaggggtgcacctgctgctcaccttcatcctctttttctgggcccctgtgcctcgggtcctgcaacacagctggatcctctatgtggcagctgccctttggggtgtgggcagtgccctgaacaagactggactcagcagtgagtatagctgtgggcactgggggggggggggcggggcagggggctttatggctatctgtgggtggttggcgagacatagacatcccagggacagatatggggtcccatggtcacatagggtcctgtggacatggcagaggcaggtggggcttcctgtggacactccgggggtggaagggaagtcttatggacacactggggacagatgggtagggtgtggacaccctggagacaggtatgggggttccatgccatggacattctgttaataccccagagcgggcacagggccccatcaacactggagggtcagtgtgaagtctcgtggctacatggggcaggtgtggggctctgtggacaccccttagggacagtgtgaaaaacacatcagggattctcccttttcataccaggggacagggcttaccctggcatagttttcatgacacttggagcagatgttttggtctctgcttcacgg

SEQ ID NO: 21612 - DNA, 1039 bp, Artificial sequence
  DNA replication origin
gcccctttcccggggaacacccagccccagtggtccaaacccagccccagtggtccaaacctccaaactgctctctgaaggaactctgcccttgctctcactctcccgccctccaccgctcctccgcggcctgcgtggctccaccctggtggctggattgactgtgtgccctactctctgctcacggtgccctcacccccacccttcccaggcaccaacagccacgggatcctcagcggcttcaacaagacggttctgcggacgctcccgcggagcggaaacctcattgtggtggagagcgtgctcatggcagtggccttcctggccatgctgctggtgcggcccgggatgggggcaggacagtcagtgaagcagagtgtggttctggggaccgagtctgcgagaaagggtctggatcggatggcatggcctgggtcgggttgtggcctcggggcaggccgtaggcctgggagcgcgatctgagttggggagctagggccgagtgctgcagagcgggcatgaggctcggaggcggggctgaggcctgtggtccgaggcaggcgtgggcatccagaggccaggggaaggagggaacaggcttggtccacagtttcgagctggagacaagatcttagaagactgactgagacctgtgagggggttggggacaggaccaagggtgagggctggaaggtgtggctcaaactggaagtgatactggacggcagaactaaggcgttggcatgctgcagcctggcgatggagctgggaggcaaggcccagtccgtggctgtgtcaggcggggcctagtgctgggacgcggggccgaagtctgtgggtgtgtccgaggggcggggactagcctggaaggcggggctgaggtctggcgcggggctgagaaggaaggttgaagtctatggatttgtctgaatgtgagttgtgaagtgtgtgtatgtgagagagaggggatggggccttgggctgggaggcaagaccaccgtctttcggagtgtggtggcgtggctttgtgctgagaggc

SEQ ID NO: 21613 - DNA, 1598 bp, Artificial sequence
  DNA replication origin
ccggtgagcggggacccggagtgcgaggcgcgggcgtcccctgtgggccagggtccccccggcgggggcggggcgggccggggggcggcgggcaccgggggacacgggttcggggcgcgatcgcgggtgcgagcggcgtgcgtggctcgcagctggacgagctggtgggcgcgtaccccaactacaacgaggaggaggaggagcgccgctactaccgccgcaagcgcctgggcgtgctcaagaacgtgctggctgccagcgccgggggcatgctcacctacggcgtctacctgggtaggtgccgctcggggacccggggccgccccgcccgctcccagcccggcccgggaaacagaaaccgcgggccgccgcctcccgcccgctctcacttcccctccgctgccctcgcagctgcagccacggccccccgcggcgggggtggggttggggggtcaagtagcgcagcgtccccgggtcccagccagagcctcggtgtgggtgggggacgggggtccgggctcccggacagacctgccaccgtcagaattggaggccggcggagcaaggcgggtgggggtctgggcttagctggccaagtggccgcgggctggcagaaggcgtggcgcagcccgggaaccccgctgtcctgaggggcgctgtcagcgggaatgccttcggtgattggagctccctgcgaggcctgcatgccgtcttctgctcggtggcgcccaaagctaggctgctccctgcacgccgctctctgtcctgtccccaggcctcctgcagatgcagctgatcctgcactacgacgagacctaccgcgaggtgaagtatggcaacatggggctgcccgacatcgacagcaaaatgctgatgggcatcaacgtgactcccatcgccgccctgctctacacacctgtgctcatcaggtgggcgcggctgctcctgtgggatgctgcggtactcccatttcggaggggtacagaggccggcgggccaggaggtgtccatctgccggggtgtttgtggggcgagggaacaagggagaggtttttttctacccggaagcctgagagtgaagggggtgaaactcggatttggggaaggaaacaggaactttgcctcagggcacatttggtttccagcaacagattcacacgggctgagctccctcccagcttgcctgggcctcacgtggcaccctcctcgtggcctccttggaggcctcccagagccactgtggccttcagggttggggctgtagagttaggggtttctgatcggtcagcaaagtccaggcacccatgcctggcccagtcgctgtgactggtgctgagggggtgtttctcacagacaggcatggctgggcaggtgccccagagctctcccccagatctgagccctggaggtatgtggttcagcctccccatcaccggtccacagtgccctccctgatgggacctggagaccagtggacaaattaggtgaatttgagctccctcatctttaaaacaaacaaacaaacaaaacaacaagagaaaactccatttaaacaaaaatttgaaaatttaaaacatctcccgttgcacaggcaggat

SEQ ID NO: 21614 - DNA, 957 bp, Artificial sequence
  DNA replication origin
ctccccccaccttcccagcaatccttgcggggtgggaggtgtttgtcatccagtcactcatgcacccatccagtcacaagtattgatcactcagtaggtgcccaatgccatcctctgcatttgggagaggatgtacctaaagagcagtgggtggaggggggtgcacagggagggcatggaaaaccagaagggaagtgaagggactgcattctctgcagggatggtctcttgttctgagagctgagtgggaaggaagccacctgggaggcgcagcaggaagagcattcaaaccagaaggaacccaggggagagaatctggatattttcaaaagtggccccgtggctccagccaggtcggtggtagccagtgctttggagtgtcggccccaccacaggctcccgctgcagcccgggatccagtgcccagcaggatgggggcaggtggctctgggccccactacatggttgtggcagggtcccccatgtagttcagtggggatcacaatctccacctcccaggacccactcaagctcccatttgcacagcccaaactggagcaggatggggacatgggaggtgggctctggctgtagcgtccggtggtgggaggtggggtccaggtggtgacgctactgtccctgcagtgctctttgatgagctgtaacagcaggcttggaggtggggctggggacgacccaggcaaccctgaggggagcttaagggagccaggcaaccctggcacttttccaaggctttgcattaactcaatagttccgccatggccccgggggtagtgccatgtatttctgttttaccgtcgaggaaacggaggaaaccgaggcacaaagaaatggagttaattcctaaagtcacagggccaggaggtggctgagtggggattcgaactcacaccccagagggcacacacaggcaggcccctgcacacacgcgcgcgc

SEQ ID NO: 21615 - DNA, 1502 bp, Artificial sequence
  DNA replication origin
ctcagatctctgtcccgcaggtcaccctggtgtgtttatctgggccaccctatcagcctcttagatagtctccaggctccccaagagcagctccataaaccacctaaaaaaaaaaatcctttctggagagaggaggtgtatcagtcagggtttagtgcctccagggctgttttttgttttttttgttttttgtttgtttgtttgtttgagaggtctcactctgtcacccacgctggaatgcagtggcacaatctcagctcactgcagcctcatcctcctgggctcaagcaattctcccacctcagcctcctgagtagctggggctacaggtgtccaccatcacaccaggctagtttttgtattttttgtagagatgggttgggggggggggtttgtctcactttgttgaggctggtcttgaactcctgagctcaagtgatcctccttggccagccaaagtgctgggattgcaggcgtgagccacagcgcccgaccctctccaggtgttttgagtaggagacattgagtgcagggaattggtggtacagcacaggtgatggaagagcccaggatgggcaaccatagcaaccgccacaacccccaggcccagaggaacaaggggaggaagagattgcaccaggccccagaagtttggggtccctcagggaaattgagaagctcggggggcccactcccagcactttgggggctaaggcgggtacatcacttgaggtcaggagttcgagaccagcctgggccaatatggtgaaaccccatctctactaaaaatacaaaaatcagctgggtgtaggggcacacgcctgtaattccagctactcacaaggctgagtcaggagaattgcactttctcatcatactgtgtaatgatgctggtgtctgccatctgagaacggcccccgccatagccatactctcccacctcctccctgcccctgcgcctcgggccctgccctctcttcggctcctttcctgtctcccacttccagccacccacctgcatgaatccacctgtctgttccccacatctgcacttgggcatcgtcacctggagaaagttctacctcctggaagcctgaagccactgcagattcacgcctccccccaccttcccagcaatccttgcggggtgggaggtgtttgtcatccagtcactcatgcacccatccagtcacaagtattgatcactcagtaggtgcccaatgccatcctctgcatttgggagaggatgtacctaaagagcagtgggtggaggggggtgcacagggagggcatggaaaaccagaagggaagtgaagggactgcattctctgcagggatggtctcttgttctgagagctgagtgggaaggaagccacctgggaggcgcagcaggaagagcattcaaaccagaaggaacccaggggagagaatctggatattttcaaaagtggccccgtggctccagccaggtcggtggtagccagtgctttggagtgtcggcc

SEQ ID NO: 21616 - DNA, 1076 bp, Artificial sequence
  DNA replication origin
gaggggaccctcgggatcctgaaacacccctcccacctgccagtacccgccaagatgggtccctgatttgctgtgtggccttagaccagtggctgccctctctgggcctcactcccagctgagacctacaggctcagcccctgcccagccctgcctggcacccgctcaatctggctgagctccagagaatggcagggctgggctgtcacatgctgagccacgtgactggcagtggctgggggctccatcccacacagaggacaggggctctgcagtccttcacccccaccctaactatctaatcacgggccaccggtgtgggcatggtccagaagacctcaccgccctcccaggtaggcagggagctggcgggtggggggggccatgatgagcacctcccaggtgccacgttggcccagaggccccggggccgggagctacggaggcccagggcaccagggagatggtagcagcggcaggcccaggaaggggcatagaggaggctcttcctccacacctgtcaccctgtcccctgcctgtccacacccacagcagcttgcacatcatccccacagcacgctggctctgacaggtgtatccggggcgggctgggggcaggcagggacaggcttaggcacagctgcctgtgccgaacttgaggaagatcgggactacaggaaccaccaaggcgacacgtggcatcatgaccacggtcctaagcagagaggcaggcactcctcctgggaggcagaggggacatccgaaacgggtgcagccccagctctggagcaagaagctctgccacacacacgccccatgttcacatcccaccccctctctgcccccacttcctcgtttgtaaaatgttagatctgcagaaagacaggctctatgaatggggcggcccatggggtggtgtggaggaacacggaagcacagggcgctgggagaggagcaggcatgaggtatggtccctaagatggtatttctagactccagccacctttgggtctgacctctttgttttgcagaaggggaaactgagtcttgggtagggtgtagcaagacaagccaca

SEQ ID NO: 21617 - DNA, 961 bp, Artificial sequence
  DNA replication origin
agacatttatcacatggcacaactcagaacgctggggagcagagtcaaggggccactgtgacagtggatgagggcataatctgggtgggctgcctggaggaagcatcagccaagctgagatctggaggaaagggactcggagagggaaggaggaaagggtcaccacgggtccttggcaccaggccgaggaacgagtgcgtcagagtgctcctccgatgaacttcaagtaaacaggcagggctcgggggaatgtctaggcccctaccctgcctgccagctctggctggcaccagcacggaggcaggaacgccctctcccccgccctgatcctctcccccacagctgtttctgcctcccagcaccacagccccggcagggtgggcagcagggcctccaggaggcccgaggtgttctccccctcttcctgaggaagctgaggcacagggagaagaggctattgcccactggcctggcctccctgggcagtgcccccaggctggggacagaggaagacggagaattctgtgtctggagtgctccaaggtggtggccatggtggcagtgagtcaccccctctactcatcaagctcctgcttacaccattcagactggcaggggtgaggctgccccgcctccaggaggggcatcagggcagggcagaggccatggcttggggttaatttctgtgcggcaggaagaagcatggcgctctgcctgcctgctcaccctcgggggctgtggtggagcagctgtccccaagcccacacccagtcctgcagccgcctccaggtccatggcagaggggagtggtgcgagggtcttcatgtgtgtctgggagtgctcactgttgggtgaaaggggttgcaggcagcctcagtccctgtggggtcatctgagtgggtccctgtgtgtgtataaggtagaggtgtctgcaagcccctgtgggtgcaggcaggtcagg

SEQ ID NO: 21618 - DNA, 873 bp, Artificial sequence
  DNA replication origin
ggcttggggttaatttctgtgcggcaggaagaagcatggcgctctgcctgcctgctcaccctcgggggctgtggtggagcagctgtccccaagcccacacccagtcctgcagccgcctccaggtccatggcagaggggagtggtgcgagggtcttcatgtgtgtctgggagtgctcactgttgggtgaaaggggttgcaggcagcctcagtccctgtggggtcatctgagtgggtccctgtgtgtgtataaggtagaggtgtctgcaagcccctgtgggtgcaggcaggtcaggggtgcccagaccctggggcggctgggtggtgcccatgaaggaggggcagccctggccacccagttcatgccaccccatctggcaggatggacccccttggggacacgctgcggcgactgcgggaggccttccacgcggggcgcacgcggccagctgagttccgggctgcgcagctccaaggcctgggccgcttcctgcaagaaaacaagcagcttctgcacgacgcactggcccaggacctgcacaaggtgggctggggttgggggtatgagagggtgcactggggcaggggggcatggagggcagctgggacagcaggggatgaagacacctgcgccctccatgaagcggggctaaaagcagctcctcccctaggccagagccacccttgcacattcatccagtcacttatttctgtattcatgcagcaactatttgctgagcacctactatgtgccaggtactgttctaggctctggggatatagcagagaataaaacacagttcccatgcctacgaagatgaccttctatcggagacaataaaacagcaaataaataattgcacagcaaggccggg

SEQ ID NO: 21619 - DNA, 1263 bp, Artificial sequence
  DNA replication origin
ggcacctcctagccactgaggctgggggaaggtgccttccacacggactttcccacagcctgtgctctggccccatgagcctggtggcctgcccgccacacctcctaggtcacctgggacctgactttgggagactgggctattttgagccaggttcaaactctggctctgctcttcctggctgcatgcccttgggcaagaacacactctctctgagcctcttctgggggccactgggtgtggttgcccaaccagattcaccaaagggttaactgagagggtgcacgtgacgctgggcagatgctgcctgctgagggtggggacaggggggtgaccaggtccagagggagggaccaggttgaatgttctgggctactgctgcctttgtagggccccgctcctgcagctgggatgggaaggcaggaggtggaatcagagccgaagggagaaaagggaccagacagacgtcaggtcaagtctcatgaaggccggcaggcggccggtggcagaagctcagtggtggcgggggagtcagtccccagggagcccaatgggctgggggaaggtctgaacactacagccttcaaggcaaagggaggagatattttgtccagagaataggagccgggggcagcccctggggcagatgtgctgaggcaggggcaggtggtgtcctgaggcaggggcaggtgtcctgaggcaggggcaggcaggtgcatgggccctgatgggtgaggggttgggggaagtgtgtttcttggggttctgccttggctgccactgggattgggaggggctgaggccccaagccttcagggtctagacagaggccatgatgcctgctgtacccagagagaaggccaaggcctcacggcctccgaggccctacatagtgtggcccataccccagacctcatctttgctgtttcttcctctcccacccccgacagctatgctggcctccttgctgctcctcaagcagaaacacccagcacctcctgcctcagggcctttgcacgtgctgtgcccgctgccatctccccagcatccatggggagcctcccctccatcttcacgtctctgctctaaagcccccttctcagagaaaccttccctgacccccacatatacaacagcaccctgatcctggccccctctctccccttcaccctgggtgtgtctccagggcacatatttcaacccaatatgctgtgtaattattatctttattattatttttgagatggagtctcactgtgttgc

SEQ ID NO: 21620 - DNA, 983 bp, Artificial sequence
  DNA replication origin
tgtgtggtatttttaaaaattcactaaattgtgtgtctgtgcagagatggtctagaaggttccaccacagacttttttttgagatggggtcttactgtgttgcccagattggactcagaccctctggggtggggagcaggatgcgggttctggggtgaggcctccttgcctgtccctctacattgaggtggggctggggtgctttggcagaaatgtatgcaggtaacactattgcaatttgaccaaatggtaacagaagggcagggtagcaggcacctacccactcctccaaaaggcaggctggccagggtcatgtgcatgaagccgtcgttcccacagaagcccccgctgctggtctgggtcagcacccgcttgaccacctgggagagaacaggatgtgcgtgaggctgccttgagccccatcaggatcctcaggacccagagcctgttccatgctggactctgtgacactgatcttgcctcagaaagggtctgaggccaccatgtcagctgaagggcctgtgatggtacaggtggggcagggggttgtgtagcagctcctcatgaagcttccaacttgggacatgtttcctggacatctgctcatgtgtggtccatgctgatggcacagactcttagggctgggggtaggggcaggaaacctagtgttgcttggggacatggagggtgtagtggcagcagggcagtactggacagtagggaggcatcccaggagaggggtgtcatgtgcctgctgagtggagggactgggagggacagaagttgttcaggcaaagagggcactgcagacagagtggaggctgaagagctgtgtggtgtgaacacagggacatgaaaacataatgatgtggtcagatttgcactttagaaacagaagcttggcccttgcttgaaggtccttgagaaggaccttcttcctcaatctgtagacttatttgaagactgaaaggaaaaaaagattg

SEQ ID NO: 21621 - DNA, 633 bp, Artificial sequence
  DNA replication origin
tgggctcagaaaggggagatgtcacctgggccacagggccttcagcgtgttgctaggaccatctctgaggcttcctgactcagaggccaggactctgcagtggcatcggggctgctctggggggtggaggattggcactcatccgggcctctcagggtggggaggtgttgtactgagagctggaggggggatggggttagaggagcagctgccctggagtaaaggacaccggcggcattgctgctgaggggcagacaccaggtcatgctgttggggagaagagcaaatagcatcgcagtgggcagtgtgatcatagttgtgtggtatttttaaaaattcactaaattgtgtgtctgtgcagagatggtctagaaggttccaccacagacttttttttgagatggggtcttactgtgttgcccagattggactcagaccctctggggtggggagcaggatgcgggttctggggtgaggcctccttgcctgtccctctacattgaggtggggctggggtgctttggcagaaatgtatgcaggtaacactattgcaatttgaccaaatggtaacagaagggcagggtagcaggcacctacccactcctccaaaaggcaggctggccagggtcatgt

SEQ ID NO: 21622 - DNA, 1030 bp, Artificial sequence
  DNA replication origin
acagcctgggtggagtggggttggctggggggcttcctgcagtgagtgagctccaaggatatgcagttaataagacgaagagagtgggtgggggcaagagggacccaggcttggggagccttagaggtgggtgccatgcggtgtgttagggacctgggcagagctcaggctgtgggagcagcaggtggggaagccggggtggggccacggccaccaagaagggtcagctcgggggcctgggagctgggggaggctttcttgagggagcagcagggtcagatgtgcccacagacagccccgactctcctccagggcagggaggcgggttgaggaggctggggctggggctggggaggcagctaggtggggtcgggggcagccgcccaaactcgagccgagccaggacagcagcacaggcactgttgtgcccctggctgccctccaggaagggcatggacccacctgaggcagcttgcctggccctgccatcgttcactgtggtgctgagtgtggacaggtggcgggactgcctgtcacctgctcggggcctactgttctctgaggaggaagtgggctcagaaaggggagatgtcacctgggccacagggccttcagcgtgttgctaggaccatctctgaggcttcctgactcagaggccaggactctgcagtggcatcggggctgctctggggggtggaggattggcactcatccgggcctctcagggtggggaggtgttgtactgagagctggaggggggatggggttagaggagcagctgccctggagtaaaggacaccggcggcattgctgctgaggggcagacaccaggtcatgctgttggggagaagagcaaatagcatcgcagtgggcagtgtgatcatagttgtgtggtatttttaaaaattcactaaattgtgtgtctgtgcagagatggtctagaaggttccaccacagacttttttttgagatggggtcttactgtgttgcccagattggactcagaccctctggggtggggagcaggatg

SEQ ID NO: 21623 - DNA, 1183 bp, Artificial sequence
  DNA replication origin
cttttaatcctcacagcagctctgcgtggagaaactacagtaacgtgttaccacgttaaggcgggaagctgaggcatgggagtatttagtaacgttcccgggccgtagagctgcggtgtgcggccgcctgatccacctgatctgtatgactcccgtactcaaccagcctatgtttcctaccagcgaatttttttttttttttttttttttttctttttttgagacaatctggctctgtggctcaggctggaatgcagtggtgcgatctcggctcactgcagcctcgacctcccaggctcgggtgatcctcacttctcagcctcccgagcagctggaaccacagtcgcctgccaccaccaggctcggctaatttttgtattttttgtagagacggggtctcgccatgttgcccaggctggtctggaactcctggactcaggcgatcctcctgcctcggcctgccaaagtgctgggattacaggcgtgagccaccacgccgggcctttccccgggaatgctgtggtagagggacccgcagaggccccgaggctgcctgcatgtgtgtgttgggaggatctgcgctgagggtaggtaggagttgggcaggccaggacaggaaggaggcagagggcatgtcccatgcccgtgcagagggaggacacgcatggtagaccaggacgaggacaagggcaggctcagtgtgtgcaaaggggacagtggtttgggatttgcatgcagatgcccgagcctccaaaggacctgtgggccacagggagaccctgggggagttcaagctgaggagtggagagggctttgggctggtcagcaggtgctcagaggagaggggctggccctagagagaagggaggtcttgggatggtggcccacacctgaccctggcccttcatcaggtgattcctgcgtggatgcctgcggggattcctgcgtggattggggaagtcctgcagcattacagaattgttacccaacgccagggccttggtccagagtcctgttgctagatgcacagaaagcaaatcactgagatgtaagtattgccagggaagaaggctttattcaggtgacatcagccagagagacaggagacgaaactcaggtccacccctgtccctcttcccgactaaagttgtaggttgatatagtctaaaaagaaagcaggagc

SEQ ID NO: 21624 - DNA, 1360 bp, Artificial sequence
  DNA replication origin
ctccaggcttcccctcgcctcctgcagttacttctcaccccagtgccacaggctgtggggcccaagcgggagcctggccactttggcattagatggcaatgcctggtctaggaaggaggcccaggtgttagacctgagaaaagctccctgggaatgggctgggagaggctggtgtttttgctgcaggccttctcagagccttgaatgtctaccatgcagtacctgccagcaggcacacagcagctggagcatttccaacactcactgggccaggaaacttgttctttcgaagaagtagctttttacaaagtagtgctttgtaaaaagcacttttggaaatgatggtagatggggggggtcaaggtctctgaactgagttttattatgggatgtgccctgcatggccctgagcaagccctttcacctctcggagctggtttcctcactgcaaatgaagtgaaatccttccacagtacttagcacaagttcaggggggctgcttttggccattatatgggcaaggggcttgtgtgtggccctagggaaaccccaccgtgtcgctgggccagcaaagcaggaagtggtgagcagtggccgggccagcaccctggcgtagggaacacaggaaagaggatgtggctggacgcaggccagctcagggccagcagggcctgtgtcaccctcgtgtgactgtcaccccaagcaggcttcctcctacccccagcaaggatgccccggcctgagtttctgccacttgctgttcttcagcctgaggtcttgggaggctccaagtcctaagcgtcttacaagtggatggctcttgggagacaggaggcccaggccccagccaggacacccgggagagtgggaacggcaggtctgtggtgacctctggcatcgctgggccttggggaagacgcccaggaagaggcagggtgacagggatgctgcggcctgtggtctagccatgagagcctggtggggccctggagtctacaggaaggcagggctggggcagcaggactccagagagcataaagactaggtggcgacctagtccagttggaggcaccacaggcctcaggcaggccgggaacggccccaccctggaccaccagagtcaagacaagaggccgtggggtcggagtggttttattgggcagcaggggctgcgggccggtggggcgtcaccgatacaagtagtcagcctggatgttggcggcgatctcggcctcccacttgtccccgttgttgagcaacttctccttgttgtacagcagctcctcatgggtctccgtggagaactcaaagttggggccctgcaggttgaggtgcagggacggtggttaggccctgctga

SEQ ID NO: 21625 - DNA, 1276 bp, Artificial sequence
  DNA replication origin
ggatgctcccccacctccgggacccctcccttgggcggcagtgaaacccgccggtgcttacaccttcctgctcttgaccaccctggagaggccccgctctggcccttgggtgggtggctgccccactctgggcctgcttcactggcagcaggacacagggccaggccatgctgccttgttctgcccagcgccccgcacccagcaggccctgggagataccctggggccagaggccagctgtcagctccacctgcagctgcagccgcggggggtagaggggggtgtcactgtgaccttgctccaggtcagcaccatgggcgtcatcaggtcctagtgcctggaagctgggactcacgaccgtccagctgcctgcactttggacaggcctggggcattcccactggaggccaggggcccttcagctctggtgatccctaagccccacacagcgagcacaggcctgtggggctgcggcaggggtggacaagtggagccccagagccgggcctggaaactgagtcacagccaagctcagctgtggttcctcagaaaattgggggacttgtggttgggcgccataggcctgttctgacagggtcggggcctgatacaaccagacagcctgagtggggtctcagcagtaagtgcctgggagaccacggtaagggaaagaacccagcggtgagctggaaagactgacccgcttggaatagaagtattcagtgcacagctacaggctccatgccacgctctgacggcggttacgtctgggaaaagctaaaccggcggtgcttcaggagtcctgcgcctgccttgtttttggaaagaacacctgttttcatcagtggccaagatgagctgcgggccagacctgtggacacttcccgggctccaggcttcccctcgcctcctgcagttacttctcaccccagtgccacaggctgtggggcccaagcgggagcctggccactttggcattagatggcaatgcctggtctaggaaggaggcccaggtgttagacctgagaaaagctccctgggaatgggctgggagaggctggtgtttttgctgcaggccttctcagagccttgaatgtctaccatgcagtacctgccagcaggcacacagcagctggagcatttccaacactcactgggccaggaaacttgttctttcgaagaagtagctttttacaaagtagtgctttgtaaaaagcacttttggaaatgatggtagatggggggggtcaaggtctctgaactgagttttattatg

SEQ ID NO: 21626 - DNA, 887 bp, Artificial sequence
  DNA replication origin
aatggggtgggctctggagtcaaatgacccagctggtctccagctctgacacttcctagttgtgtggtctcagcttccccatctgtagaatgggtccctccctccaaggaagcagcagcggggaaagctccgcgcacaccaggcccgggaacgctgggctgtgttggtaaacaccccatccttctcctcctcccttggggatcctccgtggccccccgcaaggcctgacaccctgcggggtggcgggctgagctgcattcacggagccaactgggtggggcgccaggatctcctccccggggcagggggaagagggtgggcaggaaattctggggctccgcagaccccggcaggggcactcaccccgggtgtgctgcgcgccgcgcctccgctgctggctgccccgctccgcgcacgccgggcgggactcagaactgcactcccgccagcccgggactaggcgccgctcactcctttccgggcaggcgggacgacggggaggggccagggacgccccgcccccggcccaaggctccactggagtccaggaagtctgggagaggttgagcccaggctgtggcctggcggacgggtcctgaggcgcttaatcccggagaggaggcctggagaaaggagcggataacagaccactgccaaccgcgcgcgtctatgctggccccgatgcaggggcagctccgctcaggcccagctcaggataggagatgagaccctgctctcctctcacttcgaggcttgtgcgcctctggctgatgggaccccaacattcgcaggctcatgggcttggggtccccaggatgctcccccacctccgggacccctcccttgggcggcagtgaaacccgccggtgcttacaccttcctgctct

SEQ ID NO: 21627 - DNA, 1733 bp, Artificial sequence
  DNA replication origin
gggggtggctggagccctcgctgctccctgtggagctgcatgtgctgagtggtaggagcgggcatctccaccgggtaccctggggctagccagggagcactgctgtgggggggctgtcccctgaggcccgggccgcccggcagcagccgcagccttccaggtgttgaaaccaacaaaagtgaaactacagaatggcggggaagggcccggggccttgctcaaggccgatgtggggtgggggcaggtgccaggccacctccaacccgccctggatgctggggcccctccagctccaaagccactgctctcagggcccagggcccctctgtgggaatcagttgcttagctcgaaaattagggggaggggacaggcctggtcagggccccgcctgcccagccagtcacttcctcccctgggtctggtttacttaactctaaacagggaaacgcagccccagccccagcctgggaaaggagagaaggagggaacgagggaacactgagcagatggcccaaggctgcaggtgggcagggcagggggcagcggggctgggttccatccctaaggaccaggcccggccacagggcagagggacttggagcccaggctgagattgggtgtgtgaccttgggcaagtctctcaccctctctgtgcctctacttcctctttgggtgaatgggacgtggcacccctgacagagacaggatctagggaggtgacaaaaataaccagagcctcaactgaatcccttcatccacacgacctcacactaatccctggggggagaaacccttggggagggggtacggtgcttttgtttcatacaggactccactgacacttggagaggtaaagtccaatgttatgtgcccagcacaaagggtgagctcagaggagggttgtgtctgacctggctccctttggggctgtgctggccaaataaggaggtgtggggaatcagctctggggatctggggaggggtcacccctggctcagggccatcagggctcccacagccactatgccgagggctcgagggccgggctccttccagcacttcccagggggtgggggaacaacctgtaatgggcggggggaaaggtgtggggacgtgatcagcccccgtgcctggcatgtgaggctccactggctcaccccctacccctgtcccccttggtccccgctctagccagggtcacccagccacttttatggtgtaaatgaatacgcctccatcctgcggccctggggtccaggctccagcccactcctcaccctgtgcccctttcctggcccctccaggaacccagcaggtctctctgcacctctgccctcccctccagatgatgggaaggcagtaggagagggtctggcgccccctccattccaaatggggtgggctctggagtcaaatgacccagctggtctccagctctgacacttcctagttgtgtggtctcagcttccccatctgtagaatgggtccctccctccaaggaagcagcagcggggaaagctccgcgcacaccaggcccgggaacgctgggctgtgttggtaaacaccccatccttctcctcctcccttggggatcctccgtggccccccgcaaggcctgacaccctgcggggtggcgggctgagctgcattcacggagccaactgggtggggcgccaggatctcctccccggggcagggggaagagggtgggcaggaaattctggggctccgc

SEQ ID NO: 21628 - DNA, 2219 bp, Artificial sequence
  DNA replication origin
ctgcgtttccctgtttagagttaagtaaaccagacccaggggaggaagtgactggctgggcaggcggggccctgaccaggcctgtcccctccccctaattttcgagctaagcaactgattcccacagaggggccctgggccctgagagcagtggctttggagctggaggggccccagcatccagggcgggttggaggtggcctggcacctgcccccaccccacatcggccttgagcaaggccccgggcccttccccgccattctgtagtttcacttttgttggtttcaacacctggaaggctgcggctgctgccgggcggcccgggcctcaggggacagcccccccacagcagtgctccctggctagccccagggtacccggtggagatgcccgctcctaccactcagcacatgcagctccacagggagcagcgagggctccagccacccccggggcagccctgggcctaagtgcctgggccagtggggtcctgtctagggtgacggcagcccgagaggagggaggccagagtgaaggtgggggtggagccggtgtcactgggagacgctggaggtaggggcgggggtccccatgggcagagcaagccaggagagagcttgaggtcggcctgagggtgggcttcggggtctcccagtcccactgcttactttctgcgtgacctcagcaccgcatcaagcctgcccaggcctcagtttccacctctgtcagatgggggtggtaacagcagcttccaggattcagtgagtgaaggtgcacaggtgcccgtggttgggaactgtctgtggtctgcccctgactggcccccatccgtgtccacccacaggaccatgggctccatgttccggagcgaggaggtggccctggtccagctctttctgcccacagcggctgcctacacctgcgtgagtcggctgggcgagctgggcctcgtggagttcagagacgtgagttgggtgggcaggcgtgggaagggggctactgccaaggttagcccggaggccggtccaggatggggactgccccccctccgccatagggccctggccccatttgaaccccagcggcccctgccatgggcactgctcatgggaagcccgcagctgaggcccctgagctggctcctccccataccctcctggggcatggggtctggtctgtgctctgatctgcgtcttgtggctcccagggcactccacacctttctggaggaggcagctaaggcctggggagagtcaggcctgggctctagggtgaggagctccctgacccccttcccgggacactcacccctccgtgtggcacccacagctcaacgcctcggtgagcgccttccagagacgctttgtggttgatgttcggcgctgtgaggagctggagaagaccttcagtgagttggtcccaggcctacattccaggcaggcttcctggaggaggcatgggccaagtttgatctgaaaggaagagtctgggtttgccaggtggaaggcagagaagggaggtatatgcagggccctgcagggccaagacagagcagctgggatctgtgaagtgtgcttgcgaaggtggctgccttgtgtgggctgagcagagggcctagggcagggctggctggggaggcctcgaatacagcataagagcccaggacttcgtcctgtgggcgccaggaagccacaggggtttctaagcagggaagaggcacagacagctttctcctctacagctgggctggggtgggtggggcccaggatctagggtagggtacccctaaggagcaggcaaaagggacccctgccctgggcaacccctctcaggaggagcctgtgggggcaccaaggcaggggcatggggcaggcagggttttgtgtttgctggtgcagtttacagcttttcaatgatcaggcagacacaggactcacgccagctccggtcccaagccctgcagcgcaagggccggcctgtggggagacctcaggccctcttctgagtggtggccaagggactggggagggagagtgagcccagacctgagctcagggaggggagcacagcttctggatgaaagtttggccgggattttctggccacctccacctggtgaatccagcagctggtggccgatggagtttggggcagcaggtggggccctcaactgttgagacaacctcaactgcaccccactcccgttcctctgcgccca

SEQ ID NO: 21629 - DNA, 864 bp, Artificial sequence
  DNA replication origin
ggggcgaggcctcaggctgctcaccgagctgtcccgcagggcctcctgcagggcgggcaggtctcgcacagagcaccaggcctcggcaatgaggcacttgtgcgtggtgctcacgctgcactggttcagggccaggtacacggccttcatcttgtggacctgcacctgccctggcggcagcagctgcagcacccggcctagcacctggctcaggaaccgctctgtctccccgaggacctgcgccagagtgggcagtcagcgggggctgggcaggcaggtggggtggctgggccgggggcacccacctcctgcacccacctcctggaggccaggccagggcacccacctcctgcacccacctcctggaggccaggccagggcacccacctcctgcacccacctccgggaggccgggggcacccacctcctacacccgcctccggaaggccgggggcacccacctcctgcagctcctggctctgctgttgcagctgctgcagggccccgaggcgggcctcctcctgctgcagaaacgggaagacgtggcagtggaagctggagggaggatgcgctgcgtgaggggccagaaggacacagctacgagactctgagtctgaagggagctcatggggaggagtcacgatagggcgggctgggaggtgacagcaggggcctggggagcagggcggtggggcgggtgttcccagtgactcaccagtccgtgatcttgcggatcttctgtccgatctgctcaccccagtaggagatgaggaaggtcatccacgtggctggctcgccctgcagagcaggctcagctgactctggggtcccgctctgcccaggaccccccagcccagcgccagc

SEQ ID NO: 21630 - DNA, 1972 bp, Artificial sequence
  DNA replication origin
gggcttgctatgttgcccaggctggtctcgaactcctggactccagagatcctcctcccaccacagcctcccaaagtgctgagatcacaggcatcagccagtgcccccggcccctgctgacaccttggtcttggacttccagcctccaggactgtgggaccgtgtctgccccttaagccagtagccggtggcactttgttacagcttccctggcaaacacgctgccccgacggctggtgctttgagctggcagcattctatctgccacgggcctccaggtgatgctctagctgcaccagcctctgcccacgtgcaggggaatcctgttggggcccagatccagccccaggacactggccctgcagaagcagcaaaccccccagtgcccccagtgacactgagtgggggcccggcccatagcatgggtgtgatgtggtggagcccatgtcgggaggggacttggtcacaggacagggaggggccctgcctcatccagtgggcaagagtcagggtgcttgggcccccaacggcctgtgtgggtggatcacgtgaggtcgggggttcaagaccagcctgaccaacatggtgaaaccccatctctactaaaaatatgaaattagccaggcgtggtggtgcgtgcctgtaatcccagctacttgggaggctgaggcaggagaatcgcttgaacctgggaggcggaggtttcagtgagccgagatcatgccattgcactccagcctgggcaactgagcaagactctatctcaaaaaaaaaaaaaaagctgtgcaaccaaagcaaccacaccaaaggctgcccctggctccagcttgcagtctccaacagtcactaagcttcccaacattcctctgaggtttgcgctattatttccattttgcaggtgaggcagctgaggctcagagaagctaagaaatgtctcaaagtaggcgagatgggcttccaacctgggccatgcccaccgcacagcctctgttctttgcacaagcccgtgccggctcccttgtaaactcaacaagggggagttggctgggggccgacataaagcctcacactggctgcagagcccaacagccccttgagagtgatgggatgtgtgcccctcatcccaggagggcaggccaggcccaggatggagatacctccccctcaggctcacacccacccagtggggcagctgagcctcccaggacacgggtaaggatgccgtggctctcaccggggttgacctcctggtagcggcccacgccgtaggcatccacgatgccctggaagctggccgtgaagcggttggtgcggatgagtgtggggggcatgtcccggcaggggatgcggtgagccacggcactcactccctcctccatctgggtgccagggcagagacagaccagaacggtggcgggggccttcagggaccctgggatctccagccaggcccagctggagatgtagagccctgtgggggctcactgggcagccccttcccctctctctgacgtgagatgatcagccctgctctgccctggtgggggcccaaagacaccacatggattggcaattgcttgggaaaggcaagcatgctgcctcctagggacggcccaggagaaggagcccagcctcacccgcaagcacctgctgtgcgcggcgggtgacccccggaggcaggggcatcacaccggttccacagaccatgagcaggcctaaggtcacaggggggcctggattggaatgaggcttctgactttaaaactatcctgtgcagcctccagggacttaggaaagtcagggtagggcttgctgggccagggccatcagggcagactccctggaagcggtgggccatggaggaggctgggaggagaaggagcccctaggcaaagcccaggtgcagggagccagaggctggaagtgaggcagaaacgccccggcctggtaggaggggcgggcggagaggggg

SEQ ID NO: 21631 - DNA, 1194 bp, Artificial sequence
  DNA replication origin
caggaccaccagcgtggcctggaccacctcctgccagggagagggcgagagtcagggcgtccctgctgtgcacacctgcaaaggaacctgagtcacagcagtcacggggcccagagagcctgcggtcgctcctccctccagggcccccgggggctccgtgccctcactgggtgagggtctgcctccataaggactcctgagggaagggacccccggttcccagtgccagttgtgccacctgctaaagatgcacaccatcacctctgacggccctgtctgcacggcccggggcctgcatccccgtttctcggacgaggatcttgcagctcccagtggccctgtgaccgcggggtccccatgaggccgtgtgagcccggcccccaccagccgcagcccacctgccgggggtagagcagcctgttgctggggctgtgggagaagaggaacatgttgatgaagtggatgaggatgctgggggccgaggcggccctggcagcccagacacacagccacttgtagatgactaggaacacgaggtaaccgaagagtcccagcaggaaggtgagctccggcagcgtctccagcagcagccggtgcctctggccaaagtgcctggcgggcaagagggaggtgtgctcactggggcccactctggcctgccagcctcccgtcccccgggcagccttggccctcacacgtggttgaagactccgaggaccaccccaaaggccatgtgcacgacgcccaggatgacggacatcttcatcttgaaggagttgaggaagctcaagtggttggcagccaggctccaaatctagggtggcagcaggggtgggctggactcaggggctccctcgccatcactgccaggaagtccccggcccgagtcactctctcaccaccctgttttccccctcggagcctgcagcctcatccatcacccacccaccgaggggcaacagagcgcagatgggccagctgccacggtgccagcctgggtgaccttgggcatgacctctgtgcctcagtctcttctttaggtgaggacactactaatgtgaggcccacggggttgttacgaggttcaaatagaaaatcaggctgggcgcggtgactcacgcctgtaatcccagcacttcgagaggctgaagcaggtggatcacatgaggtcaggagttcgagaccagcctagcc

SEQ ID NO: 21632 - DNA, 1393 bp, Artificial sequence
  DNA replication origin
ggcgaggcggagccctcgccgctcgggctgctgctgagctgcggtagcggcagcgcggccccggcgcccggcgtggggcagcagcgcgacgccgccagcgacctcgagtccaagcagctgggcggccaacagccgccgctcgcgctgccccctccgccgccgctgccgctgccgctgccgctgccccagcccccgccgccgcagccgcccgcagacgagcagccggagccccggacgcggcgcagggcctatctgtggtgcaaggagttcctgcccggcgcctggcggggcctccgcgaggacgagttccacatcagtgtcatcaggtcggtggcgccgggtctgggggccgcgggacagtcaggtgacgcggggcggggccggggcggggtccgggcagggggcgtgggccgggggggtcgggggccgggggagccggggccggggcggaggccggggaccggggaccgcagccggcgaaagccctccttctcccagccctgggtaatccaagggaagcgggttcgcggccgccgcaggccgtccacaaacaggcttttgtaaaaacgtcggtttcatgagaaaacgggtctgttctaggagaacaataccgttccatcacgaagtgcgtgtggtactgacgcttaagataggtctagaaagtctctgcggtttagggccttgaatgaaggtgttgtggctggctttaaaaacacaaaccactttttaacttttttctgttagtttttcgagttcgcgatttgatgtcttgttccctctccaagagtcattgttagtggaggagtagcattttctcatcccctaagagacatcactatagctgtgttactagacaaaggtgggaggcgtggctcctaaaataagagtaaggtagaaatgttttttccttttttttttttttttgagacggagtttcgctcttggtccccaggctggagtgcagtggcgcgacctcggctcactgcaaccacggcctcccgtgttcaagcgattctccttgcctcagcctcccgagtagctgggattacagacacacgccaccacgcccggctaattttgtatttttagtagagacaaggtttctccatgttcgttaggctgatcttgaactcccgacctcaggtgatccacccgcttcgacctcccaaaatgttgggattacaggcatgagccaccgcgctcggccattttttcctttttttaaacttgaaaatatttaatcttaaatttgaattacagaagtacgcgtgtaggtattcagacttaacagaagtctgaccttctttcaccactctgctccgaagacataaccattcaacgtagtgtgtgcatccttctattgagacctttaaagatgtgttcccgggccggg

SEQ ID NO: 21633 - DNA, 1449 bp, Artificial sequence
  DNA replication origin
acaggcggccgaggaggcgcgggcggccgcagcgcgagaggactaggctcagagtccggccgggcgccccctcgccgctctctcactggcaggccggcggggcagggggccgcggcggttgggcgcgcggggcggcggcggcggctgcggcgactgcggcgactgtggagcggggatgtgctgctggccgctgcactcgctcctctgccgccgccgcacgaggagcgccggccgcgtcacagcccgccctcgcgctcgccactgattggccgccgtccgccggcccggcgcatcataaccgccgccgccctcgccacaccgcctccccattggctgcggcgccgcccccaacccagagcgctgcggcctccgtgagcggggcctgggcgaagggggcggggcgtcgagggggcgccccggcggtcgcagggaagggggagaggggagcgaggcgcggggggcgccgggagagcgcctccgcggtgggacggagccggactgggccgagcgagggaggctcctgagcctcggaggaccccggggttggctttgggagctgaaagtttccttggacccctcggaagccccgtgacatcagaggccgggcctggcaggggcaggcaggaaacgtgtctggaggctactgccctctccgcgtgaccttgggcgagcagcctcctcctggggctcagtgggtgtgattttgtaacatttcccagcgctgccacaggcgcgtctcgccctgtccaacgcggagcccgaagaattactaagaaaccgaggtctgaaggagggaagaggtgacgggctcgaggccacacggtgggccaggctgggcccggctgcacgccggctaccggggcccagccctctgcacgcctcccgcagcctcagtttccctgtccgtggtactgaggatgctcgggcctagaagttcagggctggaggcccagggaccgtcgagggaggggcatcatccccgccatggggccgccgcaactgcccagagcacaggccaaaggtgcgtgccacggggctactggcgttgtggacgctgcccctgcctccccatcccccgcaggaaacagccttgtgaccgtgactaacgcacctttgccggggtagaggggcaagggcccctgctaccgtttgccacacactgccccatgtccctcactgctcccgtccttcctagaagtgaggtgctgatacatataaaaattatggatcccattttatgggacatgagctgaaacaggaggtttcctgggctgccaggggcttaggaaatccagtgcctgatacacaggaaatgcttctatgtggggagttcacagtcttccagaagcaaaaatgttttttggttttttttttgagacggagtcttgctcagtcgcccaggctggagtgcagtggcacgatctcggctcactgcaacctccgcctccc

SEQ ID NO: 21634 - DNA, 1063 bp, Artificial sequence
  DNA replication origin
ctgttttcctgggagctccgcctaccccgcgggccccgcccctgcccgccccttctgaggccccctcctcccggcgccgctctcgccaggaggggccagagggaagccagaatcccgttggtccggattccttctcagcgggcagccgctggccttggaattcggcccgggcagtagcgctgggggaggagggtccgccttcgcttccctgtgacccagtggatcttcccaaggcctgcccctcctccccgccgccgctcatccccctctgccttcttagatggcattctaagaagcttgggggcccggccaaggctacacggacgggctgccagtggggccccaccgatcgctggtagcttccacaagctggtgtggggatgggggctgccagctcccctgcctccctgtcagtcactcaaagggggtgccgacaggactgggggccccttaggggcctcttgccattcaggcctggatggcaagtgcccttgggaggggaggatcaaggatggagtaggcccacgactggccatggcatcctgcgtgagcagagccgctgtcctgcctgtgcccctgtgcctctgcttacccatctgtacaaggggtcccctgcagaagggagggccagcccaaagctaccaggcaaaagtccagcctgcagggcccagggctgactgaggggagaggggccctgtgcagccggcagagggggtgcggtgcctgaacccaggttgcccaactcctagcccagaagtgttatccccacagtgtaacctgcatgatgactggggtctttttaaaaattgtatttattttctattttgtttgtttgttttttggagacagagtttggctcttttgcccaggctggagtaaagtggcgcaatcttggctcactgcaacctctgccctccaggttcaagtgattctcctgcctcagcctgttaaatagctgggattatagacacctgccacgatgcccagctaatttttgtatttttagtagagacagggtttcgccctgttggccaggcttgtcttgaactcctgacctcaggtg

SEQ ID NO: 21635 - DNA, 1662 bp, Artificial sequence
  DNA replication origin
atgtgatgtgtcagtcaggataggtcaactgctgtaacaaacagccctcaaatctcagtggctgaacaccatacagctctgcttctggctcacacaaaatccttgcagacggtcttggttaggcatctctcctccttgtggtaacacagggatcctggcttcctccttgtgatgctgttgtcttcatcctgcagcttcctaggtcaccaggaaagcagaggagagtgtgaggaaggcataccagctgtttcacctccttggccctaaaggggtgtgtattacttctgttcataccttagtccattcaggtggtgggcgcgtagacttccatgtggtgattcagggacccaggcttcttgggactagtaactctgccaggtttcttcccttagatcctttgccactagttagacttagagagggcagagagggcctcccaggagagagaagtgacctaattaaggagtcacatggtcccagacactgcaagggggtggggggctaggaaatgtagtcttctggtgtgcctaggaagaagaaatgcattcagagagtggaagtactgagtctctgccaggacgggtggcagcgttcacaaggggatggaatccacactagggatggggagaggtgcagacaagaggcaagaaagtggcaaggtcagtgaatggaaggtcgagaggggttgggaaatcgtagccagggagggtcctggaggagaggcctaagctcaaaggctaggaactggtggacccaaagtgggatgattaaaacacatttcagagccagggctatttctagtggggagaaagtacagggcatggtggaaggcctatgcagagaagatgtcagtgagggtggcaaggtaacagcggccaggtgctgcataggtcatgcaggtagaatgttgaagtcacacagagtgatggcagaagcctggagagaaatgggtttttaatttttttaatactgtggctgtgtgtttctttgaacactctgttccaggctctttgtaactattcactcatttaatcctttaacaaccttatgcagtaggtactggtattctcctcattttacgggcaaggtacagaggcaaagagagaataatcacctgcccagggccaaatagccaacaactggtggggctgggattagaactcaagcagcagggccccattaggctacctctggaatcttcagaccatttgttcacaattcatttattcattcctccaaacagtcattgagaatttgcgacgtgcatgctctgaaggaggagggggcctcaggggtctgtagatgcaggaggcaaggacaggagaggacagcgtgagcccaaggacatagactttgggagaggactgggaaggggttcttggcccagcctggaggccttgcttggtcggattagtcaatcctgcctcccgggcgggggtagggaccacaggcatcctaggcagcaatccagccagggaaccttggccttatcacaggctgctggtggccaagggtttccctttccatccaccacccccgtccacgtggcgcggtagcctgggtagtttattgttatcagcattgtaaatataaattctaatcgcaaaagcagcttcagcacactaagtcctaggaaaattgtaatccccttaaccccgcacc

SEQ ID NO: 21636 - DNA, 1834 bp, Artificial sequence
  DNA replication origin
gagccagcctctcggactgcagccctggggaaggggacccccccccctcccgccgcgcgtcccagttgctccgagggaggtggccccgggcagacgagcgtttttgttgtgggaatgggggtcactggcagcagatgcaccctaagaccgtgtgggcaggctgagcgttcctgcgcggagcatgcgagggaggaggagagcgggcgcgccttggcctggccccccgcgggccccgccgcccccagcacccactatgtgccccgcgccgtgctccgctccactccgggtgtgccctgcgcgctggccgtgcgatccctcctcggggatcccgggctggcggggagatcctgagggaccgggccgcctgcgagccggggagctgcgaagcttgcctgggcatcgatcttgtagtccagacaacagaacgatgagcgcgctcccggcccctgcggggctgcccagggtctccgcgcatcctccctctcacgcgtcaggacgacccccggaggtgggggccatgtgggtgccactttacacctagggaaactgaggcacagggagttccgtgacctctatgacaactagtcagggcttgagccagagccctctttcagcattcgggtgaaaaatgcagaataaatcaggaagcgggtgcggaggacctccaagaagttgaggttggcataggcgtgcacatgcctggaacttggtgccggcaggtgcccaaggaagcgcagacctggagtgtgaattggagcgtgttggggaaagggggtgcctaggatatgggcgggtagtgggaccagccagtgtcaaagccctgggaggggagagaggctgcccttgccacagagaggaggcgggcagggcaggcagctcagtcagatgccaggaagagccgcagcctgccttagttttcccctgcggctccagggccatcatcctccacaaaggatgatgaatcgaggctgtggacgaccacccaacacaagaactggactaagtccaagtaacactgacgcacagcgcctccctcgtttgccctcattctcgaccttgactttggctggtagacatgatgctcattaccgccttccacagagggaaactgaggcacggtgactcgctgagggcacatggctgacggaggcagaagcgggtctcatcttcaaaacagagctcctcccactgccttcacctgccctatcagcagcttcctccttttggaggccgattcgggtgtgggcggtgggcacagcccaagcacttctcctgtctgccctttcactaaaagcagcgtcatctgtggcagcagaatccactctgccacgttcgtctttgcagacgcaactaacaaatgattgctttggtgttcttggtttctggtttatcagaaactttccaagattttcgtagtgcctggctccaaatactcaacttgcaccccagaaacactgagcctgcctttgccacccaccaccaccgaatgcctatgggaggcgagctcactaggggaataccatctgcctctaagtcgaccttggtctcaggtcccaagtccagctatgcctgagcagccctccagagcccccaaagccgatgtcctgcccactcccagctttccagagcccaccccagcatagaggtgctctccatgtgcccttcagggtgaacgccaaatcctgagtcctgtgaagcccccatacttccaagatgcagacacttccatgtgttcactgcctgatgccaagtcaagtgttctggacatttccttgcaaggctgggcccacagcctggcagggatacagatgagcaaacccaagcccagcctgct

SEQ ID NO: 21637 - DNA, 1383 bp, Artificial sequence
  DNA replication origin
caggtcaggctccgacacctggggagacggggtcctgcccgccccaccctgaggtggaacccccagctgctcctgggcacagaatcatttacaaaaataaatatgaaaaaagcagcaactctttagtgatcatggaattaatctgacagcaattaaatgtgtttaagcatctggcatatctcctcaattgcaccaaaagaatttggaagcacttggtttggtctcaaaggcaaaaggaaaggacgaggaaggggccaggcctcccgccaggcccccgcccccctcacatttctgagtccgcatacatcccgttgattaagtagtccacctgggtgtagtccttcttcttgtagctctcataggcctgcagggcaaacaaaaccaagactgtgatgaaaagggtcaccccgagtaacagcaccaccagaaggagagttttgtctaccacggcctgggtgaggggctcagtggtgaccaccatgtactggccttgggtgctgggctggcacgagtccgtggctggcatcttagtgccccctgagctcctgggtgttggcccagtggaatcagtacctggtgtggcttcagtctctacctgctccggtgcctgggatgtgcctggcccagcggccctctgggtatatggcatggggcttggctgtgtcgtgggggacatggcctccatctcagggattgggctggtgtgaggtactggcactgggctggcagttggctccctggcttgtgccttggtggtggtcaccactgtgggggtgggggcgggctctggggttgtgtttgagggcatgggtgtggatttatttgttgtgttaaccacaggctggtccactgacacctggctaatgggaccttgtgcttggggacgcatagggggtacagggcttgccgcggtgtcactgggcatgtgcttggaaggacttggacgagtgctcatggggctgcttgtgtttgctgtggtcgctacagtctgagcacgtgtggccaatgtggccagggttgctgttcttggcaacgcgctgctctttggcacttgtgcgagggctgtgctgagagatggatgcccagtggcggtagtggacggggtccgccctgtggaagtggacgtgggcgcggggagtgcaagtgtcatgggagtgctggaggccgcagtcatactggaggctgcagtcgtgggagcaatggaggccacagttgtactggaggctgcagtcgtgggagcactggaggccacagtcatactggaggccgcagtcgtaatggaggccgcagtcgtactggaggccacagccgtgggagcaatggaggtcacaccatcagctgcacctcctgaagttgctggttcactcacatctgtcctgcttg

SEQ ID NO: 21638 - DNA, 1201 bp, Artificial sequence
  DNA replication origin
aggcgtttcgaggtcgcctcttcaggctcggctgccgacaaggtgcctctgagctcacccagcccaacccgcgcaccccgggaccccaagacggcagcgggcacagctgggcagcagagacccgggaacacccacttccgccacagacctgctcaaaatagctccttctggcagcgcgcaagaagtggcccgagccggccccggggaggcggggcctgagagcagacaacccccccacttccggctcgcctccgttcgccacaggccccgccgcagccgctcttcgccccggccagcaggcccgccccgccctccgtgacgtcatttccggcgtttgggcggggcccgggcagggcgcgctgcccggagctgcctgggttgcgctgccggccacgtccccgcgccgggcctcaggctccttcctactgtccgagggccaccaggccgccgggggcctgctgcgcccgggtaaggggctcgcactgccgtccgggtagctgctgtcagggctccctgactggcttgggactgagagacagaggttggggggcaggaggagggttggatgggggcacgaggggcagtgggagagtgagtggggctgagagaggcaggaggaacgggacaggaggagcggcggatggggcacgcacagagtgcaagacgctgagcaatgcaggtactgaagaagtcaactgggggccgagcatggctgggggcccaagagacaggaggagggaggagggccgaagggggcccagactggagaagaggccggcttgtcccattgtgggagcagaatggggacactctggaagggggccgaatttgtcctggggtctttcccgggcaagcccaggacgggactggaccccaagaagtgtcgctcttacttgagtgacacagacctatcccccagaccctctctctacctgggtggaggttgtgcattgccccagattccctcccctgcccatctgtctccctgcctgcttcccccgtgcgagtcacttagtagcccccgtgtggctgcttagcatgttgacttaatcgttaggctgataggaggaatcggcctccacacgcatggtttgccaccagaaataatcatcgtgcttagaaatctgactgtaataacttgcagctatccctcgccccaggaaaatctctaacatttcgataaaatcagctaggaaaatct

SEQ ID NO: 21639 - DNA, 1199 bp, Artificial sequence
  DNA replication origin
ggcccccagttgacttcttcagtacctgcattgctcagcgtcttgcactctgtgcgtgccccatccgccgctcctcctgtcccgttcctcctgcctctctcagccccactcactctcccactgcccctcgtgcccccatccaaccctcctcctgccccccaacctctgtctctcagtcccaagccagtcagggagccctgacagcagctacccggacggcagtgcgagccccttacccgggcgcagcaggcccccggcggcctggtggccctcggacagtaggaaggagcctgaggcccggcgcggggacgtggccggcagcgcaacccaggcagctccgggcagcgcgccctgcccgggccccgcccaaacgccggaaatgacgtcacggagggcggggcgggcctgctggccggggcgaagagcggctgcggcggggcctgtggcgaacggaggcgagccggaagtgggggggttgtctgctctcaggccccgcctccccggggccggctcgggccacttcttgcgcgctgccagaaggagctattttgagcaggtctgtggcggaagtgggtgttcccgggtctctgctgcccagctgtgcccgctgccgtcttggggtcccggggtgcgcgggttgggctgggtgagctcagaggcaccttgtcggcagccgagcctgaagaggcgacctcgaaacgcctcgtgagacctttcgcgggcacacgcccttcgcgttcctccgcttcctcccacgtttcttcagcccctggcggggcgctggggtgcccggtagttaagggtggggtggcagcgagcgtttctgtgcacccgcagcgtgccacgcccgtgctaagcactttgcctatagagccagtggcttaattctgcaatagcacagtgaagaacttcgcctcattttacagacgtggaaacaggctcatcaagtgctctgtaattgtaaaacctgggataacaaaggagcaaaacgcaatttagaggcaagtgtgtgggacttgactttggttagaaataggctttgcaggccaggcgcggtggctcttgcctgtaatcctagcactttgggaggccgagacgggcggattatctgagctcaggagttcgagaccagcctgggcaacatggtgaaaccctgtgtctactaaaatacaaaaaattagccgggcgtggtggcgtgc

SEQ ID NO: 21640 - DNA, 1965 bp, Artificial sequence
  DNA replication origin
agcgccagcagcagcagcagcagcagcagcagcggccacggcggcccgggcggcgctgcctccatgttgtccggcggccggacgggcccgcgccgcgctcactcgggctccatggcgcggcggcggcggctcctcgcgcggctcccggcgcctccgcctcccccctcgggcgccgcggaccaggacgacggggaggagggagctgggcgcgcgggagcggaagccgcgccgcgtctccgccccccgccgccgccacccgcgccccccgcaccggccgcgccctcccgcgggcgccccccggagccggccggcggccaggcggccccagcggcgcaggtccccgcggcccctccccgcgctccccgccctgccctggaggtgcctccgggaggcttggcgcggggtttccgccccgcggggcccggcggccgatcggggcccggagccaggtgtgtcacctgtggagcctctatgagtggggaaactgaggcacggagcagggcggggttgcccaagggcacacagcgaggcagtttcagggcgggcagcctggggccccacggggcggccccggacacttgttctcacctgtggagggcagagaagggaacagggagagaagtggccggctgggagtggaggtgggtttgaggttttactgtaaactaaatgtgtaccctctaccttagttatgaattatgagacacgaagactgcgaaacagacacactcctctaaaagtgcctctaggctgacagggagaaagtcccgccaggctcccagacgccacctttgagtccttcaacaagcccgccagggcctcttgcccaccggtgtcagctcagccactgaaccctccaggaagaagacgtgctggtaggagaagaatctcacccaggcacagcctggaaggggcacagaaggggctctggaaccagcaagcccaagttggaactcccagtctgctactttctagaacgactgtgcccttggcgggtctaagtagaacctctccgcgcactctttcctcctttgtaaagtggggacagcaatggccaccttgcaggttcagagagggcttgcagtacctcacagaactgagtgcccgtgaacgtgtgtgttcctccagatttgtgacagctttgccaggctggagtcaggctgaacgcctctgccctcatggggtttatattctaggaagaccaacaaaaacaagaagacggaaaattaaaacaacaaaagccccattgacaggccatgaagaatgccatgagaaatgaagggcgttgtgctgcagtgtttggggaaactggcttagggaaggaaggacacttgagctgctaccaaggagcagccgtccggtgggagggcagttcaggaagagcagacatccacggaggaggcgctggggcagagggcagcctggtcgctggattcgggggaggaaccacatcaggccatgagctggagctggtggtagaaggtacaggagaggccagccagggccagcacatgtcagacctcaggcggggaagaggaatcgagaatgcaccccacgagcaatgggaagccaggctaggatttaagcagcaaaaatattttcccttcttccaccctgcatccagctctaccagcacagcctggggttctattttcaagatagaagagacccagactcccagctcttcttacacttctactactgccacctgtcacccactcatgcgtccccacttgcagcctcgacccccttccacctgatctcatggcagccagggaagctccagggctcgtgagggctgccatctcaggaaagaagcaaaagccttcggcacctgcagggcctgctccaaccacacttcttccttgacctctcagcttccttagccactcccttcccacatctcaccctgctccagccacagtggtgtctctgtgggttctcaaacacaccaggtgcactcct

SEQ ID NO: 21641 - DNA, 1773 bp, Artificial sequence
  DNA replication origin
ccgccgccgtctcggaagcgacttggcgagttgggagcgagttggggcgcgcgcccgggatccccctgccgtccccggcgtccccgccacgcgcgggccctttgtctccccacccgggccctccccggggacgctgcgtcccgggctggcgaggagggcgcccgctccgccaggtgcggcgcgggcgggtcctcacctgcccgagcccgcgggaagccgggagccgagccgagcccgcgctgggcccgtgtggcccgggccgggcaccgagcggggacttggggcgcggaggcgggcctggcccggggagccggttcgcaagcctgtttccagcggccgcgcggccgccccgcgtgctccgaggacgggctgaagttgcagcgagaaagttctgagcccgggcgcggggcggcctggccggtggcgctgctcctgtgagccgcgtggctgtgggtttccaagcggactgacacctgccaggtgcccgggcgacccgaatgccccgtgtggccgccgggtccccagatagtgtccatccccgggtcggctacgcggaggtgacgtggtcccagatcgcggggcagtgggggaggcaggcttgtgcctcagttgtacactcccgtggggagaggtagggcgggggaactttctctccaacttttggtgtttcccagggggtggagttgaggtcaggaggactcaggaaacttaagcagtcgtgaaacgctacacatgttcttttaatttggagattgccatgtggtttttcaagcaagcctcttgctacctaaatcattctcttcggatgtgcgtgttttgtttttctggagtatggctggccaagtggcacggccgcaagtgcctgtgcacgccgcggctcctgttctgtttgtggcagtttagcggggaggacctcgggcccctttgtctgggcctccttaaggcaaacagctgtctccctgaatatttccagtgtgaatggtgcagcggggtggccctgtagtcagatcccccaggctgcagcctctgcttggaggtgtgggggacagcggggaacaggaggagcttggagtttgtttcacgtcctcctgcctctgacccaagcctagagattctatggacagtttcaccccaaatctgcctctttcaggagcgtgtttacattgtggggccttgtctggagctagcaaaacaaggtgaagacaaaacagcgacagtatctggggagtacaggccagcgccgctcctttttccggaaatgcctgggtcaaggaggcaaaaggggttttggggaaactgtttgttttaaagggggggtttctaggccgaccgcgttgcctttcacctcattgcagttttgggttttgtgcacgttttggggtgatgttgctggagtcaaatgcctgtcgtccatgtggttcgagcccctgaggagaaagaattatagctgtagagttcagttgtgtgtgaggcaaaaatagagttgattattttaacattaggcagcaaggcctgggagccccagtgaatgtggtgatccaggcctaaaatggaaggaaagggaggaatctttctgcagaacggttttgatgttatatccctggttttactgtgtgaaatacatgcctcggacctcagcgaagccagtaagtgggccgctaattatttttcctgattgcttcctgttgcaattggaagctgtgaacgcacggaaatggctttgttctagtggtcccagtgctgagaacttccccagctcccaagccctagtcc

SEQ ID NO: 21642 - DNA, 970 bp, Artificial sequence
  DNA replication origin
ctccccacccgcccctgaaggccccactctcccgccttctgcagccagccttccttttgtctgcccctgagctcctccgctcttgtggtcgttaagaaaagctttttataatccaagttggtttgggaagaggcaaactgtcctttcccaacagtcatatgccaaccctggccacatctattctggatttgaagcaaaatatggtatttattcattattgtcatgcaaatgtcagcagctcgctcattcttgatggagacagcacctggaatgggagggatgggtccacggccagcattggaggtgctcggccccagcacccgggccttgctctgcaggcagccctgctctgcaccgggccctgctctgcaccaggttccactgggtggcatcagccatgcctgccctgaggaggtgaagtgcgggctctctccagtgaaggtgcagaggcagggtgagctggcgggcttacggaggacgtgggcttcacctgggtccaggaggccaggtcacattcagccaagtattcatcagctgggtgtagagaccagggagggtttttaggggtgggaatggctggaggcatggaggtggtcagggtggagtctacgggagacttggtctactctggtgcggtgggattcatgtagagagagcccttgtgggctgaggccaggctgtggggtagatgggagagacctcctggcttagcaggtccttgggtggatggatggacggatggagggatgttgggggaattggtgggatatagatggttcagccaaggtggaaatgggggagtagagctattcctggggtgcttgaagatgtcagcaagtatcccactccagcttgagtttgcagagctttctctaaaaggcagaacatgtgcttggttaaaggaaacccaagattttattattgttgtaaatgtcaagtccctcattttgaatctttagacaactgcaga

SEQ ID NO: 21643 - DNA, 823 bp, Artificial sequence
  DNA replication origin
gttagaaagtcccaggagtgggcggccatgcatccaggcctgccacaggagcccgcctgccctcctccctgaagtcagggctctggaagcccttcccttggccatgccctgtgggacagtgtccaagctctggagtaggactgaagacccctgggctctagtcctggggccaccaacttgctgttgccctttgcagtgacctccccctgactcccatggtgccggctgcaggagccgggcgggaggggctggttgccagatcctgcagatgcccctcctctgggcctgcccagggtagtgggaatgagggtgtggggtgagggtctgtcctcaccaaggctggtgtttgggagctcaggaagcagagtgccatgtggccaagttcacctctttgatctgtgtggtgacttaggaagccattgactggcttctgacgagcatgggaagggctggagcctttcagagcccaacaggtttgtgtgagagccaggcgtgtgtgtgtctgagcaactgagtgtgggagtgggaggatgtgagcgtgtgtgtgtgtgtgtgcgtgtgcacgcatatgcgtgcatacgtgtgagcctgtgtgtgtccgtgtgtgtgcatgcatgcgtgtgagtggatatttgtgtgtgtatgagtgtgcgcatgtgactgtgtgtgcacgtgtatgtgcccgtgtgagcgagtatgtgcgcgagagtgtctgcatctgaaccagtctgtgtgtaagtatggggtaccagcaggggtgggacacggtggaatttatcgccaaagtattttgagtccctgaggtcaggccagagcagcctcg

SEQ ID NO: 21644 - DNA, 1456 bp, Artificial sequence
  DNA replication origin
cccttgcgcctggtcctgctccccacgcagcgggtatagcccagtctctggccctttcagtgagtgggaggagatggtaaatgaatagtatttgaaagggacgtgtgcgtagggggataaagcagtgcttgggtgctgtggcgaggggcttccgtcggagctcaggtgctgggaaggcctcttggtgacttttgagtcgagactggaagcagatgaggctgagaaccgtgtggctgtctgggggcagcgcggtccaggcagagggatcagccagtgcaaaggccctgggctggtttggggcggggcctgtttgaggggctgtagcagaatgtagggaaacagggcccaaggtgtgaggagaggacacatgaggtctcgagcagaggaggtgccagctctgactcgtgctggaaggcatcccctggtggctggagcgagagtgagctgtggggtgggtggcgtgggggcaggagccctctccacggttattaccgggatcctggcgacagaaagcagcagcggggacacctcacttgtgggggtaaggagtggcgagatttgggatctgttctgaagagaaaagacagctggatttgctggcactctgcatgtaggttcgataaaaagatgagacaaggttggcacggtgccactctgtgcctcagtatccttgtctgtacagaggcgtgaccatgctgcatgtcatgaggaaaacaccaagaacagtttgtgagttcaacaaatgttagctgtcgttataataaaaatgccctttcctcgccaccagaagtccagtctccatgcctacgtggttttgtctttttacttctttatggcttttgctatgttggttgggaagtgctcagtgctaggttgggaggtgatcagtcgggaggtgctaggtgatttgttgggaggtgcatgatgctcagttgggaggtgctaggtgctcggttggaaggtgattggtactttgttaggaggtgcttggcgcttggttgggagttgttggtgtccagttgagaggtgctaggtgcttggttgggaggtatttgattgggaggtgcttggcacttggttgggaggtgctctgcacttggttgggaggtgctcggtgctaggttgggaggtgatcagttgggaggtgctagatgctctgttgggaggtgcatgatgctcagttgggaggtgctaggcgcttggttgggaggtaattggtacttggttgggaggtgcttggcacttggttgggaggtacttggtgcctggttgggagtagttggtgtccagttgagaggtgctaggtgcttggttgggaggtatttgattgggaggtgcttggcatttggttgggaggtacttggtgcttggttgggagatgctgggcccttggttgggagtagtctttcccatgctcagatctgagctggctttgcctgcatcatctctgcgagcc

SEQ ID NO: 21645 - DNA, 1205 bp, Artificial sequence
  DNA replication origin
gtgacagagtgagaccccatctccaaaaaaaaaaaaaaaagtaaacgtatgtcctgtgaattttacttcaataattttcttaaaaaacagcatcaacaaaaatgaacagaagaggtggtggatctgcagagcccacagctcccatcttccctgtgccacttcatgagtgtcaccctctcctggcaactgtgctgagggctggggacgtggcggggaccctctgcccccaggcccaccctcagggagcctgtcacggggcgagggtcattaagcaaataaaactgcacattaccgaccacgtcacattatgatcctgtttccagtgtccataatctcattacacccgagtcctcatttgctgggcactgtaagcatctagaaaagaatagctgtttctcgggttgatgccaagtttcatttactctgaaagtataaattatgagcattgtaagaaggagcgagtgcacatggcctgatttgtatacagaggttaaagcgttgggcaggagaggtgtgctttttgccaggcatggcttcctcctttcttccctgggggagactttgccacttgacctgggggagcccgtgtgtcaccatcacaggctgtgtttgggaggtgccctgtgcacgccgggagaaatgtacgagggcgccagctcctggggctcttgacctggcctcacttgtctggttgaaagcaaatgggaagcctggcatggtggcgcacgcctgtaatcccagcgctttgagaggctgaggtgggtggatcacctgaggtcaggagttcgagaccagccttgccaacatgatgaaaccctgtctctactaaaaatacaaaaatcatctgggcgtagtggtgggcatcagtgatcccagctactcgggaggctgaggcaggataattgcttgaacccgggaggcggaggttgcagtgagctgagattacatcactgcactccagcctgggcgacagaccgagactccatctcaaaaaaaaaaaaagaaattaattgggtcagcagcaatgactgtcgggggaccctcctgatggctcctccaccccgcttccctgactgcaggcagaaggtggtggagggcagcctgacgcaccccttcgccctgacgctctccggggacactctgtactggacagactggcagacccgctccatccatgcctgcaacaagcgcactggggggaagag

SEQ ID NO: 21646 - DNA, 2115 bp, Artificial sequence
  DNA replication origin
gcggaggttgcagtgagctgagattacatcactgcactccagcctgggcgacagaccgagactccatctcaaaaaaaaaaaaagaaattaattgggtcagcagcaatgactgtcgggggaccctcctgatggctcctccaccccgcttccctgactgcaggcagaaggtggtggagggcagcctgacgcaccccttcgccctgacgctctccggggacactctgtactggacagactggcagacccgctccatccatgcctgcaacaagcgcactggggggaagaggaaggagatcctgagtgccctctactcacccatggacatccaggtgctgagccaggagcggcagcctttctgtgagtgccggctggggcgcgggggcgagggtgcgggggctggggggagcgggggcgcggggcaggggagtgggaggatgcgggggcgtgggggtgcgcgggcgtgggtggggtgggggggcaggtgacccctccctgcagaagcccatgctctggggggccccctctctaaaggggtacctgctgcaatggagggaggtgtgtggctggctgggggacacgggcctgcagaggacccctctgcagagctcatgggggctatttcaggctcagcagtggcaaggggatttccaaggaaggttgcctcgttttcaaggcccagaagaagttgtctgtgtgtgtgtgtatatgtatttatatacacatacacgtatgtgtgtatatatatatatggttatttatatatacatatatatgtgtgtgtgtgtgtgtgtgtgtgtgtgtgtatgtatttttaatagagatgagagattttgccacgttgcccaggcttgtctcaaactcctgggctccagtgatcctcacaccttgacttcccaaagtgctggggtcacaggtatgagccaccatgcttggccctgcaagtcgcgtatttatcaatgaataatctgcccagaatcagcagttctcagcctgggggccacgctgggttgtgacagaggtccctgatggggaaatgcaccagcttctgtgacagtggggctgcggctctggggacagtggcccactcccacagggaccagggatggagatttctggccaggccattatggaaggtttggactttgaattgaaatgtggggcctaggggtgccagctgttcccagagcaggacacaggagggtggggctctctggagctgtttcctggtgagaaagtcgtggtcacaaaacccatctacacttggggcagcatgagggagggagaggttcattttgatgagtttgttgttccagttatatccgtattttggggctgctacacccagctttcccctggtttgaatgaggtgctggaagcatttatcgagttccgttcaattgctgttggtcatagaagggcttgggagagtgacaagcttggccatcccagcaagagggacagtgttcctatggaagctgctgggtccacacatagcacaaagacaagacaagccttttgcccaggagcccattgtctctggggttcccgtcactaccacacaggcaggtcctgaccccggccattggagcgtggggggcagcctttgcagaggggtgtcctttgggggctccgaggagctggggagggtgttctagtcataggagcttggtgggaggaagcagatggggagatgtcactccatgggcaggtcacatctgggtgtgagggtggccaggaaggtcacggctggttttggggaaattgcaggccgtctggccaggctgagggccccatgtggacgggccagcgatgaggcaggtggaatggtgccagcggggaggtccctgatgccacttgaggccgatgtttgggcagagggacacactggaggctgtcacgggggacgaggcaggatgtgactcattcagaaacaagtgacggtcctcttctggaaccttctctcactctgtcctggttttctcagtccacactcgctgtgaggaggacaatggcggctgctcccacctgtgcctgctgtccccaagcgagcctttctacacatgcgcctgccccacgggtgtgcagctgcaggacaacggcaggacgtgtaaggca

SEQ ID NO: 21647 - DNA, 903 bp, Artificial sequence
  DNA replication origin
aaggtcacggctggttttggggaaattgcaggccgtctggccaggctgagggccccatgtggacgggccagcgatgaggcaggtggaatggtgccagcggggaggtccctgatgccacttgaggccgatgtttgggcagagggacacactggaggctgtcacgggggacgaggcaggatgtgactcattcagaaacaagtgacggtcctcttctggaaccttctctcactctgtcctggttttctcagtccacactcgctgtgaggaggacaatggcggctgctcccacctgtgcctgctgtccccaagcgagcctttctacacatgcgcctgccccacgggtgtgcagctgcaggacaacggcaggacgtgtaaggcaggtgaggcggtgggacgggacggggcgggcgggcggggcggggcctggcgggaatgggttgcggccgccgggggtgccccagaaggaacctcggcaaacccgttcgaaatgatccacttggcgggtgtggtgattcaagtctgtggtcccagctactcgggaagctgagttgggaggattgcttgagcccaggaggtcaatcctgttttgttttgttttatttttgccccagatattttccacttttttactctccgccttggtcctcaggcacttggtgcttcctgggactgtgttgcagtgaggcatggctcttctcctctggggcaccggctgaggatctttctttccaggtgtcggttcggggcgggcccttcgggaaatcacacacgttcaggatgcagctcgccttcggggatgctcccgggcctgggatagccagtctggcctctggggctgaccctggggcctggcaagcgagggggtaacgagaggtgtcaggaaagcgccatccctgggaccag

SEQ ID NO: 21648 - DNA, 905 bp, Artificial sequence
  DNA replication origin
cacaagtgagtccacgagggagtcagtgcattagaaagggtgagtgtcttggacacccgctcctccatcacctctggggcccttcgctgttgaccgttcacctcggcctcaaaggcaatgttgagagagaaactggacccagggaaggagtccagatgagctgcctcctgagtgacctggcgacaccaggggtttggaccaagcaggttaagggaggattatagacccttgaaggggaggagtggtttgaccaggttggatgagccctttgtttacagaggaggccagggcaagtcaccagcctggggttgcccacagcaggtggcatagtaggttctagcaggtggggtctggctcccagagccatgagtttgctgctgccccatacctgggccctggtggagcaaggccctggtctccctcgcagactgccccaggacgctgcctgctccctggaggagggggtgcctcggctgcacaagcctcagcggagaaggatgcttggcttgctggctgcccgggaaccttggccttctcagagtttgttttctttcctgcctgtctgttggtgagaagaggctgaactcagtgctggagctggaccctgcgctctgcagtgttggttgaagtcctggcggaaagggaaagagtgaggacatacgggctcatgacggcagggagtggccaccacagtcagggccgggggacggaggggagagagaatcaccggaatatggcaaaggtgtaaaacaggcagctcgggccgggcgcagtggctcacgcctgtaatcccaacaatttgggagtccaaggcaggtggatcatttgaggtcaggagttcaagaccagcctggccaacatggtgaaactccatctctactaaaaatataaaaattagctgggca

SEQ ID NO: 21649 - DNA, 1470 bp, Artificial sequence
  DNA replication origin
aggacaggcacggcctagcattgaagctggtgagtcagagccggacctgtgagcggggccagaatggggcgcgggcttcagacttcacaaagcagaccacgcggcagcctggggctttagtatccaaatgtcctgccctccaggtttcattccttgccgtaaaatatcacgttaaaggaaaatgttttgttaaaagaccacagtcctgtcacctgagcacagtcgctgttctcggttcctctgtggctttccaggctgcaggtgcccattggtattgcggccgtgcgcccggcgggcatgaattagctgtgccgcctggctgctgacgggacgcctcgcctcgactgaaaactacctggagctgctcacccaggggcaacgtgaagaaaacgtgaaattctgtcgcttgttgcagctgacagcacggctgtgaggtcccagtgggcagaggcctcgtgcagggcacctcaccagccgggatgtcagagctggccagaaggagcggtgcccatggagggctgccagtgcccagagagccttccgaggtgtcacgttgggcagtgaaattcagagtcgggcagaggaggccctggggtcacacagggatctcctccaggctatgggttggtgaggtccagtgtccgggggtgaaggatagaggctctgtggtgagggctctggagctggccctgggctagcggaaacgcaggtaacgaaggaggctgtgctggtgggacttgtgcctgttcccgagggaggcattgtgagtgatgtttaggccaagaggattcaggatggaagacatggcttggtttgtagttgggagccggccaaggagtggtgttgagaaagtgcagtgtcaggcagacccgggaccgtggcggtgaggaggtgcagtgtcaggcagacccgggaccgtggtgatgaggaaatgcagtgtcaggcagacccgggactgtggtgatgaggaaatgcagtgtcaggcagacccgggactgtggtggtggtgaggaggtgcagtgtcaggcagacccgggaccgtggtggtgttgaggaggtgcagtgtcaggcagacccgggaccgtggcggcgaggaggtgcagcgtcaggcggacccgggaccgtggcggcgaggaggtgcagtgtcaggcagaccggggacttggagcacctagttccacttgcgggctgaccttctattttttgtcatcgtgttgggagcttaggaaagtgacttaacctctctgtgcttcagtttgtccgttggtagaaagggggtgattatactccccgctccatggggtttggaggaaggctgtgtgggttgtgctgagcagcgtgatggtgcaggctgtctgggtcagtgccgagggagcgagtcttccttcggcggttgtaatcagaagtagcttccaaggctgggtgctgccaggaggagctggggtgggtgaaggggcagtggggagcacg

SEQ ID NO: 21650 - DNA, 1092 bp, Artificial sequence
  DNA replication origin
gcggagacccctggcactggcggagacccccgggcactggtggagacccccgggcactggctggagagccctgggcactggctggagagctctggcaggacagcagaggccacacttctcaagtttagcctgaaagtcaaatcccagtattggtgtgggggtctctcctctccaatcagctcctaactacgtgcccgcctgagtatgccagagcgattaggacaacagcctctggaagagctcttgccgcctcggactttaggcctcctcagccacccgccgggcacccagctgtgcatcactagactggcgctcccatgaaggccccattgacagtcgagaagggatccaagaccatggggcccttcccaacacatccctgtctcctccaccttccaggactcaagcttttggactgcggccctcacgtactgttttctctgcagggcaccaggacagacagtttgggggccgccccttacaaccccttccccaacggaaggaggccaggtgaggggagggcaggtgagggtgggggttaggtgaaggtgggggacaggtgagggtgcaggggcgggtgagtgggggaggtgaaggtacaggggaggtgagggtgggtagggaaggtgcgggtaaagggatcggtacagatgtgggggtaggtgaggctgggggccaggtgagggtgggtaggggcaggtgagtgtggggaatgactcagagcccctcttgggaaggcagggcagccacgtctctcagtgactctcaaggactctccgtctccacactctctggggtcaccgtccaggagatgctcgagcgctgcctaagcccagcccaccctgtgcatctcagggatgagcctgggcttttggggcctccgacacagcatcccttcgaagggctcttactgagctgacgtaggaggagaggacagcccagaagcctactgcctgcggggatctggttcctttgggttaccctgaaagacagctgcatccaagttcccgagtgatttggcctggggcaaatggggcctggagcacctgggctcctgccacccaggcctgaaggaaaagctcccctccctct

SEQ ID NO: 21651 - DNA, 1613 bp, Artificial sequence
  DNA replication origin
actgggcttcaaagcagaagttgagagggactcagcgcgggtttggcatccctgctgtacggggtgctgcacccgcacatcctccatcgctgcggctcctgtgtgccgctccacctccagccccaacccagaagagaggctgggagaatacacattcactgcaagaagacatgcatccgtatgtttttcaatgcagaagggaaagggtgccaactgggaatcagagctttaagcagcaggcgctacaccaaatacagcagaaatgctccgggtgggaaattcagccctgactggagcagtccttcctcctcccggcaacacacatctgctcagccacgcctgagtgcccactgcgccctcctcaggaccagaggggcagaaagcaggtggtcagcagccacacctgttgcgggtgtgggactgctacagaagaagggccaggcctctgtggtgaccagcgtgcgcatagcaaggcaggagccggcagaggacctgtcagcacgtcccaggcgcctgcagaagacgggacaaagcacaggcaggagggctgaggacacccccggggagggcgctgaaagggaggagggagaggatcatcggagggtggaggccacttcctacgtgtgaccatggaggccatcctgcccctcggggctccacgtcctcagtgcgggctgggcatgcggcagcactcagggaatagcagagtcccatgggctggggacacagacacaaagcgtgggggcactggcacagagaagccagaggaggcctaggcttcgaggtggccccccatttcctaggactcctccctcccactttgtgcagaaaatcacaggaaacagaggctggcctcaggaggggatgctgggaaatcggcccaggcctcactgaaagctgagcaaagcccccgccaagctgaaatctgatcaaggtaaaaaacatcggtttcaagctgtcatgctgcacgcaagcctttggatgtttggaacccgcaggccttccccatgactactgggctcacccgagtgacagggactgtgtggcataggggagggggcctgatcaaagacgagagttctagggtaataaaaggaagcagctgtccccactgggctcagccacaggaggacgtgccagggtcagcccacgacggctgagaggagccaacgacagatgtctgcaagccgtgcctggccatgggggacacggaggaccggtggctggaggttgagggcgacatggggcagacctgagatggagcccaagtctccctcagcagttgtgaaaccgagcagcctctcagcctcccaaagcctccgacctcgactctcaatcagaagcagccgctgggcaccacaagctcctgtgagctgtaactgggacactggggccagagccaggggcgcgcccggctcagggaagggctgaatggcggtggtgatggcactgctgaggtgactgtggccgcctcttgcccagcctggctcctgccactatcaaagggtccatgtccgagacctcagtgaggccctgtccttctgtgatctccctggagaagaggccacaagagaatgacaagcacctgtgcggtaaatacacgtctctcgagc

SEQ ID NO: 21652 - DNA, 1721 bp, Artificial sequence
  DNA replication origin
cacttctgccaccaccgagggccctgggcgaaggagtgaataccaggctgccttggcagggatgtgttgagggctgtggggagtcggacagcggcgggggtcagaggaggaggagggtgcaccgtgcaggctgaagggccacgttaccctgaggttggccaggctccccaggcctagcctcccagctcccccactttctccccaccctccaccagtggcaaagccagccccttcagggcgcacggtgtctgcccccaaggagggcccattccgttggggttaatgttggccacctctttctgtttgtctctggcagaaatcaccaagccgccctcagacgacagcccggcccacagcagtgccatcgggcccgtcattggcatcatcctctctctcttcgtcatgggtggtgtctattttgtgtgccagcgcgtggtgtgccagcgctatgcgggggccaacgggcccttcccgcacgagtatgtcagcgggaccccgcacgtgcccctcaatttcatagccccgggcggttcccagcatggccccttcacaggtaaggagcctgagatatggaatgatctggaggaggcaggagagtagtctgggcagctttggggagtggagcagggatgtgctaccccaggccctcttgcacatgtggcagacattgctaatcgatcacagcattcagcctttcccactgagcctgtgcttggcatcagaatccttcaacacagaggcctgcatggctgtagcaacccaccctttggcactgtaggtgtggagaaagctccttggacttgaccttcatattctagtaggacatgtgctgtgttgtccacaaatcctcatgtaccctagaaatgaatgtgggggcggctgggctctctccagagctgaaggaatcactctgtaccatacagcagctttgtcttgagtgcagctgggatttgtggctgagcagttacaattcctacgtggcccaggcaccaggaacgcaggctgtgtttgtagatggctgggcagccgcaccgcagagctgcaccatgctggtttgtatcacatgggtgaccatggtatgtctaagaaggtggagtccctgtgaggtctgcaggtgcccccacagctccaggccaccttgaggattgcctctgcctgcccagccctgagttccctctcccctgtcctgtcccactgtcaccccaagccggcctcattgggagcctgttggatggcagggtatagatgtaacctgattctctctggggagcggggttatctggcttctcaagagctcctaggagcccacagtggtggcaccatcacagtcgcagcagcccccagagaacgcggccctgtctgttcctggcgtgctctgtgctgccccgcctgggttccctgccccagtcgcaggccccttggaggaggtaccatgtgtctcccgtttcacagatgagccccggggagctcactctagtagtggccagagaggcctgcggctcagggagcggggcacatttccaacaggacacaccgccctggtctgagtctcgtgggtagtgggagcagaggagagcgccctatgtctgtggggcggcttggctgagcctggaagccacctgacctcccccgtcccttccctgccaggcatcgcatgcggaaagtccatgatgagctccgtgagcctgatggggggccggggcggggtgcccctctacgac

SEQ ID NO: 21653 - DNA, 935 bp, Artificial sequence
  DNA replication origin
cgccaggacgggcgccgggagcgggacgcggtcggggcggcgactttgtgcctcgttgacgttcgcggcctggcgcggcgggcgggcgaggcgcgcccctgacccggctctggctccagccttcccgcccgccggccgcggcccgcagtctcgccccccgcccggcccgcgcccggtctccgctcccgctgggcctcccgggggcctcggggagcgcgtcaagttgaggcagcaactcgccgtcaagagtcgcgaagaccattgttggactctgctcttcgggaaacaagttttgtgggtttctgttaattcgccgcagagtcatcgggatccacaccagccagttccgaggctcccagtacccttcccagtggctttttaactcctgtgaggtggcttgtatgtaaactgtctcgaatgcctccctggtgtatttgagccgggggtggggggggtgggtggtccttcttgtggcttgaagtccctccctcttaaagaagcccattcactgtttacttggaggtgtttcctgttgaggtcctgctggctgtgatcacaatttagactttttaattataggtgaacgggatgggtctttggatgtacctccgtgccctgacgtttcaaccgcgtgacttaatgtcattttcctggtacttcacgttttctctgtggggctttgggtctgttttgcttttatgggagggggtgcttgacaggcgttccctttcatcctcgcagcacttgttgacggggtggtgtcctttattcgtgggacgtttactttgattttgtcctcaaggtcatgttgcagataggcttcaagggggacagggactccaggtttccaaccaccgaactgtgcctcaagtagcaagtgtatgagacccagttatggtggtggttgggttttcctcactgtggagtggagtcag

SEQ ID NO: 21654 - DNA, 1107 bp, Artificial sequence
  DNA replication origin
taaatgtatccttatataatgtgacttcatttttgcattcctttagacaatgtaaatggagtcactttgttctttttttgcccccactcaacattgtttctgtgatccttttattcagatgtttgagtacttaccatgtcttaaacactgttctactgctgggcatgttaacagtaagcaaagcagatgaaaagtccttgttttcatggagcttacattttggtaggggaaagacagttaacagataaatgaaagatacagtagccatatggtaatacaaacagggagaaaagtaaaccaggagaggtggggtgtgggggagtgcttgtctgcagattgaaatacagcagtcaacagaaggagtggagggacccagccacaaggctgtgggtggcagtggggtaggggcagcattataggcggagggtcagcaggacaaggtgctaagaaggaggcatgtctgctgtgttggaggggcagcggaggccagtgtggctggagtgaggagcctgagggagagtgggaggagggtaggccagatggatgggggagatggggggagggcgtaggtcacactggccattgttaagattttgtctttttctctgagtgagatgggtaagtcatttggtgttttgagcagaggtgtcacatgatgtggtttctaaaggtcccactgtcctgtgctgctggagggaggttggacgctctggcagtgatccaggagagcagtaatggcagctgggactgaaggggagcaggggtgggagtgagaagaggttggctgctggatccttcttgaaaaggaagagcagacaggatttgctggcagattggagtgggtgtgagagaggagtaaaggatgataccagggatttttgtagctggtgggcgttgccatgtataaggaaagggaagacttgggaagaacagcgtgtggaagtaagatcaggagttgggttttgtgcatgttcagtttctgaagcttttggagagcagattggagatatgctggattggggtgttcactgctcaagggagagatctaggctgcagatagaaataggagtctttgggccgggcgcggtggctcactcctgtaatccc

SEQ ID NO: 21655 - DNA, 905 bp, Artificial sequence
  DNA replication origin
atgtggagagcgcctctgcccgtccgcgatcccatctgggaggtgaggagcgtctctgcccggccaccccgtctgagaagtgaggagcccctcctcccggcagccaccccgtctgagaagtgaggagcccctccgcccggcagccgccccgtctgagaagtgaggagcgtctccgcccggcagccaccccgtccgggagggaggtggggggcagcccccgcccggccagccgccccgtccgggagggaggtggggggcagcccccacccggccagccgccccgtccgggagggaggtggggggcagcccccgcccggccagccgccccgtccgggagggaggtggggggccagcccccgcccggccgctgccccgtccgggaggtggcgggcacctctgctcggccgccccttctgggaagtgagaagcccctctgcccagccaccaccccgtctgggaggtgtacccaacagctcattgagaatgggccatgatgacgatggcggttttgtggaatagaaaagggggaaaggtggggaaaagacagagaaatcagattgttgctgtctctgtgtagaaagaagtagacatgggagacttcattttgttctgtactaagaaaaattcttctgccttgggatgctgttgatctatgaccttacccccaaccctgtgctctctgaaacatgtgctgtgtccactcagggttaaatggattaagggcggtgcaagatgtgctttgttaaacagatacttgaaggcagcatgctccttaagagtcatcaccactccctaatctcaagtacccagggacacaaacactgcagagggccgcagggtcctctgcctaggaaaaccagagacctttgttcacttgtttgtatgttgaccttccctccactgtt

SEQ ID NO: 21656 - DNA, 1176 bp, Artificial sequence
  DNA replication origin
tagtacagaacaaaatgaagtctcccatgtctacttctttctacacagagacagcaacaatctgatttctctgtcttttccccacctttcccccttttctattccacaaaaccgccatcgtcatcatggcccattctcaatgagctgttgggtacacctcccagacggggtggtggctgggcagaggggcttctcacttcccagaaggggcggccgagcagaggtgcccgccacctcccggacggggcagcggccgggcgggggctggccccccacctccctcccggacggggcggctggccgggcgggggctgccccccacctccctcccggacggggcggctggccgggtgggggctgccccccacctccctcccggacggggcggctggccgggcgggggctgccccccacctccctcccggacggggtggctgccgggcggagacgctcctcacttctcagacggggcggctgccgggcggaggggctcctcacttctcagacggggtggctgccgggaggaggggctcctcacttctcagacggggtggccgggcagagacgctcctcacctcccagatgggatcgcggacgggcagaggcgctctccacatctcagacgatgggcggccgggcagagacgctcctcacttcctagacgggatggcggccgggaagaggcgctcctcacttcccagactgggcagccgggcagaggggctcttctcatcccagacgatgggcggccaggcagagacgctcctcacttcccagacggggtggcggccgggcagaggctgcaatctcggcactttgggaggccaaggcaggcggctgggaggtggaggttgtagctagccgagatcacgccactgcactccagcctgggcaacattgagcactgagagaacgagattccgtctgcaattccggcacctcgggaggccgaggctggcggatcactcgcggttaggagctggagaccagcccggccaacacagcgaaaccccgtctccaccaaaaaaatacgaaaaccagtcaggcgtggcggcgcacgcctgcaatcgcaggcactgggcaggctgaggcaggagaatcaggcagggaggttgcagtaagccgagatggcagcagtacagtccagcttcggctgggcatcagagggagaccgtg

SEQ ID NO: 21657 - DNA, 1499 bp, Artificial sequence
  DNA replication origin
gaggtctgatagagaaaaaggtaaatgtactttgactatgccttcagctccagccacctctctaagaggaaattgttgggcaggtggggaagaactagtcacagaactaaactgtaagccggacagggtgtgaggaggggaggtggtagaaggattacagggtggaggagaggaggctgaggaggaattgggacttgtcttggcaacgagcagcctggggaggaggggaaaagtcagatgggtctgtagaaaaggaagactggaaagactcagcaacgcttggggttgggactaaggggacaggcgggagggaaagaaggaggatttgggaggaatcgcattgggaacagagactagggagggaacgaagcgtgaaaaatgcctggacgtaaggcacctcagaccatttgcctatttttcgacaaaaattatttaggtcttgtaggatggagaaatcgaaagtgccgttttctggccatttagagccattgtcaagtttgtattggggccaagcggtgttgcagaagaagataaggcatttaggttttaggtcaggtgtgagttgaagaggttttaggtttttaagaacacaggctaagggagaagaaggaggaatggagggtggaagtttgcctatagtgaaggaggcaagtttaaagaaaagggagagtagagacacggagggaaggggttcgggggttcttaccttccagaaaagcaggaaaggggtcagggcatggaaataaggggttggggcacagagataagaggtcagggcgcagaaataaggggttggggtgcagagataagaggtcggggcatggaaataagggatcagggtgcagagataagaggtcggggcatggaaataagggatcagggtgcagagataagaggtcggggcatggaagtaagggatcagggcacagaaataagaggtcagggcacggaaataaaggattggggcacagagataagaggtcagggcgtggaaataagggatcgggggattcttgccccccaaaaaagcagagaaggggtagagacacagaaagggttgggatacttgcccctcccccagaaaagtgggacttgccgctaagggtgaaggactaaggcaggcatccccgcgtggtctgacacctctgaaacgtgggtgaataatcagagaggcgtccctgcaatgattaaacaccaagggaaagctgccttcctagtccatgaccagcgctggagttttgggtccatgggtaaaacatgtctcctttgtctctactagaaaatgaaaggaattgaaattaagagaagggagagattgaagtgtggcaccaagattgaaaggagaaagaggttgagggatagtgagggaggttggagaagagagtaaaaagaggccgcttaccagatttgaaattggtgagatgtttcttgggctggttggtctgaggacctgaggtcataggtggatctttctcacggagcaaagaacaggaggacag

SEQ ID NO: 21658 - DNA, 1467 bp, Artificial sequence
  DNA replication origin
ggctaaacgctatctgatttgggataaagaaaaaggagcattaaccttgactatgcctttagctccagccacctttttaagagtaaattgctgggcaggtgggggagggctagtcacggaatgaaactgtaagctggaccaggtgtgaggaggggaggtgataaaaggattatagggtggaggagcggaggctgaggaagaattgggacctagctcggcctggcgagggagcagcctggggaggaggggagaggtcagatgggtctgtagaaaaggaagattagaaaggctcagcgacacttgggattgggactgaggggacaggtgggagggaaaggaggaagatttgggatgagttgcactgggaacagagactagagagggaccgatgtgtgaaagaatgcctggacatcaggaacctcagaccatttgcccattttacgataagaattatttagatcttgtaggatgaaaaaattgaaagtgtcattttccagctatttggaactactgtcaagtttgtattggggtcaagtggcattgcagaagaaaataagatgcttagattttaggtcaggtgagagctgaagaggttttcagtttttgaggacacaggctaagggagaagaaggaggaatggagggtgtaaagttgcccatagtgaaggaagcaagcccagagaaaagagagtagagacatggagggaaggggttcgggagttcttaccttccagaaaagcaggaaaggggttggggcgtggaaataaggggttggggtgcagagataagaggtcggggtgtggaaataaggcatgtggtgcagagataagaggtcagggcatggaaataagggattggggtgcagagatacgaggttggggtacttgcccctcctctagaaaagcgggacttgccactcagggtgaaggagaaggggttggggtttcttgccccgcagaaaggtggagaatgggtagagacacggagagaaggggttggggtacttgccactaagggcgaaggaccaaggcaggcgtccctgcatggtctgacacctctgaaacctgggtgaataatcaaagaggcacccctgcaatgattaaacaccaagggaaggctgccttccctagtccgtgaccggcgctggagttttgagtccatggataaaacgtgtctcctttctctctaccagaaaatgaaaggaattgaaattaagagaagggagagattgaagagtggaaaggagaaagtggttgagggacagtgagagaggttggagaagagagtaagaagaggccacttacccgatttaaaattggtgagatgttccttgggctggttggtctgaggacctgaggtcgtaggtggatctttctcatggagcaaagaacaggaggacaggggattgatctcccaagggaggtcccccgatctgagtcacggccccaaatttcataggcgtccatgt

SEQ ID NO: 21659 - DNA, 1413 bp, Artificial sequence
  DNA replication origin
gtcctcaaaatgttcatactctttgatgaataattccaacatcaggcattatacagagggaatcagagatgtggctcagggcacttgtcacaaatgtgggtgatgctgggaacattagttaatgggcaaaataaagaaaaaacactttctctgcacaaccaagttggggtatgagtccaatgtgctccccaggacacctgtaagcacacatgtatatgcgcatcagaacagacacgggtatgctggagatcccccctgtaaactgcctaaaaggcattagctccaaatgaccatcacagaggagaggaatcatcagaggagacgaggggtgtggaggagatgaggagcatgggggagaccaggagggcagggaagacaaggagtgcgggggagacgaggggtgcgggggagacgagggtgagggggagacgagggtgaaggggagacgagggtgcgggggagatgaggggtgcgggggagacgagggtgcgggggagatgaggggtgcgggggagatgagggtgagggggagacgagggtgagggagagatgagtggtacagtggagatgaggggtacagcagagatgaggggcgctggggagatgaaaggtacagtggagatgaggggtacagtggagatgaggggcgctggggagatgagaggtgcagtggagatgaggggtacagtggagatgaggggtgcaggagagatgaggggtacagcagagatgaggggcgctggggagatgaaaggtacagtggagatgaggggtacagtggagatgaggggcgctggggagatgagaggtgcagtggagatgaggggtgcaggagaggtgaggggtacagtggaggtggagggtacagtggaggtgaggggtacagtggaaatgaggggtacagtggagatgaggaatgtgggggagatgagggatccccaccctcagtgctggcctgtcttcgcctgtattcgtgctcctccatctgcccaccccagggtccacccacagctggggtcacagctcagccacctgggctgaactttccacatcaggctccacgaggctccactccctccagcaccccactggccacccagagccccaaggccagagctgtcttggatccagccccccacctgccctcacccccaaagtcacctacaattcaccatgggggctgggtgagaccagaggccctgcccctgccctctccacttggacccactttgtcaactgaaaagtttctccgaaaaaaactgcacactggcaatatgttttgctatgggccaaaagatttcccacatctggagtctgaatcaacacacatacgtcctctgagactgggaaagcagtccccatccccgtgcaagtccccccgccagcatgatccccaaactacctcgccggcgc

SEQ ID NO: 21660 - DNA, 1131 bp, Artificial sequence
  DNA replication origin
tcccctgctgaacctcttcctgggaggggcctcaggggttcttgctcactcccaggacctgttcacgcgtgtccacaatttggtcccccttgtgcctgaaaaccttccaggaggacgctcgccttccactgtccacagcccccaggtgggaaggccttttgggggcggtcaggccacctgcaggaacagagttcgaaccttgttctagaacgcgtcatggaagtcagcctccctccccaccctggtttcagatgtagaaactgaaacccagcttggggaccgccttcctgaggacacaacgctgggtaaggctgggcttggccctgctggggaaaaggggtcagggtgggatctggggagcaggaagctgtccactgtaggaagaggggaggggaagacccagagaaagccccggctcctggccgctccccagcccagcccagcctcagccccaggcgggtccaaggtaagtcaagggctccgaagtaagcttccaacgggaaggggtgagagccgagggctgtcttcacagctggaggggtctgagtcccaagccagggaaagaactctgggtcagctgaccctggtgggtgtggagcaggccccggaggacactaccagcaggccgccgggcagctgggagtgttccaggtggcttccaaggacccgtgacgctccccacgttcacccactgccctccgtgtgggagcgcactgggggtagaagtcctcagcacaagcagaacggccactgtcctgcagggagacattcccctctctgttccagaagagtgtgtgatgtcacgccagcctcaggggagggtgccggcagtcttgcccgggccaccagcaacagtggctctcgaggaaggacccggaagttggcccgcaaagctggccccaacccactctgatctgtggtcccctccatggttgcaggaagagtggtctcttttgtcttggcttacgatcgtccagtcggggtgagatacgtgtaatttgcgatatttatgcttattttgctatttcagttttgatcaatgaaaggacatctttgcctaagaacacagtttttattactaagacaatcacaggtaacccccagagaatttagtctcataactgtgacaag

SEQ ID NO: 21661 - DNA, 2504 bp, Artificial sequence
  DNA replication origin
gccatctggaagggaaggacagggcgggcgggtcggaacccggagtgggctgcgccccgaggcaaggagtgccggggctgcggggaggagcagaggcggcggccgggccagggccctggcagaaccgtccctgggcagaggaaagccgaaggggaggcctcccgggggcgcagggtcggcccggcgccagtagtaccttgagctgcggctgcgcccgggttcggagcgtcggggtccgggtgcggtggcgggtctgggcggcaggtccgggcgtcgggccgggtcgggtgggctctggcggcctggggcgctcaccgcatggcgcggccggcagcaggggcagaaggcgcgggccgggtccctccacgtgtccgccgcccggtgtggccgccgccaccgccgccgctgctatatatgcggcgcacccgggagccgcccggagtcgcgtcaccggctcagcgcccgcctcctgcaccctcgccgagccccgagggcgacgggagtgacccgagctcgggtcctctgggccatcataggcgggtgcggcggagagccccccctcatcccgcgggagagactcccccaaatctgcagagagaaccccaaaccctgtgggagagaccctaatcccgaaagacagagcccaatcgccccgcgggagagcccccagacccgtggcccaagtcatcgctgtggcgtcaaccccactgctccccccggggtcccagccccagagcaagcctgaccccccacaacgtcccacgcctgcggtctccctgcagcttctcctcccagcccctaccgctgcaaaagccagctgagctccgcagcactggagaccccagagggtgacgggcagggacgactcctcagtccgagccagccccagctgggaggtcatggggtacccggggaatggcgggcaacacttggccctgcgccctggccggcttgtgctggggctggagcgaaggttcaggcctcgggagccgtcgatggcggggagggcaggcgttcccggctccctgtgcccagcgacctccctcctgtttcactaaaggggggctgtggatctcagggtctgcttggccatcccattgtgggagctgcgggaccgtcgagcatccacaggcaccagctcagaagctcggcctctcagtgcctcccctggctgcctggtccagttgtaagagggagctttaagcaggtccagccattgggcaactggttaggtccagagggagagcagcccagactcccagaggccgccaaggggtgggcggtgggcagagcagcagcaagaggctgtccttgtgcccaaggcaaagacatcccacaggaacaaggccctccttggctcctccacaaacccttcctgagctggggccaagtcccgaaacaacccaggagagaacccaagcctaggctgttccttcaccccattcccaggcatcaggggagcacaggatcccaggcatcacacttgtacagtgtggcacctccgggcttccgaagagcacggggtcatctgctgaaaactcgcctgacctcccctcccactggccagacaccacccaagtcctcaacagcagcagctgggttaggatctccccacccactgggctcaatatcagatgggttgatgtcacatctgtgggttgatgtccacagggcacaggacgaatgatgatcatgacagtgtcatcttacctgtcctctacactttagtcttgggaacctttgcacagacagctacaggctgcccccaggagagatccgtctgcctccacgtggctggggaaggacaactgggctttcaagaactctggcgaaggccagcggctgctggagaaggtgcagggctgcagcctggtggctgagtgtctgctgtggtttatgggaggaagaggaggagacaggacttggggaggggtcttaggaacagactcctggcacgacagtggtgaggggtggggtgttcccaagggcacagtttgacttctggtcatccctatttcttgcagcctggggagaggagagtcaggcacaggggaccctaactaggactcacaggctgatttcggagcccacagtaaaccctgaagtggtttcctgccgggagtgggggcgtgggagacagtgagtcgccatgagagtctgggccagccgtgggcagaaggacagccgagaggcggaggagcagagggcacgttcctgtgactctgcagagaagtgacaatgatgtcctctcatgccccatgtccttgtgtctagatgacatcagggagtgggcaggggctgggctcatgggtgcctcttggctacctgagaaatactgcaacctttggcccccggtggtagtgggagccctgctaccatcccagagctctttcttgctttctgctgagaacaaatccagcccagtgcatagcacatcttagtcaattccagccttctcctttcttccacgttaggcccccttccaaatcctgccagagcttgac

SEQ ID NO: 21662 - DNA, 1512 bp, Artificial sequence
  DNA replication origin
tgaggtgccctctgagtggcagagctcagggttgcaaagggttgaggaaatcagccgaccctcaggcaggtcaggccactccatgggcagggagaggatgagagggccgcacagagaccagcaggctctgtggtgaacagcctggaccgatccgcacgcggcctcaggcggctctgtcatccccgtgtctgtttcttaaagcctgactctgggggtcctctgagtgaccccgataaacaagcgtctgcaggaggaggaagctgtattcgactctgggactgagaactaagtcagctttccttggcatggggagaagagcaccattctccccatttgctgctccgcggggctcagataggccctgcgtgctgttcacatccttcctctggcagaaggcagtacagggaggcttttaaggtggatggtgaggtgtggaggggaaggtgagttacaggagggaaccaaggcctcctcttgtcccctcctttggaggaaagtcagaaggcattgctgcacagaccaaggatgtggagaaagtagaggcctgggacaggggcgggggcggacacggggaggtgtcagcctgcagtgtcccatctagggctagggctcacctcaggcagcaggggacaccgctgacacaggtgacaacaacaggacagggagagggaggggacacaggcttgggcaggcagggtcacctgaaccttgttttgaggggagcctgtctgggctgccttcaggcgatctggcaattcccgtgtggagcttggagaaagggaagagggaggcaggatttggggtccgctgacctagggtgctctgcaagccgaggagttgagtgttttgggagacccgggggcctggggagaggcccagaacagggcctgtaaggactgcaaggcgggaaagcccaggagaacttgagcaaagcccagggtgggaatctcaccccgggacagggcggcagagccggggcaggagaagcttctggaaagaaccgtacacagatcaagtgtgcagagcaatggagacgggcaatgaggtcaagagggaggccagagggtctgcccagccgcaggcggaggggcaggagccagggttcaaagcgaggggcaggtggggtcaggagtggggaggccatgctgtcagtcacttacgtgggcccagcaggtagcccgcgctgttcagggtccagcctcgtttttccttggccttgaagggagaaaaggggatcagatgccagggctgtgcctggagcctatgctgaatgggtgcacccaggctttcccggcatggcagaggacttagaacaatgcatgtgcttttggatagctcgcgaaattccaggtttacccctaagtcggctatatttgacatgaaaatggaaccactttatttacgaaatacttcacttgagggcctgagcccgcgcactctcagcgcactgcacctgctttagtgacgctgaggccacgccagtggctcctagccctccattctaactaagcc

SEQ ID NO: 21663 - DNA, 1037 bp, Artificial sequence
  DNA replication origin
gcatgcacctgggagctggtggaagtgaggtgccccggggcccgggataggagtcctctcacctggtttcatgtcatcttcgggccgcagctcccgcttgctggtgaggccattcttgtcgctgaatgacctgtggttgccaacggcatctgtttgcagatcagagaggaaagcctctgggtgtgactgtcatgcacgccctccccacacccaaagaaggacacagggctgcctgtagccaacacacacacgcaactcgactgtgaaatagagcccagggacagacaccagagcagagggagcgattctccacccagctgaggtaagagcttggccgctcacaccagggtcaaagggaatgtgagggtttgcacagggtgggtgggagaaagggaggtgtggctcctgaagtgggggagaggcccagaacctgccctgttgcaggggttgcgcctgggtccagaggagctggcatctgagctggcactgagctggcatcaaactgggtgactccctggcagacaacaggagctgggtcctcatgtccctgaaagcatgggggacgctgaagagtttaagttgtgactgaatctgatttttattttcactctggcagctgtgtgcaagatggactggagccagagagagagaaggagagagacagagggagcgagagggtcacagagggagacaggatgggggtggggggtgcaggagcgtgtgtgcgttcccgtgtgtgtgtgggtgtgtttcgtggtgcgaaaatggaggaactgtgattgcaagcacagagatcccagaattccagggaagaaacgatgaaggctgtaaaccaagaggcgtggggtgaagaggagggctggatttggggctgtgcaggaaaggaaatggaaatgagagatggggacgagggtgaggacgcctctgtgtttccagctggttggcctgggtggactgtgccatctacaaggccagacaaaggagaattaacgcgtatttccagagatgccgttcttggtgctaaatttatagaggaa

SEQ ID NO: 21664 - DNA, 2499 bp, Artificial sequence
  DNA replication origin
gcgcctgaggcccggcccacgccccatcccgctcgctccacgctgcggcagccccggcggccccaggtgcgtccctccgaggaggaatgacggggcggtccccgggctgggcctcggctctgcaggcggggatgggggctgccgggccgggtcgggcccctgcgggtgggcggagggcggcgggccgtgggcgaggccgcccctcacctggtcgcacctcacctggccccccctcccctggctgctcctcacctgaccccctcctcggccgcccctcacctggccccctcccctgggcgcccctcacctgacccccaccccggccggcccctctcctggccgccccttacctggtcgcccctcccctgactccctcccctggtcgctcctcacctggccgcccctcacctggccccctcccctggccgcccctcccctggtcgcccctcccgtgaccccctccccggccgcccctcccctggtcgccgctcacctgaccgcctcccctggtcgctcctcacctggccgcccctcacctggccgcccctcacctaatcgcccctcatctggtcgcccctcccctgaccccctcacctggtcgcccttccccgggcccctcacctggccctccctcaccaggccgccccctcccctagccgcccctcacctggtcccctcccctggccgcccctcccttggctgcccctcccttggctgtcccctttcctggccgcccctcccctcgtcctctcctctggctgcctctcacctggccgcgtgttgcaggtgcgcggcccccgccatcccgccccgccgccctgcgccatggaggagggccctctgccgggcgggctgcccagccccgaggatgcgatggtgacggagctcttaagccccgagggtccgttcgcttcggagaacatcggcctgaaggcccccgtgaagtacgaggaggacgagttccacgtcttcaaagaagcgtacctgggcccggcggaccccaaggaacccgtcctgcacgcgttcaaccccgcgctgggcgccgactgcaagggccaggtcaaggcgaagctcgcggggggcgacagcgacggcggggagctcctcggggagtaccccgggatcccagagctcagcgcgctggaggacgtcgcgctcctgcaggccccgcagccgcccgcctgcaacgtgcacttcctgtcctcgctgctacccgcgcaccgcagcccggcggtgttgcccctgggcgcctgggtcctggaaggagcctcccacccgggcgtccgcatgatcccagtaagaaccgcctggggaatgggcacagctccccctccatcccttccccaacccatctgaggctgctagtgtaccccaggatttccctctacaagcattttccctggtgacaccacacacagcccaccggagtcactgattctcggtagagcgtatactctttgtcgtcttcctaatccaacatgcatcggcccagccaagccctttcccctggagggaattctgccctgcaccagtcgtccaaagctgacctaaccatgcagacggcggacaacaaaaaaagggggaaagctaggacgtaggttcccttgggccctgttgctatccttggcttaaggagagaggcccgctgtctgctggtaactattgtctgtgaaaacaaacgcaatgtggtggagggttggcgtgtttgcatcttgcattttttttttcctttaactttaccaggcttggaatccacagcaaggactcagagttaatacttggattttccgggccttgaagtcaagatgtgagatcttccctttgctaatgagtaatagctcttcaagcatatgcaatgtaaatcagagcctaaagaaatgcttgccagctctcagccgactgccctctctagctgtagatgaccgctgataattttccgctttgttcttgccaaaactaatgagttttcaaaggaaacaaagggtcccaggaaaatgtgttctcgacccctcaaaaaggacccagctcagaaaacgagaccactcatccatgaggtcattttagtaagttgtagatgaagcgtttgtgggacacaatgcttgagtcagtattgagatggctggagcctgaccctgtatcataagccagagcagcaggagcttggatttctgctcttccggttttctgttatggtaattgccagtccttagtgtacaggaaaaggatgggcagaggctggggcctccactgacctctgtttgtcctcagaggagccatagagctcaccagttcccccagccgtttcccaggacagaggtctttctcacagcctttctcagagggcttgaaatgttaagaactgcattttgctgcccagccggattggtgtccagcgcctcctgcccgtaggtcctagctcggctcatttcctcacagagtggagtcagaaagcattaatcagaacagggaagataatacaaaaattaaccgggtgtggtg

SEQ ID NO: 21665 - DNA, 1343 bp, Artificial sequence
  DNA replication origin
caggggaggggcggccggggagggggtcacgggaggggcgaccaggggaggggcggccaggggagggggccaggtgaggggcggccaggtgaggagcgaccaggggagggagtcaggggaggggcgaccaggtaaggggcggccaggagaggggccggccggggtgggggtcaggtgaggggcgcccaggggagggggccaggtgaggggcggccgaggagggggtcaggtgaggagcagccaggggagggggggccaggtgaggtgcgaccaggtgaggggcggcctcgcccacggcccgccgccctccgcccacccgcaggggcccgacccggcccggcagcccccatccccgcctgcagagccgaggcccagcccggggaccgccccgtcattcctcctcggagggacgcacctggggccgccggggctgccgcagcgtggagcgagcgggatggggcgtgggccgggcctcaggcgcaggcggccgttggcggttggagaagggggaagggtgagggacaggaacctggggggaggggaagaggcgcccgggcagtgggcggggcctgggcgtggggcggagtcgaggtcggggcggggaggtaaaggcggggccagggaggtgtggtgggcgtggtctggggcgggaggagacagagtcgcgaggggcggggcctggactgccgctgttgccagagcgggtcaggggaggcactcccaggttcagccgatccaggctcaggtggggaaactgaggtccccatcaactcgggcagcgctaagtgggactgcctagcttggcttctgaccttgggcttcagttatatttttctggccaggcgtggttgctcacgcctgtagtcccagcactttgggaggccgaggcaggcggattacttgaggtcaggagttcaaaaccagcctgggcaacatggtgaaaccccgtctctactaaaaatacaaaaattagctggccgtggtggcacgcgcctgtaatcccagctacttggaaggctgaggcaggagaatcgcttgagcccgggaggtggaggttgcagtgagccgagatcccgccactgcactccagcctgtgccacagagctagactccgtctcaaaaaaataaataaaataaaataaaacatttttctacactcgagctctcaagacagatcccggcctgggacgctgcgggtggacagagggcaggggcttgcaccgcacgttcccagccttgcacccactcccggtccttggtgacgcagcttacaggtgcaactgatggagttggtcccgaaatagaagtaacaaatacggctgggcgtggtggctcacgtctgt

SEQ ID NO: 21666 - DNA, 862 bp, Artificial sequence
  DNA replication origin
ttctcgcaggtgtggtgtgtattgtataggagggtttctcacctcagagctgtgcacactcagggccgggtacctctttgtggggggcactgccctgtgtagcgttggatgctgagcagcagccctggcctctgcccaccgactgccagcagcaacctgtgtgacaaccagaagtgtcgcagacattgcccagcatcagggggacactgttgtccccagctgagagctgctgcgttccagcagtgtgacaactgctacgctatcgctgggagtaaggcgggaggggcaggtgttggggccccttctgcaaagatcaggagaggttctgtgctgcgtggaggggccgcaggtgggctgtgtcttgcagagggtgggagcagaccaggaggacagtgggtgtccagggggtggagccgcatgccccggggtagcagagcaggcaggagccgtggagtgggctgggcagctgggccacggtgccaagctggggagggtcccaggcacccaatcatatttgagcttgattctgcaactgggtgccgcttcaggtggtgtagggtggggtggggccgggggtgcatgagtaggttaatgtgggagattcttctggttgggcagggaggaggggccctggacacagggatgcttttcggtggcccaagtagtgagggcctgaaagagggccaggcctgggagcaggagcgggatggaggaggatgtgtgcgggcaagccggcgttgttcggtatctgctgtggtgttgacaaggctggaaagagcggcggcaggagatgcatctcgggtgaagatgcgctcatccgatgccctcctctcagagcctggaatccccagcggaggagacg

SEQ ID NO: 21667 - DNA, 2045 bp, Artificial sequence
  DNA replication origin
actccatgagtcatatgcgcagacacctcaagaatgggtgtccacagacggagcgggccttcttccttggaggcagcggctgaaacggaacgtgccttggcggccccacgggctaaacggatcccggggcgctgcagtccagacccaagcacagcccctggggagagcatcccctggccggctgcagaaaactgcttccggatctgctacattcttcctgtacccttcatcctggctccggccgccttccttcaggctccttggcacagccgctcagcacaacacagcccacccccatcccctcctggaccccccggggtggtggctcctgcccttctcacggtgcctcctccacctcctcccaagctgcctgccacaaagtactaaatggataaaagagaagctaagaggaaaaaactttcaaggaccataataaaaatccaaaaactcgtgtgtgtgtgtgtgtgtgtgtgtggtgtgtgtgtgtatacgtgtgtgtggtatgtgtgtgtggtgtgtgtggtgtatgtgtgtggtgtgtgcgtgtgtggtgtgtgtgtgtggtgtacatgtgtatatgtgtgtgtggtgtgtgtgggtgtgtgtgtggtgtgtgtgtgggtgtgtgtgtggggtgagtgtgtgtggtgtgtatggtgtgtgtgtggtgtgggggggtgcgtgggtgtgtgtgtggtatgtgtggggggtgggtgtgtgtgtgggtgtgtggtgatgtgtggttgtgtggggggtgggtgtgtgtgggtgcgtgtgtgtggttgtgtgtgtgtggtgtgtgtgtgtgggtgtgtggtgatgtgtggttgtgtgggggtgtgtgtgtctgtgtgtgtgtgtgtggtgtgtgtgtgtgggtgtgtgtgcgtgttctcaccacaggatgattttcctgttttcgcccactgatgccctctgaaggtgagatcaaaatcagtggctatcacagtttcaaagatcccctgttacagaaatcagcctgactcagtcctccaccagccaaaacacagaaccatccgctggcaggccctagaaaggcacccgacttcagacatctgtccatattacaaatatttgttgactgcctccaacgtgccagccgaggagaagagctgcacaccagcagaaaaggtccctctgccctcccacagcttagaccgggctaacaagcaacgcaggagcagtgctctggtgcaggaaggggagaagccgaggggacctctcaggagacagggaagccaggagaaggagcaaccatgggaagagcaggcaagagctggaggcaggaagggcaggaggatggggtcaagggcaggaagctggggtcaagggcaggaggctgggggtcaagggcaggtgtctggggtcaagggcaggtggctggggtcaagggcagggtggctgggggtcaaggacaggctgttgggggggggtcagtggcgggacagctaaggtcaagagcaggccagcggggtcaagggcagggtgtcgggtcaaaagcaggtgtctggggtcaaaggcagggtagctggggtcaagggtagggtgtctggggtcaagcacaggtggctggggtcgacagggtgtctgggttcaaggacagggggcctagtttggagaggaaggcagaggcagccggtgggaggtggcagggttttgtgctagcaatggagaagcatccaagggcccagagaaaggggaacctgccactgtttcttttctaaagaccactctggctgctgtatggagtatggatggggatggggaagcaggaccagttaagaagctgaggctgtcttccaggaaggtgcatgggcctggcccactctgtcagtgacagggacagtgacagtgtggacaatgacccacacaagacagtctgcagaggcaccttgagctgcacttgctggtgaaatgggccctcgggctcctgtcttgagccacccactcagtgaagccaggtactgacaagggacagtctcagggagggaaggaggcaggctggggcagaagctgagaattca

SEQ ID NO: 21668 - DNA, 838 bp, Artificial sequence
  DNA replication origin
cccatcccaccctggctctggagaggattgggtctgggggtccgcccgtgggttggtcacctacgggcaggtgcagtgcggctgagggaggggtgctcggccctcgggattcggcagggcgccgctgaccccatcccagcgtccgtctccccggtccccctccccatgcccgccctcgcggtgcagccgtcgggacacgcccttggcgcagggactccaggcgcggtccgagcgctgccgtgagcaggatgagggtgccgggcccagtgcctgcttgggagcgccccgcagcctctcccgtgcagcgctgggtcaagggcgggtgggcgcggagcatgtgcccaaggtcgtgccgggctgggagcggcggggccgcgggagggtgggggtgtcacgtggccgtgccctggcgaacttggcctgcgagcccgacggtgcggtcagggccacgcggggcagccccttctcggagccaccgccgcggccagccaacagccggcttctttcggtttgtcaggagaggccatgggtcagcgtctttataatgtaaatccgcccttggctttcgttaaagccgcagaactcaaagatgagggccgatcttactttaaaaaaagaaaacaactcagagagttaaaaatcccaactacctaccaggttaaatacataacaaagttaatattcccaactcggcacaggctttcggttcctctcggctccgtgtgttataaaatatttaagggcagattttagtaggaagctggtaactttgtaagttaccgaataaaatgaaaatcggttttaccttttgcaacgttgtattttgttacaccatttt

SEQ ID NO: 21669 - DNA, 1635 bp, Artificial sequence
  DNA replication origin
gccgcacgggacccgcctgcggatggaccgacccccggtggaccctcagacccaatcccctggggaacatggggagccccggcctctttctgggttcaggatctccacaaccccgccgtccggggggaataccggggttcctctcggcgccccggttccggcggcgtcccccacccggtccggttcccggcagccccgcgccccgcccgtccccggcccccgcagcccgcagggccgccccgccaccctccccaccgcgggcgaccgggcctcaccgagtcagctacggaggtgcggcagcggcagcggcagcggcggcggcggcggcggcggtggagtgaacgagcggcgagcgggagccggggaaggagggccgcgggcgaggccgagcgcacccgacgccggcagcagcggattggctgaggcgggtccggctgcggcgcctgcaggcgggtgactcccggcgcgcggagggcgggcccggggcctcggcggggcggggcgtccgcggggctaggaggggagggaaactgaggctcgagcgggtgctcgcgtcctcgacctctgccggaatggggtctaggacgagattcctcaccctccgagcctcagtttcctcatccgtaaaacgagccatctcgtggaggccgtgcgcataaaatcgcttagctccgtgcctggctgatcctcgcgacttatctatcggcattgccccgtgtaatgctccaggcaccccctgatggtattcacccctgactctttcatgcagacaagggtcgcgggccaggaaataagttaccccacatcaccgagctgagaagcaaccgatccacagggagtggtggggcgcgcctgtaatcccagctactcgggaggcgggaagtcgcttgaagccaggagttcgaggccagcctgggcaacgtagcgagaccccgtctctaaaaaaaaaagcgcggggaagtgatagatcggacattgggtccagatctgattccacagcccatgccccaaatcagaccttataccacgagtggcagtcatcgcgatccagaggcagcgtggctcctcctcatctagctaggataaaaatgcctcacttggggggctttggtgagatttactaaaataattcttccagcgtcaagaacataataggtgctgggagaggagtagctggaggccagggcagagcgaccgagagacccttgtgctggagctcgggagaggggccgggagcgggaactgaacatccaccggtcccaggagtctagggcgagcgcagctgcaggggacccagggggttgagggggagggagaggggccccaagcgtaacaggagggccaagggggtcttcctgaccgggagccacccctcccctatctttgcccgcaatgcttccaggcgcgagctggcggctctgcatacagcaggtgctccataaatgcaccgatgttatgaacaaagactcttttaaacctcttttatgaaccctgctctttttaagttcgaccacttcttctagttatgaaaaaatccatgtttgcaaccatccttctttctgtatcatttagttgttaccgcagaagaatttagaagagaaaatgaaagttctcctttgatcccgccccccacca

SEQ ID NO: 21670 - DNA, 1285 bp, Artificial sequence
  DNA replication origin
cagcactttgggaagccgaggcgggcggatcacgaggtcaggagttcgagaccagcctggccaatatggtgaaaccccgtctctactaaaaatacaaacattagccgggtgtagtggcgagcgtctgtaatcccagctactcaggaggctgaggcaggagattcgcttgaaccggggaggcagaggttgcagtgagccgagatcatgccattgtgctccagcctgggcgacagagcgagactccatcataaataaataaacaaacaaacaaataaataaataaataaaaagaggagccgagggagagcctgggacggaactggggctctccatgggcgcttagaggagctgaggaaggcgggggacacccgcacgccccctccctagcctccgccagctccttcccagagggaaggacccgcggctgcgcgggcgccctggaactagactgcgccctggacccccagcccctctgcggtcctgcgcgggcgccggggccggcaggggagggggctgcagcgcctggactggccatggaattatgttgcatgaaaaacaaagaaagcagcgctattcggccggtcggccgctccctccccacctcccccgaccctgggccttagaggagggtcacttcctcctccccaccggtccctaccgccagaataccccaactcttctttcctccgtccgaaacctgtgacttcaaggaaacaattagcttctccggcagccaatgagcgcccagccaattccccatttttccaatgcacaaacgttttggggggttggagacgcccaggaccccagaaacaggacaatcgcagtttcggactggagcggcgaggggggagagacgggtgggtcttagacaaggaagaagcctcactgcaagcacagcggaggaaggcattatgtctatttggggtaatggggggacgcaagtgacctccgagtggaccttgaaggctgagtgggaatcttccagaagggaaaggagacagccattgggttatatttcaggatcaaggtcagcgtgggaggtccgggcacccacacccacctcccaggcagactgaaagtgctgtactgtgcgcatctgtcctatcatgaatggacgcatccaatgtggtctgtccggacaaacagagtactattcagctatacaaaggagtgaaacaccgacccaggctacaacattggtgaaccctgaagacatgatactcagtgaaaaaaggcagtcaccaacgaccacatgttgtaggatcccattcctatgaaatgt

SEQ ID NO: 21671 - DNA, 1436 bp, Artificial sequence
  DNA replication origin
tcccatgtatacttctttatacacagacacggcaaccatccgatttctcaatcttttccccacctttcccccttttctattccacaaaaccgccatcgtcatcatggcccattctcaatgagctgttgggtacacctcccagacggggtggtggcctggcagaggggctcctcacttcccagtaggggcggccgggcagaggcgcccctcacctcccggacggggcggctggccgggcggggggctgaccccgccacctccctcccggacggggtggctgcccggcggagaggctcctcacttcccaaacggggtggctgccgggcggaggggctcctcacttctcagacggggcggttgccaggcagagggtctcctcacttctcagacggggcggccgggcagagacgctcctcacctcccagacggggtcgcggccgggcagaggcgctcctcacatcccagatggggcggcggggcagaggcggtccccacatctcagacgatgggcggccgggcagagacgctcttcacttcctagatgtgatggcggccgggaagaggtgttcctcacttcctagatgggatggcggccgggctgagacgctcctcactttccagactgggcagccaggcagaggggctcctcacatcccagacgatgggcggccaggcagagacgctcctcacttcccagatggggtggcggccgggcagaggctgcaatctccgcattttgggaggccaaggcaggcggctgggaggtggaggttgtagcgagccgagatcacgccactgcactccagcctgggcaccattgagcactgagtgaacgagactcccgtctgcaatcccggcacctcgggaggccgaggctggcggatcactcgcggttaggagctggagaccggcccggccaacacagcgaaatcccgtctccaccaaaaaaaatacgaaaaccagtcaggcgtgcagcgcgtgcctgcaatcgcaggcactcggcaggctgaggcaggagaatcaggcagggaggttgcagtgagcagagatggcagcagtacagtccagcttcagctcagcatcagagggagaccgtggaaagagaggcagagggagaccgtggggagagggagatgggagacgggagacgggagacgggagacgggagacgggagacgggagagggacttttttttttttttttgagacagagtttcactcttgtttgcccaggcgggagtgcaatggcatgatcttggctcatggcaacctccgcctacctggttcaagcaattctcctgcctcagcctcctgcgtagctgggattacaggcatgttctaccatgcctggctaattttgggttttttttttttttttttttttgtctcgctctgtcccccatgctggagtgcaatggcgcaatctcggctcactg

SEQ ID NO: 21672 - DNA, 922 bp, Artificial sequence
  DNA replication origin
aaagtgaggagcgtctcagcccggccgccatcccatctaggaagtgaggaacacctcttcccggccgccatcacatctaggaagtgaagagcgtctctgcccggccgcccatcgtctgagatgtggggaccgcctctgccccgccgccccatctgggatgtgaggagcgcctctgcccggccgcgaccccgtctgggaggtgaggagcgtctctgcccggccgccccgtctgagaagtgaggagaccctctgcctggcaaccgccccgtctgagaagtgaggagcccctccgcccggcagccaccccgtttgggaagtgaggagcctctccgccgggcagccaccccgtccgggagggaggtggcggggtcagccccccgcccggccagccgccccgtccgggaggtgaggggcgcctctgcccggccgcccctactgggaagtgaggagcccctctgccaggccaccaccccgtctgggaggtgtacccaacagctcattgagaatgggccatgatgacgatggcggttttgtggaatagaaaagggggaaaggtggggaaaagattgagaaatcggatggttgccgtgtctgtgtataaagaagtatacatgggagacttttcattttgttctgtactaagaaaaattcttatgccctgggatcctgttgatctgtgaccttacccccaaccctgtgctctctgaaacgagtgctgtgtccactcagggttaaatggattaagggcggtgcaagatgtgctttgttaaacagatgcttgaaggcagcatgctcgttaagagtcatcaccactccctaatctcaagtacccagggacacaaacactgcggaaggcctcagggtcctctgcctaggaaaaccagagacctttgttcacttgtttatctgctgaccttccctc

SEQ ID NO: 21673 - DNA, 947 bp, Artificial sequence
  DNA replication origin
ctatctacaacaggcatgcacggctttaaaccagaacacagaaacctggtctccttgggaagcaggagtttatttttatccttttgtaagtattaactcggtaatcacaacaaacacggagcaatctcaatgctgtttatccggaggacagtctgcggggtcgtgacgactgaaagaaaggatgtcacaggcttgaccacagaccctgactgttgtcatcagttacagcaggggctctgcacacagccctccccagccagcgcgaccccggcaacgtcccctgctgcacatggccgtgtttatctccaggtgtgcactgactgcctcgctagcttgttcgttcactctgttggcaggtgcagaggctgggacaccagacgcctcatggccaggagtgccctgcgctggcacctcacctctcctcccacactgtctatgctgtgacttctggagtgcgtgggaggatggccccacctgagtgaccttgaggctacctggaagtgtcagaaggtacatgagaggctcccctacccagatgactctaaggtgacagccaataccagtattctgggtatatttaactatgcccactgttggtggtttaggccggcaactgcagttatagcaagagctgtgagggacagaattctgcagccgctcagctatgtggcccatgccccgtgggtgccatccctcaggatgcccactatgggggatgtcctcagtgcagacctgctaggacagccctacacctgcttgcggattcactgctgctttggggacagtgctaggcgtcatgggttggaacaaagtggggtcatgcgtggagggtggaggagaaggggagcgaggtggggtcacgcgtggagggtggagaaggggagcgaggtgggttcacgcgcggagggtggaggagaaggggagcgaggtgggttcacgcgcggagg

SEQ ID NO: 21674 - DNA, 1234 bp, Artificial sequence
  DNA replication origin
catgagaggctcccctacccagatgactctaaggtgacagccaataccagtattctgggtatatttaactatgcccactgttggtggtttaggccggcaactgcagttatagcaagagctgtgagggacagaattctgcagccgctcagctatgtggcccatgccccgtgggtgccatccctcaggatgcccactatgggggatgtcctcagtgcagacctgctaggacagccctacacctgcttgcggattcactgctgctttggggacagtgctaggcgtcatgggttggaacaaagtggggtcatgcgtggagggtggaggagaaggggagcgaggtggggtcacgcgtggagggtggagaaggggagcgaggtgggttcacgcgcggagggtggaggagaaggggagcgaggtgggttcacgcgcggagggtggaggagaaggggagcgaggtgggtcacgcgcggagggtggaggagaaggggagcgaggtggggtcacgcgcggagggtggaggagaaggggagcgaggtggggtcacgcgcggagggtggaggagaaggggagcgaggtggggtcacgcgcggagggtggaggagaaggggagcgaggtggggtcacgcgcggagggtggaggagaaggggagcgaggtggggtcacgcgcggagggtggaggagaaggggagcgaggtggggtcacgcgcggagggtggaggagaaggggagcgaggtggggtcacgcgcggagggtggaggagaaggggagcgaggtggggtcacgcgcggagggtggaggagaaggggagcgaggtggggtcatgcgcggagggtggaggagaaggggagcgaggtggggtcacgcgcggagggtggaggagaaggggagcgaggtggggtcacgtgcggagcgtggaggagaaggggagcgaggtggggtcacgcgtggagcgtggaggagaaggggagcgaggctggaccctctgggtgctccctctaggatgagggtggcaagtgggcagtggcagccaggttgagacctgcctgggcttcctgtcccgagacccacgtgccccacaccctccgtccgcatgcgcctgggcaaccagcaccgtgcaacagggcccagcggtactttctctaacttacttcttttcttcttgaagtttttccttttcctgaatctcataatgattcttggccatgattctgtcttttcaatgactgtggctt

SEQ ID NO: 21675 - DNA, 1220 bp, Artificial sequence
  DNA replication origin
ccgccctgcccggtgccccagccttctgcactggcttgtgttctggccagatttgctgggtgaccccggcagcctcaggctgacacagtccttccacgggcagccctggcggaacagcctgtccttttctggcatttcccacaggagtctcagccttgagccttgctggtctggctcaggtcgtgttcccatgcgtatctcatttggtaggaaaaatgtaccttctggagtatcgggaggatctgtggaagtggccatcataccttcctggtgtgcaggcatcacacatagggctgtctgaggctggcggctgtcataagccaaaagaaatgatcaaatgccagggacagggtgtggtattggcgtgcatgcgtgcccgtgaggagggcgaacgggaagcctttccccatggggctcctgcaggctccgcttcccaggtcctggctgtttcacagcgtgaggccctctgctgagctgaagggcagggtcttgctgcgctggcatgggtgggtgaggaaaccacagcccggctggtgtttcaggtggacctgctcagacagagccttgtgcacaggcaccctgagcttgaaatcaagtctgtcgatggcttccaaggccgagagaaggaggccgtgatactgtccttcgtcagatccaacaggaaaggtacggagccctcgccagagtcctttggggacagcacagaagtgaatttattgattgaggggcatattgggtgtctgctgggtgccacactggtttctggcagtgtgctcatggtgcaccttctgtccttagtaagttcacgtcaggcaaagcacaggcaagagagtctgcagaggctcagaggcgtgagtgtgctgtcagggagcaggtggctggggtggcagctgggggcgcagggtgggctgggaatgatcaggacatcctgccgaggaggtgaagccccctgcagcccagagctggcctttagcctccatgcacggagccgcggggtgtggtggtcgtggctgtggtttctgtgctgctgtggtgtgtgggctttcccatttgggatgagcattgttcccagaagcaggtttagtgaacgggctttgtgagacattctcagaaggcagaaagcaggtgaggcctggctagaagctatgggggaaagaagggaaggtcctggaaggtttcttgtgctttctccctggtgccagctgcagccacaccccagg

SEQ ID NO: 21676 - DNA, 1643 bp, Artificial sequence
  DNA replication origin
tggggggccactaagagcccaagagacaccaccatcgggatggataagctggctgcccctcccactcacagagcaggtgcatgggccgtcccaacaccccccccccaccacagcgacccccagtggcgtgccaggggctctaagagtgactcgaggctggccctccaccgggcaggcagctcctccagctcgtaaacaaaatgggccatccggaagaggcagcaaagcaggacctcgggatacaccacccccaccctgcccccaccccacccccaggcccctaccctgcccccaccccacccccaggccaccaccctgccccccaacccccagccccccaccctaccccaccccaaccctccatcctgcccccaccctgccccgccccacccccagacccctactctgccccagcacccccatcctgcccccgccccaccccagcccccccaccctacccccaccctggtccccaccctcgccaattcccaaagaattgctccccagcgaggccctgtgcagatgggctgtgtgtggctgggaaggagggggccatgtactgagggccctgaaactcaaaagcctcccacgagaccccctgccccaatctcagatccccctcatgcaaattgcttccagccatcatgtccccacccaaccggctcccacagccccagagtggcctgagaccgggggcctccaccatccagcctggacagggaggcccctgctggatgaggaccccactgcagtaagcaattggggaccccgggccattgaaagctgcagaagtgagctggcactccctgttcccaggaatttctcccagggaaaagatttcactgaaacgaccccatagagctgccatgaagatgaaaggacacagtgcaggtgcaggactcggcgtaacgcccggcacgcaacacaaactcgaacgtgacttcgctaataaagacttgggtgccgccctccctcaggccagggcggttcctggcgtcataaggaagttaatcattcaggcccccacagcaccggatactactgttcccagcactatcctcgttttacaggcgaggccaccgaggtctggaggggtttgagtggcttgtcacaaagccaggaggcagcagaagtggactctgcagccagatgttggggctccagagccgtgagcgagcataaccaacgtgctcttctcgctctcaggggtgggtactcgggggaaagtgcgtctcctcccccgtctcatgctctccagccaaccccaagcccagcatggagcctgcatccaaaaacacgggcggatgcttagtatcctccatcgccaacaaagctcaggcctgcaaccggggcaccaggtgggaccaggacagggatgaggcgccattctgaacactggaggaaaaatcaaagcgcacactggttgggggagaccccagctccctgggcagaaagttagaggattctttactgggtgcattagttacctggagagtaactatggctgctggaacaaatgactgccaatttcacggcttaaaacaacacaaatgtgttattttacagttctggaggcccaaagtctaacacaggttggcagggctgcattccttctgtagtctgtaggagagaatctgttcctt

SEQ ID NO: 21677 - DNA, 906 bp, Artificial sequence
  DNA replication origin
gctggctgggacacagtcaaggagggctgacccaagaggcagaggtggctaggctgggtgttgacctcctctcttttaccaaccagcctagggcaaggaggggccccaccacctgggggcaacttctgtacaagaggtctctaggggagcagaatgggtgggggagccgggcaggggccacagggtctgtttgctggtggctgcccagtctcccagccacccctggagtccccagcccagggagaaggaggcccgaggagaggaaacagatctttcttctcctgtatggactcagaagcaggtgcccattcctgtcccaaggcgaagggtcttggaggccgcttcctgcccctgcctcctccaggcgctggagtctcaggaggcgttccccgggggacactgcatctccatggtgactgtgttgggcgtgctgcccccggcctcccccagctcagcgccgtcccgcagggcccgctggaagaccaccctgagcggctcccacagccgctgcgacttgtccctcccggccaggaagtagacgatgggcttggcgctgctgttgatgcagatgcacaggtcagtgacgtactcggggaagggggccgggatctggaagacccagaagaggaaccagtcgatccctaagtagatggaggacaccaggaagacggagaccatggccaggatgacgtggttgagcttggcagagcgctggcgccgtcgggcccggcactccacgtgcaggatgagggccaggcagggcagcaccatgagcgggcagcagagcaggaacaggaggatgcccaggaagatgtccatgtgcctgcaggccgcgccgggggccccgcggcccaggaacacgcagaagtagttgtgcaggcaggtgaccaggagggacaggaccca

SEQ ID NO: 21678 - DNA, 1176 bp, Artificial sequence
  DNA replication origin
gctgctgttgatgcagatgcacaggtcagtgacgtactcggggaagggggccgggatctggaagacccagaagaggaaccagtcgatccctaagtagatggaggacaccaggaagacggagaccatggccaggatgacgtggttgagcttggcagagcgctggcgccgtcgggcccggcactccacgtgcaggatgagggccaggcagggcagcaccatgagcgggcagcagagcaggaacaggaggatgcccaggaagatgtccatgtgcctgcaggccgcgccgggggccccgcggcccaggaacacgcagaagtagttgtgcaggcaggtgaccaggagggacaggacccacagcagggcgcacaccacggccgacaggcgcttgggccgccggcgccagtaccaggcggggaagatgaccgaggcgcagcgctcggcgctgacggccggcaggaggctcacgccggtaaggaacatgcagagccccaggacccggcacacgctgcggatgtagtcggcaaacgtgcccaggaagccccccgtgttcaggatggagaacaccgccttgctgaagaggtagcccacatcggcgctggccaggtgcaggaagtagatggagaaggggttcctcttgatggagaagccgaaaaaccagaggaccagcccgttgcccaccaggccacacaggcagaggagcaggaagatgtagttcatgacggccggaggcggcagcatcgcgatctgctcgatggtcaggaagccccggctgtagagttccggggcctcgctcaggccagggcacatctgcgcaggtgcagagagggacacctgtgatgccggctggcccccacccacagacctgcatctggggcccagcgtgggggagggggggggtcccaattagggacttggggcagggagggggtctgtaaggcagtggctgtggagcagctaactggctgcaactctatcctcaaacgcccctgacctcacctgatgttaactctccgtcccagcgtctagagctagcagcacacaatggtgcctataggagtagaggtagcaccagacagtgcccaggaagggtgccaggctgcccaccggtcagagtagactgtccaaaaaacgtccaagtcgcacaaaaaactgcagagcctttcccttttttttttt

SEQ ID NO: 21679 - DNA, 1071 bp, Artificial sequence
  DNA replication origin
cagggcacatctgcgcaggtgcagagagggacacctgtgatgccggctggcccccacccacagacctgcatctggggcccagcgtgggggagggggggggtcccaattagggacttggggcagggagggggtctgtaaggcagtggctgtggagcagctaactggctgcaactctatcctcaaacgcccctgacctcacctgatgttaactctccgtcccagcgtctagagctagcagcacacaatggtgcctataggagtagaggtagcaccagacagtgcccaggaagggtgccaggctgcccaccggtcagagtagactgtccaaaaaacgtccaagtcgcacaaaaaactgcagagcctttccctttttttttttttttttttttgagacagagtctcactctgtcaccaggctggagcgtgcagtggcacgatctcggctcactgcaacctctgcctcccaggttcaagcgattctcctgcctcagcctcctgagtagctgggactacgggcacgcggcaccatgcccggctaatttttgtattttcagtagagacggggcttcgccgtgttggccaggatggtctcgaactcctgacctcaagtgatccacctgcctcccaaagtgctgggattatagacgtgagtcactgcgcctggctgagcctttccatttttaagaagagcaaagagacatgactcctaaacacagtgttagaatcctggattatacgctggatctcaacaactgctgcagaggatatcgttgggaccactggggaaatgtgagtatggacgatgcagagataatggcattgcatcggtgttgcagcttttgaatgtgacaatgtactgtggctacgcacattttcactatgtggctacgggaacgtccttgttcttagaagatacaggctatttgggcatcaagggcttggtgtctgcaatttacttttgtttgtttgtttgtttttgagacagagtcttgctttgtcaggctagagtgcagtggcccgatcttggctcactacagcctccgcctcccaggttcaagcaattctcctgcc

SEQ ID NO: 21680 - DNA, 2282 bp, Artificial sequence
  DNA replication origin
atcacaatgcactggctcactccggcacacaaggtgcccccaccctgggacaccccgaagaccccaggctgagtcagccgtaggccaggcacaggtgctcacaaacgccctttgaaggcgcagagcggcgcggtctggcagcgcggggccgaggggagccaggccactgggtgggaagggtcctgggagcggcccctggggccacacttgcgccaccagctccgggaggcccagggttaaagagggggcgggccacacgcgcagacggccacctcttctagccaatggtgggcgcggaggccaggagtacggcccgcccccgggcgggaggagtgcgcggcgggcgggggcacgtggctggctgaggccgggcggacccgcgcggcgcagaggaaagaatttccggggagttgagctgagcaggatgcccagctctccccttgggagaggaggggcccggcagcctgcgacctgggctgtgcccagcaaggcccttctccgctcacagcctcagtttacccccccagtacagcagggaataataatagatgcttctctgcggggaaggggcacagggcttcacggggagaagcttcctccaaggggtgaagctcaggttgggggaccgggatcaattccagaggacccaaggcaggcagacccatgaggtctggccggccaaggtggaccagcctccagcagggtcaccccctaccccaggcctcccattggcagccctagggtgggtgcagcttcccctctctatgccagcagtccctccctacggcagctgctcgaaacacaaatctgcaaggctgcagggcatggtgtggctatgggtgtgcctttgggcaggtgacctcaccctctaagcccaggagcgcccatcaaaggggcatgaggatacctggcccatagctggtcatgaggaccaaaccagatgatgggtgtaggcgggctggcagggtaagtggtggtgacagtgatgctgatgaccgggctgtcctgcctcccaggcacatgtaggggaaaggccagatgccttagcatgttacaaaccgcggctcagccaaagccctcctcctccagcaggttccccctgccaggaatgatccctcttcccctgctcctccttctgggaccgattgctgggaaacccctgtccccacaccaggcagggcacaaaggaagtgccccaaaaatgtgtgtggggaagtaaatgtatgtctgcaaaagcagcctggctccagaactctcacaagaaaagggaaaggagagggcttcttttccagtgagctgcggtggggctgacgcggagtccacaggcaggagggggccgtgccccaggggtgacctccagaatctcaccaggacagtcccacaatgcccctgctgctgagggtgtggggtgattgcctttcctctaaggtgatggctgagagccacaggccttgggggcctaggcacgggggtccaggaaggggaggggtccctgctgtcctcatccaccctctctctgggcttctgccaggtgggtgtgcagactggtgagctgccagcaggggcccagacgcgccaggcctggagatggctggaaactgctcctgggaggcccatcccggcaacaggaacaaggtaagtgccacaggcggagggccctggtcttgcccagacgggtgtgggtgggaggggcagacccagcccagcatctcctcccccatcccccccttcctggccccactttccagctctggacccaccgtgggcagtgggctcctctgggctatgtggccgggcacaagttccctggaccctcctaccctcctgtcctcatcagtgaggcaagcaccaggactggacctcaaggtccctcgctgtgctgacactgtggtcgccttgtagcatccttgcaaggtcttgtttcatctcttccctgcagaggtggggcagtcagctacttactacagccaggcgggccaggaagccctgggacgctgactccaaggtggccctgatgtcatgtgctccatggagcctagggggtcctgggccaccccgagagtgttgccccaggccagggtccattagtcatgagtcacccaccctgagactctgacaacccctccaggctgaccctcctcctgccctcagccaacctagtcccctacttctctgaatcccttgaaaattctgggatttccttcgctctcaacttcgaaggatctcttgaattcctatccatcctcttctgcatttgaggaaactgaggcttacacccaggt

SEQ ID NO: 21681 - DNA, 2239 bp, Artificial sequence
  DNA replication origin
tgctctgtatcagcccctgagtaaattaaaacaacggggtggggactagcccctcctgggccagcctgccccgaaatgcccactgggggcagaccaaagacgccaggcaagtgtacagccggtgctccctctcctgggcagccctgccgagcagcagaatgtgagggagatgaacagctggactcgggctgcagtgctcgggccaacgtgacgtcaccaggcggagagatgagttcccggtggggctctggggggggctcctgagcggggcattccttcctgaagcctcatccccgctcagccctgctcagcccctcctcctactcccctccccctccccctcctgccgggccaggaattgggtttggggcgggttctgcttccaaagccatctcttccagcaggagagggctctactctgagctcctattttccaaggctccgggccgcgctcggcgctggcctgctgccccggcgggtccgccggccggaggcgggagtcacaggaagagccctccacaaaaggaggcctcggcggatcaggacagctgcaggtagctccaggggcccagggtccaggggagggtgttccaacaaccggggctgcagggtgagggccaggcagggaaggaaaatgacgcgggcactgtaggggcagagaggtggacgctgtcggggcaggcagctcccagaaatcctaaggccccaggcagggagccctgagaccccagagaggctgtcactcaccggagaagctcccctgccactcctgaggctccagggttccagggccatggaggaactttaaaagtccccctcccgtggcaggacctgacccctctcagctggcctcacccccagccccaccgtccagctcctgctctgtgctgctgggggtgagggctccctctcggtccctcccccagcctcactggccattcaagcatgcattctagaggggctggaacggaacacccagcaggcagtgtcccacacacagggagatggctccccctgctctcagccctggggtgcacatggggtgtccgtgtgggcagccacaggatgttgggcaactgcagtcccaccttctcccaggcctgcggcctgatgaagctgttggccttggatggaggcggctcctggaatgatctgcaaggtctcagtccccccagacaagcctcttcaatccaagctgttaagcaggggactccagacccggagtgaggaaaacagaggctctgtgtctgggggagcgagacaggcccctctgatggcggcacaagcggctaaggagaggggctgggacagccccagcggcgtcggggctgggtcatggtgggatggagtgaagggagaggaggagcttcctgcgggcaaggctgcaggaggctgacaggtggccaggccacccttgggcttgctccgaggggagggtcaggtgtgagctgtgctggcagctttttgggtcagcttcagtggaaactagttctgtcatagcagcccagatcccacccagaggaacacacatacacatgtactgacacgcacgccccatccacgtgtcacacacatgtcctttaatatggcccatctggggtctgctggcttctagatctttctgtgcatgcgtgaaatcgcttttcaggttgtccctggcaggacaaggacaaatgcacagggacacccacataatggagggacgcagatggtagagaggggagctgggggcccccactgcatgcccacctgcagcgtaggggggagcccagcccactgcctttggggcactagttggtgtggctggggtctagcctggccagggtgaatggatgaggctcctgtgagtcaggacatctctggaaacaaggctgggggcccagacctaggggtggtgggtgtccagaagggccaccaaaaagagtaggggcaatggagagagcttggggggctcttaccaggcgcccggaaggatgagggcaggtgataggtctggggttgcagggcaggaaagctcagacaggccccagagcgtggagaagttacggcctgtctgtggcaacgggacaatggcccaactggagtccaaggagggagacttaagatacaggtcgcagcaccagccatctgcaagcccactgcacacacatcacaatgcactggctcactccggcacacaaggtgcccccaccctgggacaccccgaagaccccaggctgagtcagccgtaggccaggca

SEQ ID NO: 21682 - DNA, 2770 bp, Artificial sequence
  DNA replication origin
cagagcaggagctggacggtggggctgggggtgaggccagctgagaggggtcaggtcctgccacgggagggggacttttaaagttcctccatggccctggaaccctggagcctcaggagtggcaggggagcttctccggtgagtgacagcctctctggggtctcagggctccctgcctggggccttaggatttctgggagctgcctgccccgacagcgtccacctctctgcccctacagtgcccgcgtcattttccttccctgcctggccctcaccctgcagccccggttgttggaacaccctcccctggaccctgggcccctggagctacctgcagctgtcctgatccgccgaggcctccttttgtggagggctcttcctgtgactcccgcctccggccggcggacccgccggggcagcaggccagcgccgagcgcggcccggagccttggaaaataggagctcagagtagagccctctcctgctggaagagatggctttggaagcagaacccgccccaaacccaattcctggcccggcaggagggggagggggaggggagtaggaggaggggctgagcagggctgagcggggatgaggcttcaggaaggaatgccccgctcaggagccccccccagagccccaccgggaactcatctctccgcctggtgacgtcacgttggcccgagcactgcagcccgagtccagctgttcatctccctcacattctgctgctcggcagggctgcccaggagagggagcaccggctgtacacttgcctggcgtctttggtctgcccccagtgggcatttcggggcaggctggcccaggaggggctagtccccaccccgttgttttaatttactcaggggctgatacagagcagtggggggcagcagggcgagggctccatggaggggcagtgcagaactggcagaggtggtcagcaccgcccaagcggcacccctcccccttcccaccccggactcggcctgggccccctgggggcttatggaaccaggaattcccttttccccagccctaatagcaatcagatggcgcaagtggaaaatcacggcgctcggcaagcaagctggaaattggcgggctgtggtgcctggtgcctgcgctgctcagcgggaggatgagtcaggtcccccttccccattgagcccctggaggcgggcggtgggggggggtcctggaacgcgttcatgcctggggcactgagcattggtaggggtgggggtgcagagtcgggggtgcgggagccagcagggtggccaggaggagggggtgatgagaaggctcccctcctaccctgggccaactttctcagggtccaggaagcccgagggaattctgaactttccctgcaggagtgtagtgcccagactgggagagatgtgcctctgtgggcatcttgaagggaaatgagaagcggagctgcccctgcacctgcgctgggagctgcctgcctcctgcttgtcctggccatgtgcgaacctcagcgtggaagagggactctcgcactgctccctgcgcggctcagctggcctcctggggtccgtttttcagggatggggtgaggagggactctgggatcctggaggctcacgggccatgcctgaggctgagagagaggctggaggcagcaggcagggtggtgacccgtcccctcctctccagggcagccagctggggcccagctggaacgcttgtttacatggggaggccgggggaggctgaatcccggcgagttccaagtgtaattgcgtttggacacttaaaaggaattgtgtgaagtgggcagaggctctgaagtccaccgccttatttggtatggaaatctgtttctctcaaaataagcgagaggcgcttgtaaacgggaaggtcgtcctggcctgagtttgtggagtccccttcccgtgggcttggtgtgtccggctgctctgttgcagtaccgcagaccaggggcttatcggagcaggcgtttgtttcccatggctccgggggctggaaggccaagatcaaggcctccacagattcagcgtctggtgaggacccagcctctcactgagtccccatgtggtgacccctttcaggcaggcgaaggagctcaatggggcctcttttactcgggcattaatgccattatgaggccccaccctcataacctgctcatctcccaaacaccccacctcacacaggagattagatgtcaacacatgaattcagggcagtggggcagcagggcagggggtggggccacaaacatgcagtctgtagcagccaccctgggggtctctccccaccccctgggggagtggtgggctgtgtgtgtggggtggtgcccagaggcccagtgcaaggagttcctgtgctgcctccaggcttgggtgaccgtggacagtttccttcccactggggaccttggtttcctcagctgtcagatgggaaaagataatgacccacagggttatagcaaggagggattggatgccgggaggagccgggagaaagagctcttcatgcacctcagcaacgccgctccctgctccaggtgtcccgctggtgccaggccctccctgcaaggctcagggctctggctgatgctgagaatggggcatggtccctgctcgtccagccttcactttctaaacagccaccacttgccgtcaggagtcctcccctgcccctcccagtagaactttgtttttaatcatcccttgccaagggcctcatggtcctacgcctctccccatgtccc

SEQ ID NO: 21683 - DNA, 1769 bp, Artificial sequence
  DNA replication origin
ggcaacgaagcaagactctgtctcaaaaaaaaaaaaaaaaaaaaaaaagggaaagggtggatattgggaaagagggagaaattttaaaaatatgtggagagataagagacaaaggttgcattcttgtgagtctttgatcagactttcactgaaatacacaatttacaggttgcgggggtagaggaatagtcacttatgccttagtctggctcggtgaatctgcacttttataccagaggaagcaatcaggtgagcagagggatgacttagagttccatcctttgtttggaacctgtgaagatcagttgtcaatgtacattgttagggtaaaattcaacaaaactgttttagggtaaagatcttgggtgcccacgaaaaatttcctagcgggcaaattgtgagggaggtatgtagctttttaaatcttcgtagctattttattaaagaagaaaaggcgaggcagtttgcccaacgcagttcccagcttgacttttccctttggcttagtgattttggagtcctgagatttattttcctttcacagttatgatggtaaattttatatttattttaaaccctcccccctccccaaaagagggggaaaaagtaaagaggtatggcagaaggggaagtcacagagattggaagcgtcttgcagcacctttttttttgagatggagtctcgctctgttgccaggctggagtgcagtggcgcaatctcagctcactgcaatttccgcctcccgggttcaagcgattcccctgcctcagcctccgagtagctgggactatagacacgtgccaccacgtctggctaactttttgtatttcagtagagacggggcttcaccatgttggccaggatggtctcgatctcctgacctcgtgatccacctgcctcggtctcccaaagggctgggattacaggcgtcttgctgcatctcgaagcgtcttcagcgtgctcttgcttgctggctctgatgatggaggtgttcaagccatcgtggaaggaatgcagtggcctctaggagtgagaatgacaccagccaacatccagcaagaagacgtggacttcagtcctaggcccatggagacaattctgttaacatcctggatgagcctggaagtgggctttccccagagtctgcagataagagcccacggcagctgacattttgactctagcctcgtgaggccctgagacaggaggtttcctgccccgcaggactgaaagatgatgaatgggagttattttatattttcagattgtggtaattagtcactgtagcaatagaaaacgaatacaaggtctttatgcattaatgttgaaaacactttttatatacgttgtaaatattttttaagtgtgtcatatgtttttaaacttttcccttaatgatattgaatcctcctaatttcaccatcagagggtaaactccagttccattctggggggagtcctttgcagtcaccccgtgtactcaatactcacatgcatcagaatcaccccgaatgcttgttaaaacacagattcctgggtcctccccgcagagttgctgatttagtaggtttaagggcccaagaatttgcatttctaaaatgtttccaggtgatgctgaagcttctggccggaaagacatcctttgagaacatatttcctccccagccctcggcccttaagccccagaacgctgccccgccctgggtggaacgaagctgagctccaccctagaggggcggggccctttagctccgccccactcaggaga

SEQ ID NO: 21684 - DNA, 1389 bp, Artificial sequence
  DNA replication origin
ccagcgcgtgggctgctggatggcggaaccccaggcggagtcggagcccctgctgggcggggcccgcggcggtggcggcgactggccggcggggctgaccacttaccgcagcatccaagtcggccctggtgagccgcccggacctggggaggggactggcccgggagaccagggtcgcgcgtgggggtcccgctgtcccagcaccccgctttctgccgggcgcgcccccaccaggttcgagtccgagcggggcccgggccgcgccgggtgccaggcgagccggtgttctgagggcgagtgggctgcgtcctgcggacccggaccggggtcagggcagagctggggtctcttccgtgtcgcgtcctgatcccgaccagctgggcgaagaggccctcgcccagccttgggcagccccgagggaaccggccacctgcggcaggcaccctccgtgtgcccgggcgggcccagaccccatacttcccgactgtcgccgtaatgagggtcgcctaattgactcagagaaggcagcactttgatttttcccgtttcttctggaaaaagcagaggctcacagagaggcgttaccctacccaaggtcacacacccagtaagtggccgaggtgggattcgaaccagttgggagctaggagtcctttctttgtagggtgcctttccccgtcccacttcccgtggggctggggcgggccccctagacgggggcggcttcctctccttgccctctgccaccccagagtcccctctgcactccctcctgcccttcccgttttttgtcctggtctgaagattgctgaatccgccccccgagggtggggtgcgtccgcccctcgctgacaccaggggaatgagattctggattaagaggtggaaggaccttagcttcacttcacagatgaggaaactgaggcccagagaggccctgagacctgcccaaggtcacagccctctgttctggtgcggctgctgctcgaaccactctgagaattcacacctggctccttccctctctggcctctctttccttctttcctcctctgtctggaaggaactgggttggaatcctggtgcccacccactggtctgtggcatgtgcccatccatggagtaatgaggggccaaggaggggaccctgacgagagatgaaaaaccagaggccaaggtggccaccctgtctgctcacctcagaagctgcctccaggaagttcttcaggtgcttcctgggaccagtcaggaaggagatctgcagggagcagctctggcaggccccttgatgagacgcccagcatatggcaccgttcagggaacacagactttgtgtctaggggtctgggcgcctttctggggctgcactggctgtgtgaccttggcagg

SEQ ID NO: 21685 - DNA, 1858 bp, Artificial sequence
  DNA replication origin
ggcaatgaatgggttccgggtgagctgggcgcacagggcaggggccagagccctgagcagttctctgttcaccactgttctcttggccttctcagtcctgcgccaggccctggggtcccttttgagaatggtgattcacttggagtgagcgctggggatcagtcacttgcagatgttctggagggcctgccgtgctgctgctggctggaccttggtgaacagaataggcaggtctcttgtcctctgagacccccttctggagtgagagagagactgccagcgcacagaagtgccagacatagagtgtgattcccaagtgtggtggtgggtgccatgccggagaggagcccggcagccctggcagaggtggcgttctgcaggttgcgggggctgagccggccggctgggcagacactggcagcttgagggccgtggcctgtgaggtctgggaaggggctggactgactggctgggcctgttccgtggaccccggaggccatgggcagagctgtgggcagttgtcggagggttttggttttgtgcaaggagctgacagctctgcgtttctaaaacaagatactgatgaggatgcgagactgcagtggagagcgtggatttgagattgacaggcgccaaagtgtaaacgagatactcaagggactgaatccaggtgtgaggcagagagaggaggtgggggcagggtgcccagcacaggcggatcgggcagtgcggggacctacagggcagctgggagcaccaaggtagctgtgtctggtgctgagggcgccaggcaggatgggaaggtgctcatggggacccccaggtgggtcccagtggccaggaggggaggatgggctgggataggagcaggggagtgaatggaggggagggcagggaaacgtggcatgatggaagctgtgagaacactggtgtgtgatggttggggcagaaggtggtgattgagccaatcctgagagggctggggtgggttgacaggactgtgggtggtgtggtggccgtgggtgggcccttctgtcctcacagaaggaaggcagggaagatggggatatctgtgagagtgtgtgtgtgtgagtgtgagtgtgtgtgtgagtctgttttgcgtgtccataaagcaagacctgaggctgggtattaatagagaaggggtttatttggctcacggctctgtaggctgcatgggaagcatggtgctggcgtctgcttctgatgaggcctcaggaagcatccactcatggcagaaggagacggggagcaggtgtgtcacatggcgagagaggcccccagactccttttaaaaaccagatctctcgtgaacccctcacctgaagtcattgctgcagggagggtaccaggctattcatgagggatccaccccacgacccaaacccctcctgctagatcccgcttccaacacggggagtcagattcaacgtgagatttggaggggacgcacattcacaccgtgtgagtgttgagcgtgggagcagtgaggctggagggcgctgtgtgagtgtgggggtgtggaggtggggctcctggaggcagggtctgtgtctgggaggggaaggcttggagatggggacacaaggggaggcgggttgaggggtgaggaggcggggatggtaccctgagaagccaggtgtgctgggcaaggcaggagggtaccaagggaggcatggggccaccacccttccagctgtgtcctgggtgggcacaggggaggatggcctgggacagggacaggtgttaggattggggaacctgtgtgtgcagcgcccaggagttgggagatgggtagtggggaggcctgtgacagggaaggactgcagagcatgtg

SEQ ID NO: 21686 - DNA, 1054 bp, Artificial sequence
  DNA replication origin
ctcccaccctcctctgctccctcccatcctgactcagttcccctatcctccttcccacttccctcccccctccctatcccccgcccctccccgcccttccccgccaggctattcactgagggtgggtcctctggtttctcctccagccctgttcatccttcctgacaaccaggcttgccctgtaccctctctgactgcagcccccaaggctgcgctggcctactgggagggccctcacctcccacgccctctcctgccactagtctctcccaccatatcctcctctgcggctgccccggggcccagcagctcgttgctgtgtggaggcgtcttcctgtcccccaaccccgctccagtgctatgtgtttgtcctcctgtcctggccgagggcaccatccttcttggggctggggccacgctgcatctctgctgctttgttgtgggagtggacagtgctcagcctgcgctgctgttcctgtttgtggccgtgttggggtttggtgtgtgttgtccagaaggggaaggctgaagcccgcgttctcacccagggcggaagcggtcattgagcccctgtgtggctctgcatgtgtgtgtggagtctgcatgtctgtgtgcatgtttgtttgtatgtgtaggtgtatggtgtttatgtctgtgtgcgtgtttgtatgtgtgcatgtgtagtgtctgtgtgcatggtgtctgtatgtctgtgtgtgtgtttgtatgtgtgcatgtgtagtgtctgtgcatggtgtctgtatgtctgtgtgcgtgtgtggtgtctgtgtgcatggtgtctgtatgtctgtgtgtgcgtgtggtgtcgtgtgtgtggtgtgtctatgtgtgcatgcatggtgtctgtatgtctctgcgtgcgtggtgtctgtatggctgtgtgcgtgtgcatgtgtgtgcgtatctctgtgtgtatgtgtgtgtttgtgtgcctgtctgtgggtggtgggggcagctgggttgtggagatggaaccggctgacagaatctcaggccctcctctgtgtgaccgtccagtgacccctgcagtagc

SEQ ID NO: 21687 - DNA, 1296 bp, Artificial sequence
  DNA replication origin
cctcaagagggtttagggtctgctgtcctgggagttgccatctctggcagtggctagagcaacaacacatgtgcatccccggctgatccacaagaggtggcaaccctgccctcccgtcccaccaggggcctggccagcaagggtcacccagctgctcatctcaagccacaccctgcttggcctcccggcagctccaggcacagccagcattggggagctcgctcaccatcaggtagccccggaactgactgtagatgatggctgtcagcaggttcatcagaaacaggcttccttcaagaggagacagccacggtcaggggcgccaccagtacagcagcaaaaccaacgcaagggtggccggcacaggatagcacagcgccgggggcgtcccctatcaaatggaaacatggcctggccagcgcagtcacaggtgggaggatgacgaggtcaatggtggggacagaacagaaagtgtggggtgggggatccctggggtgaagctgttggtgggggatccctggggtgaagctgttggtgggggatccctggggtgaagccgtggcatgggggatccctggggtgaagctgttggtgggggatccctggggtgaagctgttggtgggggatccccggggtgaagctgttggtgggggatccctggggtgaacctgttggcgggggatccctggggtgaagccgtggggtgggggatccctggggtgaagctgttggtgagggatccctggggtgaagctgttggtgggggatccctggggtgaagctgttggtgagggatccctggggtgaagctgctggtgggagatccctggggtgaagctgttggtgggggatccctcgggtgaagctgttggtgggggatctctggggtgaagctgttggtgggggatccctggggtgaacctgttggcgggagatccctggggtgaagccgtggggtgggggatccctcgggtgaagctgttggtgggggatctctggggttaaaagctgttggcaggggatccctggggtgatctctggagtgaaaaacacggatgtgaagtttcaggtcgtggaggcagcagggtgtatcggtccctgagctctcgggatcctgtcacaaaatgctggccacgttacctgcactcacctatcacagtgaagactatgaagaagatggcataggcccggttcttggaatacgcaggaatcatcactaaaagaaaaaagaaataacagaaactgacaacctcagtacctgatcccactcccatcctgacgctacactatttgct

SEQ ID NO: 21688 - DNA, 2314 bp, Artificial sequence
  DNA replication origin
cagctctggggcaaatccacactcacgcaaatggacaccaggtttgccagggcgatgaggttccccaggtagtcaaagtagtagtggccgaagaggaactgggcgctctgcagaaacggagactggtactcgggcctcggcgggtgctgggcaaggaacacacgtgctcagaagcacaggccagcagccgtggctgttgcagcccaaaaatgctcacaccctcttattctgggatttgattttttcctaccccatctcccgtcctatctatccagccacaggaaataatcccagacacagaaatcgctttatacacaaaggtgttcatctcagtggtctttgtaacacccaaagagaaatagaagcaactgaaacatccactgaggctgtaagtaaaccatgttgtgatattagagtcacctgaaacatacgcaaagtgtcaccctgatatatataaaaaaaaaaaaagctgtgtgaaaaaacacaggtaagtgatatactcatagctacagaaactcagcacagaaccaactcctgtactgtggccagcagcagcaggaggcaatgaggggcaggcgggcagacgctgccactgtcaggacccttgtgagacccagcacttcccacgctcagcagcctccttgagacacgtctgtgtgtgcaagaggtcaacaaggggaatggcctaaacatttctcagcaaggagacctgcacccgctgtcccacacgggagccactgaccaccggcggctatttcatgaaaatttcaatgcaacaaaattcaacactcagttcttcggtggcaacagccacgtgtcaagtactccacagccacatgtgacacgtggctacagctcatccccccagaaagtccatatgaaaatggagagggtaagaagacatggctgcgtgaacaggcaggctgcagagtgaaaatcgcaatgcttcatgtatacgtcaaagaagaacaaagcaactgtttccccaggtaactacaaatgcctgaaattacacagggaaaagtctggaaggaaaacaccaaaatatccagttgaatagagtggctattctccagtgagacccaaactggtggtgccaatgatcagcgaacttcctctcggctcccgacatcctcctcgatacgcactctgccacaacgggcagggtccctttcagcgtctcatccacagtgaacgggagttgaggctttcttagcggaggggctggagggacacagcaggagggcaggagggcaggtggagggacatggcaggagggcaggtgaagggacacagcaggagggcaggtggagggacacggcaggagggcaagtggagggacatggcaggagggcaggagggcaggtggagggacgtggcaggagggcaggtggagggacatggcaggagggcaggtggagggacatggcaggagggcaggtgaagggacacggcaggagggcaggtggagggacacggcaggagggcaggtggagggacatggcaggagggcaggagggcaagtggagggacatggcaggagggcaggagggcaagtggagggacatggcacgagggcaggtggagggacatggcaggagggcaggagggcaggtggagggacgtggcaggagggcaggtggagggacatggcaggagggcaggtggagggacacagcaggagggcaggtggaggggcatggcaggagggcaagtggagggacatggcaggagggcaggagggcaagtggagggacatggcatgagggcaggagggcaagtggagggacatggcacgagggcaggagggcaggtggagggacatggcaggagggcaggtggagggacacggcaggagggcaggtggagggacacagcaggagggcaggtggagggacacagcaggagggcaggtggagggacacggcaggagggcaggtggagggacacggcaggagggcaggtggagggacacggcaggagggcaggtggagggacaccgcaggagggcaggtggagggacacggcaggagggcaggtggagggacagagcaggagggcaggtggagggacagagcaggagggcaggcctcccctgcggtttccggatgctacggggtggatcggagtgtggtgttaagcacatctggacacgctctgtccgagacacatagtccccaggggacctacagccacagcctgacctcctgaaaatttcccagcttcccacagtcctcaatgtggaaaccagtgcccaaaggccacctgcccacactggcaccgaattccctcggcaggaccacgccactgcctg

SEQ ID NO: 21689 - DNA, 909 bp, Artificial sequence
  DNA replication origin
ccttgtgaactcgtgcccgtgtaagacacatgatcgtgtgtgcacacatcgcatgcagatatccatgtgaacttgtgcccgtgtaagatgcatgatcgtgtgtgcacacatccacagtaaggcctcagtgctatccacaggttcttggaaactgtgactttaagggaaatggcgcacagcagaccctgcaatcatgccgttttgcttgaagtcgcagtttcccaggacctctcacgtgagtatatacatgctcacgatgacacgcaacgtgtgcacacgtacatgctgactggtctccactgtggcgttcagctgtgttgtctagtttggattcctcaggtgggttgatggggctgatgtgaaggcctttctcccggctaggctgtgatgaggaggagcggctctttggagccggggcctccctgctggttctcagaggccccttctcagactcagttcctgcaggtgctcctgccacctctagctctgcatttctttggcgtctccaggccacagagtagctgacccacctgcagtgggttgggaggcagagaagggcctcccacaggaatttgaagtccgtgcttgaatgaggctggggtggaggtgttgggatgcgggagtgggtgagtgagtgcgtgcgggtggcgatgcaagcgtgtgcgaatgcgtgtgggtagatgtaggtgttggggtgcgagggtgtgtatgggtggacgtgggggcctgacaggctgtgtgggtgtgtagaggcgtgtgggggtggctgtgggtccaggtgtgtgtgtgtgggttggtggtcattggcctgccccatcttgcctttctgtcagggtcagcgtggtgggccgggatggtgtcccctcagtggggccaggaggagtaagggctgtgctctcttcctgtcct

SEQ ID NO: 21690 - DNA, 897 bp, Artificial sequence
  DNA replication origin
gctcgagcccaggtccatctggctccaccgcctatgttctgggctgagctataaaactgcacacccctcacccacctccccacatactggtccgtctatccctcggccacagtgctcagagctgcctctggccccagaatgcatggaggtggaaggagacccaggaggaaatgagactcatggaaagggaataacgtgatgaatgcagcactagagcccagagacagggacaggggaggcctcctgaagaggggcgtcggggtggggcaggttggccaggtggggacgaggggacagcagagggaacagcagtggacacgcacagagagagacagcagagggaacagcagtggacacgcacagagagagacagcggtgccatgtccaggcagctgcaggacgttctcgaggctgccctgagtgaaggtgtggggaaaggaggggccgggcttcgctgggcattctaggctcaaaccaggggttggggcttttctcttagattgaatcctgaagagccatagacagttctaagcccagggtgagtgacaacactgaccatttggaagtgcccaccagaggccacgtgtcccagaatgagaggagttagaacagggagttgccgggaggggagatggcactgagctgagggcggggagggagaacaggcggcctaaggaggtctgagacgggactgggcggcaacatgaaccagctgggggtgagaccgggagcccacacactgaaggcacattggtttttaatgccttgcaattgcctttgattctgcaagagaacgacatttctggaagctctgctagaaaatctgattagtgcaaaacgagaatctattcatgagtgtggctgctccccaactcccaccccatcgacctgcccaac

SEQ ID NO: 21691 - DNA, 1695 bp, Artificial sequence
  DNA replication origin
accctggctctagtcttggctgttcagcctcctggttgcagcttcagtgtctccaactgtaccatgagtgaatgggaccctctgatggctaagttccatccagctctgagagcctctgcattgcctgttactttttatttttaaagtgattttgttttggcgaggaggctgagggagggtgaggccaggtgggtgggaaaaaacatgaaatcgctcagccccaggccctcctagcagcttagtccctacagattgacggaggccttgcacacatttcccagaggccgtgctgggaagcccgcccagccggatcccggcgcttggaaaagcccactctgtgtcttggcactcgggccttacagctgccggggactggctgcgtgaggtcctggggctggcgtggctgcggccgggtgggtgggtggggggggggtgtgccgaggggcatgcatccatcactgccagcagcttgcgtgggccctgccaagtcgtgggggaaccgagcccaggtgccaacgtgcttggtaactggcttgctatttgaaaaattaaagcggtgtcaagaatatctaacctttgcattcatatcaggagtctggagccgggcgggtggcagccagagtggggctgtttgtgcagggcggccagtgggaaggcaccctcggaaggagcagattacagcaaagaacattatccacccagcacccaggaggaggcacaggtgataactggggagggggagcagaaagcacaggcgagctgacctctctctagctgctgggacccctgcaggaaggcagcctggtgcgcacctactgtgtgccgggagaatgtgccaggtgctggggtggatggagatggggtggcacctccaggacacactgcgcctgggcccatgatacttgcagggacccacagtgatgttttaatgtcttttaaaatcaaaagaaagaaatgaacttttaggttgaagaaatgatggttaataatgtccccacatatgacctaaagtgatctacagattcagtgcaatccctatcaaaatagcaatgacattcttcacagaaatagaaaaaaaacaatcctgaaagtcatatggaaccacaaaacaccccaatagccaaagcaatctggtgctaaaagaacaaaactggaggcatcacactacctgacttcaaaatatactacaaagctatagtaaccaaaacagcatggtactggctaaaaacagacacatagacacatggaccacaatagagggtccagatgcaaatccatgcattaatagccacttgattttcaacaaaggcaccaagaacatgtgttggggaaaggacagtttctaataaatggtgctggaaaaactggatattcacatgcaaaagaatgaagttggacccataccttacacgatacacacaaaaagctcaaaatggattaaagacttattatgaaactactagaagaaagcataggggaaacacttcaggctattggtctgggcaaagattttatggctgagatttcaaaagccctggcaacaaaagcatataaagaacttgaacaactcaacagcaaaaaatccaaataagatttaaaaatgggcaagtattctaaatagacatttctcaaaagaagacatacaaagggccaacaagtatatgaaaaaaatgctcaacatcactgatcatcaga

SEQ ID NO: 21692 - DNA, 1625 bp, Artificial sequence
  DNA replication origin
ctgagcgcctctggccggagcagacggccccggctcccccaggacatgtcacctggagaggtggccctttcaggtaagggacatgcccattggcagcagcctctgccccctccctgcatacacagctgctcccatctggggaccctcaccccacgtgcggatgggcttccccaggaagtcggcaggactttccctggccttctggaagtccccatcaagcaaatgctctatcgatgacttactctatgacggggtccagagagctaactccccacccacgttcgaagtgatcttcaaaccgctgcgcgtggaaaacaagcccagagctcaacgttccctaagtgagtggcctttgacagcagtgccaggcagcccagtgggtgcagggcacaccacagatggaggaagggccaggcatgcttcccagacagcctctgccagtccaggcaggggctccagggtggctgcgggaaggcagcttaggcggtgcccggcccaaggtgagttggcatcatgctccacttcccgtttgaacgtgtggtcccgtttgaaccttctggaaaggcttggcagggaggacactcattttgtagactgggaaggaactgaagagctggcttccggcgaccagcgatgggccccagatccctgtggccaggaaggcccccattgctgttctctgtagctcaggctggacatttgctggtgagaactggccggactcccaggacccagccgccagagacctctgttcctcacgctcagccccctagctccaactggggcccctttgctttacaggatgtaggcttggagttagagggggcagttctggcggtttatctctcactcacagaaactcggctgtgagaggccagagctggacttggggggcagagcctgtagaggtcaatgtgtccttattgggtgtgcacacgtgtgagtctgtgtgcacacacatgtatacatgtgtatgcgtgtgtgtgtgtgtgtgtgcgcgcgtgtggcagtcagagaaggctgggcagacactgttatttcagaaaagatgtggaggcctttctgaaggcatccactgagaggcaggggccaggatctctgtgcccaggcgctgggcgtggcccctgagaagtgctctctcccctaatccttcaaagcaggaggtatttgcttcactttctaaggcaggatctgcggctctgagaggttgcacaacttgcccgaggtcactcagctagtagaaggcaggactggcctccggtccagggtgactgtgaggatgtcaggggaccctgcaggcctgtgcgccccagcttagggctacaggtcccacctaaggcttcttgatggaggttggaggggcgagctggagggaggtgctgctgggggtccaccggtccccttcctgggggatgaagccggtttcccgcgctgacccccttgccatcagaggcccagagcgcggtccttgtgctgctgagctgtgtttggggccgcctgtgggctgtggccgcctgtcctcatcttctccccttttctccttggcttttcatcctcaggctccgtccttcttccccgtggtggccccagcctccctgccaagcttcccggcccccgccccatcc

SEQ ID NO: 21693 - DNA, 2062 bp, Artificial sequence
  DNA replication origin
ggccggcgctggacggcgcggcctccagaagtgatagctaattggggagagaaagggcccaattgtctggcggggccggaagagccgcgtgggctgctgaaagcgtcgggaggaggtggccgcttcgcccagcagctgccgccggggatgtttgcagattacgtcagcgctggcgagcagggggcgcggggacagcgaggggggcgggctcccggcggcctcccgccccccaggcccctggacaatgctgtcattgtcagcacggagagtggttaattctggatgaatggtacacgggcctcttgaccaaggaggctgctcgtcgtccccagtctgtcctctcacatgccagggaggccccgggctggagtctggcgggcagatctggcctgcttggtggcaccagagagaacagggcggtcccttgggggcgccggctgcagaggccccaggctggacggagcttcctgtcctgggtctgcacagcagccacttggcagtgccgggctagggtggcagggccccactgcatctcggttccagggcagaggctgctgctgccctttggggctgacttcaggcatgacctcctggccaggtggcagctttggccctgacccgctcctggccctgctggtggtgatcctgctagcacgcctcatcctgtggtcctgcctcgggacctacatcgactacagactggcccagcggcggccccagaaacccaagcaggactaagcctctgcaggctgcggcctccacgcgccctgtcccgagactcagccggcccttccagtggtggtgggagggaggggagcagggcaggcgcatgatccccatgtcccacccctggggcaggagctcagagaggcctgagatggatcgtgccttcccagactgaccagggctgtcccgtagaggcagctggccatgtggggagatggaggggccggccttgcaggtccatcaccaggttctggggtccccggttgcagggagtggtcctgggggtgggtcttgctttaagaccttctctgcctccaattccttataaatatgcctgcaggaagagctgggtaagccagaggactcaggtggaggtgccacagagacaaatgtgacctcatcacaagctggccctgttaccaaaggccacgtcctgtctcagctcaccaccctcataactagtctcctcctgcctcccaagggacgagataagtgccgatggctgtcctgatttctccagagcagacccctgggaagggtctcaggacgcacttgtgaggctgagttgacaagccagacgcacttggctctggttgaccctctgcacactctctaacggtctgaacagttagggcacaatgatccctgcctccctccctcagcaggatatcatgtaggggacaatttaggggacaagccaaggcacccatcaatgccctctgttcatctgttcctgcaagtgtgtggctgggaagtgcccaggaaggctgacagggcagggaagttgatttgaggccaagcatccagtgctcctgctccacctccgtagcacgttagccgtgatgccagtgacttaacccacagcttggggaagctcaaaggctccacattcgagcctcttgggggaaattcggcaaacacccatgtccaagttccacactgtatttcctgggatcgttccagcagatcgtggattgcagcgagggctgctgactgcatgcggaactgtgagatggaagggactgtgggcggcagctccagggaggagcatcgaaccagatatcgtctctgggaggctgggcctggtgatgtggcaacgtcttgctccctgagaggtgatgggtatgctagggatgctcgctcagggaacgtgggccaagtcctctgaacacgaagctcgcagagggggtgattcctgtgaattctgaaaggacttgggggcgtccagcaagagcaggagcttagatggtggttccagggctggtgttgctgactgggacgagtggacccccagggtgggcatggagtggggcactggctgggagcctctgccttg

SEQ ID NO: 21694 - DNA, 1208 bp, Artificial sequence
  DNA replication origin
agcctgggaggtcaaggctgtagtgagctgagattgcaccactgcactccaccttgggtgacagagtgagaccctgtctcgacaaacaaacaaacagacaaacagaccgatggcatgtaaatagcacccacattgggcagacagtcttaggctgtaagagagggcagagtgccctggaacacacacaagggaaggagcgctgctctctcttggggtctgtgggaggctttctggagcaggtgtccctagaggtaggactggggggactctgctaggctggtaggaagggaacagcattccaggcagaaggaacggtgtgagcaaaggcctggaggctacagagctcccggcaagctcaggatatgatcctctgtaggtctccccagaccacctggggagctggtgacacgtgcagattcccaggcccgaagaccagctggactccaagagcagggcccaggaatatgactaataattcccctgcctgattcccataccctgcaaaatttgagaccctctggttcagatgctagtgcatagaggaggggatgaagagacgtacgatggcaaggcaggttgggtccaaattgtgagggttttgagggttgtttaggagtttggattttggtgtacaggcaggagggggctatcaagggtgtttaagtaagggagtgctgctcctggacctgctcctgagaatggctcctgggagtgatgtaggtgactgattgatggggtgggacgaagctgggcagaggcttgggtagctgggactgtaacagttatgtgagaggaagcgggaatctgagagagttgccggggcaaaatgtaggcccccagcccctggttcaggggacagcccagggatagtcaccagggatccagcgatgtgtgtgtgtggagtgtgagcaaaagagggggaattacatgcttgttaccagaagtggggtcggagatggggagagagagagcagttctgggtcctggagcagcagggcagaggggttctggagatgccaagtgctcagggcacagaatggggcccggatgcttgatgggggtatggggaagtccttagagaaaacagagcccaacagtgggcttcaggcacccactgagggtcttgggtgtggtgctggaggggccgggagggagggagagggtagagagggagaagggattctgcacagactcacctggtagggagg

SEQ ID NO: 21695 - DNA, 1933 bp, Artificial sequence
  DNA replication origin
gtttttcatcaatttggcattccttaattacaggctaaataaacctctcaccctcagtacaatcagacataattaatgcagtctctgtaactgatcattaattatatcagtaacacatattatttattgcatgcatttcattgttacagtgactcagcgaagaggtgctggtaatacagttcacactctaggaggcatagaaaagccagttaactcatccaagctcatgcagctaataaaccgcagacccatgattcaagtctggcagaggtctgactccaaagctcatgcttccccacccaaacaccattctatctccaaggaaaggaagaacaggtgtctctggctgaacagttgcaaagccaagactgaaaggatttatttttaaacagcttgacttttgtcacttcacccaaaatcaataccagccttgctttgtgtcccttctgcaacttgaggtctgacactaggaattgggggtagtgatggatgcgcagtacatcagtgggtgggtagaggggcaaaaaaatgggctcctgaagattaagtggatggacagacaagaaatagatgatgctgggcaggtgaacagatagactggcggtgagatgaaggatggatgctgcatgcatgggtgcctggcgggtaaggtgatggtagatgaatgagtgtggatggattgatatggatgctgcatgcatgggtgttgggcaggtaaagtgatgaacggacgggtgagtgtggatggattgatggtggatactgcatgcatgggtggctggtgggtaaggtgatggtagatgagtaagtgtggatgggttgatggtggatgctgcatgcatggatggctggtggataacatggtggcatgaatgagtgactctgaaggaactgatggtggatgctgcatgcatgggtgactggtgggtaatgtgatggtagatgaatgagtgtggatggattgatggtggatgctgtgtgcatggatggctggtggataacatggtggcatgaatgagtgactctgaaggaactgatggtggatgctgcatgcatgggtgactggtgggtaatgtgatggtagatgaatgagtgtggatggattgatggtggatgctgtgtgcatggatggctggtggataacatggtggcatgaatgagtgactctgaagggacccatggtggatgctgcatgcatgggtggctggtgggtaaggtgatgcatggatgggtgagtgtggatggattgatggtggatgttgcatgcatggatggctagtggataacatgatggcatggatgggtgagtgtggatggattgatggtggatgctgcatgcatgggtggctggtgagtaaggtgatggatgggtgggtgaatgtggatagattaaaggtggatgctgcatgcatgggtggctggtgtgtaagtgatggatggatgggtgtgtgttgatggattaatggtggatattgcatgcatgggtggctggtgggtaaggggatggatggataagtgagtgtgaatagattgatggtggatgttgcatgcatggatggctggtgggtaacatgatggcatggataggtgaatgtggatggattaatggtggatgctgcatgcatgggtggctgatgggtaacacgatggcatggatgggtgcgtatggatggattgatggtggatgctgtgtgcatgggtggctggtgggtaaggtgatgtatggataagtgtagatagattgatggtggatgttgcatgcatgggtagctggtgggtaagttgatggatggatgggtgtgtgtggatggattgatggtggatgctgtgtgcatgtgtggctggtgggtaaggtgatggatggataagtgagtatagatagattgatggtagatgttggctagaaggacagatcaatggattgttaggggtc

SEQ ID NO: 21696 - DNA, 682 bp, Artificial sequence
  DNA replication origin
gtctcctacattgtatatgtgcagaagctgcagccacgaggcctgcttgaggttgcctggctcttgctcctgcgggtctgaacccagctagatgtgactgtaagtcccagctttccaaaggctcccactgccttaggtgcacagtgtgccacctagcacgggaagtggagcccgccaggcagcacctgggatacgggctgctccagggatgccctgggaggaggggatggggatgcatcccagggaagaggttcctgggctatgacgggggtgcaactcagcttcccctggggtcggggagtgggaagaccattctgagagtgggaacagctcttgcaaacatggccgacatgcaggttggggcagatttggtgatgagtgccttgggcctgattggaggtcccgtgggggtgggtggctgtggggcccccaggcagggcctgaagcaggcggagggggtgagtggggggttctgatgggccactgggagtggcctgaagtgcactggagcaggaggtggcattgtccggatcctgtttgaaagaccccttttctgatagaaggagggcagattgccgggtgagtcaggggtggtggcagctatctgggcagaggctagtgtggggtgggaggcgtgaggcagatgtgagagctcaaggagggagactacatgcagctcagt

SEQ ID NO: 21697 - DNA, 3683 bp, Artificial sequence
  DNA replication origin
caggacgacccaggcatcctcctggaaagctgggtgcaagccagagcagggctcccaggtccatgagggtgcagcagatggaaggccagcccggtgaccatgtggtgatagcacagggcaatgatgactggaggctctagggtcacagggattttggttcaagttctgcctctacctgttactcattgtgcacccttggggtgccccacatcatctctctgaggctcagttccacctagagttctatacagaattcagcaagaagccgagtgtgcagcccccagccccagctccagcgcacagtggccccagcacacactgatggggcacgttttcccagctgccctgttggttttcctcagtgaatcgctgctgagtcagttagcaggtccccaaagtagaaactttgtcagatcccaaagaatgtcagccccagtgactcacgtgtgtttctcccaaaaacacaatcgcaggcctttgggatcagctcagccatctctgagacatttcaatgctgtgagcaggatgctgggttccggccacaaaagagctgggtgcaagcctggtctccatgaaaggagttcccacttggaaaatctgattcaattgacttctccctttcagtttagcttcacagttccctggctatgtctacatctaagaactatggctccatgatgaattgcctggcagatggtggttgtgatgtttgtgttgttgctatggtgatggagttgctgtttctgatggtggtgatcctggcagtggtggtgggttatttctaagggtgatagtggggtggtgatgtggtggtgatggtgacagtgtggtagcattgggtggtgatggtggtgctgatggacacggtggtgaggaggtagttatggtgataggattttgatagtgctgggggtggagttgatgatggtgatggtaatggtggtgttgttttcggtgctgattgtgatgaggtgatggtggtaatagcagtagtactggcaatgctggtggtggtagtggattgttggtggcggtggtgggattggtgctcttcatggtgatagtggaggtggtcaggatggtggaggtggaggtgatggtttcagtgatggtactggtgaagatggaggtgatggttttagtgatggtgatgctggaggtgggggtgatggttttgatgatgttagtggtggaggtgggggtgatatttttgtgaattgtcgtggtagtgatggtggtggtagaggtggaggtgatgattttggtggtggtggtggtgatgttggcagtggaagtgggagtgatggtggtgatggaggtggcagtgatagttttgtggatggtgatggtggtggcggtggtggtagtggtgaaagtggaggtgatgggcttagtgatggtggtggtggaggtgggggtgattgttttggtgatggtggtgatgatgatgttggcagtggagtagaggtgatagttttagtgatggtggtggtggaggtgggaataatgattttggtgatgatagtggaggtgggggtgatggttttggtgatggtggtggtggtggtgatggtgatattggtggtggaggtggaggtaatgattttagtgatgatggtgatggtgatggtggtggtggagatggggatgatggttatagtgatggtgatggtgatgttggaggtgggggtgatagttttggttatggtggtggtggtggtgatggtgatgttggtggtggagatggaggtaatgattttagcgatggtgatggtggtggagatgggggtgctggttttagtgatgatgatggtggaggtgatggttttggttatggcggtggtggtagtggaggtaggggtgatggttttggtggtcgtggtggtggtgatgatgatggtgatgttggtggtggaggtggaggtagtgattttaatgatggtgatggtggtggaaattggggtgatagttttagtgatgatgatggtggggtgatggttttggttatggtggtggtggtgatggtgatgttagtggtggaggtagaggtgatagttttagtgatgtgatgaaggtgatggttttagtgatgctagtgttaatgatggtgatggtggtggtggaggtggaagtgatgatttgggtggtggtggtggtggaggtggggatgatggttttggtggtcatggtggtggtggtggtgatggtgatgttggtggtggaggtggaggtaatgattttagtgatagtgatggtgatggtggtggagatgggggtgatggttttagtgatgatgatggtggggatgatggttttggttatggtggcggtggtagtggaggtgggggtgatggttttggttatggtggtggtggtgatgtgatgttagtggtggaggtggaggtgacagttttagtgatgtggtggtggggttgatggttttagtgatgctagtgttaatgatggtgatggtggtggtagaggtggaagtaatgattttggtggtggtggaggtgagggtgatggttttggtgatggtggtggtggtggtgatggtgatgttggtggtggaggtgaaagtgatggttttggtggtggtggtggaggtaggggtgatggttttggtgatggtggtggtgatgatgttggtggtggaggtggaggtaatgattttagtgatagtgatggtggtggagatgggggtgatggttttagtgatgatgatggtcggggtgatggttttggttatggtggtagtggtagtggaggtaggggtgatggttttggtggtcgtggtggtggtggtggtggtggtgatggtgatgttggtggtggaggtggaggtagtgattttagtgatggtgatggtgatggtggtgcagatgggggtgacagttttagtgatgatgatggtggggtgatggttttggttatggtggtggtgatggtgatgttagtggtagaggtgatagttttagtgatgtggtggtggaagtgatggttttagtgatgctagtgttaatgatggtgatggtggtggaggtggaagtgatgattttggtggtggtggtggtggaggtgtgggtgatagttttggtgatagtggtggtggtggtgatggtgatgttggtggtggaggtgaaagtgatggttttggttgtggtggtggaggtaggggtgatggttttggtggtggtggtggtggtgatggtgatgttggtggtggaggtggatgtagtgattttagtgatgttgatggtgatggtggtggagatgggggtgatagttttagtgatgatgatggtgggggtgatggttatggtggtggtggggatggtgacattagtggtggaggtgataattttagtgatgtggtggtggagttgatggttttagtgatgctagtgttaatgatggtgatggtggtggaggtggaagtgatggttttggtggtggtggtggtggagctgagagtgatggttttggtgatggcggtggtggtggtgatggtgatggtggtagaggcagaagggatggtgttcatgatggtggtggtggatgtgcgggtgatggttttgatgatggtagtgatgctggaggtggagatggtgaggtggtggtagttgtgatgggatgtcaatgtggtgatggtggagacaaaggtggtggtgatacctcacaac

SEQ ID NO: 21698 - DNA, 1027 bp, Artificial sequence
  DNA replication origin
acacttgaaggccatgggagactgatcccaatgtgtctccttcgcccaactgtctctagtagggtgagcgacttgtcccggctcgcccaggactttcccagtttcagcactgaaagtctcacatcctgggaaccccctcagttcccacacatcggagcagcctcggaacagcctctgccacctaatcccacagtttgtgcgacgccgcccttggtatctgctgcagggtgcagggctcttcacccctgctccaagccccctgccccccacagcattggcgtttgagttctctctgtttttaaatcaagtagattttttcccagagaggtccattttcagctccgactgactctagatgagaagctgcatgccatgccaaacagagctgggcacgtcgccccctggggtggccatgtgcgttcacgggtgggcgtgtgcgttcctgggtgggcgtctgcgttcacgggtgggcgtgtgcattcctgggcgggcgtctgcgttcacgggtgggcgtgtgcattcacgggtgggcgtctgcattcacgggtgtgcggttgcattcctaactgggcgtgtgcgttcctggatgggcgtgtacgttcacagatgggtgtgtgcgttcctgggtgggcgtgtatgttcctgggtgggcgtatgtgttcacgggtgggtgtgtgcgttcacaggtgggcgtgggcattcctgggtgggcgactgcattcacgggtgggcgtgtgcgttcacaggtgggcatgggcattcctgggtgggcgtcggcattcctgggtgggcgtgtgcgttcccaggtgggcgtgtgcgttccccagtgggcgtgggcgttcccaggtgggtgtgtgcaggagcactcggggtgtgttcttgtgtgtgctgggtgtgttggtgtgtgcgggtgtgtgcctccaagccctgccttctcctacccagggacctgccctgccacagagccagtttctgaccctgctctcacccctctgggccaccagcccccatctcaccctctcccgcc

SEQ ID NO: 21699 - DNA, 1167 bp, Artificial sequence
  DNA replication origin
tctggaggctaggaatggagatccaggtgtcagcggggttggcgcctctgagggctgtaaggcaaagaacccatccctggttcctctcctggctcttctggtagcttcagccgcccttggcgttccctggtttgtggcctcatcgcttcaccctctgcctccatcatcatgtggccttgctcttcatgggcctctctgaggaaagcaagaggtgggagcagtgggcctgggccggggtcaacagccaaggtgtggccaaggtccacccaaggtcattggctccttgctcggcctcaaagccagcttgacgcagcagaccctctccccggtctctctttgtcctttcttcttcttataaggacacttgttattggatttagggcccaccctagtccaggatgatctcatctcaagatcttttgccttccctgcatgcacaacgattccttttgcaaataaggtcacactcacgggtttccctggccgtactctttggtgttgcgggggcgaatgggtgcagcattcagccactccagggctctaagtaggagggacaggcagaagccaccaccaggacaactggaagacttcctggaggagggggtgctaatttgggtcttaaggggagtcattgctgcgagaaaggggagtccacgtgggaagctcagatgcagggaggtgcaggaccttggcagggtgtggggcctccaggggaaagatgacaagtgtgctggaggccttgggggtggagggctgagtgcctcaggatgaggctgggagggccaggtgtgggaggtctcagggctttgttctgcagacagcaggagccagcaggggctctagggctgggagtgagagagttccctgcaggacaaaggtgggctaatggattcccactaggttcagggatgcagaggtggtcctgggagggggtgtaaatatgtgtcttgcaaggggtggagggggagatggagccttggggtggtccctgggaggaccctgggggcgtgtggggacgtctgtacagagtgcagcaggaaatcaggctggtctgtcttgctgtgtttccaaagaaaagaggcaaacccaaggggtaaggggcttccttagacgcagggcccagtgcacccgggcgctggcggtgggtctgggggctgactgtgtctg

SEQ ID NO: 21700 - DNA, 1537 bp, Artificial sequence
  DNA replication origin
ccagggtagggaaggatttccatggggcttacggtgatttataatgggaaacctccgctttcctcacacattgttctccctgacagaggaaagaaagagggcactaaatctcctctcatcatagtaatgatgaagcccgcggcgtcccggccccatcccaatgccctcgacgacaacaaagtgctctattgtgatctatcacatttttctcaaaaaaccttcaaccgcgcacaaggccagcgccatatcctgcactggccctccctcattgtcctcgccgagggaaacggaatgtgtcagtctgagtaatgcgccttcaatgcttctcaggagccgctggctcggccgggataaagcagcccccacgctttctcaggccccggcccgggatgaaagctgcccgcgccgccgggcagccaccgcgccacctggtccacgggccggggccagttcggccggcagggctggtggccggccccttccctgctctcacccccaatcgtaggcccgggagggtgagaatgggggcaggggggactaggagaggggaagcagagggttacaggggcaacagggagccggccttcaggagctggaggggaaaatgagggactcaagagctgggaggaagcaggtatgggggaatgagcctggccacaatcctggggcgacactgccttgctctgccctgccccacacagccccagccccagccccagcccctgccctgcgggtgaccaagaggctgcaactcccaccacagtctgaattacaaagccctaaacacacccttcccatggcttccatgtgcatggctatcaaaatcaaacccggctacctacatggtgtcattcattcattcactcacatgcattcattctcactctgatgggtgctttaatgagtggggaatgggcaggtgcaggtggggggcaggggtgaaggtggttctgcctgccccttgggtcccacctgatgccgtgatccccagcaggacctgctgcatctgctgcaggaccctgtgccaagtgagaatgcagactcctgtgtttcccaaaactgctgcaggctgttcagcggggacagcatagcattgaaccaaacgctgacacctactgaggctggccttgtgtgaccgcaccatcgccagccgtctggccctgctcttcataactctccattccctccgcgtgctgggactcggcccatgcaagggcgttgactccagggtgggggagttgtcagcctgtgactgagtctggcctccctcttgctgaccgggtgaggctgagcctacacatacttgacaactctggaaaatcgggggttcaaccagacaaactcaaagccccctacagcccagctccacaccccagctccacacacaatgcagtgttcaccccatgactgctgtggacccctgctctgcaatcgctcgccggcgattgagggtttgcagtggtaaggaccttgaaggtcacctcgtccaactgctttattgattagatggggaaactgaggcccagagtccatctcc

SEQ ID NO: 21701 - DNA, 1921 bp, Artificial sequence
  DNA replication origin
cagttccagaccgcagccttccagggccctgctctgagcagctgcctgagagtcccaggccgggcgtacattgttccatttttggaattcttcgggagtgagagcagcctcggctgtcaacagtgctctgttcacagaggccggcccggcaaaggagagagggcgagctattgtccagggctgggctgcgggctgcaggaatgtgctggaatgccggcccgcatggcacagtcccagagcggggcctttgtgtgcaaacaccaccgggcagcagggccatcacataaataacgatgacctcacccccagatatcaggctctgtggtgggatggggtgggggcgggggccggcccccagaaaggagaccacaggggaggcgcacccttccccacacacagggcactgcagcagcctctgtgcaggaacgccagccagagtggggttggggtggatgtctgcccctggaagcaggctgcatttactgtctggggccaattgatacccctcagtgcctgagacctgggcatcaggactcagagcctcaactccaaagggtcctgatgaaaatgctggtataggtataggcagttcaggtccaggtgcagaggtgcaggtatgggcatgtgcaagttgcaggtataggcggaggggtgcaggtataggcagaggggtgcaggtataggtggaggggtggaggtataggtggaggactgcaggtataggtggaggggtgtgggtataggtggaggggtgcaagtgtaggtggaggggtgcaggtataggcggaggggtgcatgtgtaggtggaggggtgcaggtataggtgaaggggtgcaggtataggtgaaggggtgcaggtataggtggaggggtgcaggtataggtggaggggtgcaggtataggtggaggggtgcatgtataggtggaggggtgcaggtataggtgaaggggtgcaggtacaggtggaggggtgcaggtataggcggaggggtgtaggtataggtggaggactgcaggtataggcggaggggtgtgggtataggtggaggggtgcaagtgtaggtggagaggtgcaggtataggcggaggggtgcatgtgtaggtggaagggtgcaggtataggtgaagggttgcaggtataggtgaaggggtgcaggtataggcagaggggtgcaggtataggtggaggggtgcaggtataggtggaggactgcaggtataggcggatgggtgtgggtataggtggaggggtgcaagtgtaggtggagaggtgcaggtataggtggaggggtgcatgtgtaggtggaggggtgcaggtgtaggtggaggggtgcaggtataagtgaaggggtgcaggtacaggtggaggggtgcaggtataggcggaggggtgtaggtataggtggaggactgcaggtataggtggaggggtgcgggtgtaggtggaggggtgcaggtgaaggtatgtgcaagtgtgggtaggtggagggatggaggtataggtatgtacaaatgtgagtataggtggaggggtgcaggtacaggtgaaggggtgcaggtacaggtagaagggtgcaggttcaggtggaggggtgcaggtataggtggaggggtgcagatataggtggagaggtgcaggtacaggtggagaggtgcaggtacaggtggagaggtgcaggtataggtggacgggtgcaggtacaggtatatgcgggtgcaggtacaggtatatgcaagtgcaggtataggcagggggatagcgagccctagatacatccctgggtgatgaggcccactccgcctcctccaggcttgtcacctctgtgagctgctgtacctccttcctcagtagaaaggggaccacagagataagtcatgccttcagcacctgccagcggcaggtgtgatgagaagggtgtt

SEQ ID NO: 21702 - DNA, 2106 bp, Artificial sequence
  DNA replication origin
gcccatggagacctcccctgtgcaattctttctctcttctgctgactgctgtccaatgtagggaaaccaggagaggactccaggaccttggggaaatggagccacagatggaagatgcctgggtccttgagttgctgctcagaggcgagctgctcactggtcaaggtcacccatgtgggctggataaggaacaaatgtgtattgtgttgagttaacgtatgtttggggagggtctttggtgcagcagctcacctgcctaatggaggggctaggaaatgtttgcatggggtgagaaggaggctttgcccttgagagagaatggtcaggaaggaaggtcctgcggcccaagaggacgtcagaactgagattgggaggaaatggagagcaagccacggggctacctgaagggaacccaccccaagcagagggcatgagtgtgcccggaagggtccatgaaggaggaggaggcctcgggggagggggtgggggcagggcaacagagcgaggggtggaaagagatgaggttacacaggcctgggaaccagagacacagagcctggcaggtgtgttcagagctcagcaccgactctgggtgagacagaagccacagccaaggagttcatgacccaatcaactttctaaagaatctgaaggcatcgctctgtgttattgaggacgcactgcaggaggcgctgcacagagcttgcaggagacccgagggtggaacacaacgagcagaaagaagcacccaggatgccccaggctggagcctaagtcagtggggagagggctgccacagggtcagctggggagatggagagatgagctgtcctgtgtggctttgaacccaggacgctgccaggaggtctcctagatggttgggtctctgagtctggagtccaggagggaggtcaggctggaattacaaagcggggacttcagggtatagcaggtgatggaaatgaagagagacgctgacctggggaggagggaaagaagggccgagggtgggggccccctgcggctcacgggtctggagcctccgaaggtgggtcagggagatgaagggagtgaggaggccacagtgacccactggccaggccaaatcagccctgagggctgacccttaggtccggcgacaagagagccatgggggaggggcctggggtgaggtgcagcttctcccaagaggcaggagagagggcagccaggggtgcccacatggtcagaagtgctgttggaaagaggaacagagtagggtagtggccggaaggagaagcagtgtctagggaggtttgacttatttttaaggtgaaggcgtgtttatcagctgatggaatcacccagccaagagacaaggctggggctggtgagggtctgggcccagcatggagggggctcctgagccaggagagggggcacagcacatacgggcagcaggtagagtcctggaggctggcagagggcagagaaggtgggaaatccaagtcggggagaggggacctcggacgccaaggtcagttggccggtcggtggtgggaatttcaggtgacagttctgtgcccaggtgcagcagcgtgaagacagaggccacagaaggacgtgagaagggaaatcccagtgcagaggtgaggggtgcggggcagtgaccgtgtggatgagagggacaggagaggtgggatctgggggttgaggtgctgggggtggtgcttgaagttgagatggggagatggtaacgagaagggaggggaggagagaagaggaggaggtgaaggctctgggaggccgggaccacccacagggatgttcaagaactgggcaggagtgatgtggggaagcgaccgtgaatccggggttaaaatcttccaggagtgagggacgacctgggattcgtagatgactccagagtaaaaggcagagtctgaaggtcccagctcaaagcctgggtaggagggaagtagaacattctggaaagaaagtgaggagtgagaggacacctcccccctccccagcaccaggggaaacagaacctctgggtgagttgcagtgcaggaagcttcaggcagagcaagaaggtgaggggacccttgcgggagatgagaggag

SEQ ID NO: 21703 - DNA, 1034 bp, Artificial sequence
  DNA replication origin
tcccagctgtcctctgctctgaggcctgagctgaccctcagggttgcccccagctccttcttcagactggactggtcccatgccttcctggggggctggagatgcagcctcccttcctacagctgttggtacttctgatgccatgtattagccagatcaccagacctctggagatgtgggacccccattcatcttgtccctgctccccatgtactccaccgagagtcccggttgcctctctggggctcagtttcctcacttgtctcaggtccagtgagatgtgattgttccatgaatctaaaagtagaacgttctggtccaagtcgaggccctggcaaagctgcctttcctatctctaattatgtggctccatgactcactcatcataaacccaagtcctcaagaaatgtcttaaggaggtggagggttctcagaatgaacctgccgcctgagcccccggcccattgttacatgcaccggcgccaggtaccttattcccaccgtagtgggagcaagttcgatgctaagaataagagctagagcgacgctttgcctccggggtttcagtgggggctggggtgtggaaccagggcagggattggcttgggggcttgagctgctctggtgggtggtgtcctgggacgctcttctcctctcccacggaggccctgggattgctgtctcagtctgtggtgggttggtgggggcaggggcgggcagagaaaaggttttcaagaccctgaaccatcaccaagcccagcaaccggccattgtccctttaggggtgcagaaggtggtcctgtgtgcagtggcaccagcattgtcagctcagagaaagcagccatgaccctgtggagtgtggttgagttgggggaagtaaggagaaagtggagggacggccagggtaggtggggtgggtaagaagcggggatcggggtggggcccggccccggagacttttctccagcagaacacagaaccataggagcggtatttttcctacttccaggccaaatgggcttgcacgggaagcc

SEQ ID NO: 21704 - DNA, 1141 bp, Artificial sequence
  DNA replication origin
agaggcaggtgaggtacatctgacacttcggcgtggctcctgctgagggcaatgaaatgataaaccaggctggggtgggtctgagactccaccctatgaccttggcatctaacaggaggtaaaatggaaagcaaatcatgacacgtcccaaacattatgtaatcattgtaaatagcttttaaaggattacatagacatggaaaatattcacgacatgttaagtgggaaaaaaatcacacacatcctataattacaattctaaaggcaaagacaagatccaggaggcaaggccgctcaaactcttaagtttcactgtttgatactgttgagaagcacaataatgaccaatgagcagaaagagcatcagtaaacgctcccactttctaagtcctctggcaggaagtctttatttgcttcccggagttaggactgcggcatcaggggtttcaggcctaggatttggggtatggggtgtgtcaggcctaggatttggggcatcgtgggtttcaggcctaggatttagggcatcggggatttcaggcctaggatttggggcatcggggatttcaggcctaggatttggggcatcggggatttcaggcctaggatttggggcatcggggatttcaggcctaggatttggggtatcgggggtttcaggcctaggatttggggtatcgggtgtttcaggcctaggatttggggcatcagggatttcaggcctaggatttggggcattggggatttcaggcctaggatttggggtatcggggatttcagacctaggatttggggtatcgggtgtttcaggcctaggatttggggcatcagggatttcaggcctaggattcggggtatcaggggtttcagacctaggatttggggcatcagggatttcaggcctaggatttggggtatcgggtgtttcaggcctaggatttggggtatcgggtgtttcaggcctaggatttgcttcctgtcaaggtacatgtgtctgggagctggggatgcttcaccttcgtgcctggctcctgggaacatcaccagatcctggtctgtctgtctgggacagtgcacactttcccagcccacaggcgaagttgatgctcctgggagcacttccactccccgacaagtctct

SEQ ID NO: 21705 - DNA, 1425 bp, Artificial sequence
  DNA replication origin
atccctcgctttggcacttgggggtgggtggagggacagcggggtcgttattacggggcgccttagagttctggttatccggacactcaacaagcaggggaggggagggaaagggagtttttttccaggtgcggggaaacgggttgcgtacctaatgccccgcgcccttcccctggggtccctggagcccgtgccttaagggctgggggcaggactcggattcggaccccttagggaattctgggtcctcagggtctgagggactgatgggccgcgctcggtccccaagccccttctgtgtgttcacgcggggcacgacttgcccagcgagttctgggcggcagggccagggccggggtgcggctgggagaggtgaggggaggaggcgagagcgcgcgccgccggaccctgggccgtggctcgggaaccgcgcgaggccgcgccgcgcattccgcgcattcccgccgggcctcggttccaccgccacgtggttgccctgcgtccgcgtttaccgtaaggcttagaaaaagcgcgcattacggttccggagcgcatgcggacctcccaggacgcttaactcgagcaccagtccagctgtggtgccgaacatactccttccctgcgggtagataggggctgcttttttacgtaataaggcgggttgtactgctggagcgatagcatgttcatctgtaaagacgggcaggaaggagtgtgctcggccctactggaatccgtaataaggcgactgtccggctgaagaaagtgacagaaccgggccgtgaccattccaccttctcagcggtggtaaagcaccaaatagcagctgcagccttccgatggcgtccagtgcactgtggctggaaagctcggagcaagaaggtgcttaacaaataggaaaacgtccagaaactgcctatagctacattttattttttttttcttgagggtcactttaagataaagaatctagtgcatccctggaccctgaggccgaccttaaccaacaggatgcctgcctgggctcatgaggttcagggcatgattggggccccctgagacacaggctaggttgtgttgcctccccaggcttggataagtcagaggaatccttaggcccctcctggaccatctcgctgaatcctgacttagagagctgtctctgctatcctatgggagagagacaggttatgtgccctagggtggagggggctgcattggtccccatgcttctagacacacttctagccctgagcagcaccagttcacccagtctaagggaagcatggccatttgctttgaggtccatctcctgtagggtttggagaaaaagccttcactcaccacccatcctcatcttctcacttctatgaggtgtttcctccagccaacttatagtttcacacacttaatctcagggaaatg

SEQ ID NO: 21706 - DNA, 1153 bp, Artificial sequence
  DNA replication origin
ctgcccccagcccttaaggcacgggctccagggaccccaggggaagggcgcggggcattaggtacgcaacccgtttccccgcacctggaaaaaaactccctttccctcccctcccctgcttgttgagtgtccggataaccagaactctaaggcgccccgtaataacgaccccgctgtccctccacccacccccaagtgccaaagcgagggatggaagcgctttcaagcgttccaagggcattgaggagcgagctggagaggcgcggggatgcggggtcctccccgcagtcttccggaaagggcgggggagggcgcggcaagttccggagtggggcatgccgtgggagcccacgagggcctcagcgcggatcctccgccggaaaaccggctcccgcgagccgccgccgcaggtttcctaggccccgcgagtcccgcagcgaagccctgcgtctccgtccgacgcgggggtctgctcagcctcgggtgggccgcggccaggcctgactgcgggggagagggccgaacgtgacctccgaggtcacccccagccagctttctctcctgtggtcggaagtggttttcttctcgatctgggcgcctactccccaccacttggtctgagaggggctggggccggaaggccagggaatctctggtggatttgggggttcatattgctcagggtaccagccgatgcgttttgaggggcgggagtcgaggaattagaatcgcctttaaccctcaagagttgcgccttcagcctcgggatcccagatgcgtcgttggagccagggccgcccccctacctgttgggtttgcgttttaactccagcgcacaccttgccggcagccctcggagctaggggaggggtctcgtttccccgcagcccgccggacagacgactggggcacgggaggggcggtggcagggtggtctgtgtgtggctgaaactaattgatctggagcggaaacgcacgtctgcggttggggcgatggggggggcggtgcggctgtccatgtgccgagcgtgtggctgtctcgggtgggcactggggccggagttcgccccggcccacctcgcagttttggggcgcctgggatcggcgctacgtaagcgaagcagagctgccatagcacgtgggccgccacgcg

SEQ ID NO: 21707 - DNA, 1169 bp, Artificial sequence
  DNA replication origin
catgctaaattagttcttgcaatttacacgtgttaatgaaaatgaaagaagatgcagtcgctgagattctttggccgtctgtccgcccgtgggtgccctcgtggcgttcttggaaatgcgcccattctgccggcttggatatggggtgtcgccgcgccccagtcaccccttctcgtggtctccccaggctgcgtgtggcctgccggccttcctagttgtcccctactgcagagccacctccacctcaccccctaaatcccgggggacccactcgaggcggacggggccccctgcacccctcttccctggcggggagaaaggctgcagcggggcgatttgcatttctatgaaaaccggactacaggggcaactccgccgcagggcaggcgcggcgcctcagggatggcttttgggctctgcccctcgctgctcccggcgtttggcgcccgcgccccctccccctgcgcccgcccccgcccccctcccgctcccattctctgccgggctttgatctttgcttaacaacagtaacgtcacacggactacaggggagttttgttgaagttgcaaagtcctggagcctccagagggctgtcggcgcagtagcagcgagcagcagagtccgcacgctccggcgaggggcagaagagcgcgagggagcgcggggcagcagaagcgagagccgagcgcggacccagccaggacccacagccctccccagctgcccaggaagagccccagccatggaacaccagctcctgtgctgcgaagtggaaaccatccgccgcgcgtaccccgatgccaacctcctcaacgaccgggtgctgcgggccatgctgaaggcggaggagacctgcgcgccctcggtgtcctacttcaaatgtgtgcagaaggaggtcctgccgtccatgcggaagatcgtcgccacctggatgctggaggtgcggggcttcgggcggctctcttaagacttccctgcaacttgttgcccagacccacgtttctttgctactcacccccctcccttctctcccgctagaactttgaagtttgccgtggtgtttctagggatccgtattttcaaaataaaaattgcgggtattttctgaaggaggaaggggtgggggtgggggtgctagaagtagcgtttcgtgggaggggagaagggg

SEQ ID NO: 21708 - DNA, 805 bp, Artificial sequence
  DNA replication origin
gtaacgaactcccaacccccggcctgggtaaagggtcgcccgagggtcattttcagggtttttttatgcacttagttatttttttaatatttttaaatattttttgaaaagatgacgtctggggaaatgcggcgcggcggcctgggacgccacctttgtgtctcgcaggcgcggcgcccaaccccgcggcccgttccgcggccccgcaccccagttggtgtcgacccccagtcagagggaccacggagctccagggcgggccagggtcccgggggccggcagcccgcgccgccgcgcacgccgcccagctgtgcccgctcccgcccccaccgtgccagcctcgcggggactttccctttcagtttcggggagggtgggtactggggacgcgcgggggagggggcgcatcacgggaagctcctgccgcccccagccccgacccctcggcgccctccagacctggcggccctgccaagcgcgatggggggtgcgggggcgtgcgggggggcggcgcgacctggcggcggcggtcacgggccccgtgcctccgtaggtctgcgaggaacagaagtgcgaggaggaggtcttcccgctggccatgaactacctggaccgcttcctgtcgctggagcccgtgaaaaagagccgcctgcagctgctgggggccacttgcatgttcgtggcctctaagatgaaggagaccatccccctgacggccgagaagctgtgcatctacaccgacaactccatccggcccgaggagctgctggtaaccactggaccccgccgccccccgccccccgcg

SEQ ID NO: 21709 - DNA, 1742 bp, Artificial sequence
  DNA replication origin
agccggctgctgggcgccgtaacaacttagaaaaagaaatccttaacgagccgagccacctcttttcccctttaaatgggagcagttccacccagtctgagagccgggagccatgaatgaaaaccttctcattgaggcaaatcagaaccgcacacagaaaccgcttctgcagggagcgacaggttctagctggctccgcaccttgtgcacccccccgtctccaggggcacacacagcgtggagtcactggggccacgttgtttcagaagctcgtgcccccaccccagtgtgtggtgctgtctgtgcttagattaggagccacccagaattagacaccaaagctccaggatttgaccctatccgctgcctggttgtaaagggaagtgacagctgtcccggaagctccttggcactggacgttcctcacctggcctcccacggagccaagggcgcacctgccctgaaacccccatgcgtgagtgtatgcagcatgtgcacacctgctggggacctggggccaggaatgcctagtgcagggagaacacccagcatcacctttaaatgtaacctttgccacgtggagggcaaaaacaccttcctagactctttcccacgcctccacctccttcaacctgtttctgactttaagcagccgtaagtcactcttgtctccacagatgtccagcaggaacaaggcactggctgctcagttacgttccatggggtggccacgggtcaggacccggagcactttgcaggggtgggtcccctggtctcctgcccctccctcgggacccaccctggagtggactccacagtcactgagagcacgtgcacagctgggtccccaagtgtccctcctccttcacccaccgctgggggcgccttcgcagacaaagggtgtgcagtagtgggaaggacgagaatctgcacctgcccactgcctcccactagcacccaggggtcctgggaggggagctccactgctggagccaccctgtagggaggctgtgcaagaaccacgccccacgttctctccaggaaactttgcatttctctgaagccactttcagctccataaaaggctgtctggagtctccggaggcctctctcctctgaggagcaccagccagagaatgcctccctgtctgccgcatgcccccccaccccagacccatccagactggtcgacatccttggcatcttcatctgcccaccttggggactcgcttggaaacgtgggggaggggttcatgccccaagcaggtggaggaggtgggggaggcctcacgcctaaaccagaacccattctggaataccggctgcgggctaccggtgtcagaagggagctctgaagtaggcttggggggctctgccctctggggaggggagaagatgctactgcctctttgatgccccgtgggccttgtggcctaggtcacccagagtgagcccccaaacagatgtgacaactgaggcttgaccaaaggtgggccacagcagagctgggtgggatggggccatgctcccccatgaaggtaaccaggcctcctgggccagggaaggaggcggtcacaggggggtcagaggcagggctggggacagcaggaggcggcaccctgtgtatgtgcgagtctgtccccactgggttctggggccaaggccatgtcagggaggggcctctggggccatgccaggggaagtgaggactgggtgcttctgctgcccacggtggcggccca

SEQ ID NO: 21710 - DNA, 1737 bp, Artificial sequence
  DNA replication origin
aagcgtccgggacggaggccccaggcggccccagccaatggtctgtgtggtgatggtgtgtggggttaggcccaggcgagctttgtttgggccacaatgtgcgtggccaataaatagatgcttgaaaagggctcctgtgaggtccgagacaccggacaacgggcggatagagacagccttgttgtttacggcctctttgagaggctgctgctgttaaaccctgggatgactgtgtctttcttcttaaaaatgccattgttttattcccgagtcttttcttaaagaaagaattaaaatgacaatcaaaagggtttgtggcatttaccaaattagaccagagaggtggccgggtcagccgccggccccgcggtgtgtgagggagtgaccgcctgaccccagcttggggctgggtgggcctgcaagacccgttttggctctggcctgggccgcctcttggtggtctgccctcgagcctcccggggactccgcacgggtctcagcagatgctatctagggtccacctgcctgtcccctgcctagtggtgcctctgtcccggggacactgggagtagcggctgcccagcccatgtgtgtctcggaagaggaagaagcttttttgccgtgggacaccgaagttggcaggggcctcccttctgtgttctcggccatggcctcccttgcaccctgccccgtgttatcctttgggggtggtgaggtgtcctcacccgctgtagggtggaggccagcagcccgcagctctctcaggaaaatggctcagaaacaccatcgaggcctccagaagcccagcaaagagaaagcccctccatcaaaatgaaactcgcgtctgcacttttcatttcgaactccacgccctgagtgaaaaccgcttccccgccaggggtgactgccctgggatgttgctgtcttcgggcagttgtgggaagttgggcgctggcccttatttgagtagagaccatcttaactagattggaggcacacgtctcacagctgacagacacacggggtgaagttacccgaggcggagtccactctgcctgatcagctagtgaccaacgtagctgagcccagactcagaaaaaccgtccacagcagaggcccctgcattttctagggcgtgttctagaattttctttggtgggtggaatgtccatctgtgcaaatcgggtgcgcagtgccacacaccagtgacttttcgcggaggagcgtgctgcctttttggagcttctggctgtgggagaacagctttgtccaccggggtagccttgcaggcagctgtggggccagaggaatgaaggaaggtcctggagtctagctgcatgtgtgaccctggagtgggtcatgggcgagggacgggccgcaggtgaagaatccctggatggagctgccaggcccctggggctgagaattgaagctggctggtgttttaggttgaacgtcaggagtcttgtatctcaccccaggcctctggcctcagtttccccatctgtacagtgggactgtttgtgcagccagcccggccagcttcatttgccatgatgagaatttatctgaggggcgggagaggaaagccctccctataaaggtacaggcgctaaaatgtcgtgacctcagtggtccacctaaaagtcgttctggcctgggtcatcgcctgtcgtgctatgcctttgtccagccccttctggttgggagttaagtggcacctgtgcggcacgtggt

SEQ ID NO: 21711 - DNA, 1180 bp, Artificial sequence
  DNA replication origin
ccacctaaaagtcgttctggcctgggtcatcgcctgtcgtgctatgcctttgtccagccccttctggttgggagttaagtggcacctgtgcggcacgtggtggggctgtggcccagccctgctccttgtggaaggtctgtttcctgggctgcctagagacttggcttgaagccctagcgtggcttcctggcagttgggacacacacagccccaacacatggagccggttctccatccagaagcccccgggcagtaagcagccacttcaggctgcgtgggacttgcccgtggtggagcctaggagaggcccctggctgggcgtggcgttccagatttcacggctgctctttcccactgacagtgtggtgtggacgctgccaagggagtctggagccccagagggtggaggtgcaggacttccaggagcgtccgtcgcactccacccgagggcgagcacctcagtggccgcagtgggtggatgcatgctgtgccaggctgatggctggccccggggcacaggcctgagcgggagaggatggaggggagggatcaatggtccaggtccccctggccacccagcattcatcctcagtcatgcacggcccaaggcttcgacagccattgatcatggaaggccaggttcacctcaagggctgccacatggagaggttaagtctgaaaaggctgaaaaggcagggttcaaagggcctcctgtccagatcagatggcactgaattccccagggagctggcacggccagtgggaacaggcggtgaaggcgctgttggacatggggacgggcagggggtgtgcagggtgggcgggcaagcatctggtgtcttgtggctccagagaccaggtgggaggtggaggcatttggtcctgagtgtcctgacaggtgatggcagctcccacatctcgctcaggttcagaggaggcagcatgggccgagggacagtttttggcttagtcttgctcttataaaggcttccgggtcatggcacctgggaaggggccctcgctgcaggccccttctaaggaccccctcttcccacctctccccaccctctctctctcaggactgcctccgggcctgccaggagcagatcgaagccctgctggagtcaagcctgcgccaggcccagcagaacatggaccccaaggccgccgaggaggagga

SEQ ID NO: 21712 - DNA, 1109 bp, Artificial sequence
  DNA replication origin
tccagctgcttcctgcgcatccgtgccgacggcgtcgtggactgcgcgcggggccagagcgcgcacagtgagtgcccgccagcacccccgcccgccccgccgcgcgcaccccaccccgctgcgcgcgccccaccccagcgcccttccttcctttgccacccttaggctcctgcggacccctcaactcctgggaaccccaggttttggcacctggacgttaggatccctccgttagtccccaaacagcgcgggacgctagggagaagcacaggcttgtggaccgaccgcacccacgtggtgcgggcccagcggtccttgctgcagcttctcgcttcccctgcgcctaggtttgctggagatcaaggcagtcgctctgcggaccgtggccatcaagggcgtgcacagcgtgcggtacctctgcatgggcgccgacggcaagatgcaggggctggtaagtgtccccacggggcggatgcgccggggcgggggaccggcgcctgtccccgggcggaggcctgaaggagagaaaggcgctggttcgaatccagggtttcctcgcctcctccgcccagacccgcgtgcaacttcgagggaaagattgcaaagaccgattaagtgcatgtccgacgatttcctacggaaatttagggtctcagccagcagccagagaataggcaaaagctgcctttgcatttccaattgagtcaaaggccggcctagccggaccgaggaaacccattattcggcctcctttgatattaaacaggaaaacccacctcgggccttttcagcctctgcctgcgcgtgtgtggtcctcgcctccgtttccctccctccagtataaaagaagaaaaaaagaatgggaaagaaaaaagaggatctacccataactttcctttaaaaacaaatcaattgtcaagcaaggcagaaaacagtgcatttgggataggagagattttttttttagaattaatttttaatctaccaggagcacggtgtggcttagacgcagatgcgctggagtcatgttgcgccaggggagtgcttttcctcctgcgggcctcacctgtcctgtaaacgctttctggtgggggcagggggtgggggct

SEQ ID NO: 21713 - DNA, 952 bp, Artificial sequence
  DNA replication origin
tggagcggcccccatttctttcctcacctggcacctgcccggacgccaggggcgcccatcaccgttcctgggccccttcccgacccctccccaccaggtaaggcgctctcgacctccccgaccgtgctgttcctcctgaccccgtgcgcagggactcggggactcaaaaaccagacccccgacacaagacagctcaaaaaacgggaaacggaggcccaggcctccctccctgcgcccctgcctccaccaccctccagccgagaagctggggttcaccaatcccgcagctggcccgcccaccctgcccgagagcctccttcccagtgccccctttcaggttgcatctcgcgcacagccgcggggccggggcgagcgcggagcaggcaggggcgcggggccaggagcgcaaagcccaggcggacgccgaggctgcggcgccacctacagtccgcgcggcttccattgtttccccgccggccgagagcgcgcccggccccccgtcggggggcaatttacccggataaaaggggcggggcaggaattgcaagaagatgaagctgaaagaacctgagactgtcggaactgccggggaaaattctacgggacggctttgacgtcagatgtgcggggctgcgaaagtcgggggagggagtgcgagtgggcttttaaggggaagggcactaaggccgaggtgaggcttttcccgacagagggtgaagggggcaaaactcggtgccccccaacctctggccccggggttcctgaccccgcccccgctagtgccccacgccgagtgcatccactgggagcctgaggcctgggggaagggccccagttgtcgattgctttacaaagtcaaactctcccagccaagaacctcggggccgctgcgcggtggggaggagttccccgaaacccggccgctaagcgaggcctcctcctcccgcagatc

SEQ ID NO: 21714 - DNA, 1756 bp, Artificial sequence
  DNA replication origin
gatgcactcggcgtggggcactagcgggggcggggtcaggaaccccggggccagaggttggggggcaccgagttttgcccccttcaccctctgtcgggaaaagcctcacctcggccttagtgcccttccccttaaaagcccactcgcactccctcccccgactttcgcagccccgcacatctgacgtcaaagccgtcccgtagaattttccccggcagttccgacagtctcaggttctttcagcttcatcttcttgcaattcctgccccgccccttttatccgggtaaattgccccccgacggggggccgggcgcgctctcggccggcggggaaacaatggaagccgcgcggactgtaggtggcgccgcagcctcggcgtccgcctgggctttgcgctcctggccccgcgcccctgcctgctccgcgctcgccccggccccgcggctgtgcgcgagatgcaacctgaaagggggcactgggaaggaggctctcgggcagggtgggcgggccagctgcgggattggtgaaccccagcttctcggctggagggtggtggaggcaggggcgcagggagggaggcctgggcctccgtttcccgttttttgagctgtcttgtgtcgggggtctggtttttgagtccccgagtccctgcgcacggggtcaggaggaacagcacggtcggggaggtcgagagcgccttacctggtggggaggggtcgggaaggggcccaggaacggtgatgggcgcccctggcgtccgggcaggtgccaggtgaggaaagaaatgggggccgctccatgaagcggttcctgccaataaagaaaacgacatccagagaatacccaggcggggaataaaggggtcctcctacggggctttggtttaactctaattatttcttgttattcttccaaacccccagctcctggatgtggggccccaggaggctggttttgggggcagagccctcctggcccagcgcaaaggcgatggggagggcaaacaggagagacagcgagagaaatgccaggcctaatgaatttcaatgagcagaggccacattcattccccagtcagtgactggcgttaatgactgagggcgcagcaaatgtcaccaggaaagtctttacaaaaagacatcatcccgaaggctttctagaccagggacccccacgctgtgtgtcttggttcagaaagccgtggcttctgttaaatctaattacttcccccctgtggctttaaatcgacggcggctcctattaaacttaattaccctcccctgcagctttcgttttaaagatccgtggtaaatgcgtgataaatgctcttgagggcgatggcagaggctgcactgggggacacgacccaaaccgggtgggggcgatggcagcctctggttccacccctacccctctgcagccccttccagggacatggggaagagagtggctgatgcgatcagggaggtggggaaatgaggaaggcggctgctgtcccccagcccctgttctgagcgcttcatggaggttctcagctcaaatctccacaagagcccccacagtattctattcctccctcccccatggagcaggagggaaatggccccagaaaagtggccgagtaacccaaggtcgcacactctgttagtggtgaagttggaatttgaacccaaacagtggggctcgtaaatccaggctgtgctgcgtcttatcccgggacaggggctccggggtcagacccactgtagcatggat

SEQ ID NO: 21715 - DNA, 992 bp, Artificial sequence
  DNA replication origin
agagactgtgactccaactgtcttgtgtggaagcttctagaagaaacccttaaaacaaacagagccatgggaatcagatgctggagatggaagaggaagcactgcccacacaagccaggttttccacactggcggggtcaccccatcctggcttgactctccttgccagcctctccacgagggacaccccataacccacccactaactgacctctgggaatcaggctgggcacaggctgactgcaccaccataaatgaggtttaaatggaaatccacgtgtttcccactctggccatgggacctgtgggaataagcccctagctgcaaccaggaccatggacttaatcccagcaaaagaccccaagccccagtagtgacggcaatgagcagtgtacagggagaggcaggaaggaggaggagggaggcgggaggaggaggaggggagggtgagagtcagagaggggaggagggaggaggaggagaggagggaagaggaggggagggaggagaggaggatggaggaggaggaaaagaggaggggaggagggaggaggtgagaaggggaggggagagaaggaaggagactggaggcagtgaggagcaaggaaggaggagctctttttcactctccactggccaaggctgacagccccttcacctcagtgctctcatctgtagaatggggctgtgctagatcctgcacacacacagcctggaccaggcacttgcatctgttccctgtcccatagagggcctgaaacaagaagcatgatggtggaggagggatggcaagggttcagggcaggcaccatcctggagcagagggttgaggagctgacgggagttccttgcaaggaggcaaagcatggcaagtcttggggggactggaagccctggctggggctttgggaagaggcccctcctagtccagccccccacatcccagccgcttggcctggctccctctggccaccctctgcaagcccgtgtc

SEQ ID NO: 21716 - DNA, 1044 bp, Artificial sequence
  DNA replication origin
tcaactcgagggcattgggaagtgtattagttcattctcacactgctaataaagacatacccgagactgggtaatttataaaagaaaaaggttaattgactcacagttccacattgctagggaggcctcaggaaacttacaatcatggcggaaggtaaaaggcacgtcttcacagggcggcaggagagagaacaagagccaagcaaaagtggaagccccttataaaaccatcagatcttgtgagacttgttcactaccatgagaacagtatgggggaaatcacctccatgattcaatcatctcccactgggtccctcccacaacacatgggaattatgggagctacaattcaagatgagatttgggtggggacacagccaaaccacatcagggagcttgcctgcctggtaagcatgggggagaggggtcagacggagccacagctctgtggccttaggaggtcagtaaatgcagagagcagcatgcggaacagaggaggaggtgactggggctgagaggcacccacatggcgtggagcacattggggggcgaggggtgatcagaggtcctgcaggtggaggagcagctgctagatgtgccaagagcaggtcgaggatcccagggaggggctggcctggctgggtgggttccacagggctggggaaggagagtgcagaggacaacgcctaatgctgcaggagagaggggcaagtgtggaggcgtgttctggggccgggcacaggcaggagccaggacagagagggggccaagcgtctgggcccaggggcaggagtcaaggggtgaggaggggccgtgcatacaggctctctttggaggagaggaggcacaatgggaaagaaacttctagaaggttctacagaccagaggttaagccacttgtccaaggtcatatcgcaagaaaggggctctgtgtggattggacctcatgcctcaaggccaggggctagaaaacctgggcttaccctgagggctgcagagtgaagcctgtggaggcatggcggctgcctccttctctctgtgctc

SEQ ID NO: 21717 - DNA, 764 bp, Artificial sequence
  DNA replication origin
ggcggttttgtcactgtttggggcagctcattaggcagtagtgagtgatcagaacggcctggctgacggctgtgatctcagtctaagagcgtcgcagggctgtggaaagcatcccagcccagggagcaggatggagcttgcacggtgagaaggcccctagagaagggcctgtcagggtagaggaagaagttgggggggccagtcaaggggctgctgcagccacccaggtccagggagaggcggcctgcacagaggtcctgtgcagatggagaggtctttagactgcagagtcgatgaggtgaaaccaactagatggagtgagaggctgctgggggaggggtgggtggggggaagggcttgccttgtcctcctggacggaagaaaggacaggctggggatggctgtgattgggtgtggacccacggaggctgaggaaccctggcagcctcccagtggggaagatctgagacccagcagaggagtcttgctgggggcaggggtgggcgtgaaaatgatgttgtgttgcctagcaagggtgttccagtccctgggtctcctgggcagtttgattcattacaggggccccagttcttctagctcgatccaggacccctcctacatggggtcctgggggagggtgggtctgtgctgggttgctgtcccccttccccaccacaggacatggaccagcacggatgtcactttcctcaatcacagctcactgcagccttgaactcccaggcttaaaggatcctctcacctca

SEQ ID NO: 21718 - DNA, 990 bp, Artificial sequence
  DNA replication origin
ctggggtggggaggggactgcaacccggacgatccagccatctggatctgcaacccctcatgcatgcagaccctgtaggtctctgtccacatctgtcctggccaaacaaggaatggctcatccagcttctggggtggaaatgtacccatcgttggcaaaatcgatcagctgaactgagctttcgtcttggctttccagctcctagcatagggggacaatggggagtcaaggacaggtcccaagagagattaaaaagtcactcattcacttaacatacttgttgagtgcctcctttgtgccaggcacaattagcgaaggaaacaaggatccctgctcacctagagcctcatcgtaatgagggagatgacagtgaatgaggaacacgggccacctgggaaggtggatggtgccaagacagagagagagcaggatggggaggtgtgggggtgggggtgggggtgggttgctatgaaggtgatgacgtctaagcaaagacttcaaggtgctgagggaggaagccgtgcgaggaacagtgtccaggcagagggaacagcccatgagaaggtgtggggctggcagcaggcctgggatgtttaaggcactgtgggatgggcagggaggaggcagagtcagagaggccagctcctggagccttggaggccatggtgtggactgggcttttccttacagtgagtttgtgccatctcatagccctgggatggagcagaggaaggttgagatgagatggtcggaagctgaggagtcccaggaggaagcgattatggggattcaggttgggtataaggttgcttaaggctggtgtggtggggagtgaaaagtcaaattaacaaaagaggagatggggtttctcagaatcagcctgctgcctaggggaccaacatcttcgtggatgagtgcagggtttggggccagccccacagcttcgtaggtgggtgacccacagcttccttgctgaatgaccgtgggtga

SEQ ID NO: 21719 - DNA, 1591 bp, Artificial sequence
  DNA replication origin
ggcgccggcgactacctgctgggcatcaagcggctgcggcggctctactgcaacgtgggcatcggcttccacctccaggcgctccccgacggccgcatcggcggcgcgcacgcggacacccgcgacagtgagtggcgcggccaggcgcgaaggggcgggggcggggggcaacggccgccgggccaacccgctcagtcacactctgagaccctcggcgggcacctgctcgggggccccgggaaccggggcggactcgggctccggtcccttctgacgcggggctggggacgcagacactcttggctccggcagcccagcgcaacccctgaggtcgggcgccgcctcccgccttcagaaactcgggctccgagcgccgaattccagcgccttcgcccgtgggcacagggcgcgcggtgcagccacagggggcccgagacacgcgccccggcctggcccaggctggggaaccgctggggtcgggctcgcgtctgaaggtccgggactgggtgcggccgccgggggtcccctacacaggcaagctaatctgagctagcgcaggcttgggctccggaggccctagagggcagcttgggctctggaggcccttgggggcggctgcgccgggaaccctggccctttatccccaaccccaccccagaaatagggtccccggaggcgaacaagccgaggggcggagtgggccagggatcacctgccccgcaatgacctgcgccccgcccccaggcctgctggagctctcgcccgtggagcggggcgtggtgagcatcttcggcgtggccagccggttcttcgtggccatgagcagcaagggcaagctctatggctcggtgagtaccgcaggggtctggctaggcacctagttgggaacagcggacatggctagcaggctcgtggcttctccagccccacctgtgcctgggtcttggaggggtggcagggtcaccaggtcacgggaccggcaggcctccccagacaaaggaagcagccccaaggcaggaacaatgaggttcctgccatccctgagtgggcccctcccagaccgaggaaagggcgctattgagagcccttcccttctctagtccagaggggtaggtctcagtgttggaactgcgggcttgaggctggacacggagggaatgaattctctggctgctaggtgcagggcaggtggtgagagcaccagctgttgtgggctggccatgtccccttctcaccctgtgtgggtcttgacaccttaactgctcagcagagacatctcagcccagggtggggggtgggacagaagggggttctgacccctggcttcaggctgggtaccttgcccaagaggtgccccagccctgacactgccctgctttgctgcagcccttcttcaccgatgagtgcacgttcaaggagattctccttcccaacaactacaacgcctacgagtcctacaagtaccccggcatgttcatcgccctgagcaagaatgggaagaccaagaaggggaaccgagtgtcgcccaccatgaaggtcacccacttcctccccaggctgtgaccctccagaggacccttgcctcagcctc

SEQ ID NO: 21720 - DNA, 1677 bp, Artificial sequence
  DNA replication origin
atatatcagctgcctgcagcgtcctttgctgaactcacagcaaataggagagacagggaggggtccttgggaagccctaaattgagcttgctgtgggagtcctgggaagaaaggagcctcatcctatcaaaagccgggggaagacatcagagtccctctgctcaggtcagctggcacaggtgggtctccaggcctgggtctcacttccccagagggtgtgttcggttggccccaggctgagggaggaaagcccacctcccatgtcattttgcaaatggggagtcagggacctagagatggaaagacaacacagcaagtgagggatgggttctaggtcccctgcaccctgcaccctgcaccctggccaacgatgtctatttggcaccagatctgcaggctcatctgggggaccccaggacccagaggcagccgggttgcatctcgaagctgtgagctgcagcccaggaaggtccaggtctgggtggcgctgcccaagcaggctgcaggcccaaggaggaacaaagatcctctcaaggggtgcggagctgaggttccggtcctgccaaagccacttgatgacccccaagtgcccccctttctgcacctcagagaagagccctcaagcctcccaggtcccctccaggggcacgaataagccccagcagggttctgaaggggtcccaggaatctccctgtggggatgcggtggaggtggaggaggctgcggtggcctggggacatctctggtcacaggtgctggtggtatgagagatggggtaggcaccaagccccctgcagctgtggctaggcgggcctgcaggaagggccaggcaggctcctcagggaccacaaagaacaggggttttcacacctaggtgggcctgcatctagctaggacagtccccatcaggccataatgggcacagtgggaggtagaaccatgagtgagagaggggaggcttccagaggcctggcctgggtccctgctagattgagggctctggctatggtacatggatatttctgctgtggaatcaaaggagcaggggatgctgaatatcccctctggccctatgccctgctacctgtcctttcacggaagggtgtgtgtgtagggggtgcaggaccaggcctccctgggtgcatctctgccaccttgccctttggctcaggtggacctccaccaggtattcagaactccagcccagaaacgcgccaagcctgtggggccaagacctagggggtgggggtggcctccctcccgcctgtagccaaagggtcctcccttgcccagccaggccccggtgtcgcttactgctcttatccacccctccttcccaggccggtcctcaaggccccagcaaaggaaccaagttcccgtgagcctccgaaaggcgaagggcaggcagcagccgctggcttctgcgcccactaggagcttcggatgcccgagttagggctgcgccaaggcggccggagcagagagggagacggggacggggacaggcagggacaaagtgcaagaggcaaaactggctgaaaagcagaagtgtaggagccgccaaggggcgggacgaacaggtccgtgggccgggcggagccaagggtgggggccggggtccctccaggtggcactcgcggcgctagtccccagcctcctcccttcccccggccctg

SEQ ID NO: 21721 - DNA, 1171 bp, Artificial sequence
  DNA replication origin
acctctggatgacagcccccctgggagcagatggcacctgggctgctgctctgtgggtggagctaaggtgcctgggggatgcctgcgcatcatgggagtcctcagaagccatgaactgggctgatttgcttttttaggaagcccctttaacatgcactagcagagtgcaacacatggtaagtgcccaggacactgactggtgaacgaaggactgaatgtcagatgggtgggtggatggatggatggatgggtggatggatggatggatagatgggtgggtggatggatggatggatgggtggatggatggatggatggatgggtggatgggtggatggatggatgggtggatggctggatggatggatgggtggatggatggataggtggatggatggataggtggatggatggatgggtggatggctggatggatggatgggtggatgggtggatggatggatggatggatggatggatggatggatgggtggatgggtggatgggtggatgggtggatggctggttggatggatgggtggatggatggataggtggatggatggatgggtggatggctggatggatgggtggattgctggatggattggtggatgggttgatgggtggatgggtggatgggtggatgggtgaaaggatggaaggaaggagggagcatggacggatggacatgtgaatgggcagatggacagatgaacggttggaaggatggatggaaagaaggatgagagaaaggaaagaaggaaggaaggagaggtgtatggacagatgggtgaagagaataaaggaaggggaaagaaggaaggaagatggatggatggcttgacaaacagatggactggaggtaggagaggctggagcagtgatccaggtgggaagtgatgagcctgccttttaaggcgtgctctcagggatgaggcagagggaggtgaggtgtgtgggctgaagagatgcaggggcgtggtctgaggactagggatggactgaatagcaggaggggtctaccatgactcccagcccactctgggtgagagtgagtggctggtggggcgatgattaagatggggagtcggggagctgctgagttcggttcgagtgtctgagtcagcaggatgttgggggagggtggtctatacctcagaagggaggt

SEQ ID NO: 21722 - DNA, 1248 bp, Artificial sequence
  DNA replication origin
tgggagggcagtcaagaccacagctgtcctcgggtgctccgcgcggcgctcggctccggccccgggcgcaggaagcggttccgccgcttgaaggtggcggcggcggcctcagcaaaccgcggcttcctccaggaaagccgcagccctgagagggcgtcctggggacatgcgcctccggagccgcacggtgggcaccagctgtcaccagggggtccgagtgcgcggaattcgtctcactaagacactccggttctctccaaagccaggctccccctcggagtcgcacagcatccaaacttcttggtgtaggctgctcacggggaggggagggcgcgcgcccgcagccgcccctgtcctgcgtcgagactcgtgcttcgctggtccccggtcaggcaccgccgatgccgcccagcctgcgcactgggaaggcgggaggctcgcagcctgcaccacagcacccctgggctggagcaaaagcccggtggtgaccgcgtctgtgctcggaccgcgtgccaggagggcgctcctgagaggcatgccttggagagggtgcaggcagtcgccccaatcccctcgcagcctctattgggagacaatgaccccaacccgtcctttgatgtagtcccccgcccccagcccccaccacagcactcgtgtatccagaaggaaaggcgggaggggagatttaaactttcttatccctggggagtgggtgagacccgtccagcttccctctgcgggctccagggtctaaactggcttcctgcccttccaggtcccccggcgagtacaatgatctcccgccaggtctattgccagcatgatctgggtggcaggcaccctggctgtgttattgccagtggtttatattatcagcctggctcatcagggcccagctttcccgctggcaggcacaggcattggggaccgtgcagtcccagagctcagactcccatggctgccgccagggcttgatttcccgctcaagcacatgtgcaggggcctgacagtcacccagccatagtggtccccacttgcttgtctgtcggatgatgatggcagctggcaaggtgttgtgaggctcgaatgaaagccagggtgcaggcagcgtcagcaggtgggaatgttaatttcattgttaccctcccaagtttgaatgaagagaagccttccctgatgttcccttctctacctcctgtccggtgacttctcccttcctgaacttccactcactccccgacctgtggg

SEQ ID NO: 21723 - DNA, 924 bp, Artificial sequence
  DNA replication origin
ctctttctctctctcgcccacccttcccccttcttcccccacctttcccgcgaagccggagtcagcatctccaggcgcgggatcccgctccgagcacctcgcagctgtccggctgccgccccttccatgggcgccgcgctcgcctgcagccgccgccgccgcggggcgggcgcgatgccacgatgggcctaatctggctgctactgctcagcctgctggagcccggctggcccgcagcgggccctggggcgcggttgcggcgcgatgcgggcggccgtggcggcgtctacgagcaccttggcggggcgccccggcgccgcaagctctactgcgccacgaagtaccacctccagctgcacccgagcggccgcgtcaacggcagcctggagaacagcgcctacagtgagtgccggacgctgcggggccccgggggaagcggcgccgggaggggtcgggcccgggagaaggcgcgctgcggggccccgcgggggaggcggcgccggggaggggtctggcccgggagaaggcatggtgcgcccggggtgtccgggaaaagaccgtctgcctcccgctgccagaaggggaatgccagggtgccctcctcaacctacacgtccgggagaagagcgcgcgctggggttcgagcagaactcgggggcatgggcgttcacgtccgaagagggcgccggcggctgtcagagtccgtccccggtccggcccgctggtctgaggggacgcgagctaggcgaccccggggctccaggctctgctgctttgggcagctctgacaagtttaagccctttgaatgtgtcggagaaaaggagccggacaaggcatttatcatcctctttattattttgacgacttctcctcctcctgccgacccctggacgccccgccgtcccctccgccctccccgctcg

SEQ ID NO: 21724 - DNA, 1422 bp, Artificial sequence
  DNA replication origin
gggctcggggttcgggccgggcgccgtctgcatacactcgccgccagcgcaccgccgtcgagccgcggctccgctccgcagcgcgccccacgcccccgaaagccctcctggctctgaaaggtcccctacccgcccctcccccgccccctcccccagaccaattatgcctccgaaaattatagaccgaggccttgaggaggccgccccaggccctgtcaccccctcccgctccccatcaatccccctgcacaatggggccgccgccgatgactgatgtccgtgaaaacaacttgcggggaagtcgagctgacaaacgcccattaaaggcggcgcataatgaaggggaccgcggagggcggcggcagggaggctccggggcgcgggcacgcgtggggagctccgggtttgtgtctgcgcccggcgcttcctgcaggagcagtggcgctgtcctcagccttgcaaggcgcggggcaggccgggtctggagatgctatctccttttgcgcacaccaactgggcacccggagtggtggggttagctctcgtctggcaggcctcggaggatcccgtcccagtgacggtccagagaggggcctggggaggcgggaggagggacgcgagagccagagaagtgggcgccgacagagagccctagagagaaagagatgcagatagagacagacagaaacggaggaggaaaggacgggaaagacatggaaaatgtgaatgacagagatcgccaaaaagaggaggcaggggagatggaaagaagacagagccgcggagaacacccagagaaaagcacagggagtctggtagccacagcgggtgggtgatgacaagaggaacccggtagaagctgggaatgggtgtgggggagtcctggcctggaggatctgaatcagtgcagatgcccaggtggtcccctggactgtgtgggggtcaaggtgtatctcagggggcccagtgaagaggggcttcaaaaagtatcgggaaaagccatgtccccacccatttctcttgcttcctggtcctctgtcccccagggtcctggggccagcaggaagcaggggccagcacaggggatttgcttctctcaaccctgccccagaggagggcacgctgtggagtccaggggtctaggccacagctttggctccaagttgaccaggggctctggggtgagttgggtgggctgacattccccagcctgccatctgcatcagggtttggggtcaggcaagtgtgcagggcaccatgagctgtggcagtgagcacacacccctgggacgtgtccagctcccatggcccaatacacacagggcagtgtgtcctctgtgagcccactccagcgtgcacagggtccaggtggccatcctgaaggagggcgcccccaagccatccccgagcacctcagtctta

SEQ ID NO: 21725 - DNA, 1363 bp, Artificial sequence
  DNA replication origin
ggtgcagccacggcaggacagcctctgggacccacccaatgcagcgccctgcctttgcacacgcggaaaccctttggccctcaaagaagcagcttccatcctggctccctccggcttccaggccctcactgcggctttggacctgggttcacagggcaggtgggtgcagagggcctcccgccacctgcagagccacaagtagccgcacacggccggggcctcaagtgtccaccttgatttaggtcaatgctgccttctttcccccacccctcctttcatcccaccacccccttaaatggtgggccaggctatggtgccctggaggccactgttccttttgctccaagttttcagctctgtgggctgtggggcaggtgactcaggccaagcagatgcgttgcatcctgctgggaaaactcgattttgtagacatttgccaggattgccactgaacatttgggggggtggggtgggtgcagtgggggacagaaatggcaggagtaggggccgtgcagtggccaggctgtgggggaggaaaggcagggagcacggtggcctctgccacctctaggaatgggcagagagccccagggaggcccctttgacctgcagtgtgacctcgggaaggcccctccgcatctctggtcttgggtgaaatcattgaaaatacaaggaaatagagagaaggccatgctaggtgcgttctgagggctggaggtgccgtgggacccatccacgtggtctctccttccctgagctcacaccacagggagggagggaaccagtgcccagtctggtttctggggaggggagaagcgagaggaagaaagtaaagcagaggtgagcaggaggcagctggagcagcgtaggagggggacgtggaagcagcgttagggcgggagggtgacctctgagcagagggtggagaagagcccagccatgcccgggagtggggatgcaggagagactgtaggcagaggcagctgctggaggtgaagcccagggctggctgggcaccttcccatggtggagaccgagctcgtgcccagcacagaatggtggatggggtgatggggggaggctcagccaggagggtccctgggactgcagaggcagccgctggggcatggatgtgagtgggtggcgggtgcacagggactgaaaagagcctggcctttgggggtcagagccccgggttggcatccgtttcctctctcactggggtggagatactggcaaggacggggtgatggcctgagctctggacatcaggagcaaggtgctgtcagcccagagaggggtggcttcctactcacggtcacacagccggtgagtcacaaagctgggttctcagcccctctct

SEQ ID NO: 21726 - DNA, 1383 bp, Artificial sequence
  DNA replication origin
acatgcgttccaaacaaacctgatacacaaagactggggttcaggtgagtgtgatgggtacaggtgggcaggatggccccaggtaagtgtgatgggtccaggtggatgtgatgggtccatgcgggtgtgatgggtccaggtggatgtggtgagtccaggtgggtgtgataggtccaggtgagtatgatgggcccagataaatgtgataggtccaggtggatgtgatgggtccaggtgggtttgatggatccaggtggatgtgatgggtccaggtgggtttgatggatccaggtgggtgtgatgggtccaggtgggtgtgatgggtctaggtgggcgtgatgggtccaggtgggcgtgatgggtccaggtgggcgtgatgggtccaggtgggcgtgatgggtccaggtgggcatgatgggttcaggtgggtgtgatgggttcaggtgggtgtgatgggtcccggtgggtgtaattgatccagatgggcgtgatgggtccaggtgggcgtgatgagttcaggtgggcatgatgggttcaggtgggtgtgatgggtcccggtgggtgtaattgatccaggtgggcatgatgggtccaggtgggtgcgatggatccaggtgggcatgatgggtccaggtgggcgtgatggatccaggtgggcgtgatgggttcaggtgggcatgatgggtccaggtgggcgtgatgggtccaggtgggcgtgatggatccaggtgggcgtgaggggtccaggtgagtgtgatggatccaggtgagcgtgatgggtccaggtgggcgtgatggatccaggtgggcgtgatggatccaggtgggcatgatgggtccaggtgagtgtgttggtctgggtaggcatgatgggcctagttgggaatgatggttccaggagggtatggtgagtccaggggggtatggtgggtccaggtgggtgtgatgggtccaggtgggtgtgatgggtccaggtgggtgtgatgggtctaggtgggtgagataggtttaggtagatgtgacgggcccaggaggatataatgggttcagtgaataagacgggaccaggtaggcataatgggccaggtggatgtgataggttcaggtgaatgtgatggacttaggtagatgtgatgggcctaggtagaaacgattggttcaggtggacgtgatgcattggttcaggtaggtgagacgggtccaggtggatgtggtgggcccagataggtggggcatggcatataattttccctctctgtgcttttcacctctctgtctccatatttaaggtggattagctacaggctacgtgtgattgggcctcaccttttcaccccctgtctgtttctgccttgtacctgggccattccattagatgtggtt

SEQ ID NO: 21727 - DNA, 1055 bp, Artificial sequence
  DNA replication origin
acctccaaaccattaatttataccaacggggacattccaaggcctggagcagttactgaacacgactgtgcagccttctctgccatattaatgtactcttgtccccaaagacctgggacaggagtggctgcctacttagcaaggactctgctcacaagcccggtcctcttgtgggtatagaatattctgggttatgagacatgtttttgaacccagacttgatgcattcagtcaataaacatatatgaagtgctgtctcccatgcactaggtgcaccctggagaagcaactcttatccccaaagagaaaacacacaggcagcaaatctgtaggaatgagggcagagtggggaggacagagtggggagggcagagtggggaaggcagaatggggagggcagagtggggagggcagagtggggagggcagagtggggaaggcagaatggggagggcagagtggggagggctgaggggggagggcagaagggggagggcagagtggggagggctgaggggggaggccactccgggacagggatggtcactgccacatagtgggaagatgttctgtggggaccttgaagagtggggagatggagagtgatcgggagggaagggtgatacagaggtgcgggcagaaggcaacagccaggaagaaagaggggtgtcgaggtggacggtgggattccagagagcttttcttattgagttactgggggaagtttgtttttctttttttctttttctttttcagaacacaggatggatgtgcctgtctcctctgggaagctctcctctccttcatcgtgttatactcgtgttcactctactctcatcctgtgtagggcaggcaaacagggccgtgactctggcccctcagagcccctggtttgatagtctgtgtacagcgtggggtatgtgatagcaattgcacctcttattttataaatgggtaaactgagtcctggagacagggctgtccctagatggatgtgggttccctgagtttagcccatctctttccttacacgcaaaagcagacctcacatcactt

SEQ ID NO: 21728 - DNA, 1172 bp, Artificial sequence
  DNA replication origin
agcaagttgcccccacgtttctgcaaaagctcagggagagagagttccacacctcagggtcaggaatgcagcctgacccaggcctgcccagaggacactgtggggatgggggaggccacaccatccactgggacctggggacactgtggaaatggggaggccacaccgtccaccgggatctggggacactgtggaaatggggaggccacatcatccaccaggaactggggacactgtggggatgggggaggccacgctgtccactgggacctggggacactgtggaaatggggaggccacaccatccaccgggacctggggacactgtggaaatggggaggccacaccgtccaccgggacctggggacactgtggaaatggggaggccacactatccactgggacttggggacactggaaatggggaggccacaccatccagcaggaagtggggacactgtggggatgggggaggccacactgtccactgggacctggggacactgtgggaattggggagatcacaccgtccactggaacctggggacactgtgtggatgggggggcccatactgcccaccagcacctggggagggacagtggtctccatgaaaaattgggacgaggttgtgggcagcacccttggatgctgagagcagactccagccaaagctacaaaggtgagagatccccatggaagccagaggctgtgggagcagcttggtgtggggagcggggctgatgttgctgctccactgggaccccaagccctgggttctagagggttctagagggtgctgggtcagttcttgccaggcagcatggggcaagggtcgtggctctgcctggtgtgggttatcacccaccatgtcccgtgtgcgctttgtggtttgaccatacatcctgggaggaagcttctcaaatcaatatgcctaggaagattgccggctcccagccctagagattcagatgagtgggatgacgtgcggtcctgagctcacagcccctgtgagactctttgcctggctcttgtctttatatttttttttcaaaggtagggggacaaggcgagagggagtgaggtgattggggacgtgaagtcccccaaaggacaagcctggcaatcaccaccagtgacgagtcctaggtcctttttgtgtcctgtgaggtgg

SEQ ID NO: 21729 - DNA, 1016 bp, Artificial sequence
  DNA replication origin
cacccagaggtgagaggactcaccccaggaggggaactccgggttgaggaaggaggggtcaccctaggagggggaactcaccctgaggaggactcaccctgagaaggatggacttacctcaggagggaggacgcatcccaggagggggactcacccagaggaggcaggactcactctaggaggggaactcaccgtgagaagggagcattcacccaaggagggggaactcaccctgaggaggactcaccctgaggagggggaactcactcagaggcaggaggactaaccccaggagggaaactcaccctgaggagagaggactcaccctgagaagggaggacttacctcaggaaggaggactcaccccaggaggggaactcaccccaaggaggaaggactcaccctgaggagggaggactcactccaggcaagagctggatggctggtgacaggccctggagccagcagggaggggcagctttcctgggagcttggtgacaaaacagaggactattcccaagagccctggaggagtgtgtacctgtctgtgtgtatgcatgtgtggtggagtgtgtgcatgtgggtgtctgtgaactggtgtgtaagagtgttcccattgcactcatgttcatgtgaggacacattgcacttatgtgcatgtgagcagtagtgtgtgcctgtgtgcgtgtatacacgagtgtgcgggcacgtgtgttactttgtgcctgtgtgagctgcagggaaaggcgcctgtgagtgaagtgaaggagccctggggccgaacatagcactgggacttggtcaccccaaggtggtggcacctctgggtccctctctgcggggaggaagcatgggaaccggggggtgggagccggcccaggaggccaagatagagtggcaggggaggagggatgccaagatggccagccagggaagaggggcgtgaaaggaggtgggcacagactcgaggccactgctcgctccaggggctcacaggagttcgcggtggggccact

SEQ ID NO: 21730 - DNA, 840 bp, Artificial sequence
  DNA replication origin
aaagggtctggtacccaaatgagacccaaagggtctggtacatgctgggctgcagtaaatctttaatgaattgatggatggatgagtggatggttgtatgaatgaatgggtggatagatgggtagatgaatggatggataggtggatggatggatggatggatggatagatgggtgggtgaatggataaatgggtgggttggtgagtggatggatgggtagatagatgaataggtggatagatggatggttggatggaagaatatatgggcaggtaggtggatataagggtgggtggatggatggatgaatgggaggatggtaggatgggagggtggatgtatggttgagtaggtggatggatgggtgggtgggtgggtggatggatgggtagatagatggatgaatggatggatgaatggatggatggatggataagtggatggatggatggatggatggatgaatggatggatggatggatggatggatggatggatggatggatggatgatttaagtgggtggatgtgtggatgcatggagggtaattccccctctggtctcactcctgatcacctcatctggaagatgctggaggtacaattgccatgattactaattcaggagatactctcatctgaatgacccttttggccagaagtatccagactggcactggctgctgcgtttgttcagtcatactccagcaatttccctgccagctgcacagtgtgggattttttttcactacttgtcccctgacttagatatcctgaaaagcaatggagtcatccccgaccgtgcaagacagcggcctcccagaccacagcaggcatccc

SEQ ID NO: 21731 - DNA, 942 bp, Artificial sequence
  DNA replication origin
gatgtgtggatgcatggagggtaattccccctctggtctcactcctgatcacctcatctggaagatgctggaggtacaattgccatgattactaattcaggagatactctcatctgaatgacccttttggccagaagtatccagactggcactggctgctgcgtttgttcagtcatactccagcaatttccctgccagctgcacagtgtgggattttttttcactacttgtcccctgacttagatatcctgaaaagcaatggagtcatccccgaccgtgcaagacagcggcctcccagaccacagcaggcatcccagacagcatcgtcatgtgcccccaggtgtcctggggagcccactccagatgtgccagcctgagaagggagctttgcctcaccggcccatggctctgggacagatttctagactcggctctgagaaaaaataaacttatgacagagtttatctgaaggaggaagcagcaataaagcgtgacacccagggagcaatgaacagagagctccgagacagacacaaaacaggtaccgacaaatgtggaacgcgttatttaaaattccccgggctgacagatcggacagcatagcgggccagacgccggttcgaggagatgaaaagagttcatttccttcctccagataaacacactagcagccagatctctctgtgatgataaatggcttcctcctgccatcagtggggttgtgggggggcaggtcacacctcatggctggttggagcctgtggccatcaaaggcaggagaaaggcagccgtggggagatgcgcccacgttggaattcccacaatcccggcctgtcctccagcaccagaatgctgcttatctcatcccagggcccccacaactatcaaaatacatgaagacacagaatgaactgggggatgtagctatggcctcctgctctt

SEQ ID NO: 21732 - DNA, 1249 bp, Artificial sequence
  DNA replication origin
tccttctctctggtcagatgtcaggactccctggagcaaaatggtagcagcagtgggaagtctttctcagtgtcctctgcaccttccgttgaatccccgcctccctccttcctccaggcctcatcatctcctataagacagggctggctccactgccccacctgctttcacatttctgtcacttggtggaaccatgtatcacgttaagcatttgaagtgatcttaccaagaatctgcagcactggcaagactagactcctttctaccaggggcgattttaatcttccacccggtcatgcaaaaagaacaccacgtttccatgctgtcaccccaccctttgctgagctggaagaacccagagggccctcccctggctcccacctttattgagggacctcaataaagaaagattcattttacagtcaacaataagcacgaacagtagagatgacaggtgcctagcaagtatttgctggatgggtagaaggaaggaagaaaggagagagggaaggaaggcaagggaagggaaatgagggaggggaagggaagggagagagggaaggagggaggaaggaaggaaggaaggaaaagaggaaggaaatgagagtaatggatggatgagtgggtggatggatatgtggatggatgatagatggctggctggatggattaatggatagctatgtgagtggatggatgaacagatgatgaatggatagatgggtggatgggttgatgtgtgaatgaatgatggataaatggatgggtggatatgtgggtaactggatggatggatggatgggtgggtggatggatggatggatggatggatggatggatagatatgtgggtagatgggtaggtgaaaggctgggtaggtgagtgagtgagttatatgtttcagggatgctccaaatcagggaaacccaacatcatagaaaggtgcttcacagtggactaaagactaataaaagataccttccaacagcaagattgcttatggttttaattttcttctttgtgctcctctgtatgaaacaaaatggggaaactctacttaccagaatgcctgccggggagtgcagatgtaattagaaggcatactatggtaagccacgggggcagaggtgggagggacatgacccctccaagctgaggcttaagctttaacatggtggtacccctgctctgttaatagggaggcctctcaaggaagcaggcttatctttgctgaaggagatttgatatc

SEQ ID NO: 21733 - DNA, 1366 bp, Artificial sequence
  DNA replication origin
ggcggctctgggggccaaggtccgagcctagctcgggaggggactgtcccctctctcctccccagaggcaggagcgaagccgcgcgtgctgtagccaaacttggctgccctcgctcacggccgcgccgctcctccccctcggctttttggtctgggggtcccgggcagacctccccaccccccgggggttacctgcggacaccgccctcgccccgccccgcgctccccggactcccagcgagcggcgcgggacgctgcagaggagcagcggctggtccccaggtcccggcccgcccccggcctcccgctgcgcggggcgcgtctccaccgctcccagaccgtcttatcagttggggcgggcagtggggccccgagcggccctgcgaggtgcacccccagccagggccccagggaaggggtgttgactacaggagggggccttgagccagcccccgagagacgggcgcagccctgggcgcggggcggttccgtgagtggccctggttcccgcatcagaagagcgccctggccccctcccccaggcggcaggaccccgacgaatcactgtcaatttgtcacacgaggaggctgaagcccagggatggaaaggagagctggaggttacaggtcactggggtcctgaacttgaatccagaaattcgcctctgcccacccccctcccctccccgggttccctcccgcaagccacagcctgtgcagaatgtagaaatctggataaagtgagaagggtttcaaagtgggggaatgtcctgttatgtgaagattccagttaactgcggctaagaggactggacccgggggtgcatccagggacgaggcagggactctgatgcacagcctgtccccgacccttcctcttccccgcctcatgggctcagggcaggaagccgggattgcccctctccagccctgtggggtttagaaaccaaggtctggacaattcagcatcctcagagacagcagcaatgtgggccctacggagggcgggcgtggggaactgcagtgccggcgcctccttgtgtacccacaaacctcacacccctgacatctccagataaataccataaattctcaggcagaactaccataaacagaatgctaagtggctccgtgaccacaggagaggccgtgggggacagggcagccgcctcatcttttgaaaggtcatctgacaacttctgcaccccaagggaggagctggtttggtgctgaggaccagcccatgccagggacccttggatcacttgccaaggtaacacttcacctagtgcccagctttggctgggccctgagggagacagacccggctacccctggaggacagaccacatccccgcggaaggca

SEQ ID NO: 21734 - DNA, 1117 bp, Artificial sequence
  DNA replication origin
gcccccagagccgccgcagacctccaggggtgacttcgtcgctccctagtctggactcgctaggtcccgggtgcaccggagtcgcgcagcgaacgcgccatgcaggagggcgacatcggcctggaggggctgccccccagggaagtccccacagtcggtgagtatccagggcggcacggggggtgagggaccgcgagcgcggccgcagtggatctgggacgccccaggggcagtggcttgcggaggactcaggggcgcacgaggagcaggaggcagggacccccacctctggtggcggggacagtcctcccccctccgcgctgctcccggtgaaggcgagaggggagggactgtgtcggtcacaggtcgctggggcactgacagacaaacagacgacagacagagccccggggctgggctggggctgggggcgccgccgggcaggggcccctgcgcggcccctggggagacatctgctaggccggcccaggctgttcccaatcccgggggagcgtcttgcagcggatacgaggttttcggatgtttttacaggcgctattaatacacataatatttccgtgctattctggagatttatttgtgatataaagtcactactatgactcgaaatcataatggaaactgagaggaacttagagagccggagacaaatgaggcctggacgctaggccggagggggagtccctgacttcctcccccctggctgcacataaatcaccacccaggatatttttgtaccaataattttaaaataaatgacccaagccctgtttcctggatgattctcccctcccagttcagaggttattaaataaacctaagagtgggatagtgacaagggggccgcagtgtgcagtgggttttatttaattacacgctgagctctgcccttctgaagccctggttaggaggcagtgccctgcaatcaggatgccaccgccaacccgggactgctaactatagcatgggaagccctccttttattcttcccccctccctcccccgacttttcttcttttcgaattcccatggagaaacttattctgatgcgtgcctttcaaacagccgggtctggcttctttctagaagtgacact

SEQ ID NO: 21735 - DNA, 1866 bp, Artificial sequence
  DNA replication origin
ggccctcccgcccgggtcgcggccgcccgcactcaccgtgccctcggacggcaggtagccgatgtcctcgatggcgcagatgttgatgatgtggacgctgcggtcctcggccgggagcgtcgagtacttctcgttgaccctcatcgtggccgcctgtgcgctgggaccgccgggcggcgcgccctccccatccacggccccggcggcctctgcgggcggagaccgcagcgttcgcggcgcgctcgcagggggccgggcctccccgcgcccaggcccgccggggacgtggccgcctcccgctccgcccgccgccctggcccgcccggcccgcgcgctcgatgcggggggcgcctgagcctctcggggccgatcgcgccgccacccggctgctggtcccgcgggccggcccgcgcctggtcaggaacttggacgccagccggcccgcctttgccttaaagatataagcgctctccgcccgcctatggcaggggcggtggccgcgccggtcagattttccgtagaaatttaaacacaggaagaaaaagtattccattcctgcgggcccctccaagttttatttttatccagggaaagtgcccctttggatttttgagggttttcataccgggtgtgaaaggggggaactttcaatagccccacctgaaataaagtccccgagtggcaggcgcttctgtggcgcgtcacctccgcctccggggggagtgaagcttctgagattggagtctggatctctgcccctttccctccaccctggcaaactcctgctgtcactcagcactcacctcctccggggagcttgcctggttcctgccgacccgccccctccagctgcccgcgctcctgggggagtctctcccggggcagtcatctccctggagcccactgatgttaccggtgcccccgagtttacggagtgcttagtgttctgtgcccaggtgcgtgcagcgtccctgatgtagggcgtgagtgtgtatcatctcatttaaccccgcacctgcaaggttggaatgcgggtcctcattttgcagaggacactcaggcttaggagggccaaggaccagtccgcatcctctgaggtggggcggggctcctgcagagctttccccactgctgggcaaggctgtcctgctttctggaggggcggagcgggggggatggtggctttgatctctcttacccccggacctagcaggggtctggcacactgcagatcttcaagtcttcttcccctaaggagaataaggcaggtccccaggggacgaccatactcaggttaagccccaggggccatgctggccaccacatccagtggaaataaagtgtccctctgcctctcacatcctatgagttcttcacggtgtgcatcagatagcacctcctgcaggaagtcctgctggattctcccctactgtccccttcccacccaaatatgcaggccttcctgtctatccaaagaacctgcctgaaccccaactagcacttcatttattccgtctcattttacagtgggttgtctaccaggttcacacagccgatgctcaataattgcttgttaaatggccactggggaacattcaaggcctacagaagtgattagaaaattgtctttaaaggccacgatgtcgtcagcgtgccatggttccaagcatggaacctggagtcagctaggatagggttggagagaaggggtggggtctagctccagctctggcaccttccagccttgtgaccttgtgccagcctccttggcctcagagcctcctgggcctcagagcctctgccttctcatgggagttttaagcgtgcctgaagctgccaggcttagcaatggtgactgttgtcact

SEQ ID NO: 21736 - DNA, 2131 bp, Artificial sequence
  DNA replication origin
gagggcgcgccgcccggcggtcccagcgcacaggcggccacgatgagggtcaacgagaagtactcgacgctcccggccgaggaccgcagcgtccacatcatcaacatctgcgccatcgaggacatcggctacctgccgtccgagggcacggtgagtgcgggcggccgcgacccgggcgggagggccgcgcacctgcgccttggcgagggcgggaaccgggcggcggcagggcctcctgggaccccagggcgggggccgcaccctccgcgcagggttcgcggcgcccacccgcgcacgtgcgtgccgggaagggcgcgccggccctggccaagtgcgtgcgccccgcctgcgctctgagcgttccgagcgcggcgcccactccgcccagcgcagcgccgggcccccaggcatggcccggcctcggagctctgcggccccgaagccgcctcacccggggctgcagctcggagcccaaccaagagctcacggctggcgccctggatgggaccttcccttcctggctcgcggccaggggtacctgttggggcagccagggtgagggtgatggtgggggtcttgggtgaaggccaagttggtcgccactccacgatgatggtaactgccaggccccactgcttcactatcctctggggccagagtcccgagtcctcacttgccagaaacgcatattgtgcccagggcactgggcctggtaccctggcattggcaccgaaactctcaaagcccagggtgtcaatcattggagattgctttctaccctcgcccctgtctcccctgggcgcccaggcctggttcaggtgggggcactggttggaagccagtcatgtaagttggggaccccatcctgaggtccccaatatccccaccaccctccccagggccagacccagaggtctaggtaaccctatgttttagagaggggggcagaattctcccaggaagggtttggcttgaaggacaaagtttgccggaagaggataggacagggctgggactggctatctcctcttggggtgagggaagctctcagcagcaatttgtgggacctaaggacagaagctcccttctaccttcttcccatgcagaccccatcaaagcccctccccaggcgtcaggcccagcagggctgcttcaagcaggatgaggatggccctggcctgtccctctagtctctggagctcacagagaggcagggaatgaagcgggagcaaagctcctgctttgagtctctgttccagcgacagcagggactctggccttggtcaggccttgcaccccttgggtcacagtggaggggggtggcctgggggcatctcttcaggaaatgagattgcacagagctgccaggagcactgggaacaggtgtagatggagagggagtctacctgtgactcacaggactggccggaggagctcagggattgccatttgatcaaagccatgtgccaggccatgctggcccctgggcaccctcaaagaatgagacagggaaggctccgcccatctggagcttacttaagaaatggtgatggaacgttacccgttatccacggcagtgacagggactattccatagtgctgggccagtgctgtgtcttagctcattgaactctcacaacgtgtgaggtaggtgctattgctacaggcaaggagactgaggcccagaggggcaggtgaccagctccaagtcacccatcagctgggaggacagttaggaagggcccaggacacagaccaggtagctgcagaaagcctgcctgaagaataaacattctggagaaggagctaattctacccataatgggtagggactgagtctttcaaaaacattgcatactcaaagtcccaaaggtgggaccatggaggtaccagccaggagccaggggatggtagtggtggccaaggtgatggagaaatggatgctctgggggtagactagacaagacctgatggtgaactgaatgttcaataagaaatggagcctgtcatgaatagcccccggtctctagagtttttgttccaggacccattgcttatccagacccagaaactatctgcctcctgcaaacccaggtgaaggccataaagtctgcaaagaggcagctgggcc

SEQ ID NO: 21737 - DNA, 788 bp, Artificial sequence
  DNA replication origin
ttgaacgagtgagtgaggagtgagtggatgaagggagcagcgcaccctccaaaggcccatcacgagcagctcgatggtgaatgggtgtcttttcttccacccttagctgctgaactccttatctgtggaccctgatgccgagtgcaagtatggcctgtacttcagggacggccggcgcaaggtggactacatcctggtgtaccatcacaagaggccctcgggcaaccggaccctggtcaggagggtgcagcacagcgacaccccctctggggctcgcagcgtcaagcaggaccaccccctgccgggcaagggggcgtcgctggatgcaggctcgggggagcccccgatggactaccacgaggatgacaagcgcttccgcagggaggagtacgagggcaacctcctggaggcgggcctggagctggagcgggacgaggacgtaactatctcactgcgcgctgtttgtggggggtggggggtgggctgcgtggggggcagtaggggggcagctgcttccatagtcagagggtgcgaggctggtatcttgttttagctttaagctgttcttaaagaaggggcagacgggccagacgcagtggctcacacctgtaatcccagcacttcgggaggctgaggggggtggttcacgaggtcaagagatcgaggccatcctggccaacacggtgaaaccccatctgtactaaaaatacaaaaattagctgggcatggtggcatgtgtctgtggcccccctactcgggaggctgaggcaggaaaatcacttgaaccc

SEQ ID NO: 21738 - DNA, 977 bp, Artificial sequence
  DNA replication origin
gggccagacgcagtggctcacacctgtaatcccagcacttcgggaggctgaggggggtggttcacgaggtcaagagatcgaggccatcctggccaacacggtgaaaccccatctgtactaaaaatacaaaaattagctgggcatggtggcatgtgtctgtggcccccctactcgggaggctgaggcaggaaaatcacttgaacccaggaggcagaggttgcagtgagcggacatcacgccactgcacgccagcctggcgacagagtgagactctgcctcaaaaaaaaaaaaaaaaaaaaagaagaagaagacagggcagcagacaaaaacactgttcttgttaaggtggggtagaaattgcttttgaacagagttagggagccctgacctgctcctctggccatgtctgctctgggagagggtctggccttcacagccatgaccttcagagtcagagcatcgcctgcttctggtcagctcctttcctgggaagatttgccaatcgggggagggaggacaaagctctcctgggagtcttcctggatggggtcggcccttctctgggcctcagtttctcgtctgtagagtgagatgtgggtccagctgagccctgggagtcgttggtgctctgaagtccgtggctctgtaacactgtgctctgaagccctgctccctagcaaagcctacgaatcttcctagaagaaagatttcaaaagagaacaaaaggtcgacccccctcgagtgcctggctgctgcggggccgagggtgcagctgtgtgcagagagaatgactttagcagccctagcacagcggtgcttccttcagcggctctgctggctgctgtgtgctctctggctgtcatcttaacctctctgtgcacgggaacccttccttccatgaatattgggtgaagggccccagcctacagagccatcactgtgcggattacccaagaatcgacaaagtctctaaaaca

SEQ ID NO: 21739 - DNA, 1082 bp, Artificial sequence
  DNA replication origin
gggctggtggcagtggtcataaacatgggccataactgcatgtggaagggaggaggtggttacaggagaatcagcaaggtcagaaccgattagatctgagggatgatggggagggagccattgagaacagcctagtgggcgattccttccttcattcagcagggatgtattgggcacctgctgggtgggagaaaagaggcactgaggacatttataatccggcaggtggggagaggcaagctgagctagaagacagagccaccgggagggtggtggcctcaaggcctggttgttaaggggaccctggacctattccaatctgaaggggacaagtgcttctgggaaaaggaacagccagggcggaggccctgtggctgcaggagtgagtttggaaagtgagagaggcagccagggggcggggttgttgggacaggtgggtccagtggaggcggcggggcggggaagcggtcagatggcctgggccagggggaactggaaggacgctggccttgcctgagagagtggaggcagaattggcatgctctgaaatgcacgtctgcatagcacgaccagttcttctcaccccagtttacagatggaaaaactgaggccgggagtggtgatgtcgctggtccaaaatcacacagctgcaaatggcagagctggcgccaggttccaggcagacagactcccaagccggagctgctgaggccaccaaacaaaacacgtcactagtcaaggggcaggcagccgggggggaatcccttcagcagggctctgcccaggcaccaggaacccagagcccgatgatggccgcctcctgccaccgtggggaatggatcccaaggcccgccccaccaccaccacccctgatcccccagagtcctagaacattcagggctgtgtcccagagtggtgctgttccaactcagctctcagcacgaggggaccgtaaatccaccaggcagggtacgtggcacagctgtgacacaggacaccagcactaggcccaggagggcacggcagtgctttgctggggccaactgccatgactcccacgttgggaggtgaaagatgggaac

SEQ ID NO: 21740 - DNA, 1040 bp, Artificial sequence
  DNA replication origin
ctgaatgagctagtcctggcactgacgtgaccatcagccaagcaatcctgagactagaaaagcagccagtgtggctggagaatggaggagggggaggagggggaagagggggtagggttcaggggcctgtgacccagagaactgaattcggctagaaagggactactggtgtccatggaagaagcatttttagggggaggataggcatctgccaagtgccagaggggtgcggagggatgaagggggctggactctgaggctggaattggtcaggacaggcctgtggaggggatggtccttttccaacaggattggagtcgggagttctgcaagtcatggggtcccagacgatgccagatgttacactaaaaataaccaaatatgtaatttttgtgctaagttagatagcatcttcatctggattcccaggcgggcaagttgtatcaagtaccaaagatttaaaaacatgtatgggggcctgtgggggaggctgaaatgaagaacattccatacacagaggtcctggcccctgggaattgggacaaggccactattgtgaggttgtcagggaagcatctctacccaccacctgtggaaggaccagcagatagggcaagggctgcacatgcagggtccaggaaggactgcttcccgagagggaaagctgggcacatttggggaacagaggctgacgtggagacctggggggaaggctggtatcgggtgtgggcccatgggagaggagggaagagcaaatggatgtggtggggacatgttcttttcgggggcatggtagagaagcagagcttcctggggagcctgggtgggaagggtggagttcccatgctcagagtgaggggtagagggtggggaccaacgctttggggagtgaggaaaattagcaacagccactaaagaataaaggggctggctgggtgcggtgactcacgcttgtaatcccagcactttgggaggctaaggagggtggatcatttgaggtcaggagttcaagaccagcctggccaacatggcgaaagccc

SEQ ID NO: 21741 - DNA, 1912 bp, Artificial sequence
  DNA replication origin
tgctgaagggatgaatggtggatgatgggtgggtgtgtggatgggtggctgatggaaggatgaatgatggatgatgggtgggtgagcaggtaggtggatggatgcatgctggagggatgaataatcaatgatggatggatgggtgatgggtgggtaggtgggtgaatgggtagatggatggatggatgctggaggaattaatgatagatgatgggtgggtggatggatgatggaaggatgaatgatggatgatgggtgggtgagcgggtaggtgaattgatggatgctggagggatgaataatcaatgatggatggatgatgggtgagtgggtgggtggatggatggatgctggaggaattaatgatggatgatgggtgggtggatgggtgatggaaggatgaatgatggatgatgggtgggtggaggaatgatggatggatgggttgatggatgatgggggggtgggtgggtgagtggatggatgctggaggaattaatgatgggtgatgggtgggtggatggatgatggaaggatgaatgatggatgatgggtgggtggatgaatgatggatggatgggttgatggatgatgggtgggtgggtaggtgaatggatggatgcctgagggatgaataattaatgatggatggatggatggccgatggaagaatgaatgatggatgctggaggaatgaatgatggatgatgggtgggtggatggatggatggataaatggatggatgggtgctggaggaatgaatgatggttgatgggtagatgggtggctgatggaaagatgaatgatggatgctggaggaatgaatgatggatgacgggtggatgggtggatgatggaaggatgaatgatggatgatggatgggtggaggggtgggtgaatagatggatgccggagggatgaatagttaatgatggttgatggttggataggtggatgatagatggatgggtggatggttgatgggtggacaggtaggtgaatagatggatgccagagggatgaataattaatgatggatgatggatagatgatggagggatgatggatagatgctggaggaatgaatgatgggtgggtagatggatgatggaaagaagaaaaggagggaaggagggaggattagatgggtgtttgggtcctaactcagagctgcagggaactctgcattctgccacgatggctccacatcacagcctggtgccaagtttttgcctttccggtgacagactccatggcttctccattattgttctaatcagtggcaggagccccacgtgcctgaccctggatacctcacagggcagaaatgaaagtgcagccaaggacatttcaatgacattttcctgtgctgagctggagggtgggcagaagagagtgtagggaagtttaagcaggaggcaggtctgggcagggcagccatcactcttggcctgatcatggggccacaaacatgtaggagtacttgggagccccttcctccaggaccgtgggtgagttcacacctacacagaactgaaccccaggtgagcaaggcacgcccccagagctgtctttggatgtgcagaaggtgttctggtgggcagctgctgcctccccctgccagggcactggaagagtaggaccacctgggccctgttggggagaggggtggcttgggttgtgggggattgattccaggtgtggactgaggtctgctgcatccctgggctggactaggagccacagagcccaacatgtcattcatccatccattcatccattcattcaacagtcacttagtgaaaacccacaggccctgttggaggcatggagggtgagaaggaccagacaaacctggtccctctggtgtctccattctagagggaagggcaacgggcaaggacatacac

SEQ ID NO: 21742 - DNA, 2391 bp, Artificial sequence
  DNA replication origin
agcgtctcctctggggtaacacgggctgtgcactatagagaccccccactgacaaacagggaggggaaacagtgcaggtgtacccacggctgcccccacccaaactcacaggtggagggcgtattcctgagatccatagaggggccgcctgctgctgcacagccccccgaaaccaccagcctcacctgcagctaagcatggccatggttggaggggcttgtgacttgtctgcggccctgggaaggttcccccacccccgaatcgagagtcctgggcagaccccttcccccatccctgtctcctcctttacactgaaggatgcgatctctcctcccagggcatggagagaaggcagatgggctcatgcgagttagtgatgtgcgaaaggtacagggtgtttctgcatcagtgcgtttccttaggcagataacgatgaaaaggccacagttttactgtgtacatagggaagcctcggccagcaaaccttgatgaagcggagccacacctctgcaaaagcaaagcagccatcgctaacctgggcagcttcctcctctcacctagagtcaagctgctgatttatgccatagacaggtggaagatgcggcagagagtgaggaggagggaaggaggagacagagagacagagggaggaaggggggagacagagacagatggagagacagagaaggagagaggcagcgagagagacagagagaggtaggggagagggagagagagacagagacagatggagagacagagacagagagagagaagggggagggagggaaagagggagagagactgagacagagacagagagaggtggggaggtggagagagagacagagacagaggcagatggagagacagagatagagagacagacagagagaggtgagggagacggagagagagacagagacagaggcagatggagagacagagacagagagacagagagaggtggggaggtggagagagacagagacagaggcagatggagagacagagatagagagacagacagagagaggtgggggagacggagagagagagagacagaggcagatggagagacagagacagagagacagagagaggcgggggagatggagagagagacagagacagaggcagatggagagacagagatagagacagacagagaggtgggggagatggagagagagacagagacagaggcagatggagagacagaaagacagacagagaggtgggggagatggagagagagacagagacagaggcagatggagagacagagatagagagacagacagagagaggtgggggagacggagagagagagagacagaggcagatggagagacagagacagagagacagagagaggcgggggagatggagagagagacagagacagaggcagatggagagacagagacagacagacagagagaggtggggaggtggagagagacagagacagaggcagatggagagacagagatagagagacagacagagaggcgggggagatggagagacagagacagaggcagatggagagacagagatagagagacagacagagaggtgggggagatggagagacagagacagaggcagatggagagacagagatagagagacagacagagaggtgggggagatggagagagagacagagacagaagcagatggagaggcagagatagagagacagacagagagaggtgggggagacggagagagagacagaggcagatggagagacagagacagagagacagacagagaggtgggggagacggagagagagacagaggcagatggagagacagagacagagagacagatagagagaggtgggaaggtggagagagacagagacagaggcagatggagagacagagatagagagacagacagagaggtgggggagatggagagagacagagacagaggcagatggagagacagagacagagagactgacagagaggtgggggagacagggagagagacagagacagaggcagatggagagacagagacagagagacagacagagagaggtgggggaggaagacagggagagaggcagagacagaggcagatggagagacagacagacagacagagagacatgggggagatggagagagaggcagagacagaggcagatggagagacagagatagagagatggacagagagaagtgggggagggagacggggagagaaggagggagggagcgagacagggacagtgagaaaggacaaagctctgcaccgggggaggagggacccaccctcagtggctcccaccaccttctgacagacgtgtggagggggcctactcccagctttctacatataccgcttgacctcggtggacttttc

SEQ ID NO: 21743 - DNA, 1001 bp, Artificial sequence
  DNA replication origin
cggtcgcgcctctgccgagtccacctgtttgcaaagcgcggtgcggccctactgtgtgcagggccggggcggggagggcgcagcccgaacgtcacgtgccctcacatctgttggtgaccaaggttacttatgcattaacgtttagggacaaacgtggaaaatgcattctttggtgcccctggagacatcttgtgtgtgcagaaaacactactcagaagtttatgtgcgtttaaacatgtgatttaaataatacatgatttccaaagtagcagtcgtttattcaatcaacagtattgagcgcctactgtgccaggtagtagggtctggggacaaattagtgagcgaagcgcgagggtccccgcgtgcccggagtttacatcataattacaaaagcgacacgctccagaagagaaggtcgtggcggccgtggtggctcagcctgcaatgcccgcactttgggaggctgaggcaggattgattgagacaaggggttcgagaccagcctgggtaacatagtgagaccccgtctctattaaaaaataaaaataaggaaaaataaggaaatcgtatagtatgccagaaattcagaagagccaggggaaagggagtctcttcacggggtgggcgtgtggagggtggggggcccggtggtctgatggggcctctgtaaaggcgcaggtgaaggctgggaggggccgggtacctaggtgtggggggaagagctgggcacacggagaacagaagagcagagcacaggggacggctggggttccaggagcagcaatgccgtgggtctggaggtgaggagggggtgcagattaggagagccctcaccagccaacaaggacccagctttaccacagggtggggcaggggctgatgccagctgagtttgttttcttgagatataattcacataccattcaattcacccttttaaagttatacttcagtggtttttagtgtagtcacaaggttgtgcaacccttactgctgtctaa

SEQ ID NO: 21744 - DNA, 829 bp, Artificial sequence
  DNA replication origin
tgcaggttcgggggtggaatccttgggccgctgggcaagcggcgagacctggccagggccagcgagccgaggacagagggcgcacggagggccgggccgcagccccggccgcttgcagaccccgccatggacccgttcctggtgctgctgcactcggtgtcgtccagcctgtcgagcagcgagctgaccgagctcaagttcctatgcctcgggcgcgtgggcaagcgcaagctggagcgcgtgcagagcggcctagacctcttctccatgctgctggagcagaacgacctggagcccgggcacaccgagctcctgcgcgagctgctcgcctccctgcggcgccacgacctgctgcggcgcgtcgacgacttcgaggcgggggcggcggccggggccgcgcctggggaagaaggtgggcgcggggccgggccgggggagccagggcctggtcgcccggctgtaggtgctgcgaggctcctccggttggcctccaggcgcctcccctttgccgggtttgatttgcgtgggttttctccgtacagccctggttttgcagatgggagagccagaaacgcagaaaagttaacttattcgaggttgcagggcgtggacacgcacagtcctttttcctccacccacttctgcccgggtaaattagaaaactcactgaagaaaagatgagtcagagaaggtgtgggggaggggcagaggttgggtgagcctgcctcgcatcatttcctttctgtctcggaatatgcttttcacggctgtctgagagtaatactagcattcagtaactcctacccaggggcttacagtgtgccgctta

SEQ ID NO: 21745 - DNA, 872 bp, Artificial sequence
  DNA replication origin
gagtcaggggactgtgttatgactcagtttatttctggctgctgatgggagatgggctggatgggtggaaggcggggcagaggcggaagatgaattgcgaggtcactcactgtggttgtccagtggaaagggctgaggccccactgggagtgggggtggcggcaggtagcagaagaggtggatgggagagacacttgtgagttacaaagtataggacctggtgcttacttttatttttttttgagacagggtcttgctctgttacccaggctggattgcagtggtgtgatcatggctcaccgcagcctcatcctcctgggctcaagcaatcctcttgcctcagtctcccgagtagctgggagcacaggtgtacacaaccacatccagctacattttttttatttttattttttttagagatgaggtttccctatgttggcgaggctggcctcaaactcctgggttcaagtaatcctcccacctcagcctcccaaagtgcagggattacagatgagagccactgcacctggcctagcgcccagttttaattgagggaagagtgacagtggggagaggaaggagggtttgtggcttgggctactgactagatggtggtgtcaggcacggaacggggcgcaggttgcagggaggctgaatttggggtgtggcttgcatgactctgacagtgcccatgtgctaatccctgggatctgtgaatatgttcccctacctggcaaagaaattctgcagatgtgtttaaattgatgttgagatgggaagaggatcctgggttatccaggtggcccagtgtagtcactagagtttttgtaagagggaggcaggagaatcagtcagagagatgggaagatgct

SEQ ID NO: 21746 - DNA, 831 bp, Artificial sequence
  DNA replication origin
aggaagaattgggacctagctcggcctagtgaggaggggagaggtcagatgggtctgtagaaaaggaagattagaaaaactcagcgacacttggggttgggactgaggagacaggcaggagggaaagaaggaagatttgggactagttgcactgggcagagagactagggagggacagatgtgtaaaagaatgcctggacgtcaggcacctcagaccatttgcctatttttcgacaaaaattatttaggtcttgtaggatggagaaatcgaaagtgccgttttctgaccatttagagccattgtcaagtttgtattggggtcaagcggcattgtagaagaaagtaaggcatttaggttttaggtcaggcaagagttgaagaggttttatgttcttaagaacacaggctaagggagaagaaggaggaatggagggtggaaggttgcctatagtgaaggaggcaagtttaaagaaaagggagagtagagacatggagggaagcggttcgggggttcttaccttccagaaaagcaggaaaggggtcggggcacagagatacgaggttggggcacggaaataagggagcagggtgcagagatataagaggttggggcacagaaataagggattggggcacagagatataagaggtcggagcgtggaaataagggatcggggcgcagagatacaaggttggggtacatgcccctcccccagaaaaatgggacttgctgctaagggtgaaggagaaggggctgggggtttcttgccttacagaaaggtggagaaggggtagagacatgaagagaaggggttggggtacttgcccctc

SEQ ID NO: 21747 - DNA, 979 bp, Artificial sequence
  DNA replication origin
ccaggacccagacagggctggtgacacaagcaagctcatttcccaggccggcagcagagatgtcagggttttgaatatgcaaaggcgctgtgttggcatttggtggctggcctccgtggcagaggcagctcacttttccttccgaccagctgcctactgtcctttgaccacttgcttttctgcttaaacagattccagccctgttctattttgtcttctggttttgttttgcagttagagcctgcatgagcttggttttgtcccaagggccagggcagggccctaaagaagtccaggcagggaggtcagatttgcatttttcaagcctcagccacagggtaggctgcagggagcaagggaggatatgggaagccaggttaggaggccgctggaatggctggggggtgggggatggtggcagaaggagggtcatggggcagtttgtagtgagggcatgcatttgaggggtgttgggggcttggcatgggtgtgggacatgagagggtgggggtggcatgaaggaggctgacaggaggggacacagagaccatgttcagggtgacaacagagccacaaaggtgatggcctggttttgatcaaccctgaatatgaggttccccaggaggtgtctgggggcaaggaggtgtgtcctagggcctggagaatttcctgagagtgggaatggctggccagggagagctgggcagaccccatgagggcctttcaggacaaggacagggggatgaggtgttgagggctgggcagtgacagctcaggaatcaagccctgtacccactccacgcacacatgcagcttcagtttcaaaacatgcgtggaaggatcttttggaaacacgcccagactgcagacacccaggtccctctaccagggagtctgactctgtcccaggtggggctcaggaatgactgcagcactgccccaggcagagggacgttttcaccttcagctgttaagcact

SEQ ID NO: 21748 - DNA, 1240 bp, Artificial sequence
  DNA replication origin
agggggcgggaggcggccccggggcactgattggctgagcgagacgggagccacgccccccaggccccgcccgggtcgcgggggagggggcggtctccgggatgagccacaggtgggcgctcaggtgctcgccgggtcagcgtcttcctccgggcgtccccagtttccccccacggctgcagggacgccggaggcctttgctgagtgtctaccgcgcctcgagttctgagctggacgcgtccggcacgtcaggtccctcccgagctggaggctctggattcgcaccttgcagaagagcgaaccgaggcttcagtcaccaccgaggacccagaccccgcccgccgcggcgcccctacggtctccctgggcctgatctgggttcagaaggacggagttcccgccaggacccacttacggagcgctgcctgccgcacctggggacgtcccggcgcagcgtccagagtgcaggctttgccgctgtggctttcactctgcagcgtgggcccgggcgactcgggaaacccgcctgggcttcagcgcctccgatgtaggatgggaaaatgatgcagacctacctgcgaggctgctttaagacatgaatcagatgtgaagagcgactagttgagagcctgacgggcagcactgcgcgagtcttggtcatttcatcttttccgcaagtttttttttttttccagacgttgtttcactcttgtcacccaggctggagtgcaatggcgccatctcggctcactgcaacctctgcctcccgggttcaagtgattctcctgcctcaacctcccgtgtagctgggattacaggcgcacgccaccaagtccagataattttgtatttttagtagagacgggatttctacatgttggtcgagctggtctcgaactcctgacctcaggtggtctgcccgcctcagcctcccaaagtgttgggattacaggcgtgagccactgcgcccggcctcagcaagaatttttaaacatctactatgggccaagtcttgtgctagatgttgcagatacggagatgaatagagacacctctaattaattaaagcggatgccctccccactcctcccaggatttgactcggagcacaaactcttcacaaaccaaaatgtcaggacaccatcgccagtgtccactggccactgctgttggtgtgaggcagccaggagcccctcagaactagtaagtctgagaagaggctgcacggggcctaggagag

SEQ ID NO: 21749 - DNA, 1052 bp, Artificial sequence
  DNA replication origin
gctccgccagtgtccggccgcgggccggccttagtgactggggcggcgggccccggggccgcggcgtggggcgggcaggcggacgccggccgcgggctgctttcgtcggctcccaagctctcccggagcgagcagccgcccgcgagccgccgcggagcctcctcgcccgctcccgccggcgagcaaggtaagggagcgggacactgaggcaggctcggggcccaggcgtcaccggcgcgtcccggtctccgcggcggccacgcagccgattagatgtctccgcggggaagggtgcgctccgggacgggtgggggcgaggccgcggcgccgggtcgcgctgggagagctccggcgggacacccgcgccccaagggacggctccggggactgcgcgctgcccctccccgagccccgcgccccgtgacccgggcgctggggcgaggggcggggacctgtggccgctgaaagccctggcccgagcgggctccgttgtcaacggtcctcaccccccggggttcggggcttccgccgcacctgatacaggaggggaggagtgcggctcgagcaggctggaggtcaccatccccatcaggtgcgccgtctggggcatccccctctcaggggtccaccgcgcccccagtactgcccgaaaggctcagaagcgacttcccctttccctggcgctgtctttatatcccagacacttaatagactctcgtaatctcacctttcacttttccctctttcctagccgcccccggctgtatcgacctgctatatttccattgtggattttttttttcggttgtaaacttacgtaagttaggttgaccaaccgttgcagccattggaaaacacttctaccagcgtttaacgaatccggttccttttagtgctcaccaaatccagcccaagaattcagggagccgtcagttcttcccgggagctgactgcacacattcctgcaagatgcctgatggattttgtacttgtcagttttgctggttgtatgctccttctgtgcttttcctgaaaaatgattgggtgacatg

SEQ ID NO: 21750 - DNA, 945 bp, Artificial sequence
  DNA replication origin
gggagggaggtgggggggtcagccccccgcccggccagccgccccgtccgggagggaggtggggggggtcagcccccccacccggccagccgccccgtccaggaggtgaggggcgcctctgcccggctgcccctactgggaagtgaggagcccctgtgcccggccagccacctcatccgggagggagatgggggggtcagccccccgcccggccagccgccccatccgggagggaggtggggggggtcagccccccgcccagccagccgccccatccgggagggaggtgggggggtcagcccctcgcccggccagccaccccgtccgggagggaggtgggggggtcagcccctcgcccggccagccaccccgtccgggagggaggtgggggggtcagccccccgcccggccagccgccccacccaggaggtgaggagcgcctctgcccggccgcccctactgggaagtaaggagcccctctgcccggccaccaccccgtctgggaggtgtacccaacagctcattgagaacgggccaggatgacaatggcggttttgtggaatagaaagcggggaaaggcggggaaaagattgagaaatcggatggttgccatgtctgtgtggaaagaagtagacatgggagacttgtcattttgttctgtactaagaaaaattcttctgccttgggatcctgttgatctgtgaccttaccccccaaccctgtgctctctgaaacatgtgctgtgtccactcagggttaaatggattaagggcagtgcaagatgtgctttgttaaacagatgcttgaaggcagcatgctcgttaagagtcatcaccactccctaatctcaagtacccagggacacaaacactgcggaaggccacagggacctctgcctaggaaaaccagagacctttgttcacttgtttatctgctgaccttcct

SEQ ID NO: 21751 - DNA, 1346 bp, Artificial sequence
  DNA replication origin
gctgggcggggggctgaccccccccacctccctcccggatggggcggctggccgggcggggggctgacccccccatctccctcccggatgaggtggctggccgggcacaggggctcctcacttcccagtaggggcagccgggcagaggcgcccctcacctcctggacggggcggctggccgggtgggggggctgaccccccccacctccctcccggacggggcggctggccgggcggggggctgacccccccacctccctcccggatggagcggctggctgggcagaggggctcctcacttcccagtaggggcggccgggcagaggtgcccctcacctcccggacggggcggctggccgggccgggggctgaccccccccacctccctcccggacggggcggctggccgggcagggggctgacccccccacctccctcccagacgggacggctggcctggcgggctgacccccacctccctcctggacggggcggctgctgggcggagacgctcctcacttcccagacggggtggctgctgggcggaggggctcctcacttctcagacggggcggctgccgggcggagggtctcctcacttctcagacggggcggttgccaggcggagggtctcctcccttctcagatggggcggctgggcagagacgctcctcacctcccagacggggtcgcgaccgggcagaggcgctcctcacatcccagacggggcgtcggggcaaaggcactccccacatctcagacgatgggcggctgggcagagacgctcctcacttcctagatgggatggcagccgggaagaggtgctcctcacttcctagatgggatggcggccaggcagagacgctcctcactttccagactcggcagccaggcagaggggctcctaacatcccagacgatgggcggccaggcagagacgctcctcacttcctagacggggtggcggccgggcagaggctgcactctgggcactttgggaggccaaggcaggcagctgggaggtggaggttgtagcgagccgagatcacgccactgcactccagcctgggcaccattgagcactgagtgaaccagacactgtctgcaatcccagcacctctggaggccgaggctggcggaccactcgcggttaggagctggaggccagcccggccaacacagcgaaaccccgtctccaccaaaaaaatacgaaaaccagtcaggcgtggcggtgcgcgcctgcaatcgcaggcactcggcaggctgaggcaggagaatcaggcagggaggttgcagtgagccgagatggcagcagtacagtccagcttcggctcagcatcagaggg

SEQ ID NO: 21752 - DNA, 1195 bp, Artificial sequence
  DNA replication origin
agaccatcctggccaacatggtgaaaccctgtctctactaaaaatacataaaattagctgggcgtggtggcgggcgcctgtagtcccagctacttgggaggctgaggcaggagaatggcatgaaaccaggaggggagctggcagagggccgagatcacgccactgcactccagcctgggcgacagagcgagactccatctcaaaaaaaaaaaaaaaaattaggtgggcatggtggcacatgcttatagtcccagatactgagaggctgaggcaggagaagtgcttgaacccaggagacggaggctgcagtgagcccagatcgggccactgtactccagcctgcatgatggagaaagactccgtctcaaaataaataaataaaaattaaaaaaataaaagcttgagtaaacataaaaggaataaatagtaaaatcagccccaagcccctgaatcccagtaggaactggcggagaaaaagcacctatgaggagtgagaagaaaccatgcaggcttgactttggctttgaggggcgcatggtaatgaagaggagtctgcgggacatctcaggagaagggagtccaggcctatgggaaggggcagagggcatggctggcagtgatggagggagatctgtggggcgggtggaaggggcagagggcatggctggcactgatggagggagatctgtggggcgggtggaaggggcagagggcatggctggcactgatggagggagatctgtggggtaggtggagggagccaaaacacggagtcggtagccgggctaagcaagtcgagattctgttcctgcgcctagacagacactgaacaaaccctcccaaagcgatggctgaggttaggctggtggctgtggcaagtgtgctgggtggactccaaagggagagtgcagaagcacagcctggaccacaggcaccgaggtcccggctctgagacgagaacatcaaaggcgagtgtgtatcagggggatcaggaaagaaacccctgacagagcctctgagtggcagcaggggagcagaggggccaagagcgaagcttggatgagaggcagagggcaatgctgacttggaagggaaggagagcacagttctggcaggagagacagcaggacacccaatggacacgtctgaaacaatcacaaaacacagggctgaggtccccggagcatccagaagg

SEQ ID NO: 21753 - DNA, 1530 bp, Artificial sequence
  DNA replication origin
cgtggccctcgcggacccccggccctcgccctgccccgccccaggccgggaaagcctcgccactctgccccggcccccgaaaccgcaagcggaagagcggtgagaccgctgcggccgccgcttccttcccctttcgcggccaggcgacgccacaggagggaagaagcagagcccggcctgcaccccgggcggacgccgcgctcgctcaccgccgcctggggtcggtccggcccgggtcggccctggattccgccgcgccagccgctcccaggcaccaggctctacttccggttccgagggcgggggcggggccgcatccgggtccccgcgcgaccccgccccctgccccgcctcctcccgcgtcttggcccgcaagagtcccgggggtccgcccgcagctggctaagcgctagcccggcctgtggcgagtctgcagagctcgcccggaagtagcgttgcgcgcgcagaggatgggcgctgagcagcacacagcccgcggcggggtctcaggatccgcggcgctgcccggggccgggggaaggaagccagccgaggagacgcacgtgccctgagtccgggagcggggagcctcttcatctctccatcctccctccgcgcgcgccctcagccgtcctcgtccgctcaccatgcacctcccctccaagaaagggccacatgcgtgccagggacgcgagccccggccacagggacatagcagcctagaaggtgagtcaagcgttaaaccacatgggtactcacctgggaaatgagataaatgccaagaagtgagagtttcataacatcgtattggggagacggtaggacctgaacccctgggagaccagaggtttctttgggcgattcacatgttagccaagatgtgaaggccctataagagtaaacaaggtaaggagggaagaattttccaggcaggccaacagcaggttccaacagcagggccaacagaggtcccaaggcaggaacggtcttgcagcaggggaactggaggaggctcagctcagcatggtagagggctagtggtgcagcggagctgtggtgtgagaggggccaggtcatgcagaggccgatagagcacagcgaagacctcggtctttattctgggagacacgggaagtcctcggaggaagttaagctgataagagacatcatgaagtttgggccaggcgcagtggcccacgcctgtaatcataacactttgggaggctgacatgggaggatcgcctaaggccaggagttcgagaccagcctggtcagcatagtgagaccctcgcccccgcccgccatcgctaaataaataaataagacataatgaagtttgaattgtaatgagatcactctggctgctgtgtggaagatggatgggagaagggccaggtagagcctaatgtagccaattcgggcagaccgctggtggcaggtaagatggggagaagtggatagatgcaagaggcatttagaaagctaaactgtcagatgtgaggatgaattggaagtgcgggtggcggaagg

SEQ ID NO: 21754 - DNA, 1598 bp, Artificial sequence
  DNA replication origin
ccccgccgcgggctgtgtgctgctcagcgcccatcctctgcgcgcgcaacgctacttccgggcgagctctgcagactcgccacaggccgggctagcgcttagccagctgcgggcggacccccgggactcttgcgggccaagacgcgggaggaggcggggcagggggcggggtcgcgcggggacccggatgcggccccgcccccgccctcggaaccggaagtagagcctggtgcctgggagcggctggcgcggcggaatccagggccgacccgggccggaccgaccccaggcggcggtgagcgagcgcggcgtccgcccggggtgcaggccgggctctgcttcttccctcctgtggcgtcgcctggccgcgaaaggggaaggaagcggcggccgcagcggtctcaccgctcttccgcttgcggtttcgggggccggggcagagtggcgaggctttcccggcctggggcggggcagggcgagggccgggggtccgcgagggccacgaggacgggtctgggcccaaggaggccgggcagggggcaagggggcacggagggcttggggctggggtccgcggaggaaggttagaaaggggccaaattggggtatcagctctgaggggagggtccctgggcgccggggggctccagggcaggagaggggccaggctgggaggggtcttgggtccgagggaataggagagggggatgggctccgagggggagggtattagggcccgagggagaggggctgggcctgtggggttcgggggtctgagcggagggggccggggttcgaggggccaaggaaggtgggtgtggggggtctcaaggaaagggcgaggggtctgagagggaggtgtctgggtgcagagggaaagggatgaggtccgaggggaggagattggggtctgacgggaaggggtccaggcgcagagctactgggatggggtccgagggaagggaattggggttcgaggggaaggggtcggggctcggaggaaaggtatagggtccgaggggaggggattggggctccaggggaagggatccaggcgcagggaaaagggatggggtccgcggggtcaaggcggttggggtgcgcgactttgaggggctcgctgtgggacgtggcggagcagctggggatccgcccggcctgcacctgagcggaggttttgcaatcaggtcagtggaggcagcgaggcgcggctgcagctagtcgtgaggctctaaatttggaaccgtccctccttcggggtgtgtttaaaatcaccagaacggtgctttggggctttctgttacgtttccatcacctggatagtctaagggatgcctgatccctgaagctggaaggccttgggtgagaagggacagggcttcctcccgctggaatctgtggacgtttggggccccttggggaggaattcattttctgctgaaggaagctccggaggcatccggtgagcgctccctggaatcccatgcgctccctttgggctcagtgttgacttggctgcgcaggctctgtcggggggacttcacccactaggtccttcaggcatgatccagccctcaagcccggccgggcccaaggcc

SEQ ID NO: 21755 - DNA, 1828 bp, Artificial sequence
  DNA replication origin
ggcgctggcaccggcccacctcctaactgggggccccaggccaggcaggctcagcacctggctgcagccataggaacccagatgtttaacatgagaggtgagagcctcgagggctcatgtccatttgaacttaaattcttaatagtaaatcagattggaacctgagtgtgttagactgcgtgtggggctacctcgctggcagccagcgctgcgtgtgcggtgatgagccatgtctcccgtcttcagcctcgtagagacgcgggctccacactgcctgctcctgcgcgtggcctgtggtcaggggtggcagggtcagtccttgcctcgcagctgaccacacagcaccatccaggggcgtaggcaggcagagcaggtgttcgggctgggctccccagggagcagtagcctgggctcatttctgagggcaggcgcgagttcaccaggagagaaggctcaggagaccacggaggggcgaggtgtgggcctgggtgggacaggagtcactgcaggttctcaaggagcctagctgcagagggagggtggggagcggggatagagctggccctggagagccccacacaccacagagcattctgcatgtcgtgacatgcgtcacacaccacagagcatctgacgtgcgtggccccagaaaggttagcaggcaaggaacactgggggggtctactttgagaagcccccggcctcagcgtggagtctgggttgtgggggttggcctgggcagaggggtgtggtcctgaagagagctggaggggctcgggtggtggagaagcagggcatggtgtttggcgccaagggacgcaggggagggagcagtcgggtggatgtggggtggacgtggggccaactgtggagccgaagaactgggaggagcagatgtgggtgtcagcgagagagagctggggtagggccggggccgggtccgggtggcgtgcagagttgggaggggagtaggcacgcggtcagaggacactgggcagggggacccagtgaggtagcaggggccttgcaaggcactgggacagacggagggaaggagctcccctgtgggtgagtcagaggttgtggctttgaggccggaacctgagggactgcctgtgttgtgggtgtctgtggtcagcattgctggtgttggcggtgaccgctgagcttgtgagcacgtgaggaggcagtgtgtgggtgtggcctttcgtgtcattgtctttcatccaggagggggtggagcttctctctctgtttgctgtgtgatggaggagtccaaggcttagagagggtgacgtaactgcccgggtccccatacattgtggggatagggctacaacccaggctgggaggtgaagttgccccctcagggcaaggtgatgtctgcagagggcccagtgggtgatgggacccagtaaggctgatggccttgcctttgaacaggtgcaagcagctcaagggacatggagtagacgctggagctgactgatgggaggagggagcggggtccgaggaaggacaggcgggccaggaagggggcaagcaggaggtgctgggcagaaaggggccatggtatgggggctctggtggcttctgagcctcaggtgttctcatcagaggtagtgaaacccacagtgaaactgggtacggccactggtctccatgagccctgacagtctccacctgagtcagcacgtaagagtcatcgccgtcgcttggtcagaccatagttgagtcccctgcaatgcagaaaggtgtgattgcaccactgggtagtgtgtaggacgggccactggaggcttgcatgtgtccccagcgtcttcgcttc

SEQ ID NO: 21756 - DNA, 690 bp, Artificial sequence
  DNA replication origin
ccgccccgtctgggaggtgaggggcgccactgctgggccgccccgtctgggaggtgaggagcgcctctgcatggccgccccgtctggaaagtgaggagcgccaatgccgggccgccccgtctgggaaatgggggggggcgcctctgcatggccgccctgtctgggaagtgaggggcgcctctgcatggccgccccgtctgggaggtgaggggcgcctctgcatggccgccccgtctgggaggtgaggggcgcctctgcccggccgccccatctgggaggtgaggggcgcctctgcctggccgctgtgtaatcttccaagtgtgaagtgacaggctttctgcaggtgtacccaacagctccaaagagacagcgaccatcaagaactggccatgatgacaatggtggttttgtcgaaaagaaaagggggaaatgtggggaaaagaaagagagatcagattgttactgtgtctgtgtagaaagaagtagacataggagactccactttgttctgtactaagaaaaattcttctgccgtgggatgctgttaatctataaccttacccccaaccccctgctctctgaaacatgtgctgtgtccactcagggttaaatggattaagggcggtacaagatgtgctttgttaaacagatgcttgaaggcagcatgctcgttaagagtcatcaccactc

SEQ ID NO: 21757 - DNA, 1018 bp, Artificial sequence
  DNA replication origin
agtaggcgaagggcgcctccgcgcaggcagccgagctcaggtggcgccgggcctgctcccgcgtgcgaagccgtcctcacgccgcagcggcggggccttcgccctcctcgtggcccgcagcccccggctcccaggccagggatctgggtgagggcgagggccacagaacggggaggagattggtcactgggggcccccactctggaaggggccaaagccaggcccacctttccccccaacaacccccgcgccacctcacccaggtcccaagcaggatgcagccacccacggccgccatcccaccttctgagcctggcctgcactctactcccgcctttgaacaaggcgggcagaggactctgggcccactggtcacatgcctcacattgaccaatcactggcaaagaatggggatccacgattggctgagctagagtaggcagggcagctatcagccaatccctgggaccaggaggcgggtccacagacgaggcaggtgccctgggagggagctgggatattgatgtccccttaggtgcctgtatcctcctaagggagcagtgagaagtccctccttcagtgtgggggtgcacatgtttgaggtttgtttaagagttatggctttgaatttcaaagctatgtaaccacattaggcacaccctggaaaatggagaattgccacagccctgccaccaagctgagttcacctccagtcctaacacccaccttctccctgcattgaatcatgacgcacctacacctccactcctgcttccttggcttccgtttagcccccaaaccttgcttgcatggccgtcagtccccagcccttcatggaaatggtggtgtgagatcccattgagtggtatggtgtgatgtccttgacaatgtccttttagttggcattcgggataacgaccacttttcgctattacggtatcatcttacatccagtcctctgaaggtgtggtgttcacatcactatggtgctgctgcatacacttcaacccacgagaca

SEQ ID NO: 21758 - DNA, 1468 bp, Artificial sequence
  DNA replication origin
ccctgcccttcctcgagttgggcctttgaggggccttggggcctcccggggcggcggccttgagccattagtgttggctgaagtcttaatgacaggcgagaggtgggcggagacatggggtttgagaggctgtcgtttccataggccgaggttaagcctaggccaggtgaggtctccgaggcgcccggctagagtcgggccaaggctggaatctttgtcctcattcagggacgcctttgcggtctttgaagctacgctcaggtgagccgagggcagacactgtgtctccttccggaagctgggggttgcgatacgcgaccccaaacacctgattttgggagaatggctgcactcccagcccctccactgtgggcctcggtgcacgagtcgcgcaccctcccagcatccccttagtaccccaaggagctgtgggactttccactcactgaaacggggccagtctatacaggcgtctttcccttgtggagcccagctccgtgtgccagaaacagactcgtggggtttgggggtttcagcccaagcatccgcccagaacacagtctgcttctgctgcggccgctgagaggactagggaagtgttcctttccacaccctgggacaggacgggcgaagtccgtgggtctggtggcctcggggagcagggcaggtggaagactcccaggcactttccaggcaggggactaggagggcccgtggaggggcaggcagtgctccgagcctttggggaatcccctcttccttaccaggtgtctgaggaccagatggaagctgcaggagtgggagtggccacagcatgggcacagctgcagtgggctgaggctgtgagggggcctctaggaggggctgtccctgcagacattgcctgggccagggttacagcagtgcatgaaacaggccgtgcctcccccacggggattgtcttccagaggcatgtgtgggcggggtggggcggtgggcactaatcagtgagcaagtaagtaaagcaataagccagtgaaggtggcagtaagtgccctggggatgtgggagggggtgatggcagtaagtcccattctaaatcaggtgatctgggaagccatgtaggtacggggaccccacagggaggcggcgctgaggtggcactgtggctggagccaggtgagcagggaggaagcccgaagaggagggtgggtggggccagatggctctggacctggtgggcagagtggcagagctgaggtcagtgtggccgtctctgtgtcgctgctatgaatgcacaggtggcttgtgtttcctgctatttctagacctctctttttgtggtctccttccttcccaccacactctccacttagccctcctggggcctaccggagaaagctggtcccatgcctattggcgagggaggctggtctttcccagcaagcatgctgggtgttaaaggtctcaggctgtgtggttttccctg

SEQ ID NO: 21759 - DNA, 1049 bp, Artificial sequence
  DNA replication origin
tctctgtgtcgctgctatgaatgcacaggtggcttgtgtttcctgctatttctagacctctctttttgtggtctccttccttcccaccacactctccacttagccctcctggggcctaccggagaaagctggtcccatgcctattggcgagggaggctggtctttcccagcaagcatgctgggtgttaaaggtctcaggctgtgtggttttccctggagcctcgatgtctctatcgggcaccttgtataaactcccacttgtgaagatggagcgtttcttagctctcccaggtggctccaaggccaggagggcagctggccatgcccttggcgttaagtggagcttcacagctgcatggggctggcaagccatttccaggctcactcgggagccatgagacccccatctcattcttcattagctccgcctttctcttctgccaatgggggtgacagtggaaggagaggaaagggctgccccagttctgactggcagagggaggccgtgggctgtgggagaaaacacatcatcatcgtggggggctaggagctctgtcatatggtggttgtaagcaacagaaatgggctctggctggctgaggccacagaggtgtgtgttgggagggctctgggcagttcacagccacaagaggaaggcttcatggaggacctgggaaggactggcctcgggcaactctgcccccatggtgagggcccacagtctggggataacttgtgtaggtgcctggaggccatgggcaatggcaactggttctccaagcctcggtgtcctcgtgagaaaaggagatagtcacctcagtgatgcttaacctcataggattcttgtgggaattaaagcagatccatgtgtcacatgccctctaagccaaggggactttacaaatgttgggtcctttctctgagaaacaggggtttctaggtcttggttctcctgatcccagtggagtgaattaaggtaaccagattgccactgaattcggtcttcgttttccacaaccctgaggtgattcagctggtagggactcccc

SEQ ID NO: 21760 - DNA, 1263 bp, Artificial sequence
  DNA replication origin
ggagcatgagaaaaagaagtgttactgcattaacagacgtggcccacacaggctttacgaattcccctcttcgtgtccgctggggctgctacccgagggcctttcctggtcagcagggacagtgcacgcagagcggtgtgcatgtgcaccaaccgcggacttaccttggagcgaggctggcggacttggctcccattggtgaatccagtccttcccccggctttgccaatttctctcggttcatttgctgtaggatagagttcaattcactaataacgtttgcctttgggcctgagagaatcgggcttttgatctctgtgacgtcgccccacaacttggaggtccttggctggagaaccttggccatcccaggctgggcactgcccggcgggggcgggggagcgggcggggggataacaaagctatctacatcttcttccacgagcgcgtcttgataaagtgcattgcttttgtgaatgatgggcttcatttttggcttaggaggtactgggggtttgtcaaccataaatgcttgcccatctgcatagactgtgcaggtgtccacattctctccaccttcggaagacagggtggagatgctagacacggtggagatagtgctggtcgtctcgaggtggtggtcgctgctactccggctgtccacctcctcgatcccagagtcggcgacggcgtcaaagctttcagggggtggcaggaatgaggcaggcagacagtttgaaagactggctggcttcttgctgtctgcagagttggttggttggctggagttcaacgaaggggactgaggggtgtcgcttttcttctgcttcactaagtctgagagagccgggacagaagctgcccggtcatcggggatatcaaaactatttgcaaattccaggggaggaggcaatggctctgtaaaaataaaatcctcatccaagtccacggatgccagagggggaggagggatgcggaatggcaaaatcaccgcctcttccatggagcccaccgcgacgatggttctgccgggcacggtggtgggctcgggggcagcggagatctgtaaagcaccttcggtttcggaaacaccttctggcacctcggacggcgagctgtctggcttcatctccacctctgccttctcgtcctcttcctgcagggcgttgtccagcttagtggcgtccacggtgtgcaccatcagcaggccagccgacttctgctgggacgtgtccatgatgtcgatcagcatgttcttcttgt

SEQ ID NO: 21761 - DNA, 1165 bp, Artificial sequence
  DNA replication origin
ggccagcggggagctgggatcaagcagccgccctgtgagtgggtggacataattcccggggccggctgtgccgctgctcgcggagggcactgctgggctgctctcgggcccctgggctttggacgtggaattcagcggcctcccagcctcacccggagcactggcctcggcgccacccacgaaatggttttcgggctccctgggcgtggcactcggcatgggggatgacagctgctcagcgctgtcctcgtcagcaaaatccccctcctcggggaacatggagggccgcgtcctgggggcgggtggccccaggcccacatcctcatcccccaggtctgtggagaggaaggccggggagttcctcctggcttccagccgcttctcacggtcgcggacggctccggcgatggcggcggcaaaggggctgctgacggtcaggctttcgtcaggccgcagctggctcggtggctccggggcctgggggtcgatctccatgctgctgccctggctgctcttgccgctgctgctggtggacggctccttcacgatgatggtcgggatagggatggagcacgtcttctcggggctgtcctccacgttggactgcttcaccagcatccccttccgcctggcgggcttggcggggacgtagacggctttgctggcgatcttccccacctctgagtatgggttttctggcatctggcctctcttgttgcggaagttggcttgcgggccggcattccgactgtagaggtcttcagagtccaaggagtagcggtccagctctctcctgaagtacatccccttctccctcatcatggtggccacggtgtcggacctggtggcgggggacaccttggcggcagaattctgattgaacgcaggcttaatcgtcccgtagactcttggagttggggacttggggcagttgtaagtggttggggaaggtggtggtggggacgggggcacagactgcggtggaggggggatgtcctcagaggtgtccggcatggacaggcttctggtgaacttcagcattggaggagccagaaactgccgctcttcctctgttattcctacaagcagaaaacaggtttagctttaagtcacaatagcaacaaagcctaagttcctaggaacgtgcgatacgctacatctccac

SEQ ID NO: 21762 - DNA, 926 bp, Artificial sequence
  DNA replication origin
ggtggccacggtgtcggacctggtggcgggggacaccttggcggcagaattctgattgaacgcaggcttaatcgtcccgtagactcttggagttggggacttggggcagttgtaagtggttggggaaggtggtggtggggacgggggcacagactgcggtggaggggggatgtcctcagaggtgtccggcatggacaggcttctggtgaacttcagcattggaggagccagaaactgccgctcttcctctgttattcctacaagcagaaaacaggtttagctttaagtcacaatagcaacaaagcctaagttcctaggaacgtgcgatacgctacatctccacaaactcacaaattcagatgatgaaccggatgttcaggaaacacagcacaagccacgatgccgagtggttagtcacatggcccgtcgtgagccaaaggacaagaaagggaagaacagaaaggcactggggatgctgtgagtacgctgctgctgtggggcctccaggcacaggctgcagcaggggagctgtgtgaggccagggcaggagggcccctgacgctgagccgtgtgccagtctgcaggccaagtgggcagctcgccttggggctgcttgtgcgtgtgtgtgtgcgcttacgtgtgcttgtgctggcattgtggcattgtgcttggggcggggttggctagaccaggaggtatccttccaccatgccccttcaggcatggtaagggctcctgggggtgtttttagggcaggggtctaaggctgtcacctgtgcatctgaaatgagagcaaagggttgcaggtattgctgtgtttatgtggcaaggatggtgtgcagtccaccgtccagatggcacttgagccccacggctgcccagatgtacagggaggcctctgccaccctgagcgaagccatctgccc

SEQ ID NO: 21763 - DNA, 1266 bp, Artificial sequence
  DNA replication origin
ctcctgcatcctgatgaaggcccaggcagaagcaggcccggcagagcctgaggctgagggcagaagggggtctctcctgggcgattctttactatgccctgacaagcgggtcagctcgccggctccccaggggcatggaaggaaggaagcgtcctcggcatccgtgggggagatcacctacgccaagtgggggagggtgaaaggtgaaggggggtccgtggcagccggcgagctgggagaagcacagcacccagaggaacccaggtggcgactcctgctccagggtccccacacccgcctctcaggaggggctcccctgtttgaagaaataaaaggtcctggggaggcccccgtgacgatttccccccactggtggccttgtgggagccttaggggaggagacgggatctcctcaatgtgatgatgggggcagatcatggggcatcctggagcctggcttggggcggaactcagtggggttcagacaccctggtcacttactcccctttgggaccagggagtaagaaacgggtgcctggggagccagtggcacaccaggccaggaccagtgtctcatgtggcaccagctcaggacccatgtcatgctaggaaaccatcatggcacccactacttgcaacagcagggtctgtacccactgcagaatctcacccagtcctcccagcagccctgtcagcagccactactgcatccccatcttccagatgggaggctgggcccagagaaggcgggtgacttggccaaggccacacagctggtaatggtggctggtgcagtggaaccgggcagttggggttcaacacacgggttccccattaccacccaaaaccccccacaaggtgccgtgggatgcaggctgcagtgcggcggatgcagattctgggttattttagaatagcctagaaggtcctcctctcctgacagggattccaagatctatacaccttcgcattgtggtaaaatacacgtggcctaacactgaccattgataacatttagtacagtcatagcactttgcaaccaccacctctatctagttccagaatgtttttgtcaccccagaaggaaaccctgcactcataagcagtcactcccctccccctcccactggtaaccgctcacctcctccctgtctctgtggatttgcctattctgggcatttcatgtgaaaggaatcagacactatctggcctttcatgcctggcgtctttcacctggcctcatgttttcagggttcacaacgttgg

SEQ ID NO: 21764 - DNA, 1143 bp, Artificial sequence
  DNA replication origin
cgcactacagcaaacatgtgacctaatcccccagttcatagactgagacccccggtctgtgctccatgctgcagaacggcctggtccccagtgcacagggtggatcccatcagagccagcccctccttctcttcctgctccgtggtggagccagggctgcatgcagagtcagagaaggggaggggacccttcagggcacgccacccccatgggcaaagggacagtcactagaagtcccctggcaaagtgcaaatgtgtgaaaatgggaggagccatggccccagagtcagatgaatgagtgaaagaatgactgaatgaatgaatgggagacattaggtgatcagtcacagttgcagtgctgggatggagcagaagcaggcatcaagccagcctgttctcctgcctccaaagacccccaccccctaccctgatgttgcctctcccagtggggaaggtggggaatttagtgccctgtggtatgagttcccagcaggctgtggggagtgtggggaagctcagaagaaaggccccaaacaagcatgggctggctttgggccacacctccgcagtctgtgtcggcccatctggagattgatcagcagggtaaactgaggcagggtctaagagagattgggcaggggccgccatgagtgctgtgagccctgtggtcatagacaagaggaactggccgagttctccatcagcaccatgctgggggcttggccatccctcggcgctggtaggaggagatcagacttcctgagaagtgtccatgtttggagaaggacccgggctgggggccaggtgcatgggtcttggtggctggagagaaactggcatagcgccatccgcccctggggcagggtgtggagcccaagaccacatcatcagcccaggcctttcagggcccccagcgggttccgctgtcaccaggatggtaagtgtgccttgaagtcttcggtgtgagaagtactttgcatactctaagtcagacagaacataaaagtggccgttggctgaagtgaggtgtggggttgggggcttggggcatcggctggcgccccgtttcccctcctcaccctcaggggcagccaggggcttgcgtgggatgtggactccagctctctcccagaacctgaagct

SEQ ID NO: 21765 - DNA, 915 bp, Artificial sequence
  DNA replication origin
agcagaggatgtgaattcgagtgctaggaccgcccgaggagggcgctgggtggtactggggaggcagagacaactcaggaggctgaaagtccagggatgagggaggcagggccaggccacgaggacagaggaggcactgttccccacagaccctggaaccaggtccctggtgcccagtgctgggtcctgagcaagttctcctgagggttaaaacattcacacctgagaaggaaggcagggtggggtgtggggggatctgaggcctccggaggctgctgggtgaaggctgggagtgccagaagggagtacttccaggctggggtggcccagagcctctccctggcccaggggactcctgccaggctggctcctgaccagtccccaggcgaggggagcctgcggggcgtcccccgacaggggccgctgaggaagaggagatgacaaatgccccgcaaagggccacagggtgcagcagccaggggcagagccgtgtgtgctcctgtgtgtgtctatgatagtgtgtgtgtatgtgtgtgagacagtgtctgagagtgtgttgtgtgtcactgtgtgtcactgagtgtgtgcctatgagcgtgtgtgtctatgagtgtgtgtgtaggtgtggcagtgtctgagtgtgtgtatatgtgtgtgtctatgagagtgtgtatgtgtgtgagtgtgactgagagtatgctaatgtatgtgtgtcactgaaagggtgtgtgagctgtctgtgtgtgtgtgtcagtgtctatgaatgtgtgagtgtgagtgtctgagtgtgttgtgtgtgtgtgcatgtgtgtcactgagagtgcatgtgtgtcaatgtctatgatggtgtatgtttgtcagtgcctgagagagtatgtgtgtgtgtgtgtgtgagtgtgtagtgcatgtacatgc

SEQ ID NO: 21766 - DNA, 1046 bp, Artificial sequence
  DNA replication origin
gatgcagagagagccccagccgctccccctccccgccctctcccagcccagcctgcggatgctcgcgcgggatgacgcccaggcagccgccgggcgcactgtgggctcgtcagatgattgtgggggctcctgcctgccgcacaccgccggcgccgggacgggagagggagggggcgctggatgcgacgcgcaggtccctgcgtctctggtgcctgctgccggctcgtgcggggagcagataggatttgattttattttaaacccccttcaaggaaaagcaaaacaaaactgctgcctcatttctcctctggctgattttcccgggcttccctggaagatgcgtgtggtcgggacaagccggaggagctcattcccgacgccgccgctgctgaggccgccgctgccgccgccgccgttcgggccacttactttctttgccctgggcggcgtcctggccagccccccttgagcctccagctcagccatccctcaggcagccgccccaccatgtatgactccttcctccggctggctccggctctgcctgcccccaccctgcaagtctcattgtgccacgctcgcctatcccggtagccacccccctcttccttcgctcctcctgcaccctcgctgcctcctttcctccatgctgcctggatctggcgagctggggtgattaattggctatgatgatgaacgtccccggcggaggagcggccgcggtgatgatgacgggctacaataatggtcgctgtccccggaattctctctacagtgactgcattattgaggagaagacggtggtcctgcagaaaaaagacaatgagggctttggattcgtgcttcgaggggccaaaggtaagagcagccgctctgagcctgaatatgttcccatgtttgtgtgtgtgtgtgtgtgtgtgtgtgtgtgtgtgtgtgtgtgtgtgtgtgtgtgtatacgcctgcatgaaaaacgttccccagctcaggaataagcattaaataagcatttttcctgggggcactcagttgctagacaaccatgttcc

SEQ ID NO: 21767 - DNA, 1489 bp, Artificial sequence
  DNA replication origin
gctgggctgggagagggcggggagggggagcggctggggctctctctgcatccccccctccagcgtccccccggtcccttgcagccttggaaggtggccggtggccggtcggggaggggtgggggctccctggcagaggactcaggacatttcggtgttaaagcccctgaggacaccagccccctctggggatgatgaattcattgctggggaactggagggggtatgtggctgcccctttgagatgacaaagctaaagccacaactgcttgcctctagccatggcattttttttttttaaggaaagaaaccaaaaaagctccaactttgctctagtggccacagtgtcctctcgcttttcctgctggcactcgccacatgacatccagcccccgaggcacccagagtgtgtgggacggtgccctgctcagtgagcctccaggctgcggctgaactgtcctccacccccaccttctgggtggcctgcgggggcagaaggggagtgagatgaaggctaccggcacccccccgccccgtaggactctgctgctgcccggaagttagtggggagctgggaaggcctctgtggaggggagcggggaagggagggaggcagcgtggagggaggcctctacagggtcttgcggggctgtgtgtgagcctcgggggtgaggagaaaggacaccaggccagcggcccagccggaaaaagctgcagatgggtcatgaggaacccaccaggcccccgtcgcacaggggcagtcccagggatgcaaatttcaaacaaggccatgtgctgacggactcttggtcccagaggagtgcgggtcagctctgcctggcaccagcaccaggttcacggtctacaggaagcacagggccccaggtgcagccagctggtgacagcacagccaccccggattggggggccctggggaggaggagggacggggcaaacgtggatgacagggctcagtatcctggacaagggacgagcagcggcccctcgatcctcccattttacagatgaggctggtgaggctcagagagatcggaggacccagctagggaacgcgtgctcttctcaccactccacgcacccacccccgacagcatcagagggtcgtgcatggaggcatgctggggtgaccctgtcttccaggaatagcccagcatgaatgatagcttcacagccgaagaccaggacaatccaggtgactggtcactcccgttgtcagcagctgggaggggggttctggcccctgaccttccttaccttgccccctccccagagacagcctgctaagtgcagggaggtccactctggggaactcggtcacaactgtgagcccctcttggctcatccctggaagcccacttaccctgctcagggccaccaaacaagggctgacacagggtcagaggtccaggaccctgggagcctgggggtgaggtcacatggttattgtgacctttagaaaatgatgggg

SEQ ID NO: 21768 - DNA, 1700 bp, Artificial sequence
  DNA replication origin
cccctgtccttctacacctgtgtctcctccagataggaccaggactgactgacttgtctccttctccctggcatctggcacagggtctggcaaatgtccagctctcagagaatggagagttgagtggagagagaggtgagaagatggatggatagacagatgatggatggctggaaggaaggaaggatagatggggagctggatgggtgtgtggatgggtagatagatgaatggatggatgggtagatggatgatggatagatggaaggatggatggatggatgaatagatgaggggctggatgggtgtgtgaatgggtggatgagtggatggatgggtagatggatgatggatagatggaaggaaggatggatggctggatagatagggagctggatgggtgtgtggatgggtgggtgggtgggtgggtggatggatggatggatggatggatggatagatggatgggtggatgagtagatggatggatggaaggaaggaaggggagctggatgggtgtgtggatgggtggatggatggatggatgggtagatgggtgatggatagatggatggaaggaaggaaggaaggaaggggagctggatgggtgtgtggatgggtgggtgggtgggggcatggctggataggtggatgaatgaatgggtagacagatggatggatgagtgcatgggtggacccatggatgcatggatgggtgagtgggtgggtggctgactgaatctgtgacttggggtaagggtggggaccaaagttgggcagtgtgctcagacctctctataggcagtacttggtacattgtcagcactcaataaattttcacttcatgggaaggagaggatagcatggccccagtgagaaggagacttgtgtccccagtgccaaggagtatgtcatgaaaagtgctcagggcagtctaaggagttgagactgccccctgtcctccctagggctctgctgccccgttctctccaggacagaatgaagcactgggcacctgtccccatgcttaggattacaaagagatgcagcccatccaagtcttcgggagggtccagcttggaatctgcttccctctctttccctgtcagggagcttggtcagatgggtcaggactagaggctgcactcccaggccctgccaaccaacaagcagggcttagctcttcagggcatgtgctgattaaaacctgactctactgcccccaaggtcaaggtggaggctggctcggtggtctaatgcctggtataacagctggcaccatgtgtcccaggtcccctggcctggagttggccccgtggagctctgaggcctccaagatgagtgaaggggaggagccaggaagatggcagctcttttctgggcggcaggaggagggtggaaaaagcgagttcaaaagcagattggaagagaggggcccagactggaggttgggagcttttttctttcctgggtttcatttgccagttttttgttttttgggggttttttcgccaagcctctgggactgtcagatgggaaggcagggattaaggaactggagtcctctggccacaccatctgggggaatggcttggactgaggtcagggacctcaggcagggactaaggtggtgttggggtcaggccttgcccagggtcctttgcctcacctttctgcagcacagcattcccactgccaaa

SEQ ID NO: 21769 - DNA, 1087 bp, Artificial sequence
  DNA replication origin
cggcagcatctgacatgcaggagaagcttagaattcattcattccacagagcactattcgcgcgggctgtgtgtgccagacaccatttccagagctggggttacagccggaagcaaaacagagagtccctgccctcacagagccggcaggcctgtcccctgcagggaaatggcagctgctggggatgtgaagcagctgcagggctggggagtgctggagaggggagggcaggcttcctaggcaggacaaaaatggccacctagaggtgggatgtgtcagcagagaccggacagaagcaagggcatgggctgcgtgggcatgggctggggcactgcaggcagcaggaacagcaggtgcaaaggccccatggcgggaatggacttgtgcttggggaacagcaagaagggcagcgcggctgtagcttctagggaggggagggtcggggaggtgtggtcacataggctgagcccagctcagtgaggctgggggacacagaaaaaaatcctgggccatgcaagggtctgagcaggcaagagatgtgatgggttcggctttctaaggatggctttggggccaggtggagaaaggacagagcagtagagaagtggggagactggtccagagccaggcacagggcccaggagagagaggaaggtggctcaggccagagcagagattgtgaatgggcagcaagaagggtccggagttgtctgtgacctgcaggcacttgctgtctgattggctgtggagggtgagagcagaggcgaggcttgcggcttcagcaactggatgaggcgccagggcagagatggggtgatgttacgtgtgatgttgggcgagttacatttgagcagcctgtagtgtgtcagggtggagcctgcatgggttgggctggagggtgaggctggggccacaggagtctgatggcatctgaagccaagacttgagcaggtcaccctgggggtgtgtgtggccagagaggaagacacagaggactgcgttcagaggatggggagctgaggaggaggccacaggagtggccaggagcatccaggaagtgagaaaggggacatctggagagcctggc

SEQ ID NO: 21770 - DNA, 1831 bp, Artificial sequence
  DNA replication origin
ggaaacccggcccccatggctcctggcctggggtgattaggagcctgagaatgtcaggccatgaaaagacttttccaccagcagaaaacaggactgtgttctccgggtagccagctggtaactgcccgggtccctcccatccctgctgcccagggctagttctggagagcagggcaatcctaagcatggcaccgagccccacctccccgcctgccacctccctgtgcacttgctgcaaactctgccaccggtttccacttcagggtggtgtaccccacccagcccttcagtctcctacttctgtgaacccaagcggagtcttaccacctcgggcttgtccccatgcagcccagtccccagtcactcgtggggaccatggatgagccaggggaagagactgagcagggagtgcaggggtggagggaggggagtgcaggggtggagggaggggagtacaggggtaggggggtgcagggatggagggaggggagtgctggggtggagggaggggggtggaggggtaaaggggagtacagcggtggagggaagcagacaagccaccctcatccccaggggctgtggcagagagatctggagagcccagacctgaggctgggatggaaagggtagggcagagccctcccccagtgtgggggcagcggggcatagaggagctgaggtgggaggtcgtgtgacatgcctggggacacagaagagtcacccaaggccacctgcaagtgctgatgaccaaaggggagcaacaagatggagggcagggaccagacccagaggctcccatcggcccctcctaggggtgaccctgaaagcagcggggagatgggggctgtgagcacggggcaccctgcatcccccaccctggagggaggcccagccttcccgtcctggagaagcgggagagtggtgggagaggagatgcgtgctgtgagcacggggcaccccgcatcccccgccctgaaggaaggtccagccttccctgtcctggagaggcgggagagtgtggtgggagaggagatgggggctgtgagcatggggcaccctgcatcccccaccctgaagggaggccaagccttccctgtcctggagaggcgggagagtgtggtgggagaggagatgggggctgtgagcatggggcagcccgcatcccccaccctgaagggaggcccagccttccctgtcctggagaggcgggagagtgtggtgggagaggctgcttctgtgctacaagtgtggctgggcacgctacccagccctgggctctgcccccagatctgctgggtgagttcacagcctcctggaccgtgtcagagtcacctttgaagcgtgggtgtgagattctgacccagcaggtcctcagccctgtctcgggtcagcacctgtgtgattttcccttcagtaactcccatgaaagcccccaggccctgggttggctggaggctggagaggagggtgcagcatgcatgtgctcagctgccttcttttccgtaaatgcgcccaaatggtttcacatccgaggccttttttgacaaccgtgaaggacacggatgaaggaataacgctcgctcgaggtctcaggtgtggcggatcagggcatgaggccaccttttgagcctcagttgcatttgcatcctcagcaatgcgtttcccaccaaggctctgcaacttccaaggcggcgggtgacctagggacagctcaggtgaggcagggagtgggacggctcacagaagtaggaggcagaccctgggccaggtgggggccaggccagctccaagcagctctacccatccaagcttactctacacgagacccacg

SEQ ID NO: 21771 - DNA, 1679 bp, Artificial sequence
  DNA replication origin
caaactggaaagcaccaggagcaagctagctctcctgtcattattctccttcctcagctgcagatacccaggaaacatgggttgtgtgtgtctggacagccatgtgttagggtatggccctcaacctggactatagaaaagtaatgtggatgccagggctctatctccacctcatgaaacctgaatgtctggggtgggacctgggaatctgtatttttaagcagctttcccagtgatgtgtttgatgagctgggatcaggaacctcgtgttggagcagatttaataagtgcaaatggtgcaagccaagaggactgaaggcaaggacctggaggttaattaatttgtaaacgcctgtttgtggggtcaattgatcaaggtttactaccctccatgagagccaagaatcaggaggatacagttgactcacatcagtattctctgcacctcacacagtgcctggcatggagtaggggctgagaaagtacttctgatggatggatggatggatggatggatggatgaatggataggtaggtgggaggatggatgggtgggtgatcagatggatgaatgggctagcagggttggaaggatgaagagtagtgggaggttagatggattaatgggtgagtgggtggatgggtagatgaatacatgggtgggtggatgggtgtatggatggacagataaatggatgggtaggtagaaggatggatgaatggatagatagatgcatgggtgggtgagtggatggatgactgggtgagtggatggatggatggataagtggatgaatggatgggtagctgggaggatagatggatgggtgaatggatgggtaggtggatgggtaaatggatgggtggatgagtgagtgagtggatggataaatggatgagtgggtggatggatgggcagatgtgtaaatgcatatgtaggtgggggaggatgggtgagtgaatgagtgggtgaatggatggatggatgcatgagtgggtgggtgggtagatgaatggatgggtaggtgggtaggttggaggacagaagggtggctgagtagatggataaatgggttagtaggtatctcaatgggtggatggatgtctaaatgaatagttaggtgggtagatgggaggatgggtgagtgggtgggtggatggatgggtgggtggatgtgtggattgatgcatggatgaatgtatggatggatgagtggttaagggatggacaggtgggaggatagatggatgggtgaatggatgggtggctgagtgggtgagtagatggataaataggtgagtaggtgggaatctagtaagacccacccagttaggtgggtaggtgggaggatgggtgactaggtagatggatggatgggctttgcttggggatgtttatagatactcactctacctttcatacacagctcaccacaattcaagttgtgcatcccttcctattgtaaacctttacattacccaatgagatgtctttaaaaccatagagtttgtgagcaacagggaaggcagtgaggcgtgcatgaggctcttggcgataccagcaacatcactggcatcccaggccaggttgtcttcgagtctttggcccctagagagtgttaaggtatcagttaccttcagccaacccagatgcactgtggccttagactttgcatgcc

SEQ ID NO: 21772 - DNA, 1403 bp, Artificial sequence
  DNA replication origin
cctcccagttcaacactaggtcagcttctgggatccacctgctctccctcgggagccatatcatgtatgcactggagtaagtcatgttccgccatcctgcaggccatgtaacgttatcgttccagccttttcagagcacacagttccaaaccttgtccctgtggttgcatcctctcacctctcatttgatgtttataggtaactcatgtgatcctcagagtaaacttgggaggggggcatgcagtgatgttagtccatttgacacgaggtcagagatggtgagtgacttgctcagaagcaggggtggccggcccaggacctaaacatagatacatctgagctgacatctgtttcctttacctggaggctggagcatccccagggtcagccagcctctgagatgttaagattttgtggccttggagtcagggaccaggggtggtggtggtggtggtaatgatgataagtagttgatggcagccatggtgatgctgtttatggtggtggtggtgttggtggcggtcatggtgatgatcgtggtgatgctggtggtggtgctcatggcgatgatggtagtgatgctggtggtggtggtcatggtgatggtcatggtgatgatggtgttgatgctggtggtggtggtcttggtgatgatggtggtgatgctggtggtggtggtcacggtgatgatagtggtgatcctagtggtggtggtcttggtgatgacagtggtgatgctggtggtggtggtggtcacggtgatgatagtggtgatcctagtggtggtggtcatggtgatgctggtggtgatgctggtggtggtggtggtcatggtggtcatggtgatgatggtggtgatgctggtggtggtggtcatggtgatgatggtggtgatgctgctggtggtggtggtcacggcgatgatagtggtgatcctagtggtggtggtcatggtgatgatgttggtgatgctggtgttggtggtggtcatgctggtggtggtgatgctggtggtggtgatcttggtgatggtggtgatgctggtggtggtcatggtgatgatggtggtgatgctggtggtggtggtcatggtgctgatggtgatgctcatggtggtgatcttggtgatgatggtgatgctggtgatggtggtcgtggtgatgctggtggtgatgctggtggtggtggtcatggtgatgatagtggtgatgctgtttttgttggtgatgatggtagtgattctattgatggtgatagtcatggtgattgatggtggtagtgatgtgactagcaatgatgctggtggtgatggtgtcagaggttttaagatgataaagggatgatgctagtcaagtctggcactccaccttggtgaacgctactgctctggccatgaacaaata

SEQ ID NO: 21773 - DNA, 1793 bp, Artificial sequence
  DNA replication origin
aagtcttgctaagtgtgtgaagtggaattggctgcctcgggggagccctttaatttagcttcccattgttctcagcacctgggactcctcccttggggtccttccaagcaggaatctagaccagaagcagctggacctccttgtttggctctggtgggaagcgtctgtgggctaaaggccaaagcgttgagaggacgtggggtctgccagctctaagaggatcaggcctcgaccctgtctaggggccgggagaagtgggctctcaccggcatgttctccccacaaactccttggctgtggccccaaagcctgggctgctggtcatagtcagggtgatcagcccctcctgggaccacgtgaggcactgaccctcctcaaactcacacggagcttgccaggtggagcccctgggggcaggggtggtggcggtcttcctccctgacatccctgaccttagctggcaacagagcatgacccaggcctgcaagactccccgcagccaggctctggaccccgagtggctttgaggccagggaggaaacaggaagcatgtaggatgggggcgagggtcaggggcctcagcactgaatgccgacatcaccaaaaacatggcaacggccggggaagcacgggtccaaggcccaaatctgagggagtgccaagtcaccagatgccagagccaggggcctgtgccgagtcctgcccttgctacgttctggctgtgtgacctcgggctcctcatagaggcgtctgcagcaaagaagccagcacagtgaactcctggagcagctgtacccatgagaatgtggaggcatcggtggcaacggccactgcccctgcaggtgcagctttcgtggctggaaccgacaccaaccctagcacctggggccccgacaatgagctgatccctgggaagtctcttcctcgactgaaaattctgggaggtggcgtgagaaaggcagagacctgcttgggagttggagctctgagtgcaaatccagctcccctggctgcttgggaggcaggagggtggggagagacccagacctggagttggacgccgaatggggtgctgggcaggagaccacaggcagttcccaaagtctgccctatgctgcccatgtccttgtctaggaaatggaacgaggcacaggctcctgtcacctggggctgcttcagagactgacagacatgccctctgtgctcctgccatgctggacccaggcctgcaagtgctcccctgagggttagcgctacctgagaccatccctgcagctgctgagacagccagacgccagagccctgagccggcctctccggcccccagcattctcctctgggctgggtttctccctgccacccacgtgtgcaccctcaatttggataaggtgtgtttgcaggcttgcaaacatggccctcgggagggcacacacccctgaccaggcttgcagccctgcctctctccctcttgacatttcacttaggaccaagaagtcagtacacaaggaaaggaaacaggacccgagaggccagcagtatccccagtccaccccaggatgctcagctcagcctgcacacctgccccgagctttcatcgtgtgcctccatgaggctcgggaaggtgaccccagccccccaaggggagaccgtgccagcagggacagtgagcaaaactcaggcatgaaagtttcctcaacatctgggttggaataaaatgggcttcctgctcaacttctgggccaccccaagttggaggagctgggacccccagcacgtggcggtcttccttccct

SEQ ID NO: 21774 - DNA, 1356 bp, Artificial sequence
  DNA replication origin
cgggaaggtgaccccagccccccaaggggagaccgtgccagcagggacagtgagcaaaactcaggcatgaaagtttcctcaacatctgggttggaataaaatgggcttcctgctcaacttctgggccaccccaagttggaggagctgggacccccagcacgtggcggtcttccttcccttggcgtctgccactccttacccgacatgccagagaggctgcggcctcttgccgtcctcgcctgcgccgcccagcctgttgagcgatggggaccggctgcggggcccgggcacgtagctcccaatggtcttcgcggccccctcgggcttgctgggcatctgctgcagcagctggggtgacaggctgcggtgcgaggtggccgtggagcagacggcccagtcgggagcgctggcattgaggttgttgtcactgttggagcgcagcaggacccggggggcggccagcgtgttggggggccgccgccggcggttggagtacgccggggcctctcggaagggcactggggagaaggacatggagagaggccggtgagtgcatctgtgtcgtggtcagctgggtggggaccctagggaggtgcaggcctgcgtgcgtccaagcccccatgcgagcccagcagaggggagctgtgagttctgggccgagaccccagctggactccaccaggcccagaactcacccctgacatggaagcagagagacaggctggggacggagaacatctccacggcacggagctcaagccagtacttcgcatggaagggacgtggggtctgagcttccatctggcctgggagacgtccggctggcttgggcatgtgtaaggacgggccaccccatcacacaaagcagagagggcactgagctgcctgccgcaagatgcctcctccccacaacctaagttgagcctctggggtgggctgaactgtgtcccccaagttcgtgtgttgacgtcctaaaccccagttttcaaaatgtgccaatatttgcaggtaaggtctttacagagatcatctgggtggagggccattagtgggggccctgatcccataggattggggtccttataagaagaggcgatgaggacacagacacacacacagggatgaccccgtgaggacacagggagaaggtggcacctgcaagccatcaagagaggcctcaggaggaaccagccctgcgatgccctgatctcagacttgtagtccccaggactgggaggtgtaaatatctggttgttttgttgttgttgttgttgtttttgagacagggtttcgccctgtcacccaggctacagtgcagtggcacgacctcggctcactgcagcctccgcctcccag

SEQ ID NO: 21775 - DNA, 2707 bp, Artificial sequence
  DNA replication origin
ctctgccacgcctgagccaaccatacagtctccgagtccactggctggatgattcaatctcagtcctcactaagaaggtgccttcctccctcccatcaagtggggactgtgtgaggaagcaggggctgggcaccccttatctggcatcctacaaagctctagacagggccaggccctcactctcctcactcaatgagaccaggggctcagaatgacagcaacagcccctgggagctttgaggggtggcagccacgccgcagctgccttggtttacccagagctccagagcctaagacagcgagtgccctttccaagaaagaagacctcctgaaaggcagccctccaagctccgcaggaaacagcagaaaccaccatcactggggggccaaaggcacgggcttctccccggcccgtgataatcgtgcctgcagcagcttttcactggctacaggattcagcccttaggctgaagccacgcttggctccgaagtttccactgcacaggaccagggctaccatctgacaaactgcaaggcaagagaaaacacgtgtcctccctgggattgggtctgggggaaccttcatgcctcagaggagaagaacgtcacaagtagtttaggacacaggtggcagtgacgaagctcttggggacatggatggtgctggcagaactcaagggggatagaggtggtgctggcagaggtcacagggacaaagatggcactggcagagttcataggggacagaggtggagttggcagagttcatgagggacagaggtggcgctggaagagttcacgggggacagaggtggcgctggcagagttcacgggggacagaggtggcactggcagagttcacgggggacagaggtggcactggcagagctcatgggggacagaggtggcgttggcagagcccatgggggacagaggtggcgctggcagaggtcatgggggacagaggtggcgctggcagaggtcatgggggacagaggtggcgctggcagaggtcatgggggacagaggtggcgctggcagagctcataggggacagaggtggcgctggcagagctcatgggggtcagaggtggcgttggcagaggtcacggggggcagaggtggcactggcagaggtcacgggggacagaggtggcactggcagaggtcacgggggacagaggtggcactggcagaggtcacgggggacagaggtggcgctggcagagcccatgggggacagaggtgatgttggcagagttcatgggggacaggtggcgttggcagagcccacgggggacagaggtggcgctggcagagctcacgggggacagaggtggcgctggcagagctcacgggggacagaggtggcgctggcagagctcacgggggacagaggtggcgctggcagagctcacgggggacagaggtggcgctggcagagctcacgggggacagaggtggcgctggcagagttcacgggggacagaggtggcgctggcagagttcacgggggacagaggtggcgctggcagagttcatgggggacagaggtggcggtggcagagttaatgggggacagaggtggtgttggcagaactcatgggggacagaggtggcactggcagagttcataggggacagaggtggcgttggcagaactcgggggacagaggtgtcattggcagaggtcataggggacagaggtggcgttggcagagttcacgggggacagaggtggcattggcagaactcatgagggacagaggtggcgctggcagagttcatgagggacagaggtggcgctggcagcgttcacgggggacagaggtggcgttggcagcgttcacgggggacagaggtggcgttggcagcattcacgggggacagaggtggcattggcagaactcatgagggacagaggtggcgctggcagaactcatgagggacagaggtggtgttagtagagctcatgagggacagaggtggcgttggcagcgttcatgggggacagaggtggcgttggcagcattcatggggggcagaggtggcggtggccgagttcatgagggacagaggtggcgttgacagagctcctgggggacagaggtggcactggcaaagcacatgaggacaaaggtggtgctggtagatttcactgaggacaaaggtggcactagcagagctcacaggtacagaggtggtattgacagctcccaaggacagaggtggtgctggcagcgctcacaagggacacatgtggtgctggcaggtttcattgaagacaaagatggcattggcagggctcacaggacagaggtggcgttgatggagctcctgagggcagaggaggtgctggcagagctcatgggggatggagggtgctggcagagctcacgggagacagttgtgacccggcgcaccttccccacctccccaggacacagggcagccctggagacagagctagagccaagcctggggagccgcacagagctgcgcaaagcgtcctgaggttggatacttggacttgacacacttggacgtcagtgcctgctgtcggtaagaacctggaggtggtacattggggaggtcgcggtgtcacacctgctctgatctggttcctctgtgaagcctttctgtcattgaagatgccctgctaagcagccggggctcctcagccagcactttcatcccactcctaatt

SEQ ID NO: 21776 - DNA, 1194 bp, Artificial sequence
  DNA replication origin
ccatggttagaacaaaagtgaaggaataggaattcctacattcaaatcctggtctccaacttcacaagaggtaacgctaaaccagcagaccctgagggcagagaagctgccttccatggcacagggcctggcatgtggtaagctcacaaaaaatgtaagatgaacagaagagaggaaggaaagaaaaaagaaaggtgggaagaaaggaaggagttaaatcgatggcaggatgggtaactgcatggattgttggatgaatggatggatgggtgggtggataaatgaatggataaatagataagtgaatgagcagaaacactaatgaatggatagatggatgaatgaatggataaagagatggatgaatgcatggatagagagatggaaggatggatggctgaatgaagaaatggatagatgaatagatgaatggatagatggatggatggaaagacagatgaataaattgatggatggatggataaatgaacaggtgagtgaatgggtgggtgggtaaatggatagatgagtgggtgggtggtgggaggatgggtgaatgggtggttcaatgagtggatggatgggtggatggatggatgaatggataggtgatgggatggatggatgaatgaatagatgaatgaatgggtagatggatgaatgaatggatgaataaatggacagatggatggatgggtggatgggtgagtgaataagtgggcaagtgaatgcacagatgaatggatgggtgactggatgggcagatgggtggttaggtgggcgcatagatgaatggatggacagatagatggataattgactggaggaaggaatagatgaataaatggatgaatgggtagatggatggatggataaattaacagatggatatttggatggatgaatgggtgagcagataggtgggtgggtgaatggataatgagtggatggatggatggatggatggatgggaggatgggaggttgggtggtaggtggctggatgaatgaatgggagggtagatagatatattagttgtatatataaaggcaaccttcccctcttggactgttttgcccatctattatatttccttgcctctagggggtgtgagtttaaaccatgtttgatacattatttcattaaaaacaccaacagccttatgagggaggcatctgattcctgctttattga

SEQ ID NO: 21777 - DNA, 823 bp, Artificial sequence
  DNA replication origin
tcagctgatctaagcaccagacactgaactgatggcacacctgcccagtgcccaggtgccagctccccgaacacagcctgacctcatcccagttcatccagattcctgctgcaaacctgctgcgattaagtgtctcagggggagggtgtgtgacacaatctgatttatggtctttgttgaaagatccctcttcgagctcctggggtggagactgggttgtaggtgaaaggagtagaatgtggagcctggctgggaagctactacactggtctgtgtagtctctggaatgggcttgagtagagacaatggaaatggaaagaagtgcaatacgtcagttggtatttggagcctggactggactggctgatggacaggactagactggctgatggactggactggctgatagactggactggctgatggacatgactggactggctgatggactggacgggctgatggactggactgctgatggactggactggctgatggactggactggactggctgatggactggactggctgatagactggactggctgatggacaggactgtggatgatactcaggcttccggcttgagtggatcatgaacaaagagggaaatctatgtgcttggggtgggggtggggagcttggttttggacacattgcacattttggatcctttgggattcccccacgggagtagtcaactgggcagcaggacacagtctagagtctagtaaactggaggtaagaatttgggaggaggagacatgggtgtggggctgattttgctgaagtgcccgtcttggggctcttggtctcagcag

SEQ ID NO: 21778 - DNA, 1688 bp, Artificial sequence
  DNA replication origin
caacatggtgaaaccccgtctctattaaaaatacaaaaattacccaggattagccaggcatggtggtggcacatgcctgtaattccagctgctcgggaggctgaggcagaagaatagctgtaaccctggaagtggaggctgcagtgagccaagattgtgccactgcactccagtctgggtgacggacaagacttcatctcaaaaaaaaaaaaaaaaaatgtagatgtcagttacttaagcacatttcccatgtttcaggtgctctgcagccagaccctactgcacaatgttctggaagttgatgggttcttagtccagaatgctggccttgttccttacatttgggtactgcagggctgttttctaaccttgaaacgtcacgagtgtgtgtgtgtgtgtgtgtgtgtgtgtgtgtgtgtgtgtgtgtgtgtgtgtgtgttggagaggtgcctcaagaatttcaccagattggggtcagcacagggagattttccaagtcagttggttaattgagaagggttggttagtgcagagggaggttgagcctgggaagggttggttagcggagagggaggttgagcctgggaagggttggttagtggagagggagggtgagcctggggaagagttggttagtggagagggagggtgagcctggggaagagttggttagtggagagggaggttgagcctgggaagggttagttagtggagagggaggatgagcctgggaagggttggttagtggagagggagggtgagtctgggaagggttggttagtggagagagaggttgagcctgggaagggttggttagtggagagggaggttgagcctagggaagggttggttagtggagagggagggtgagtctgggaagggttggttagtggagagggaggttgaccctggggaagagttggttagcagagagggagggtgagcctggggaagggttggttagtggagagggaggctgatcctgggaagtgttggttagtggagaggaaggctgaccctggggaagagttggttagtggagagggatggtgagcctggggaagggttggttagtggacagggaggctgatgctggggaagagttggttagtggagagggaggttgagcctgggaagggttggttagtggagagggagggtgaacctggggaagggttggttagtagagagggaggctgatcctgggaagtgttggttagtggagagggaggctgatcctgggaagtgttggttagtggagagagaggttgagcctgggaagcgttgtttagtggagagggaggttgagcctggaaagggttggttagcggagagggaggttgagcttggggaagagttggttagcggagagggaggttgagcctgggaagggttggttagtggagagggaggttgagcctgggaagggttagttagcggagaggcaggttgtgtctgggaagggttggttagtggagagagaggttgagcctgagaagggttggttagcggagagggaggttgagtctgggaaggggtggttagtggagagggagggcgagcctgggaagggttggttagtggagagggaggtagagcctgggaagggttggttagtggagagggaggttgaactgggaaggtttggttagtggagagggaggctgtgaaagagaggacttgaggtc

SEQ ID NO: 21779 - DNA, 2154 bp, Artificial sequence
  DNA replication origin
tggacccccagaccccatcatttccatttacatatgaagacctgcagttcccactggctgctggattccccagaccccatcatttccatttacagatgaagagacagacagagaaagccactcatcgatgcatgcagtgagtcctcatggagctgccaggtactgtcctagtccctggggacacagatgcaaaccagaaagtcaaggtctctgccaggcttgggctggagagggggcacagaaaacaaccacacaacgtcaggacgggtgggtctgatgcagacagtggagaggatgcggctggctgggcaagctgagtcctgggatgggaggagagagagcctggggacagctgggcggaggcagaggccaccccagcagagcaccaagaaccgaagtagaaaccggcaaggggccgggaggcaggaaggcagtggtggggccaggcagcagcaagctgggatgagctgggctggataggagagaagggcacaggacacaagccctgggttatgcaaagggggttctcagcaggggagggatgaagaacttgggtgacagaaagtggatttgagggaagacagactggaaggaaagaggctggatggtgaatacatagtcccagggagagacagcagggccccaggcaagggtgagaagggtggtggggacaagaggggtggaggggacaagaggggtagacgggcccagagagggtggagagggaatggacaagtcccgggatgagagggacggtgagaaacaggaggtggccaggtttcgggcctgagctccaggggaagggcgttatttacagagtggggagcagctgccacactggagtctcctaagaggtcggcacgtggggccattggcaaggagcagacatcactgccagagctcagggcagaagtgagctgggagactccgactggggactcttggggttttctagaaggcgcacaaggacacagacaggcccgccggaggtcacctcgggagtcactgcaggagggaatctgggtaacaggagcgtgcagtgcagacgccgagagatgccacagaaacgttgagctggatggggacagagacgggaccttggaagtgccatgtgggtgtgactgggtttgagcaagcaggggtgaaagtctgaccacactgtgtcagtgagacaacagccatgagaaggtggaagccacgtgtgcagaactctcccggggagataagcagtgagtggggaagttaggggtctgtgtgcagaactcttccagggagataaacagtgagtggggaagttggtgggaggtgtgtgcagaactctcccagggagatgagcagtgagtggggaagttgtgggggtgtgtgtgtgcagaactcttccagggagatgagcagtgactggggaagttgtgggggggtgtgcagaactcttccagggagatgagcagtgagtggggaagttggggggtgtgtgcagaactcttccagggagatgagcagtgagtggggaagttggggtgtatgtgcagaactctcccagggagatgagcagtgagtggggaagttgaggggtgtgtgcagaactcttccagagagatgagcagtgagtggggacgttgcaggggggtgtgtgcagaactctcccagggagatgagcagtgactggggaagtttgtggggggtgtgcggaactcttccagggagatgaacagtgagtggggaagttgggggtggtacagaactctcccagggagatgagcagtgagtggcgaagttggggaggaggggtacagaactctcccagggagatgagtggtgagtggggaagttgggggcggggcatacagaactctcccagggagatgagcggtgagtggggaagttgggggggatacagaactctcccagggagatgagcggtgagtggggaagttggtgggggcggggtacagaagtctcccagggagatgagcagtgagtggggaagttgggaggggagtacagaactctcccagggagatgagtggtgagtggggaagttgggggagggtacagaactctcccagggagatgagcagtgagtggggaagttggtggggggggtgtgtgcagaactctcccagggagatgagcagtgagtggggaagttgggtg

SEQ ID NO: 21780 - DNA, 1091 bp, Artificial sequence
  DNA replication origin
ctctcccagggagatgagtggtgagtggggaagttgggggcggggcatacagaactctcccagggagatgagcggtgagtggggaagttgggggggatacagaactctcccagggagatgagcggtgagtggggaagttggtgggggcggggtacagaagtctcccagggagatgagcagtgagtggggaagttgggaggggagtacagaactctcccagggagatgagtggtgagtggggaagttgggggagggtacagaactctcccagggagatgagcagtgagtggggaagttggtggggggggtgtgtgcagaactctcccagggagatgagcagtgagtggggaagttgggtggggggggtgcagaactctcctggggagatgagcagtgagtggggaagttggggggggtatagaactctcccccggagatgagcagtgagtggggaagttggcgggggagggtacagaactctcccacgaagatgagcagagagtggggaagttgtggggggtgcagaagtctcccagggagatgagcagtgagtggggaagttgggggggtgcagaagtctcccagggagatgagcagtgagcagggaaggtgggcagggggtccgtgaagccaaggaacttctggagacagaagtgggtggagtgtcttcataagcaaatgggcatgacgtaagagaaggcagaggtcaaaagtagaaacactggtggcagacatgcccacaggcacagacaacgttgcaaccaggatgttaactcggaagctccaggccccgtcaagccatttcctttcaacggcactgaggctgtcttcacttaaatgtcacagatacaaattactgcacactccaaagtgtaaatcaggagtttgttttcaggttaagctatcttttgaaataaggccttttgggcagccataaatgtaaaaacaactaagatgtctgcataagtaaaacggggaagtggctgggacgcttgtgtcattgggacagggctggaacctggtccctcagaccagcccaccccttgaagagctgtgcctgtaagtaagggccagggtaagtacgaacacac

SEQ ID NO: 21781 - DNA, 911 bp, Artificial sequence
  DNA replication origin
caccagtttcttgactaaaatagtcaagtgtaaaccactcctcttaaggacaggtaggctagttttcattgttgtattacagagacagtggaggcagagggaaggctgaggggctggggagcagcactctctttggtcttagcaaccagttaatgaaaccacaatcagattccatgccttctacctccccaagaggtaatccaaatgcatactacaaaggacatggcggggctactcaaagtggagaccaaagatcctaaccatgtatttctataatcaagagaatggatagatgggtgaatgagtggatggagggagggagggaggggtgaggtgggtaggaggatgagtggatgcatggatgggtggctgggtaggtgggtggctgggtggatgcacagatgaatggatggatggatggatggatggatggatggatggatggatggccggccggacggctggctggctggctggctggctggctgggtaggtgggtggctgggaggatgcatggctggctggctggctggctgggtaggtgggtggctgggtggatgcacagatggagggaaggatggatggacagatggagggagggagggagggacggacggacagacggagggagggagggagagagagacagagggatggacggacggatggatggcaggcagacaggcaggcaggctggctggctggatggatagatagacggatgagtgagtggaggggggatgtggatggattggagggtcaggggatgggtgggtaggtgggtggaagcgtagagtggaggggtggtctagggggcctccctggttaggctggagtcagtgttgggccacactccatggactcaaagtttttgaataaagaccattatcatgttaccatcttctgcccaa

SEQ ID NO: 21782 - DNA, 1425 bp, Artificial sequence
  DNA replication origin
gggctggtggtgtctccatgttgagggtgtggctgggggcatgggaggggcaggtccatccctcctctgggagcgtgggcaggggtaggtccacccctcctctgggagcgtgggcgggggtaggtccatccctcttctgggagcgtgggcgggggtaggtccacccctctgggagcgtgggctggggtaggtccacctctctgggagcgtgggctggggtaggtccacccctctgggagcttgggctggggtaggtccacccctctgggagcgtgggctggggtaggtccactcctcctccgggagcgtgggctggggtaggtccacccctctgggagcttgggctggggtaggtccacccctctgggagcttgggctggggtaggtccactcctcctccgggagcgtgggctggggtaggtccacccctcctccgggagcgtgggctggggtaggtccacccctcctccgggagcgtgggctggggtaggtccacctctctgggagcgtgggctggggtaggtccatccctcctctgggagcgtgggctggggtaggtccatccctcttctgggagcgtgggcgggggtaggtccatccctcctctgggagcgtgggcgggggtaggtccatccctctgggagtgtgggcgggggtaggtccatccctcctctgggagcgtgggcgggggtaggtccatccctcctctgggagcgtgggctggggtaggtccatccctcttctgggagcatgggcgggggtaggtccatccctctgggagcgtgggcgggggtaggtccatccctcctctgggagcgtgggtgggggtaggtccatccctcctctgggagcgtgggctggggtaggtccatccctctgggagcgtgggtggggtaagttcacccctccagtatttggggcagtgtgtcagaaggtctgcttttgcagaaacttccagagcagtccacccccttggccagggcccccatgtgttgtgttctagctccttctcagctgatgtgttttgcaggtgcagggaggagaacagtgggttaaatgaacagaaggaagccagcgtgcctttctctcttctgcccggctggcctccccttccctcacatctggccaactctggactggctggcagcccacccttccccaaagcccacaccctcgcacttgctctcagccctatgtctatgtcagctcttagaacggcaattttctaacatccgatggaacctggattccttgaatattctgttctagttccacaggttccaatggagtgctgtcagtcctgcagccgtttgaccccgagtttaaatgtctgtaaacggcaccaggggagcctcggggtcctcactgccttgaggccgagcacattttacacacaggaatgcacaaaataaatgaaatgtgtag

SEQ ID NO: 21783 - DNA, 2068 bp, Artificial sequence
  DNA replication origin
tggccggccgccccgtccgggagggaggtggggggatcagccccccgcccggccagccgccccgtccgggaggtgagggacgcctctgcccggccgcccctactgggaagtgaggagcccctctgcccggccagccgctccgtccaggagggaggtggaggggtcagccccccgcccggccagctgtcctgtccgggaagtgaggggcgcctcttcccggccgcccctactgggaagtgaggagtccctctgcccggccagccgccccgtccgggagggaggtgggggggtcagccccccgcccggccagccgccctgtctgggaggtgaggggcgcctctgcccggccgcccctactgggaagtgaggagcccctctgcccggccagccgccccgtctgggagggaggtggggggggtcagccccccgcccggccagccgccctgtccgggaggtgaggggcgcctctgcccggccgcccctactgggaagtgagcccctctgcccggccaccaccccgtctgggaggtgtacccaacagctcattgagaatgggccatgatgacaatggtggttttgtagaatagaaaggggggaaaggtggggaaaagattgagaatcggatggttgccgtgtctgtgtagaaagaggtagacgtgggagacttttcattttgttctgtactaagaaaaattcttctgccttgggatcctgttgatctgtgaccttacccccaaccctgtgctatctgaaacatgtgctgtgtccactcagggttaaatggattaagggcagtgcaagatgtgctttgttaaacagatgcttgaaggcagcatgctccttaagagtcatcaccactccctaatctcaagtacccagggacacaaacactgcggaaggccgcagggtcctctgcctaggaaaaccagagacctttgttcacttgtttatctgttgaccttccctccactattgtcctgtgaccctgccaaatccccctctgcgagaaacacccaagaatgatcaattaaaaaaaaaaaaaaaagaagtgtgggcccggtgtggtggctcacgcctgtaatcccagcactttgggaggctgaggagggcagatcacttgaggtcaggagttcataaccagcctggccaacatggtgaaatcctgtctctactaaaaaatacaaaaattagccgggtgtggtggcaggagcctgtaatcccagctactcgggaggctgaggcaggagaatcgtttgaaccttgggaggtggaggttgcaatgagccgagatcatgccactgcactgcagcctgggcaacaagagcgaaactccatctcaaaaaaaaaagaaaagaaaaaaaagacgtgtggattggaaggtaaaccaagaaaagtcatgtcttgtaataccggggtgtgctgcattgctgtatgagaattcactgcattcttgctgtctggaaagaagtagctgtccggttaatttcttggcttgtccttacctagatccttccagtgctcaaattctcttcccactcagaggtcctgtctgcccgtctctggcgtctttgtggcacagcccacagactatctgttgcagaccttttgttccaggacatccgtgagagggtgaagcgaggtgacccagtacctggacggcacctgctttggtgcttggcctgtgtagttttgatctgtggaacccccagtctgtcctgtcatccctgcctttttgccaggagcctccttcaagggaagggctgacaccaggcgagcagtagtgtgtgcttgttggtgtcggtccaggctggggggcgtgtggacactcacattcgtctgtctgtgcagcacgcgggaggttggagagttgtcctccactcacgctcagcagaggatggaggagatggcttcctgacagagtgctcatggagggtgctccccggacatggtctacactgggtcctgaggagttggtggggctggactgtgagatcagccgggaagcgttccaggagggaggcccgaggatgagacgtgtctctgctcctgagaaaaggttacatgacta

SEQ ID NO: 21784 - DNA, 1341 bp, Artificial sequence
  DNA replication origin
ggggctcctcacttcccagtaggggcggccgggcagaggcgcccctcacctcccagacagggcggctggccgggcggggggctgacccccccacctccctcccggacggggcggctggccgggcagagggactcctcacttcccagtaggggcggccgggaagaggcgcccctcacttcccggacaggacagctggccgggcggggggctgacccctccacctccctcctggacggagcggctggccgggcagaggggctcctcacttcccagtaggggcggccgggcagaggcgtccctcacctcccggacggggcggctggccgggcggggggctgatccccccacctccctcccggacggggcggccggccaggcagaggggctcctcagttcccagtaggggcggccgggcagaggcgcccctcacctcccggacagggcggctgtccgggcggggggctgacccccctacctccctgccggacgaggtggctgccgggcagagaagctcctcacttcccagacggggtggctgctgggcggaggggctcctcacttctcagacggggcggctgccaggcggaggggctcctcacttctcagacggggcggttgccgggcggaggggctcctcacttctcagacggggcggttgccaggcagagggtctcctcacttctcagacggggtggccgggcagagacgctcctcacatcccgcacggggcggcagggcagaggtgctccccacatctcagacgatgggcggctgggcagagacgctcctcacttcccagatgggatggcggctgggaagaggcactcctcacttcctagatgggatggcggccgggcagagacgctcctcactttccagactgggcagccaggcagaggggctcctcacatcccagacgatgggcggccgggcagagacgctcctcacttcccagacggggtggcggccgggcagaggctgcaatctcggcaccttgggaggccaaggcaggctgctgggaggtgaaggttgtagcgagccgagatcacgccactgcactccagcctgggcaccattgagcacggagtgaacgagactccgtctgcaatcccggcacttcaggatgccgaggctggcggatcactcgcagttaggagctggagaccagcccagccaacacagcgaaaccctgtctccaccaaaaaaatacgaaaaccagtcaggcgtggcggcgcgcgcctgcaatcacaggcagtcagcaggctgaggcaggagaatcaggcagcagtaccgtccagcttcagctcggcatcagagggagaccgtggagagagggagagg

SEQ ID NO: 21785 - DNA, 1417 bp, Artificial sequence
  DNA replication origin
gcgctgagccacagccgggtgcccgaccccggcccgccgtgctcaccagctgggatagggagacccggcgggcgcagcccggccgccaccgtccgtgaattatgcaggaagctggcaccggcgcgctcgagttgatcaagtttccctggcaactttcgcccgggcatccctcctccccggcggccgggcagctccgcccgcccagcccgcggcccaggcgcctccaccgggtggccccggccccgggcgccaggcgcggggaccgctcccagagacgccgacagcgcactcgtcacttgggctggagccgccggactgagccagcaggtgcgaccaccgcagcgggcctcgccgcccgggttcggggggatgcgggggctggggtggacctcgccgccagggttctggggcttggcgtgggggtgcagcgcggcgccctccaggcgggtctgcgtgcggacaccctgctcgaggtgggtgggcgcgtgggcgaggcttgcctttccgtggggctggagcacccagagggagaaagggtggtgcaggtgaccgtgggttttcgcagccgatcttttaaaggggctcggggcgcctggaactgagaaggcgctcgagccaggcaggtgaggggtgggtggtgggggggtcaggcgaaagtacgtaaggctctcgggggctggcagctgctggcaggggcctgggcgtcctcagaggccatccgaaaataaagtggttttcgggtggaaattcgaggttgtaaattggatagttgagtgacctctttttcgtttgaaactcaagttcgaacgttaatgaggccaatcagctaattaagcttccagatccagagaggtaatttcggaagtcccccggtgggggagggcgatttgatctctatctgggatgtgggcctcggttttgccgacccagccacaagggaagttctgcgcccctggaaaaggacctggcagattcagccttaaccccggtgccctgcggtccgcatcacatagttagtgacgcccttctgtgcactaggaaccgagcctggtgccccagagggttcagcaggtccagaacagccccgggccgattgcttttggagttttccaactacttgtgggttggaaacaaggttgagggtcctaatagggttgagcctgtgggggtggagtgaggagagcgagctcggcccccatctgggttcagtgttaattctgagggaaagccgtcgtgtctgctctaagagggggattggtaggtgggagctgtgggtttctatgccggatgtcactgtcctctgagggggcttgagggagactcttgtcctgataggaatctgggtgtcccagtagtgcctgaatgattcagctcctgggaagcactgtctatataaggcctctgattccattattac

SEQ ID NO: 21786 - DNA, 875 bp, Artificial sequence
  DNA replication origin
aaatcagggactttctcgtccgccggctttggccagggagggggaggtccgtgagccacgcagcccggggcggggcagaggcggccagggcgccccgcggtctcccggggttgccacaacagaccccacgcgcacgcccgagccgcagccgcgggcgggagcggggtcggggcgggggactgaggtccgcggcgtgggcgggggtgggggtccaggtcgggtcgcccgcgggtcctgggccgcacgcgtcctttcggcggcgagagggcccctcccccaccctcgccggagccagctcccgcgccgggcggggccgggtccttccccaccccctgcacctgagccgcggcggcggctcctgagctccggcggggctgggcgcggcgccgctcgggttcccgcggccgatccaggtgtgcgcggacgctggcgctcccggggggctcggacccgcccccgactcgccgagccaggtgaggcggcggccggggacgcagggcgcgggccggggaggacgggaggtggcccttgggcacccgatcctgctcactgacggcattttgggggcatctcgattccgggagcaccaactaccgggtaagcgcagtcctggacccagagaggctggagaggtgggcgctggggggagtgagccgcgtgtccaggtgggggtcgattttccgtagagagcccttccccctgcatgcctttcttcccgggcaggggccggtgtcgaaagctttggaagcggcgtgggggcagagcgcaggaaggagcccccgctttatctcctgcgcgcatggaccacgtagtctctggcgcgtcctgccccttcctctggaacagcgcgtgtggcgcgacctcccccgctctcc

SEQ ID NO: 21787 - DNA, 1234 bp, Artificial sequence
  DNA replication origin
gccgccgcctcacctggctcggcgagtcgggggcgggtccgagccccccgggagcgccagcgtccgcgcacacctggatcggccgcgggaacccgagcggcgccgcgcccagccccgccggagctcaggagccgccgccgcggctcaggtgcagggggtggggaaggacccggccccgcccggcgcgggagctggctccggcgagggtgggggaggggccctctcgccgccgaaaggacgcgtgcggcccaggacccgcgggcgacccgacctggacccccacccccgcccacgccgcggacctcagtcccccgccccgaccccgctcccgcccgcggctgcggctcgggcgtgcgcgtggggtctgttgtggcaaccccgggagaccgcggggcgccctggccgcctctgccccgccccgggctgcgtggctcacggacctccccctccctggccaaagccggcggacgagaaagtccctgatttttgtaaagtccggttcggtctgcacggttatcccgaacgcagctggctcccgccacagagtatttataataataggatttggaaatagaggctgcctgcacatcaaaacgtttgcagagcaaacgaaaactttgtacccgggtgatacgccggcgtctgctgcccaggccaccagttctggggcgccttccgcccaggggtgcacaacggtatctccgccagctgccctccaagccaagaaaagccagggggtggggtggggggagcaaaagccaacggctcgggtgaatcccagaggccaaaggcaccctccggagactccaggaatcctgttattatccaggactccggattgctaggtttgcggaagcccaaaggggcgggtcctgagcttggagctgtggccgccgtgtgagccatcggctgatagattttctcaaggccttaatcattcactgggagtctcccccagtacgagctgcgtgtttctgagtaagctcttgaggtctctgtgttctgagttttccagtattctggaaggtgtgggtggggatcagagtccaagctgtggagtagaactgtctccagaaccctggagcccggcattatgcaaacccctaactgtgccccctacatagagtgagtgtgtgtgtgtgtgtgtgtgtaagtcagtctatcttacaggacatgcctgagaggtttgcatgggctggtgacttcaacataccaaaggcaaagttaaatattt

SEQ ID NO: 21788 - DNA, 1015 bp, Artificial sequence
  DNA replication origin
ggagggctgtgatccatggggaaagtgcagcaaaggacggggtgggagggagtgtgggcagggccgggggtgctgaatacaaggtgggccagagtgggcctcctcaagaagaggacattgggtaagcacttgaggtaagggtgagccatgtggatatctagggaagaacattcagccatggggggaacagcccatgcagtggctcagaggcttgcttcctggaggaagggcaaggaggggttggctggggccgagtgagcaaaggcaacaggaaagcaaggtcagagatgccgcagaaggacatccattccaagaggggctggaaacccccggcagggttcagcagaggagagacattgtccaagtaggctctggagaactgctcaggctcctgtgcagagagtagatgtcatagggacacaaggtgtggacagtcaggacattaggactgttgggatgttgggactgtcaggacattgggactgtcagaatgttaggactgccaggatttggggactgctgagatgtcaggactgtcaggatgtcgggactgttggaatgttggggctgttggaatattgggactgttgggatgtcgggactgttggaatgttgggactgttggaatgtcgggattgtttggatgtcgggactgttgggatgttggagctgttggaatgttgggactctttggatgtcgggactgctgggatgttgagactgtcgggatgttgggactgttgggatattggaactgttgggatgttgggactgttgggatgttgggactgttggactgttgggactgtttggatgtcgggactgctgggatgttgagactgtcgggatgttgggactgttgggatgttgggactgttgggatgtcaggattgttggaatgtcagtactatcgggatgttgggactgtcagatatcgggactgtagggatgttgggactgttgggatgtcaggactgttggaatgtcgggactgtagggatgttgggactgttgg

SEQ ID NO: 21789 - DNA, 1297 bp, Artificial sequence
  DNA replication origin
tccagatgcccttgacgcatggcacaggtgagctgaagaactggcttgattgcactgagattacgttctggggcccaagcacacggtttgaagccgacgcagggcacgtgggccctcatgggtgagtgacattataaatcacgccaacgtagagaatgacaaacgcaccctgggcccggcttccagcatgtgcaggacaagttctttgaccagttacctgaatcccccaatccccggagggccagagcatcagccgagataacccctgtggagaccctgactaggtctagctggctgaggacacacaacaatttctgtgttaactagaaaatcctattttcatgtccagttccctcaggtagggtaagtagaaagaagcaaaacacacaaagtctacatgattataaggtagcgaggatgatttccaggagccattgaaggccagcctcgttatctgataacacacaagctacaaagtgtcatcctccagaaacatttcccaagagcctaggtgtaaaccacactggggttttttggatcccccaaactgaactgtaagtcccactgcctacaactgtccacaagagaaccccccaaacattggtttatgatggatggatggatagataacagggtgagtgggtggaaggatggatgaatgggatggggagaggagcaggtggatggatatatgataggcagggttgagctggggtgcagggtggcagggatcaggtgtgttcagaagtgtcacccaggaagccagagggagcaggctaggagggcctgagagggtaagggaggccggtcaggagctgcggacattgctcaggcaggaggttgacctggatgagatgatgcattccttcccctcggcacatgccattacaggccctgatagagtggatggatgggtaaatggatggatgacgggcaggtggatgggtgggtggctagatgtgtaggtgggtgggtaggtggataggtggatggacaaatagatgacgggtgggtagacagacggggtggagggtggatgggcaggtggatgagatggatgatggatgggtgggtgggtaggtggaaggatggggagatgggcaggtggatgggtgtgtggctagatgtgtaggtgggtgggtaggtggatgggcagatggatgaatgggtgatgggagggtagatggatggatgatgggtgggtggatgtgggtgatggataggtggatggatgatgcattggtgggtgggtgaatgggatggggcaatgggtaggtggatgatgggtgagtaggta

SEQ ID NO: 21790 - DNA, 931 bp, Artificial sequence
  DNA replication origin
agagaccaccattcctcggggctgtccgtgggagaccttgtctgttcattccttgccatcattgagaacccacgaggagcctggctttgtgcctctcacgtgggtgcagactggaaccgcatcccaactctgcccccagaagctccctgttttgaggggtggatgggctgaggtgctccccaacaattacagagggggccaggcataccacaggggcatcctcacttgcttctgcccctcagccctgacctccctatcagactgcacacctgtcactcagcctatggccagttaacgagatgcagaaccaaaggatggactcagcctcccctccctcttcctaggagcaggtagttccttggccaagggtataggggcctcagagatggttcctggggccccagatgagggtccgcagcagcagaggcccagaaagtgaccagggcccccgccaggcatgcttcagcccagccaagctcctcactgcgggttgggaaagcgccttcatttctgaatccttcatctgcaggggttgtgaacaagtatcagatcaatggcctgcaagcctggctcctcacgcacctgctctggtttgcaaacgctcatctcctgtcctggttctcgcccaccatcatcttcgacaactggatcccactgctgtggtgcgccaacatccttggctatgccgtctccaccttcgccatggtcaagggctacttcttccccaccagcgccagagactggtatgttcttagcagcgggtccagcctgatgtagaaagtgcaaacttcacccctggcctttcttgctgcctggggcaggtggttgtaaagccctgagcactgagaatccgtggaagaggaggagggggatggaacttgcttcaccctggggaacatcctttctgaatgtttggtggcttctccagcct

SEQ ID NO: 21791 - DNA, 1698 bp, Artificial sequence
  DNA replication origin
cacgccccacccccagctggtcagctgggatcccgaagaagcgccagaggctgcgcccacccactagggcccgggcgggccggtggggcggcagggcggggcctgggccgtcaatctcgagtccggccgctgccgaatggcgggcgcggtgggcccggagtcagctcaggctcctcgaccaatcacggggcgcggagccgccgggcgtgcagggtccgcctccgattggcaggcaatcgctgacatcatccgggggcgggcgcccctgccctgcgggtgactccgacccctggctagagggtaggcggcgtggagcagcgcgcgcaagcgaggccaggggaaggtgggcgcaggtgaggggccgaggtgtgcgcaggtgagtggccaaggtgtgcgcaggtgaggccaggggaaggtgtgcgcagtggggggcgcttgcccaggtgagcaggtgcccactcacagggcgagggtggggtcaggggtagggggcgtgcgcgcaggtggggagagggtccagctcacaggcgaggggccgctggggctccggggaggcggggcggaggcgtggatagtccccctcccccacgagccggcgtctgagggatgctctgtccccgcgctgtctggagcttccccgggcgaaggctgcctggctccggggtcggctcctggccccatgccgcgctccgcggcggctctttctcctgccccacctgttgttcgcctccctctttgtcagtgctgagccaggcacagcagctttgcgatgggactggcttgtccgccgtcctccctgacatgcggctgttgaagccctgagcactggaccttctgcctcttgcttgactcctactgtgggccttgagcttctgccctctcctgaaatgtcagctgcctgcggtcttattcatttttgtgttccttgcaggactttagccggttgagaaggatcaagcaggcatttggagcacaggtgtctagaaacttttaaggggccggttcaagaaggaaaagttcccttctgctgtgaaactatttggcaagaggctggaggtaagtgtatctcagtgccctggatcgtgggcgcaggctatggcttcacagcgttgaaagtacagacagactggtccaccagctctcgagtgccaacgactgtctgtgcctcttatgagtaaaatacaacataccagggcacctcccctttgtctgttcccagccgtctattgggaaggatgttacttagatgtttattgcacaactcaatgcttgtggctaaagagctgactcctgggtgaatgaactctgtaataagctaaaagtacttctttggtcttgttttaatcccttttgacaacattctcccagtggctttttcacactttagttctgaggttacacatcccctgacccttttgcaatttcccagtgttttacataattgataatgttggtaccaggcattgtccccttgtagcttatccatggcttggggcaagacgaatgccaccccattctacttagccttcctgtaaggcaagtgtgcatgtgggtggtctggattaacaccagtcagtgtgggaactagggatcggagggagtgggggcactgagctggtaagttttggctgggaagaaactaagcttgtatcttaccttgatgagagcctgggggagaggaactgtctaaagcaagcc

SEQ ID NO: 21792 - DNA, 1133 bp, Artificial sequence
  DNA replication origin
cacaatttgataaagatattttttcatgaaggaataacccctatgagttaaaacctcatttctgcatataccgcaattggcagaacccctaccatagccgggttcaaaggcagggcagtgtcacctcctgtgacacaggcagcacgtccaggccaagaccctggtgtggatgccggggctgcggctccgcctctgccctcccccagctccatcctcctttgtgttggcctcagtctcaggttgcttctccagctccgccctcctctgtgttggcctgtctcagattgcctctcctcgtgggcatgggatgtttgccccagctccagccatcccatcttcacacagccacatgcagaggcagcaaagtggccttggctccttgcgtgtctttttgatgagaggggtgttcccagaagtcgctggcagaggcttactgacactggggtgtcttactgacaggggtgtgtcttactgacatgggggtgtcttactgacatgggggtgtcttactgacaggggtgtcttactgacaggggtgtgtcttactgacggggtgtgtcttattgacagggtggtgtcttgtgctgtgattagtgggtcactggcaagtgtctgaatgaagtggaggttccggtggcaacagtgacggggaagggctatgggtccgcctcaatgtcatctgccccatccctgggcctccaggaatccagggtctcagcccctgctttagaaggtgtgacaacacctttgacagtggccaaattacacgtgggagttgaacaaacgggaaatcacgggttctctttgaaatttccttctccaggaagtcctgacggccacgctggatctggaggacgtccggagctacagggcggagatttcatctcgaaacctggcggtgagtgctccagtagacacctgtgtgggatgctcatcaaagacgtggaaagtggccccattcgtgcgggcctggtggaggccgtgagggtgcagtgcctgaaaagtctgacagggaagttccggacttcccgagcgtggaaaggggctggtgccgcagacagaacctgcttccatctgttccccgtcatcctctgcttgggccaggccctgagctggggtgagctggggacagg

SEQ ID NO: 21793 - DNA, 1127 bp, Artificial sequence
  DNA replication origin
cccatccttgcagggtgaagatgagacgaagatgggtgcacaggccagagcctccaggggagtggagtgggtttgggatctgtgctgcccaccgggtgtccgctctttctctcccccatgtctggcccctctgcctgggacactcctgcttcccagcctcacctagagccccacaccaaacccagggcccgggctgggacacagaccacagctgagggtgaatttcccaggaggtgctgtcgggatagcagaaagtgggggacactcggcaggtgctgtctggatagtagaaagtggggggcactcggcaggtgctgtctggatagtagaaagtggggagcactcggcaggtgctgtcgagatagtagagagtgggggcactcggcaggtgctctctggatagcagaaagtggggggcactcggcaggtactgtcgggatagtagagagtgggggacactcagcaggtgctgtctggatagcagaaagtggggggcactcggcaggtgctgttgggatagtagaaagtggggggcactcagcaggtgctgttgtgatagagagtggggggcactcggcaggtgctgtctggatagtagaaagtggggggcactcggcaggtgctgtcgggatagtagagagtggggggcactcggcaggtgctgtctggatagtagaaagtggggggggggcactcggcaggtgctgttgggatagtagaaagtggggggcactcggcaggtgctgtcgggatagtagagagtggggggcactcggcaggtgctgtctggatagtagaaagtggcgggcactcggcaggtgctgttgggatagtagaaagtggggggcactcagcaggtgctgttgggatagtagaaagtagggggcactcagcaggtgctgtcgggatagcagaaagtggggggcacccggcaggtgctgtcgggatagtagagagtggggggcactcggcaggtgctgtcaggcggagtggtcaccaccgttgttgtcttctccgtcacttcctccagagtctgttacccacgtcacatcgtggatgccccctgcccggataggtctgagtgcactggggtggccggcaccccacaccttctcagggagcaccca

SEQ ID NO: 21794 - DNA, 1442 bp, Artificial sequence
  DNA replication origin
gggtgggacccgactccctcccatcccctcacggtggggtcgcggctctgggggctcctggggccgctgccggaccctcagctctgtcgccggggggccgcagtctcggggcggcacagatggggcggctccaaggcttcagccacagacattggtttcctctgttgggggcgcggaggcccaaggtcagggagtctcagggtttgcttccttcccaggcccctcctgggctgggggcgggtgtctcctgcgccccctcgggccgccctctgcgggtctgtctcctctccccatgcggatcccagtgagtcgggatcaggcccaccctggggatatcatttaaactgaaagacctgttcaatggccccaccttcaaatcaggccccgtcctgagggattggggaccaggccttccacgcagtgtggggcacacactttagcctgtcacacaggattccctgggcccctaagtactgcagccagggtggctctggaactgggtgtggcagagaagggggttgtgtctgtttcgcggggtccctgctggagacgtttccggcacttcttgatagtgactttaatcctcaaggcagctgcgtgtttttcatgtcacaggcacagaggagttaagtatgaataacttgcccggaatggcacagctggcagtgcagggatcagattagctaagaaggaactaagtcaggggtcttgaccttggcctgagaacggtataagtgagacactgggagaactgcggagctctgatgccgcctggagaaccatcctgtgggggagtgagttggggggtactaaagggtgtgagctttccttctgaggcgatgaaacgttctataactgattatggtgacgggtgcacagcgctgtgaatacgttaaaagcattgaattgtataccttaagcgggctaattgtgtggcatatgaattgtatctcaataaagctgttaccaaaaaaaagaagaggtgtcagagaggttggggagcagtgaagccgtggttgtactgatggacagagagttctggtgagatcaaagcattggagaaagagagctagaaaaaggagggtggctggaagcggggtgcatgggacagaccccagtggggtgccctgctgagaacaaggtcacagatatcaccacagggatgagaggtggggaaggatcatttacttgtgtgtggaaatcactaaaaattaacctagaaattgtgttggaaaaagtagtcacgagccagaagctaaaatcatgaagaaattgggaagaggttggcaaggcataccagacagcacataatggaaacagagatgaaggctctggagaagacagagtgggatgggctggcggtgaggggaagacattacccattctctgggaccagttcccaaactgaacacttgggcttgtcagttttcttactcgattcc

SEQ ID NO: 21795 - DNA, 1011 bp, Artificial sequence
  DNA replication origin
tgctcaactgagccaggaggaagtcactagcaaaaaggaaaaaaacagagctctggaaaaataatgtaaacagtcacaagaaagggaccctgtgtcctgcctgacatctggacaggtatataaagagcccgggctcagggagctccacacctgcacctccctctcacctgctcctctacctgatccaccctcaatctaccagaatcatgggctgctgtggctgctccggaggctgtggctccggctgtgggggttgtggctccggctgtgggggctgtggctccggctgtgggggctatggctctggctgtgggggctgtggctccagctgctgtgtgcccgtctgctgctgcaagcccgtgtgctgctgtgtgccagcctgttcctgctccagctgtggctcctgtgggggctccaagggggactgtggctcttgtgggggctccaaagggggctgtggttcctgtgggggctccaaggggggctgtggctcctgtgggggctccaaggggggctgtggttcttgtgggggctccaaggggggctgtggctcctgtgggggctccaaaggtggctgtggttcctgtgggggctccaaggggggctgtggttcttgtggctgctcccagtgcaattgctgtaagccctgctgctgctcctcaggctgtggatcctgctgccagtccagctgctgcaatccctgctgctgccagtccagctgctgtgtccccgtgtgctgccagtctagctgctgcaagccctgctgctgtcagtccagctgctgtgtccccgtgtgctgccagtgtaagatctgaggctctgaacccagaccttcaggtttcacctgtttggtgaaagcatttgttatgatttccctgaattaattcatcccacgcatcctccctgaggcacctgccccttctccagctcatcatccatgcacgcacctccttccatggctcagctctccactgggccctgccttcagcctcctcactccggaaatgcatg

SEQ ID NO: 21796 - DNA, 991 bp, Artificial sequence
  DNA replication origin
ctaagagccaggggggcaagaggtgctggctcttactccttgcatggcggggggcgcctcgcccccctgcgatgggggtcctaagagccagggaggcaagaggggctggctcttactccttgcatggcggggggcgcctcgcccccctgcgatgggggtcctaagagccaggggggcaagaggggctggcttttacgcctcgcatcgcggggggcacctcgccccctgcgatgggggtcctaagagccagggggacaggcggggctggctcttatgccccgcatcgcggggggcgcctcgcccccctgtgatgggggtcctaagagccagggaggcaagcgggctggctcttactccccgcatcgcggggggcgccttgccctcctgcgatgggggtcctaagagccaggggggcaagaggcctgccctcaagtccttatagtatactaatccattacaagcacttccctttaggacccacctcacaacactcttgcattggggatgatgtttccaacacatgaatgttgggggacacatgcagaccatggcatagagaaatctctctttcccacctggagtaaaactgagcagggaacaaaagtgggcaactggaagaagcagcctaagaggagtgaacactgtaaatggggaagagagaaaacaacagcagagagatttgtgggattttcagaaatgcttgagtagaggaagagattccctgcaaacaccaaaatgagattatattattgttatttggaccgtaaaggaaaaaaaaattggctgagcatggtggcttatgcctgtaatcccaacactttggaagaccaaggcaggaagatcactgcagacaaggagtttgagaccagccagggcaacttggcaagaccccatctctacaaaaaatttaaaaattagctgggtatgatgacacacatctatagtcccagctactcaggaggctaaggaaggagaattctttaagcccagg

SEQ ID NO: 21797 - DNA, 999 bp, Artificial sequence
  DNA replication origin
caggctatgaaaccctgtctctactaaaaacacaaaaattagctgggcatggtggcacgtccctgtgatcccagctactctggaggctgaggcacaagaatggcttgaacctgggagatggaggttgcagtgagcccagatcgcaccaccgcacttcagcctggagaacagagcgagactctgtctcccaaaaaaaaaaaaagaaaaaaaagaaaaaagaaaagcagtgagtgggctgggcatggtggctcacgcctgtaatcccaacactttgggaggctgaggcaggaggattgcttgaggccaggagttcaagaccagcctgggcaacataggagaccctgtctctacaaaaaatttaaaaattagctgggcgtggtggcgcatgcctgtagttccagctacttgggaaacagaggtgggaggatagcttgagcctggaagattgaggctgaagtgagcgtgccactggcgctccagcagtgggtgggggaagggagggagggggcgcggtggggaaatggagcgactgtgtctggaaaaaagaaaagagcaggaagtatgcatacagatatgtgtgtatgtcctgagctatggtgtaaaatcattcctgactgcggattatagtcaaaaccccatgaagagcatcactacagcccacgggtgtgtcagggacacagtgttgtgagccctgggaaggcagggcctgtgtccagcactttatcaacactggcgcatgcaccctatgaggcgaagggatttgtattgttcccttacagcgtgggacactgaggtcgccaggggcatgacgactgtaagggacagtgctggatgtgagcctcgcctgcaggaggcggtccaggaagcgtgggtggaggggctggagaagttgagggccgcgtggcccgggaggctcccggaggagggaagggcctatctcagcgaggggcataggcggggaaggtgcggggcgaggcggccgcggctccctggcatccc

SEQ ID NO: 21798 - DNA, 1291 bp, Artificial sequence
  DNA replication origin
gacgcccctcccagagcccaggtcacctccgggcttccgcagccccctccaaggcggagtggagctttgggaacccctcggccaagcacagcggttcgaaaatacagctgaaacccagcgggcccttagcacgcgccccagcgccggagcagggtcagggtcttcttgcgacccggctccgctccagatccccccagctctcggcggcggacccgggccgcgtgtgagcgcgctttgcacctcctatccccagggtccgccgagagccacgattttttacagaaaatgagcaataaagagattttgtactgtcctgactggggagtcccaggccgcgggggacggagcgcccctgggatgcacgcccggctggcccggcctctgggcgcggtggtgacaggccctgacctagggggaccgcagggtgtggggagtgcggcgccctactgggggcggggcgaggtgtccgtaggccccgcccaccagcccttcctccctcctgaggccccgcccccccatacctgcctgcctttgccagccccagccaggagaagggagcggcggagcggctggcagagacagaggagggtgtgacggcgttgctggtcccccatgggtccagagggcgagacagactcccgaggcacaccctccaggggccctcggccctccagcgaccatccccgagtcggacagggtccacttccgagccacggtggggtcaccctgtgcccagtaggggccttggaagtggtggttggaggccaggtacgctcggttactaccctttccctgctacagcctcagctgcgatgcccacgagaaacaggctggtggaggggcagaccccctacaaggcctgaaggtgccgttcctccacccgctcctcttgtggccagaagagagggacacccccgccatgaagagctctgaacggttgggtgaggacaagtgggggccgtgggagggccatggagcccccagctgcaccccagcaggcccggggctggtccacaccattcctcactctccacagcctctctacccctgactttggcgagaccctcgtccgtacctccaggctccatgcctgcctcagcatcgctctatggattctcccagccctaaactggccccatctctcctctctgccctcatgtgagtttggttcttgaagcctctagtggtccctggggccagactctgtggccttggacagggagtctcccatctgagccacaggttccttctctgttgagtgtgtgagggaacatgttggagcccttagtgt

SEQ ID NO: 21799 - DNA, 1820 bp, Artificial sequence
  DNA replication origin
ggtctcctccctgcctggccgcggagcgtcctccccgtcctcgcagtcctcgggctgtgcgcttccccgctccagcaaccagccgcagcctcttctcctcgggagggacgtcgtcctcctccctcctgggccggccatccttgcctcggggcttgccagtggcttcggagctgccggaagggctggccatggctccgggggctctgcctgcacttggggaagaggaaggacccggcgcgagcggcctctcggcggagctggggcgtctgagcgcgggctcggtgggtccgcgcggctcggagctgggcatcggggccggcgcgggctcctccgcgggccgctcctggctctctagcgccctctgctggccgctcgcacgcaccgcggacacgccgggccggggcctgcgccgcgctcacctgccctggcctaggcggtcgctgtcccctgctcttggccaggccagctccggccaggctctgcacctcctccccgccccagccaggttgcaccccgatggtctccctgcccaaggaggagagaagagaagggacgccccgagagggtggacatcggccacagccaccttgtctttgctcttaccctgtgtcttgcatgatttggaggtggtgggaaaaccgaggctgctcaaaactcgtggagaattcctcctgcaagatgacatgaatgcaccttcgcgttgcctaccaacagatcttttttgagcatctctgtggcccacgcgtggtgatgggggaggggatattttggtgaacatgacaggcatggccttcacacagtagggctcagccctgggtgagaaggcattgagaacggacattgtcaattgggcaaagggaggccaaggagaagtgctgggggcatgggaactgaaaaagacaggaggctcagcaggtcttggagctgggagagggacagcagcagcggctgttccaaaggaagcaacagctgagagacgtctcagagagttgttctcagcccagtggatcatgtttgggcagagggaacagcgtgtgcaaaagcccagaggctgggaaagaagcagaaagaggactgtggggctggagcatggagggcgaggggagagaggtgtggtgggcagacagattgcctgggacccagccgtgcagggacagaggagataggggatccttgcaggcccccagccagggctcaggcacagagataatgcaggtgggcaaagagaggagatgtggagaaatattttggaggcatgacctgatgaatgagcccaggatgcactcttagtgtcagtgtggagctccttctttggctgtgtgatcagctgaacccgggggtattttctggacatcgaggtgctacaccaagagtccaggacaggctaagtgagcaccagcagctcctggcctacctcaaaagcaggagagacaggggagactggggaggccggggaggaaggggaagccaggaaggcaggagaggccagggaagcagaggaggccagggaggcagtggaggcaggagaggctggggaggctgtgtcctttccatgattctgcccgggatcctaggcccctgaactccctgagcttctccaccccaagcgctggaaccatgttgcacaatggtctctccactaagctcctgatggcagaccctaccctgctgtgctccctatttcaaccctaacagctctcacagtgggcagcacatagtaggtgctcaggaaacactggtgggagagcacatgggtctgctcagcaccttcctctctcctccagctctcccctgtcatgaaataattctgataacgacac

SEQ ID NO: 21800 - DNA, 1919 bp, Artificial sequence
  DNA replication origin
gaagccactggcaagccccgaggcaaggatggccggcccaggagggaggaggacgacgtccctcccgaggagaagaggctgcggctggttgctggagcggggaagcgcacagcccgaggactgcgaggacggggaggacgctccgcggccaggcagggaggagacctgcacccagacaggtggcgacggcagaggagtaagtgacgcgggcgcgggggtccgggggtgccgggggcgcgggggtgccggggacgcggggtagggacggcgggaggctccgtggccggccccgggttgaagttggtaactgagcggcaactccggcgggcgcggagtgacagctcgtgacggcctccgagacgccagctgccccttctcggctgtgtggcttagacttcctgattctcccacgacgtccctggactagagacccactggactctgcggctagtcaaaagaggagggggagccccgcgtcctgggggccctcagcaggggaaggggcgggggttgccccgggcatcctgtctggggcatctgtctgggactctgccggtgcctctcacctggcgaggggcttgtggtgggggcaggggggaagtacctggagccaggcttggccaagccctgctctgctgggctgcgggctggcggcgctcacccagctcctcacctatcccgcatcttcctgtttttcttccctttctggttgggcagcgagagttgagaggaggcagatggcttccatcccagaaatcgctctcctctttccatccctacagagagggacagagagggaaagttccttgcatcccccggggcgctgtccctgtgagctcccggtgtcctgcacacgtggaaccctgagtcaccgggcctgtgtgtgtgcgatggggctccgtggccagcctggcctcctggggttcactttctgctttcctaccccaactcttcctgtgtggctttgctggccttccactggggaggcacgtgggtttggagggcagatgagggcccgctgaggagctgtacccctcagtgagggccgccaccttgatggtttttgatggataatggggttgacctctttgctccttccacatgtttttatgtttgaccatttgctcagctgagcgtgtcttaatcatttgtttcgtggtgaatgagccccacatgggagagagggcgccttcattctgaacccatttaggcagcacgggcagccctcctcgccgtgggctgcatcagagcccccactgcccagtcttggggttgctcctggatgctgtctgggaggcttgttcatggtgacatcctcatctccccgtgcactttactgcattcagagcttgggtcacctggacactgaactcagatgaattttctctgagatcccgggagaaggaggacagttctctggaaggttttccagggccgatcacggaaaggatgagaagggaaaggtcctggtcggggacacaatgacggtggcagtgtaacgccgggaaacttgattgcgtgaggtccctctcactccctctacctccctcttttacgtagactctgccaaagaccaggataccagaatgcaatggagtgaccaagtgtagtgggaccttgggaacgtgagtctggagccaggtggctggggtttgcatcctggttctgcccctccttagctggctgacatggcacaagccacttaccctctctgagccttactgtcttcagtggcaaatggatcggtcaacaggccccattgcctggggttgttactgctgagattaagggaagctcgtccatagaagcacttagcattgtgcctggcacatagtgtatggtggataaatgggaattaggactgaaactcatgccttggtgtgtttttgcagtgatgttttgttctggggtgcatcaca

SEQ ID NO: 21801 - DNA, 700 bp, Artificial sequence
  DNA replication origin
tcagatgagtctgtagaaaaggaagattagaaagactcagcgacacttggggttgggactgaggggacaggtgggagggaaagaaagaagatttgggatgagttgcattgggaacagagactagggagggaccaatgtgtaaaagaatgcctggacgtcaggcacctcagaccatttgcccatttatgacaagaattatctagatcttgtaggatggaaaaattgaaagtgccattttctggctatttggaaccactgttgagtttgtattggggtcaagaggcattgtagaagaaaataaggcatttaggttttaggtcaggtgtgagttgaagaggttttaggttttgaagaacacaggctaatggagaagaaaggggaatggagggtggaagcttgcccatagtgaaggaggcaagcctagagaaaagagagagtagagacacaaagagaaggggtggggtggtcttgccttccagaaaagcaggaaatgggttggggcacagaaatacagggttggggtgcagagataggaggtcaggttgtggaaataagggatcagggcacagagataagagggcggggcatggaaataagggatcagggtgcagagataagagggcggggttcctgtgcctcccccagaaaagtgggacttgctgctaagggtgaaggagaaggggttgaggggttcttgctt

SEQ ID NO: 21802 - DNA, 2046 bp, Artificial sequence
  DNA replication origin
taaaaagtcgtgaaaatgatcgtgaactgtaccccacaacgagtgcgcgtgtgcctcccaagacggtggagaggcccccagcttacgccgccagcccgcggggcaagaagggtgcgagcgactctggccaggccccagggacggggaccgggtcgcgcggacctgaccggcgagagcccaggcactcacgtggcgggagcgccgggggcttcagcacggagacccatcccgtctgcccctggactcccgcgagccccgcggacctctccgctagccccgccgcccacctgccagcggaaggagcgcagggcgcgcgctgccaggaagcggcgcttgaaactctgcagcaagagttcgctccccgcgttctcctcgggcgccatgacgggggcggggcctcagccttgccgggagaccgggcggaagccgggcctggactgaagagggggcgggcccagggcagtgcaccggggcagagagggggcggggcctggaggtagagtcgtgggggtggctctagggcggggccaggatgagagttatgaggccggggcttggggtggggctaggatgagcattatgagggcgaggcctggggtagggccaggataagtgtcgttggggcaggtcctcgggagagttcaggttggtgggtcctggggcggggccaggacagggcgatcctggaagtggggcttcggaagcgtccaggttggaggcgtcctggaggcggggccttgcatgggggcaggataagattcccggaggcgggcgttagggtggggataaacaatgattgggttcaggaggcgagactcggagcagagtccaggagacaggtcttggggcggggctaagaccagaccaggagaagcgctcaggaggcggggccagggcggggcgttggctatgtcgtagcacgtggccaggcgctgctcggactctgggaggcggagcttaggacgggccgacgtggggaggggcccagggtccgggaggcggggccgagtccgggctgcgggctgcgctcaggaggcgggccctgggaggcggagcttagggaggggccggtgtcgggagggaccaagagactgggaggcgggtcggggctgggctcaggggcggagagggagctgggcttggggctgggccgagacggagcgaggggtccaaggtgtgagaaacggggaggggtttgaggaggggattggagtgtggctcaagttcgggaggcgttacctgcggagggtttgaggcaggcccaggagcgagtccacggtctgccgactcggggccatggtcgggccccaggatccggagcttcgggcggggccgagtccgggtttggggcccaggaggcggggccgttagggctagggtccccgggatcgtcgggtcaggccttgggccaacgtaggcactctcacagttcctccgccttcaggaaggtctttttggcaggggccttatgggtgcgcgcttcggtcctggaggccttatcctagcctcctctccatcagcgccacccgtctggggcccgataggagggagctttccctctgtcccctagcctttggactgtcaccaaacaagccattcgttcaccaaatacttattaagcgtctaccatgtgtctggcaagggatatgtaacagtgagaaaaactaggtgtggtccaggccctccaggggctcaggggctcgtggaagaagtggacattgaagtacttatcacacaaatgagtataaaagtacaatagtgatatctgccacgaaggcgagcagacagagctagcggggcttccaggaggagttttgatcttgcagggacaggaaggaggagttagctcctggggggcgggattgggggtggtggtgatatagacgtggggtcagagtggaaaacaacaaaaatataattattttagttcaaagttattgtgtcttgagttgaaaggcagggcagttagcaacacagttcagatttcagtactgcccctgaaatctgaactgtgttcaaagtctaaaacgtttaccttagcaaatc

SEQ ID NO: 21803 - DNA, 868 bp, Artificial sequence
  DNA replication origin
aggctgtagtttgtgatccttgattcagacagtttagcaaggctgaaaagaacacccacacccccttgttacccacagatgggtgggactgtgttggccagaggctgagaggagggtgctcacaggggaacgtacagcatgtagaggccggaaggtgctccagcgcaccaagtgtgggaaagtgggacacacggggaagtttccagaaagcatgatgtcaagttggaggcggagcgctgctgggttgtgaagggtctcaagtccaagtgagggagttagggacttgggaggggttgttgttgggtcggggacctgggttcagccaggtggtgacctgggatggggtggggacaggcaatgaagtaagctctgctctttagtattttgcagatgcttttctcaaactttcctgatcctgcaggcaagctaaaccagttctggaagaacctgcgggagtcgcagcagctctgatgggatgagagctgggtgcagactgtgctccctttggttatggacacataactcctgggccagaggctaaaaccccagggcccctgctgtccttcccgcagcttcttcttggtgtctcagggcaaaccctttcgagcagcgcctcccagtggccggaagctgaaatgaaggcagtggtgccacctggtgaatgactcgggaagctgtggttggccctgatttcttctttggagtctctgaaacgcttcctgtcttctgttcttcacgccccatgcccctgctagcgtattactgttctgtgacttccctgtgacctctgcagtactccttaccctgcatttggtctccaggtgtcacctttctgccatgttcctaacactttgattcctgtcttgaa

SEQ ID NO: 21804 - DNA, 1093 bp, Artificial sequence
  DNA replication origin
catagatcaacagcatcccaatgcagaagaatttttcttagtacagaacaaaatggagtctcctaaatctacttctttctacacagacacagcaacaatctgatttctctatcttttccccacatttcccccttttctattcgacaaaaccgccatcgtcatcatggcccattctcaatgagctgttgggtacacctcccagacggggtggcggccgggcagaggggctcctcacttcccagaaggggcggccgggcagaggcgccccccacctcccagacggggcggcggccgggcggaggcggccccccacctccctcccggacggggcggctggccgggcgggggctgcccccggggctgccccccgcctccctcccggacggggaggctggatgggtgggggctgccccccacctcccggacgggccggctgccgggcggagacgctcctcacttcccggatggggcggctgccgggcagaggtgctcctcacatgccagacggggtggcggggcagaggtgctccccacatctcagacatgggcggctgggcagagacgctcctcacttcctagacgggatggcggccggggagaggcactcctcacttcccagactgggcagccgggcagaggggttcctcacatcccagatgatgggcggccagacagagacactcctcacttcccagacggggtggtggctgggcagaggctgcaatcttggcactttgggaggccaaggcaggcggcttggaggtggaggttgtagtgagccgagatcacgccactgcactccagcctgggcaacattgagcactgagtgaacaagactctgtctgcaatcccggcgcctcgggaggctgaggctggcagatcactcgtggttaggagttggagaccagcccggccaacagagcgaaacccagtctccaccaaaaaaatacgaaaaccagtcatgcgtggctgcacgtgcctgcaatcgcaggcactcggcaggctgaggcaggagaatcaggcagggaggttgcagtgagcggagatggagcagtacagtccagctttggctcggcatcagagggagaccgtg

SEQ ID NO: 21805 - DNA, 876 bp, Artificial sequence
  DNA replication origin
ggaacccctctgcccggctgcccagtctgggaagtgaggagtgcctctccccggccgccatcccgtctaggaagtgaggagcgtctctgcccagccgcccatgtctgagatgtggggagcacctctgccccgccaccccgtctggcatgtgaggagcacctctgcccggcagccgccccatccgggaagtgaggagcgtctccgcccggcagccggcccgtccgggaggtggggggcagcccccacccatccagcctccccgtccgggagggaggcggggggcagccccgggggcagcccccgcccggccagccgccccgtccgggagggaggtggggggccgcctccgcccggccgccgccccgtctgggaggtggggggcgcctctgcccggccgccccttctgggaagtgaggagcccctctgcccggccgccaccccgtctgggaggtgtacccaacagctcattgagaatgggccatgatgacgatggcggttttgtcgaatagaaaagggggaaatgtggggaaaagatagagaaatcagattgttgctgtgtctgtgtagaaagaagtagatttaggagactccattttgttctgtactaagaaaaattcttctgcattgggatgctgttgatctatgaccttacccccaacccggtgctctctgaaacatgttttgtgtccactcagggttaaatggattaagggcggtgcaagatgtgctttgttaaacagatgcttgaaggcagcatgctcgttaagagtcatcaccactccctaatctcaagtaaccagggacacaaacactgcggaaggccgcagggtcctctgcctaggaaaaccagagacctttgttcacttgtttatctgc

SEQ ID NO: 21806 - DNA, 2136 bp, Artificial sequence
  DNA replication origin
ttaatatttattttcactcactacaactctttcgtggagggagcggaatttaaacttccgggtcagcctcagtgcagcttgggaaacgtagttcctagtccccacgtctcgctccttggagcccagactgagggagcgtcgcgaaagttgcccgttttggaacgctcccatttggctctccaaagggaagaattggttaaatagttgcactgaaaataatgcgattcaaatttctcattttccaagaacgctcccttgctgaagcttgcaagggcacggtactcccctctccttgaccctgaaacgtgcagcaagtagataacctcctgatccctgacagtctccgcctgtgttgatgccccgccccctctgctggagtccgagccgccgattggctaggagcacttgagcagcggaagcagctggctcgcgcggggactgcggtgagggggcgagccgtgaagatggcggcagtggtggaggtggaggttggaggtggtgctgctggggaacgggagctggatgaggtaagcggagttgagagacgaggagagactcaacctgagactgaggggaggggcagtgaggtatcgggaggtgggggtcttaggagagaagggaaagatcctgagagggaaggagctgactagggggcgggtgcgtggagagcgaagtcagaggcactcctgacttggggactccgaggcggccttgggagtagaagacttgcattagcctcaagggtgaagatggaggacagagagagaggtcggaggggtgggggtgttaagattttgtgattactagctgggtgtcttagggtaggaccgaagggctaagaggtagtttgagttggagggacgtgaatttcttcaggggaaggctgggcttctactgtgggagaggactctgtctaagcctagggtgggggttggggacacagaccgggaaagagtgctaatccactagtagtatagctttgagttatcttaaagttggaactgttttatttatcgttccattctaagactttgtatctaatgcatgctcagtaaagttttggccaacgaatgaaggaacaagtggatgaataaatgattgtatgccggaattcatgcatttattcacttaataaacattatgacttttgctccgggttctgggccaggtgctagggagacaaggggcccctccgttgaagagcccacagtctagtggtgggagacagacaagaagactagtcattgcattagagatataatggtggcactgagaagtgtgcaacatttcagcttgggatagggaaggcttcccggagttgctgagttttaaacgataaataagtgtctctctcttcttctggatttatgagttccttgaaggtgagctccttgagattgtatgttccctttacctatctaataggcatttaaagactggtgtattaaaataccagtggtccttgaaggaatcactaggaggaaggagatgttgagtgtgaaaggaatgaagggacagggcagagaagcagagacagaggtgaaaagattctgaagccatggagacattgatagctagtggtgtttgtgatcttgcacatgccagcatatgggcaaagacatcacaggaataggaggaaggggattggttgtcagagatagaaccagtgagatctctgaggggtcagaatcttagaggccccttgctgtgtgttgggtgtgggaagagtggggaggattggggatgattgaagatgaggttcagagaaagggagaagtggacttgggaagcaataagactgttgcctggtagtgggatgagttggaggagttggattacctgattgggatcattaaggtgggaggaagggactgagaaattgacaggtgatcacagcagggggatttttaaagaagtgttgtagtcttctacctcccaatcactagagactacaggtgtttggataccagttggttggttaggtggagtggttgtggaaatgacctccaagaccccttctagcttttacatttctgtgattacagttggctgtggttcagtgagatatatttgaagacactttggaaagggtaaatactgtattgaagttcttatttaaggtttgttagtcatggg

SEQ ID NO: 21807 - DNA, 1168 bp, Artificial sequence
  DNA replication origin
gcttaccgggaccttcagtttgtcaggggcggggcttcaaggccgcgggtgacgctgggatttgtagttctctttgccttcaagtacaggccggggtccggaagcggtgataccccttctctttcccagtggccctcaaacttccttttcccgggtccttaagcgggccccgccgacagaggccaatcagagggcagcgcgagggggcggggccatagtttaaactaattgtgcgctcacagcgctggcgcgagcccacgaagaggtacgattccggagaatcgcgaggcagagcgggagcgcgcagccaggtaaccggcgcgggcccgcgtttggcgtgcggcctgggcacccctgcgggtgctcaggcctaaaaggggtgctggagaggccgctgcgagcggaaggcctcctccataaccgagtccgaaagggcagaatctatgggggtaaggtttgtgaggagaggcgcctgagagggaggagccggggggggggggggtgccttaaaggggagggtctgtttgggggcgtgtctgtggaattaaatctgaaggtgactggggtcgggggtatagggcaagttcccgaaaggcttgtaagcgaggggtcgggtcctggaaagtctttgccttttatcgttaacaatagcagtagttatggtagtgcagtagtcagcattttctgagctacaccgtccacaatgacctgccaaatgtttatctttttaatcttctaaccacctgttatactttaaagatggggagcctgaggtttataatgtttagcttggcccgggttacgtagccagtgcgaggttggctctactttgggtttatgggttgggcataaatggggacggggaaggtgctttgtgggggcgcgcgttgtcttggactggtcagtgtattttgagcctcacttttcatatatgtaaacaatgaccttacctgccttacctacttcctggggtggttgtcctggtcaaaacaggttaagtcttttttttttttttttttaatttttgtttgtttttgtttttcatccatggactctcacagataacatgtttcatacacgcacctcggagagtacaaatttatgactataagtggtgtgactgtgtgaagattgtgggtgggcgggagcccactgggttgatgctgcc

SEQ ID NO: 21808 - DNA, 1166 bp, Artificial sequence
  DNA replication origin
ctcggagggagccgctggggcgggggcgagtgctaataatacccgttcgttccgcagccgcgctttacagtttacacagctgtcaccttcgtttctccttaattaataataaaaatagccgccgttcgggagcgcgggctgggcgccaggcccggtgccgagcgcggtacgagctcggcccccagagccggccctcgccacaggatccccattttccagagcgggaagccgacgctcaaccccgcgccgcgacttgcccgaggtcacccagtgggccagcggctccgggaccgaggcgcggggcggggtgaggcgaggcgcggtgctgcccccggctccccggggcggcgcggggcggggcgggcggcgcggagggcgggggcgcgcgcggatggccatcttaagtggccgcctggagcccagggccgctgtccggggaagggggcgccggagcagcccgggaggtgggggtctgcgtgcggcggccgggatcccgggagggaactttctactagacgggccagggatcctcctggcttcggactgctgaaccccctcaaggcccggcctgcgggtgtggggggtggtgctggggaacttggccgagagggggaagggctctgcggggctgggaggggctgcgtgagaggctcgagaacgtcgcacctcgtctgggccccccgccagagtaagaatcttcagaagcctggttagccagggaatctccccgcaggctttgccgggggacggttcccgtggagttgggggttcagatctaagagggggctgcatttcgcaggagttgggggccccgcccgcttgggtggagggaagaggatgggtagggggtggtcctggatccttcgcaggtttggggaactcgatgcagccaagctgtaagggggacgagaggaagagccatggagtggaatcagacctttatggggcttaggggtcatatcattgggagaactgagaagcgctgaattctccagggggtgcctggatcccgaagtgtcggggccaggatggggggactcggatttcgatggggatttggggactggatctcctcgggtgaatgatgggggcaggatcattgtggggtctgggaggtcccgggcccttcgggaaggtgggggcaccgtccccgcaggaggagctgg

SEQ ID NO: 21809 - DNA, 1406 bp, Artificial sequence
  DNA replication origin
ggcggcagccggccctgcgctccgctcctgcccctcccccgccgcctctgaacaaacttttctttctcttcaagttgaggccggcgctgcaggcagcggcggctgcgcggtgaacgaggcggcctgcgcggcggagtgctgagtcccgatccccggctctgtccggcccacggatcctcaagcccgggccccgggcccggccccagcctcagccctgagcgtctcggggcggatggcgcggggcggcgggggcgggcggtgctgagccctgcgcgggccatggcctcggcctgcggggcgccgggcccggggggcgccctgggcagccaggccccctcctggtaccaccgcgacctgagccgggcggccgcggaggagctgctggcccgggcgggccgcgatggcagcttcctggtccgagacagcgagagcgtggcgggggccttcgcgctctgcgtcctgtgagtggggcgggggctccttgcgggctggcgtggaccgggagcgcgggcacggccgggtgtggaaagggcccgggtgagggtttctggggcggtgggacgccagacccgcctccaccccccagagtgggagccttggctttctcctgggtctgaggagggacgcaggggcacttcctgctgtgtgtctgggggcactttcaggagccttgagggtagagaatatggggttctgtggcccagtgtgactgtgatgacgaaaaattcgggcattccccggcagaccccttcaggcatcctccaggtagaagggagcaggggagaggatgtgcattccacgttgtgtgcagtcccgtttggatagggactgagtggtgagcaggagagggagtcggggcagagggactgacggggtgtgtggggatgcctggcagcttccttagggcccctttcggtgctttggggttctgcctggccgtgtatgggtggtgggggcggtgatgggtggtgtagagaggaaggcttggggaagcagaggctgaggctgtatgggaccttgccattatttctgaaccaatgagtgagtgtttgagccctggctctgggcttgagccctggttacctggctgccctagccctgagctatgagtgctgagtgagagcagagccagacttggtgcttctctgagtgggccaggtcctgtggctgtgcctttcagcccagtgtggttggtagtggtgctggggtgagttagcactcttggttttgcagccttctagcggctttgtacctcctgccctgcagtctgacattgagttggcttctgtgggcccagtgagtgggaatctgtgggggctgctttatttagatcagttatttagatctttatttagatctttcttagctctgtgaaccccctcccaaactcctgtcccactgtacct

SEQ ID NO: 21810 - DNA, 902 bp, Artificial sequence
  DNA replication origin
ttctttccgaaccaggatctcactcgagccttgcggccgcgggctgaccccgtgcgttctccgaccctcgtccaggctgactggcccctgtgcccgcaggtctggttccagaaccgccgggccaagttccgcaaacaggagcgcgcggccagcgccaagggcgcggcgggcgcggcgggcgccaaaaagggcgaggcgcgctgctcctccgaggacgacgattccaaggagtccacgtgcagccccacgcccgatagcaccgcctcgctgccgccgccgcctgcgcccggcctggccagcccgcgcctgagccccagcccgctgcccgtcgcactgggctccgggccgggacctgggccggggccacagccgctcaagggcgcactgtgggccggtgtggcgggcggtgggggcggcgggcctggcgcgggagcggccgaactacttaaggcttggcagccggcggagtccggccccgggcccttctccggggttctgtcctcctttcaccggaagcccggccccgccctgaagaccaatctcttctagctgccggcctctggaggctccgagcctgcccccagagacgtccctgcccctccaggacctgacagcccctcccatcctggccacccgcctggaagtccccatccgtctccactccctactgtctcacccctcggtgtgtcctccccaactttggagaccaagtcagggccactctcgtcctcacccaccctctaccagcagagcggagttctttataccgggacctcctccaggagaaccccggagctccttctagcttggccttctttggatgcggtatcacatgaggcctgtccctaacagtgccctcaaagtgaaggtcctcaaggaggatcggcacagcccccttccct

SEQ ID NO: 21811 - DNA, 1467 bp, Artificial sequence
  DNA replication origin
ggcccagaactggttagtgggaagactggcaatgctgatgagacctgacagacatccagggccagggtagacagaggggacagacgggctgagagacagacaggagggaagggtcggaggcacggttgaatgggggtgcagggggagatggagggaacagggcttgggaggagggcgacgacgggggtggggtgggggagggagtgtcttggctggagtattggattatgctttccccttggccgctcttggggctcaggtctccctgatctccctccgcctttatcccgccggctccattgagtaatagggaggacgctcggccccaggctgccgggaccaagacgagggatcaggccagggacgggggaggcgtgtgattcccccggagctggacacaacgggttgaactctgcttctcactcccccatcctttttgccccccccccggcccccctgcacacacccgcagtgccctacaagttcttcccagagccatccggcctgcacgagaagcgcaagcagcggcgcatccgcaccacgttcaccagcgcgcagctcaaggagctggagcgcgttttcgctgagacccactaccccgacatttacacgcgtgaggagctggcgctcaagatcgacctcactgaggctcgcgtgcaggtgcgtgtatgcacgtgtgtgtacgagagtgcgcatggaaggaggtgtgggagcttaatgtctaacacctgggggtaggggaatacaggcagatgcagcccgaaggcagggcgcggtcccagggtgcttgggcagctacgggaggcagcagggcccggacttggaggcccttgggagacccgatctgtttagctccaggctacctccgctctgtctccctcttagggcagaaagttccgagtgatgcttgagaagccaggagggaggccgaggggctagagggggagacccaggggacctcagggccgagctgaggaggagagggggcaggccagtcagcacccctggggttccctaccccggcgctgcagctttgaaaacccggagcccgggaggctgagtttgtggcaggcacagggccgaagagagccgggctagagcagactgttgtctatttgtacaactccgtgtacagatgttcagttggcccgccttgactggatgccctagacaaaaggtttactggcgccctaaactgctctccacggccctggaacactccaggagggaagtcccagagcttcctaaaagaaggaattgggggaagaacttagagtgaggagaacgaaggcagggtcccctccgggagaccaagagtgctgggaggcagcagagtcagcgggtgagtggatcccaagggcaagaacccagggatctggaggcaggggccagtggagcgcggagtgcagcgggctgcgtgcggagggccgaaggcccctccaactagtaagaacccgggcccggttc

SEQ ID NO: 21812 - DNA, 1868 bp, Artificial sequence
  DNA replication origin
ccattcccccagactctcccagctagagttctgtagaacccggaagcagctcctgcatccccaagactttagatccaagtccctgtccaaaccctcaacctcactgagcttctcagtcatctcagccctctgattagagtcccagcctgccctatgtaatcttatcgccttccctcctgggaagactgccggggacccaagtagaagactggggcctaagggccaggcgcggtggctcatgcctgtaatcccagcactttgggaggccaaggcgggtggatcacttgaggtcaagagttcaagaccagcctaaccaacatggtgaaaccccatctccattaaaaatacaaaaaaaaaaaaaaattagctgggcatggtggcccacgcctgtaatcccagctacttgggagtctgaggcaggagaatcgcttgaacctgggaggcagaggttgcagtgagctgagactgtgccattgcattccagcctgggtgacagaatgagactcggtctcaaaaaaaaaagaagaagaagaagaagaagactgggccctaggctggggtttggggaagagatacgagaaatgagaacctggatttggagaaatgaggcccagggtggggagattgggtaccctgagccagatgagggtagggattgggaagaggggagacagcctccagagatacagggttttgagaccagagagatggggataaggtacagagagatgggagcagagatggaagcactggaaatcctaggagaaatggggactcagggttggggagatagagataagtatcaggcgatggggaccaaagaagattagaaatagagatgacgaagataagaatacaaatggggtgctggagacaagaatcaggggagatggaggcctggatgggacaaagatgagattggagacccctggtgaatatgaagacttaaaccagggttacagacagggaagggaagtactgtcagaaacactacctatggggcagtggagactgggatgggtataggaagagagttggggggcagtgttggctttggaggagatgggacatggagaaggtgcctggggaggaagaaggagggcaaagagaagatggaggaagtcttctcaatgggcgcaaagagaagatggaggaagtcttctcaatgggcacaaagagaagagtggctgagaaatggaaagttgaagagagattcaaatggaggaagattaggaagaggagagggggacatctaggggagaatgggggtcaggggagtggggcagaattgaagaaatgaggcttgggaaggggagaggtggatgggtggagggagccaaatctgtatacagctgagagccggtgggaaggctggtggtagggctgaaaggagggccggtgggagggtctctgttgcagagccttggcccagaactggttagtgggaagactggcaatgctgatgagacctgacagacatccagggccagggtagacagaggggacagacgggctgagagacagacaggagggaagggtcggaggcacggttgaatgggggtgcagggggagatggagggaacagggcttgggaggagggcgacgacgggggtggggtgggggagggagtgtcttggctggagtattggattatgctttccccttggccgctcttggggctcaggtctccctgatctccctccgcctttatcccgccggctccattgagtaatagggaggacgctcggccccaggctgccgggaccaagacgagggatcaggccagggacgggggaggcgtgtgattcccccggagctggacacaacgggttgaactctgcttctcactcccccatcctttttgcccc

SEQ ID NO: 21813 - DNA, 1304 bp, Artificial sequence
  DNA replication origin
catctctctggtctcaaaaccctgtatctctggaggctgtctcccctcttcccaatccctaccctcatctggctcagggtacccaatctccccaccctgggcctcatttctccaaatccaggttctcatttctcgtatctcttccccaaaccccagcctagggcccagtcttcttcttcttcttcttcttttttttttgagaccgagtctcattctgtcacccaggctggaatgcaatggcacagtctcagctcactgcaacctctgcctcccaggttcaagcgattctcctgcctcagactcccaagtagctgggattacaggcgtgggccaccatgcccagctaatttttttttttttttgtatttttaatggagatggggtttcaccatgttggttaggctggtcttgaactcttgacctcaagtgatccacccgccttggcctcccaaagtgctgggattacaggcatgagccaccgcgcctggcccttaggccccagtcttctacttgggtccccggcagtcttcccaggagggaaggcgataagattacatagggcaggctgggactctaatcagagggctgagatgactgagaagctcagtgaggttgagggtttggacagggacttggatctaaagtcttggggatgcaggagctgcttccgggttctacagaactctagctgggagagtctgggggaatggggaaatacaagtggcttaaaaacccgggcccctttattgcgggctacgggatctggttttggtggctacagaagggttcggtcccaggcagcgtgggtccaagacagggcaggaggggcctgatggccacgcgagctctaggaagcttcccgtctgggcagctcagctgcctggagaggtccttgctgggggtcatgcatctcgtggggcagcggtgatggggtggggtgataagtggtgatagggctgggctgggagcctttttcaaagatccagcgcttgtagaggtttagtggtcagtctttgcaggtggtgaggggaaggcctggtaaggggcccagagctggatggggatatatttccttgacctgaagggcacgagacagagatttggcaacgagaaaaaggaacaggagagatgagagggtgaggctcattcctgcggaggagaacctcgtattctgggggtctctcggggcattggagggtctggccaaggcaggaatgggggcggctgagggggacagtcgcattcacttggcgagcgggcccagggattctgcaggaattggagggagggttgggccggggctg

SEQ ID NO: 21814 - DNA, 1484 bp, Artificial sequence
  DNA replication origin
aggttcgagcgccaggctccgaggacccgaggccagctctgagcgcccgagagtccgcccgccccgtcgcggccgcactcagcccgggtgcaacgcaagtgcagccagcccggcccgcgcgccttttaacgcgcaggaccccgcggaggggggcggggcggggcgagctccgaaggggcggggcctaggaggcccagacaccgcccaaagccgccccgacccccaccccgaagggtccccgccgccgtcttagggctcagaggtgtggagctgggatgcgcgggaccctatccccggagtccctatcctgccccaatccggaccagaccttcggtctctacacagcgtccgaggccagagggtcccgacccttttcccgggcctccccacctgcggccccgcggaagggaggggaggcaggcctggcggcgctcgtgtgaagaagttaattcaattcgctctgataaccgagttattccgatctggcccctcagccccgcccccagcgaggtcccatcccggcggagactgcggaggcggcccaggaagggggatggagaccgggaagagacggagcctgggatggggacagggaagggacgtggatagacagaggaaacagagaccgggagagaaaggggcagaaacagtgatggagacagggacaagagatacaggtacacagagggagacaaggacggaacatacacagcgaaagacaggatggagcggggacagggcagagacaggagatgagggtaagagagagacaggatggagcggggacagggcagagacaggagatgaggttaagagagagacaagaggagacagggagacagggggacgagaaagagagtgagggaggcatggagacagaaggggtcgggatgagacatggacggcaaccaggactgcggtggagagcaagggagggatgagacaaaacagaggcaggaatcgtgagacagacacatatgcccagggacagtctgagagagacagggccagggacagccacaagcgcgggagcagaggctgagagcggagagaaaacgcctccggggagcttagacacgagggctggagcgcagaggggcccagggatgatgctggaggctctggggtgcggcctccacggggctgcggagagggagggtcgtgggagccaggtccctctaccctgacttgtcccgaggcccacacgaccttgcaccttcagggcccgcctgcctctccccccgttccctcagctccatctgcagtatgcgaccctctcctgtgaccttgggctcaggatgcgatggatgtcagaaagggaacgtaccccgtgacctctttattgttcttcagtctcttacccctgttctccagggccccccgctttttttctccagggaaaccacctagactcagtctgcacctggcccagacatccctgcacagattcagtcaccagctccctcgtgctgtgggacagcggg

SEQ ID NO: 21815 - DNA, 1003 bp, Artificial sequence
  DNA replication origin
agggaggtggggggtcagccccccgccaggccagccgccccgtcagggagggaggtggggggtcagcccccccgcccagccagccgccccgtctgggaggtgaggggcgcctctgcccggccgcccctactgggaagtgaggagaccctctgcccggccagctgccccgtccgggagggaggtggggggtcagccccccgcccggccagctgccccgtccgggaggtgaggggcacctctgcccggccgcccctactgggaagtgaggagcccctctgcccggccagccgccccatccgggagggaggtgggggggtcagccccccgcccggccagccgccccgtccgggagggaggtgggggggtcagcccccctgcccggccagccgccccgtcccggagggaggtggggggtcagccccccgcccggccagccgccccgtccgggaggtgaggggcgcctctgccgggccgcccctactgggaagtgaggagcccctctgcccggccaccaccccgtctgggaggtgtgcccaacagctcattgagaatgggccaggatgacaatggcggctttgtggaatagaaaggcgggaagggtggggaaaaaattgagaaatcggatggttgccgtgtctgtgtagaaagaagtagacatgggagacttttcattttgttctgcactaagaaaaattcttctgccttgggatcttgttgatctgtgaccttacccccaaccctgtgctctctgaaacatgtgctgtgtccactcagggttaaatggattaagggcggtgcaagatgtgctttgttaaacagatgcttgaaggcagcatgctcattaagagtcatcaccactccctaatctcaagtaatcagggacacaaacactgcggaaggccgcagggtcctctgcctaggaaaaccagagacctttgttcacttgtttatctgctgaccttccctccactattgtcccatgaccctgccaaatccccctctg

SEQ ID NO: 21816 - DNA, 2711 bp, Artificial sequence
  DNA replication origin
acctccctcccggacggggcggctggccgggcggggggctgacccccccacctccctcccggatggggcggctggccgggcagaggggctcctcacttcccagtaggggcggccgggcagaggtgcccctcacctcccggacggggcagctggccgggcggggggctgaccccccacctccctcccggacggggcagctggccgggcagagggtctcctcacttcccagtaggggcggccgggcagaggcgcccctcacctcccagacggggcggctggctgggcgggggggctgaccccccacctccctccctgacggggcggctggcctggcggggggctgaccccccacctccctcccggacggggcggctggccgggcggggggctgaccccccacctccctcccggactgggcggctggccgggcggggggctgacccccgccacctccctcccggacggggtggctgccgggcggagacgctcctcacttcccagatggggtggctgccgggcagagaggctcctcacttctcagatggggcagctgccgggcggaggggctcctcacttctcagacggggtggctgccaggcggagggtctcctcacttctcagatggggcggccgggcagagacgctcctcacctcccagacggggtcgcggctgggcagaggcgctcctcacatcccagatggggcggtggggcagaggcgctccccacatctcagacgatgggcggcgggcagagacgctcctcacttcctagatgtgatggtgaccgggaagaggcgctcctcacttcctagatgggatggcggccgggctgagacgctcctcactttccagactaggcagccaggcagaggggctcctcacatcccagacgatgggcggccaggcagagacactcctcacttcccagacggggtggtggccgggcagaggctgcaatctcggcactttgggaggccaaggcaggcggctgggaggtggaggttgtagcgagccgagatcacgccactgcactccagcctgggcaccattgagcactgagtgaacgacattccgtctgcaatcccggcacctcgggaggccgaggctggcggatcactcgcggttaggggctggagacccgcccggccaacacagcgaaaccccatctccaccaaaaccagtcaggcatggcggcgcgtgcctgcaatcgcaggcactgggcaggctgaggcaggagaatcaggcagggaggttgcagtgagccgagatggcagcagtacagtccagcttcggctccgcatgagagggagaccgtggaaagagagggagaccgtggaaagagagggagaccatggaaagagagggagactgtggggagggggagggggagagggagagggagagggagagggagagcagagatgaggtcttgagtggtggattagctttttgatgtgttgctggattcaggttgctagtactttgttgaggatttttacatctatgttcatcaaggatattggcctgaagttttctttttttgtgtgtctttgccaggttttggtatcagaatgatgttggcctcaaagaaagagttaaggcggagtccttccttctcagttttttggaatagcttcagtaggaatggtaccagctcttcttcatacatttggtagaatttggctgtgaatttctttggtcctgggctttttcttgttggtaagctttttattactgattcacttttggaactcattactggtctccaaggattcaatttattccttgttcaatcttggcaggttgcatgtttctaggaatttaaccatttcttctaggttttctagtttgtgtgcacagaggagttcattgcagtctctgagggttttttgtatttctgtggggtttttggtaatgtccccattgtcatttctgattgtgtttatttggatcttctctttttttctttattaatctagctagtggtctatcaatcttatttattctttcagaaacccaagtcctggatttattgatcttttgaatggttttccacatctcaatttcattcagttcaatgtcattcagttcagctctgatttgggttatttcttgttttctgctagcgttggggttggtttgctcttgtttttctagttcctctaggtgtgatattaagttgttaatttgagttctttctagctttttgatgtggacatttagcactataaacttttctcttaacactgctttagctgtgtcccagagattctgatacgttgtatctttgttgtcactagtttcaaataatgtctttatgtctgccttaattttatttcttacccaaaagtcattcaggagcaggttgattaattttcatgtagtttatggttttgagtgatcttcttagtattgatttctatttttattgtgctgtggtctgagagtggttggtatgatttcagtttttttgaatttgctgataattgtcttatggttgattatgtgagcagttttagagtatgtgccatgtgcaaatgagaagaatgtatattctgttgtttttgtgtggagagttctgtagatgcctgttaggtctatttgatcaagtgttgagttcaggtcctgaatatctttgttagatttctgcctcaattatctgtctaatactgtcagtgggattttgaagtctcccactattattgtgcga

SEQ ID NO: 21817 - DNA, 716 bp, Artificial sequence
  DNA replication origin
agagcattgcaaggcttggtgctgtgctggtgagggcggacgtcatgacagggagtgaacccagaccatgaagggggcttcctggaggagggtgaggtgaggcaggtcttggagtttggatgaggaggacgggaaaggacttgaggacattgcagatagaccaggaaggcaggctgggaggtgaggaggtgcaggaggctgtgcttctcggggctcagtctccttgagacaggggtgggactgaggggtggattggttgggggtgtgctgaggaaggatggtgagtagatgctattttcataaccttggttgcagtctcttgggagggtgccaagtccaggcaggtgaaggagttgaaggtctcctccgagcaggagctaagccctccccctctagtcttagtttttctgtccataaactgggatgatgaaccccgctggaggtggtgagggtcgggggcagagcagagcagccattatgctcaagacaggctctggactgcacctggggagagaagggagaatcagggttggggcaggaatgaaggaaggggcatgggaaatcaggggaggaggcagcatgggtggtgtgggaggatcaaggatgtcagggcaggcctcttacctgactgaggtttgcactcctgggttccctgtcctgaaacacaaagcaagagttgtccccatacagcgaatccctgctcttcagcactcttt

SEQ ID NO: 21818 - DNA, 736 bp, Artificial sequence
  DNA replication origin
aactaagccagcttttgtgacccagggtagggaatgggatagattatcagcaattaagactgcccagggctgcatgggcattgtacctagggaagccatggggacgggtcctgggtgagcttcctagccctcagtaattcccaagatgggaattattccctgaacatggggaatacctggctgaaccaattactccctgggctggttcctctggctacttccagccttgggactgagctcagaagcagcttggaggagaggtctctaagcaggggtgggagctgcccctaaggagggcaggaggcctgctgtggctctgggcctatcctctcatcctcagtagagattgatcaggaagccctgcctggccctgggtccccggggaatctgggaggaggaccagaggtctctgcaagcctcaccttcatgtggtacatcatcatctcattggccaggtggctgcgatactgagcctcattcacttttttgtataggagagactaggggaaagagggaaagatggggctcaaggaaggtggctgtgaaaatttagcaatgcccaggactgggatgaaggggtcaaaaagacaccccacttcctgtcccattctggccccagtcaaaaccttcaagctccagtccacagtaaagaccccacccccactttcatccagaccccgcgccggttcctcctcatcaagttctcccagcatttggtctggccctttgcactccc

SEQ ID NO: 21819 - DNA, 845 bp, Artificial sequence
  DNA replication origin
ttaaacctcgggccgctccccagcgccgccggcggactcccggacacccctagggccacatactccctccacaccctctcacctcatcatccaccacgcccccgtcgaacaccttggccaccagctcattctgatccagcaggaacacagagcagctgtggagggaggggtttggtcctctggggcctgacaaccccctctgatcgccctcacgtcccataaggaggcaaaggccggatttccgaggcctgggaggagtgctccaaggtaagacactctgctcagggctggctggctccagaaacgtgtccattcaagtgttttgtttttttttttttttggaagcacctactatgtgccaggcactgtgataggagctgaggatccaaagccagccctgtccctgctgtattggagcctacagtctagcgagggagacaggcatgaaataaaggatccctcaaaaggtgatgaagtcccgcagaaggcagagaaagggaagtgggtggggcaggaaaggagatgatggggactgaaggccacagcctctctcgccctgtcccctgggtagagtcactcacatctctgcgttgctgaggtttctggcctccgtgatgatctcctggagcaggacagagacgtcatctggggaagggagaagaccaggcagggtgagaccaggctgccaagacctcccgcctctcctctgcaaatgccagcccccatgcccacacacagccaggcagagagaacagtgcactcacccaggtgggtgaagaggttctttgccacttggagaagagcctggaatgaaggaaatggagatcataggggggtcggggtgt

SEQ ID NO: 21820 - DNA, 1260 bp, Artificial sequence
  DNA replication origin
tagagaacgcgagaaggacacacacaggggctcagagaagtgcaggggacccagctctttccaggctgttggccctaccagcagagaacctttccctcgattctttttccattaaacaaatagttgttaaagggacggaactgccataaagtccacgcctgttcctctctccactctgtgcccatctgtccttatcttcagtggggcaggccatgaccacccaggcacccagtgctgtcattagccttcgcctgggcagctggccctgggttgtggagttccccacaacccccagcatgagcctggaaggcagggtgggggtggggtagtagtaagggaggaactggagaggagcagggagcggctctgagttgagcaaggagctatcgggggtctgagcagtggacgaagctcccgctcccatgtgggtgggggagactcagccttggcacattccccctcgcagtctgtgggcatctttggagacttcaggaggacagcagttctgggagggctatggcagaggaaaggggctcccatgggggtaggttgaggtgagtgtgggctatggggtcccgcaaagccgggggagggcaggctgcagagcaaggtgccgaggctgcctaagaattgagggtccttggaagccccagtgcttgggggcatctcggcttatcaagattggtctatcccagctcagcctctgtcttgtccagggccactaagatgataggaccctcactgagaccaggtttccagtgtcacagtctccttatgtggagagttttacccaggcagcatgatcgttctgaaatcatacctgaccattaccgtccctgctcaaatccctcccagggcaccccctgccctcaggctcaagcccagctccatagggccctggcccctgtctagccttgctctcggctgtccagtcacaccaacctccttgtggccatacctttcagcaggcacacaatcttctcgcctccaagccttcacaattgcaattccctggacatcctttcctgtctgcctcgataacctctgcctgtcctttaggactcaactcagatgtctccctctacaggaagccttctctgactccatcacaccctgcacctgagtgggctggggcctgctcttcctgcctttggcagagctctcatctcccgactgaagcgtgggtctgtacgttgatctctgcgtgttcttggcctcctcaagtgaggcatatgtctgacccctctgctcatctcagcc

SEQ ID NO: 21821 - DNA, 1262 bp, Artificial sequence
  DNA replication origin
gaggtcaggagttcaagaccagtctggtgaaaccccatctctactaaaaatacaaaaattagccaggcatggtgacaggcgcctgtaatctcagctgctcgggaggttgagacaggagaatcacttgaacccagggggcagaggttgcagtgagccaagattgagccattgcactccagcctgggtgacgagtgaaataccatctcaaaaaaaaaaaaagaaaaagattgctcaggttgcagaatatgtatgtgtgcgagtgtgcatggtgcgtggcaggggaggggagataagttagggggaggcagagagaaggtgggtagagcaactggaggctcctgcagctgcccaggcaggagatggtggtgcctgtgttaatggaatggcagaagagttagagatatggagcaactttggagatatttgaaaacagaaatgacagaacttgctgataaatgagaagatgagcaagagggaaaaccagagaacaatttccagggttctggcttgaagaaccaagcgatggatggtgaagatgtttctgagatgggcaaaggcaagggggagggtcagcactagtggggtgggaggacaaggaggcagaaaccgagtgagctgttttggatgtgttaagggaagcatccaggtgaaggtgtgcagtgggcagcggggccaggctagggatacatctgggagtcgacaggcatggggggtttgttaaggtcgtggacctggctgggataatggagagagggagcttggcaacagaagaggtggggactgaggaccgagccttaaactctgaatattccattgtctagaggccggggaggtgagaaggagcagcaacgagacagaggaggagggccagggaggcagaggagaccaggagtgtgaagccagaagccaagggaggaaagaggctcaagtgggagggagggtcggtgtgtggatggtgctggcccacaggtaagatgggaaccggaagattgtgctgtgctgggcactgtgggtgagtcaggctaatgggagccatttcagtgatgggctggagccagaagtcagactggcctgtgtaggatggtgagggaggtgaagacgttagcctggagagccctttggagacgttgggctgtgagggctgcagagaaggacatgatcgctggaaagggagattacatttttttattatgggtgattctaagcagacacaataccagagagaagcatataagaaactgccatatactcatcaccccagt

SEQ ID NO: 21822 - DNA, 770 bp, Artificial sequence
  DNA replication origin
tgtaaacacccaggaggcagaggctgagactgagtctcctttgtctctcttgggcccatgtggtgcttggtataggcctggtatatggtaggtgctcaataaatacttcttgaatgaacaagagtggctgtgagtagggctggagtagttccaagaaggggcacagttgggttgggcggtcttggagacttggaggaggcaaccttagaactttgaaggatggagagggtcaagggcaccaaccgaagaagccagggaccagctaggcagtcagagaggtccatgaggtcagcttctgacagcagcagctaaggacaaccaggaccagaacaggactgggaaaaagcagatagaggaggctggagcaaggactcagccccagaggaggctgcaggaggttggctcatgctcagaacccggctccaaaacactctgcccatgagtgctgggctgaggaaggcttggtgccagagtcagggtgaggctgaggccaccagtgaatatgtgggcccagctgcgggggtagcactaggcaggggcgggagccaggttggagggggtattgccattgccgctgcaggtggagtagggcttcgctggggaaggagcagcttgtgcgagagtgtgggcaggagtgggaggggagaaggctccgagtatacgagcatagcttaccagcaagtcctggggtgaggctggaggggccgcgctgtaggcagcacttttcgggcccttatctaacattctcaagtgagtgctcctagctgcca

SEQ ID NO: 21823 - DNA, 1081 bp, Artificial sequence
  DNA replication origin
acaagcctccacacaccaggtgcagctcctgtcacccctacggtcaacccaaggagagccagagattccagtagtcgtgggcaggtatccagtgcccaggcgagaagagggggacaccagcagggaacccagaacctcctccatgccagactgtgccctccccccagctcacagaaggagtgcctcaggctgtttatttcctagcagggactagcagggatgggtgtctcatccccctccccctcccagtccccaccacacgattctgaagctgccaaatcaaatcagcccctgcacccgcgccaggctggcatggcggccagcagctgacgggaacgaagccaggctcagaatatcccaccgcctgtccgatgcctgagtaggcttgttgggtgggggtggggaggggcaggagcctggcagccaggccctgggcagtgcccctcagagaggctgggggtttggaatgctgcagggtggtgggcttctggagaatgagtgagcaggtctctgttgtgtctccaggctgctgtggcagtgtctccaccgctagcattccgggaactgtggaagtggtgctggtaggatacaggtcgggggtctgatcccagtccagatgactgggcgccaggctggggtaggggggctcccacatggtctcacattcatttgagactcacagcacccaggttggaagccccttggttgtctgtcagtaaaggcccaactcactgtggaggcccagtgactgtgtgaggtggacattacggatcccattttacagacagagaaactgaggcttagagagggctagtagagctccctggagagaagcagaagtggaggaggcctcagaaagagtaaagaggtggtcatttccactccttaggagccctaggtggaaagaaggaatatggctctgttctcagagtcaaggaacagagaatatggcagagccagaggtgcccatgggaagcagagaacaaggagggagtcttgggagagagcagggtgcaagcaggcaaggctccctggaggagggggccatccgtgggcttgctgggggctaatgggaggacag

SEQ ID NO: 21824 - DNA, 877 bp, Artificial sequence
  DNA replication origin
ggacattagtgaacacctgctatgtgcccagcacagagggtgggaagagatgagcaggatgcaggccttaaaatccccacaccttcctccaagcctgagcaatgttgcatcagccccttggcaggtggcacagacctaggtactagggctgggggaggggaggcggagaaacagggagtgatgttggtagagtgtgtggggagggcaacgagggagataaactcaggggccatggtgatataaagcagggacccctatttcagcccagagtgggagggaggggcatgttggggagcttccaggaggaaacaaatctgaactgagagctaaggtcaagccaggagaaagttctggacagaggggagagaatggttactgtgaaggttcgctggtggcagacagagggaggagagcctgtggcagcaccactccatggagcaggcccctgggtgccagccggctgggtccggggggatggggactggtaaagctggcccagccagatggtgcaggacttgtaagccatgttaaggactgcggacttattctggagggaaattgaccctggggaagagttgagagaacggatatgacagatcagatctgcatgttcaatagctccctggaccatggtgtggagactgaaggggaggctggtgtggtccaggtaagcgggggtgatgaggcctggacagggaaatggctgaagaatggaggggaggggacggagtggccagggctggtggagggagctggacagctgtagacgtgaagggcaagggaggagaatgctgccccacccaggtgtctggatgggttttgtgcagtctctgagatgtataggagggaagacaggggttagtggcagatgcctggg

SEQ ID NO: 21825 - DNA, 2182 bp, Artificial sequence
  DNA replication origin
ggaacctaccccagagtccaaatctctccttccatcagggcttcactggctttctctgtgggacccactccccgatcccttccctccctcctgtgttggagatctccgagtctttcctcgtggggggcccctcctcttgttcctctccaggtacagtggtcccactttattctctgggcttctcctctggtttctcttcaagtatttctgggctctctaatttggtctgttgccccatgtgcccacctctcttggtctatcttggtctctctcctgtttctctaggtctccatcttcgttttggggtctctttctgcagccaccccttcctcttgtatctacctctgctttgtggtgaggagggggcaggctcagagagcagggctagtgtccctgggacacccccgccccccatgttctcaggcatggcatggtgtgggctcaggtggaagggcctaaatgtggagtgtgctgccctcaggcgatgcccagggatctgaggtggtggggggatgatgtggtgggcactggcttttgtaacttataaagcccctcatcccagctgccctggtcttgacgggggcggctagggcttgagatagggaagagtaaactgcaatctggtgtcaacctgcggtgggatgtgtccaggctgggtgggtctatagtgtatgtgtttgtgtgagtgttcctgtctgtgtgtagcacgggctgggttgcatgtgttgggtgtgtcttgtgtgtaatcatgtgtgttgtgccgtgtatgaatgtgtcatcgagagtgggattatttgtggggagattatgggaattatgggtctatggcattgtgtgctatgtgtggctggggaggcagtgttgtggctgtggagtggtagctgggtgtgtggctgttgtgtgtgtagagaacttgtgtgtatgtggctgtatgtctgttattgtacagtggagttgttgtagggacagcttgcatacaggattctatatgtagttgtgtgtgttactggctgttgtgtgtggccaggaagggccactgcaggggcctgatggtttccactgggtgtcttgtcagagaggagttggggcagggggtgccgtgtgtgccaatgtgtttgcagcctaggtggctggcttagagtcactatggcacatcctgggattgcttgggtaatatatctattaggacctgagtgctggtgtttgaatgtcatgtgtctgtgtggtggctgctcccgcgattctggacaggaaagggttgcagccagggctgaggggtctgaggtgaggagccagttgacaagtgtgtgagtgtgtgagtgtgtgtgtgtgcgtgcatgtacacgtgcatatgggaatggggtggggtgggaggaggcagtgggccagcagcgctgtctatgctgaggggctgtgtgtgcccacaaacgtgtgacattaggtgtgcacattatctatgcaggttgtgtctgcatgtgtctctgtgtctaggtggcgtgcgtattgaatttaattggatgcatacacctgtggctggggaggtgagaggtgtgtgaggtgcgtggtgggagacggtgtgagtgtggtgtgaagtgagggtgtgtgagctgggtgactttttggtgtgacgtgtgaattatgtgatcttttctccccatgagctgtgtgtgcctgtggtgaggagtgagtggaggatggccagtgagctggcggtgtgtgtgttgggggtgttgaggactgtagaatgtgctgcggtggcagtgtgtgcatgaggtgtgtgtgaggaatgaggtctgtaacatttggggcgtgtggaatatagtgggtgtccccataaatgtctgtggagtgacgcatgtgtgcaaaagggcttggctgccatcctgttcttgctcccctcctgatcaggtccctagagatgccctggaatgttctccatgcccccccaaccccagctgcccctaccctttgcccttcatcctccttgccttgaccaagccctttgttttgggtttccggcggagcaggcgctggacaggcgggcggcaggcaatgtcgtggtctgagaacctttgttctcttagtttgactggtgtttggggccttggtttggaggagggtgtggagaggatgcacgtggcagcaaggtcactgtgtttactacaccacttcgtgctccgca

SEQ ID NO: 21826 - DNA, 1201 bp, Artificial sequence
  DNA replication origin
actctcgatgacacattcatacacggcacaacacacatgattacacacaagacacacccaacacatgcaacccagcccgtgctacacacagacaggaacactcacacaaacacatacactatagacccacccagcctggacacatcccaccgcaggttgacaccagattgcagtttactcttccctatctcaagccctagccgcccccgtcaagaccagggcagctgggatgaggggctttataagttacaaaagccagtgcccaccacatcatccccccaccacctcagatccctgggcatcgcctgagggcagcacactccacatttaggcccttccacctgagcccacaccatgccatgcctgagaacatggggggcgggggtgtcccagggacactagccctgctctctgagcctgccccctcctcaccacaaagcagaggtagatacaagaggaaggggtggctgcagaaagagaccccaaaacgaagatggagacctagagaaacaggagagagaccaagatagaccaagagaggtgggcacatggggcaacagaccaaattagagagcccagaaatacttgaagagaaaccagaggagaagcccagagaataaagtgggaccactgtacctggagaggaacaagaggaggggccccccacgaggaaagactcggagatctccaacacaggagggagggaagggatcggggagtgggtcccacagagaaagccagtgaagccctgatggaaggagagatttggactctggggtaggttccaggctgaggactgaagtccagatgtttgggtgggaatctgagcgggtgtccagttgaggcttggaatggaggtttggggctttgggtgaggccggctctgaggtggagtcctggatgacagctgggggttcaggtgctccaggtgtgccgggagccccacatatatggtgaaggttccgaggcgtgggcagggtccccactaatctaaggaaagggaattcgaggcttgggcacagctctcagtgtgcactgcggtcccaccgtggactggaagctcagtgcttggggtggagccccggatccgaaaggagttcagagtctggggtgacgtgtggactgagagctggggcttcaagggctcttggtctgcgctgccgtcccagcacaggagtagaattcagaactagaggagggg

SEQ ID NO: 21827 - DNA, 1287 bp, Artificial sequence
  DNA replication origin
aagaacaagtaactctggccagtggctgtaacagatacctcccgggcacctgtatctcacccagccttgtccagagcccaggactgagccagtgacacatgctcagaatttaccaagagacttgtgcactgagctcagactcagacctagtccttccaacagcccttacatgggtcatccccttttacggaagagaaaactgaggccaaaaataggaagggaggccctgtgggggccagaacctttacacatcttagcccaggtaattttttctacagtgttaataagtaggatgaattgcccctgtttggaagattcagtaaaatacattgacttggcccagatcacttactctacacctctcctaagtccccagatgtgactcccaggaaagacacaaaaaagggctacccagagggataaggtagtaaccagggaagccctcccagaggaggtgggccttcaaatggcccctaaatgacaggcaggagggaaggatctgggagggtattgggggtggggtggcatgggcaaaggcctggaggtgagagtcagtcagtcattgatgtgagaagagcaagaagtagaaatgtaaggaatggtggggaggggagtcagagctggatgaccaagcaagggttcagctgtagagggtctggcccgccaggctcagggctcgggctttattgtgctggtggtagggagccactgagggtgagtgggggagagcatgccagagcatgcctcagaaagaaaggtgggagaaacgctggcatggagggctgccccctgagttggtggggtggccgggctctgccaaggctatgtgccagctgcctggactgtgtccaggaatgggcacaatgactcaacattgagaaaatcactccccagggagaaagggccctgatgaatcacccagctgaggtggggaggctgggaggctgggaggctgggaggctgggagctcactgagtcaccgtccaagagttggtgaggaggggagctgcagagagaggggccggcagtgcagttgacggggggattcaggtcagaccacattgagggctgtcgggggactctaccttcccgccattcccgggtttggtcctcctggccgtcctgtgagggagatgagaaaactgaggcccaggaagtggggggaggggatccgagcaaggtcatgcggcaagtcgctggcaaaggcctagcgagacccaagcgcaccctccagtccagacacgtcctgccgccccaaccgctttcatgccaagcagaggcctaaga

SEQ ID NO: 21828 - DNA, 678 bp, Artificial sequence
  DNA replication origin
gtgtgagcggggctggggcctgagggagatggaggagtgggaggggcaggggccggggcatggggctgcatctggcatggactggagttcattcagattgttccatccagagggaccttggggacagttgtttctctccttccttccccctttcttttcattcctccatccctcctctttcccctcctcccacttcttctgagccttgttcctgtttgaggccctgggctgccaacccttttcccctcctctgggaataaagccaggctcagccctcaccccggggagctgagtgaggtgggggacagccaccttctggtctaggcctcagggaaggtgtgtggggaccactgatggcttggtgagagggcctgacccagctgggccaggggctgtgcaagtggctgctgaccctgatgagtggggaggaggttttcagtagagaggcagggtcagagatgaagcagcgtgggatgggggagcgacagatgttcagagtggcctaagtgtgagatgcggagcagagaacgtgggaggaatcgaggctcgagaaggactgggagagagtggatgcagtgaggagtttgaagtttgtccctgggggaagaggagccctgaagatttttgttgttgcttctttgatttttaaatgggagggttcattttagagatggggaa

SEQ ID NO: 21829 - DNA, 674 bp, Artificial sequence
  DNA replication origin
tcaaagtgagggtggcagggcagtcccttagggaaagggctgcgtgggagacagggatgagcttcctgcccatagtggggaggcatgagcaggggctggacagcctggttagcaaggctgtatacaaggtacctaccctagtgaggaagttggttgcagattatcttgagtcccttcaagctgtagctgccatggggggccagagaagaacgtgcctcagctctcttgggcctggggaggattgagtccacagagtgctcctggtgtcctgggcagtggaaggtgcaaggttagactgtgcacctggaagcagagagatcccattccctggagaactgaagggaaatttgtcttcctggaggtttggggctggaggcaggggctggatgggaggacactctggggtggagtgggggtgggatggggaggactgggcaagtccgaggcggctctgctgttcagcacccgcaggaaggagcagggaggcatatcctgaatcatgcagggctctagggtgggaggcccatggttgtggggctcaaacatgggctctggttggggcagaggagaggcttcctggggttggggtctgggcaggaattggggtagaaaaggagagaagcagcaattgggtaccacctccttcccaggtcaggtaattcggagttgtctta

SEQ ID NO: 21830 - DNA, 970 bp, Artificial sequence
  DNA replication origin
agtaggtgatgaggctggggtcccatggaaggggctgctggttggaggaggggctgataatgaacctgaaccggttcttcaagggctgagggtgtatgtggggagggggaggtctgccaagtagttgggaggagctctcggggctgcaataggctggttcaggacccggagagggagagtgtcttggcccaccaaggctatgtgtgtgtgaaggaggtggggagggggaaagatggagaaaatatgaataagagtggccctggagcaagagagggttagaggtaaccaccttccatggaattgggaattggggttcagggacaccactttatgaaactttaccccaaagcgtctgtcccaggatagggttctacggagccagatggaatatggtgccagcctcgtgtgtgtccacgtgcaggggggtgcatgtgcaagtgagtggggggcgccgtggcgacacccctctactaagggctgccgaggtggtaggcagggtatgtgtgtgtgtgtgtgtgtgtatacatgtggaatgtaagggacatgttgggtgtagaggggcctgtagagctctagggtccttggtggttggatgtaaagcagcctgtcagagtttgtgatcatccctgtgtgagtgagagtttattcgcatgtgtctgagtgtgagtgcaggttggtctgcatatgtatgtaggtgtgtctattaggttgagtttgtatattatgtgtgttgtgtctgcaaaatagagtgaatcagtgtgcattttttatctgttccatgtgcatttatgtgtgtgtatttgttagtgtgtgaataatagcattgctgtgtgtggaggtggatgtggctgtgtgcgtataagtattctggtgtgggtgtgtgatcatggtgctagtgtgtatatcggtgcttctgtggctggtgtgtgtgtgtatctatatgtgtgtattcatctgagtgtgtgtgggt

SEQ ID NO: 21831 - DNA, 879 bp, Artificial sequence
  DNA replication origin
cctcccagagccagccgagcagcagaggcagtggcagcgggagaggcgggagcagcggggcagcagagctggattggggtgttgagtccaggctgagtagggggcagcccactgctcttggtccctgtgcctgctgggggtgccctgccctgaactccaggcagcggggacagggcgaggtgccaccttagtctggctggggaggcggacgatgaggagtgatggggcaggcatgcggccactccatcctctgcaggagccagcagtacccggcagcgcgaccggctgagccgtgagtatagtgaggggctggggtggtgagcggctgtgagaggtgccacagacagggtcctgggagtccctccaaggagctggggttggcatggagctgagccacgtggaaggatcgatcctgttcctgggcacccctcctccccgcgttgccagactgcagcctggggtgggggcaggttacctctgagcagaatgagggtgtctaacgtcaacctagtaggtgatgaggctggggtcccatggaaggggctgctggttggaggaggggctgataatgaacctgaaccggttcttcaagggctgagggtgtatgtggggagggggaggtctgccaagtagttgggaggagctctcggggctgcaataggctggttcaggacccggagagggagagtgtcttggcccaccaaggctatgtgtgtgtgaaggaggtggggagggggaaagatggagaaaatatgaataagagtggccctggagcaagagagggttagaggtaaccaccttccatggaattgggaattggggttcagggacaccactttatgaaactttaccccaaagcgtctgtcccaggatagggtt

SEQ ID NO: 21832 - DNA, 673 bp, Artificial sequence
  DNA replication origin
cccttggcattgccaggtcttccctgagccaggatgggaaggaagagtaggggttacttggtgaagaaggcaaaagccctgtggtgggcagaggcacagccctttcaaggagacgagggcagtgagggggtggtgacatgggtggggctggagatcgaggcagaggcagccatgcagggcctagcagcaatgcaagaccatcggagggctagtgaatggcagtttaagaagattgctactcgctgatgggtggggagagggaaattagagcacactttgaaggccatggtttcgtccaaggagaaggcggtaatgtgggctggggtggcagcagtggagatagacagagcagagagattcgacgtgtggattgggagagggaggaggggtttgtttctgagttgagcagcctggcgggtggtggtggtgtttccctgatgggggccacagggagggtgggatgggaggcagggggtggagatcatgggcatggttttgcacatgttgaatttgagcagctttggtcacagccaggtgtgtcaagcctgaagcttggtcatgggaagggtggtcatgatggtggtgttttgtgtcgtggcacttgcatatggttggagtggacaggggatgtgtaggtgatatgtgcccatctgccagcctttggtggtatcgg

SEQ ID NO: 21833 - DNA, 1088 bp, Artificial sequence
  DNA replication origin
agagctggtgctcctggagggagcccacctgcggggacaggcctgaggacacattgctctcaaagagcacatgtcaggccctcacagacaggatgagagacagagtctgctgtgggaacattgtgaggtcattgctgacaacatccctcagcacctcctgcatgctttcctacggggacaaagccctccaactcccaaagagatttctttggaactccatgctgttcacaacctcattgccccaggtctgcctccctctgcctgacaatgtcatttatgtaacaactgcctgagtcatcctttttgccctggatgccaggaagctctgagccactgtaaagctcagtgctgtgaacggtacaagcctgcatggccatgacagcctatcctttccattacctttcctggtccagattcccatttctgtttcttttatgggaccttgccagtccttcagagccattgtagcaggaggcagagtacagagtgatagatgcttctggaaaaggaggttggggcatagaaggcttcctgtgacattcaggtggtgggtagaggggacaaggtttgcaaaagctgggagtgctgggtagggatgtgtgtgtccaggagtgacagagaggcagctggagagacgggcaggggtagacctggcagggccttgaatggcaggctgaggggcacagagtctgtcctgaggaccatggaatggttttggttagaggaaggatggggtctgattttagctagatcactctgggattttggaaggggctgctgcagaggcctgggggagcggatgacttgtgggctggctagcgtggtggggatgcagagaggtggatggatttagggaaaacttgagagaatgaagagctcatgggtcagatgggagcaggagccccgggaggatgcagaggtggttttcaggtggtggggggctccctgatggctcccctgcccaaattctccccagagttcagccggcgctggtgtgtccttggtgacggggtcctgagctactttgagaatgagcgggcagtgacccccaatggagagattcgggccagcgagattgtgtgcctggc

SEQ ID NO: 21834 - DNA, 998 bp, Artificial sequence
  DNA replication origin
tgcctttgtccacacctaccttccctaccagagtgggatgcctcactcttttgcctaagcgctcccaacaccttgtcccccacttcattctgtgcatcctcatgctgcccccaaatccctctgagtccatccccactaatctccccacccctatgtccccagcttctctgctgactcagagctagagaaggagcagtggttggaggccatgcagggagccatcgctgaggccctgtctacctcggaggtggccgagcgcatctgggctgcagcccccaacaggttctgtgctgactgcggggctcctcagcctgactgggcctccatcaacctctgtgttgttatctgcaagcgctgtgcaggtgtgtgcatgggggtcggggcaccaggcagaggcatggcggggttggccagttgggatggcaggtatcctatctggaggagggcctggagcggagacagcactcagagagctgctgttgatgaggcttctcctgcacacctgtgattagctttgagtccttacattgccaggcaggggttcaacttctcccatcacgggtggggacacggaggcacagggagaggaaatggcttgttcagggtcacctggcaagtaagtgagcccagatttgagcccaggcttgttggggtctggtgttcctctcatgtcagaagaatagggaaggccaggcaagaggagttggcaggggccaggcagggctttgcatgcagagggaggagctggtttttgtctggagggcgatgggaggcggggacatggtcagatttgtgggtcagactctggctggtgggtgaaagctgagttagaggggcaagactggagaccagtgaggaggctgccataggatccaggagagggaggaggaggaagcctggcctggggaagccgtgagcatttgagggctgttcaggatctatggtggaaaactctctgactgactggatgaggaagatgaaatgcgagagggttgagc

SEQ ID NO: 21835 - DNA, 783 bp, Artificial sequence
  DNA replication origin
caagagcactctccaggggtggcgtaggcgcagggatagtggggcaggggcagtgggagcaggaggccagatgggcaacccctgagcagcatggcgggcaggggaggacagcagttgccaagcagcacaggggagagtaagacctctcaggagggaaggagatcagagagggttagcaagtgacgggagaggggctccacaggtggggcagggcggggcagggtgagggaacccatcccataggaaggggcagcttcccacgtcgcgcaaaaggaaaacattaggaaggagtgaggatgccggtgagccaagaagatggagggtcacctgaagatgcggtagggcgtggtgaggtcgaagctgcgccggtccacttccttcacgttgcccacgctcatgtcgatgaaggtgatgccaatgcccaggtggtactcctggagggcagatgggacgggatgagggcaaggctttgggggcagggcgtgaggcttgggacagggagaggaagggaaggtggtgcaactcagggactggggggggtgcccaggagggagacagcaggggacatgggaggctgggcagggtaaggggctgcaggttcagggcccacacagcaatgaacagaggtgcgggggagcaagggccagggcagggactggagggcagtgctcagagcctgggggaagtggtcagaacttgggggagcgaggacatatccaggcaaagggctgggcccagtgcaggaaaagagggaacagaaaaggcagggctaaggccctaggt

SEQ ID NO: 21836 - DNA, 888 bp, Artificial sequence
  DNA replication origin
aggagctttaggtttccagtgagctcacagaggagtcagttggcggcctccccttccctcttggggcagggtgggtgctggccctcggcccccagggcacgtggtgagggtctgtatcttgagtgctggtgtcactgggtctgtccactcccgctgcctgtgattctgtggtcagccctgtgcactcccaccctgctgcggtcagccctgtctcttcctgtttctgcctcatttatggtgttcggagtccccctcctgctcccgctgggggcagtggtcacaggaggatcttcctggagtcatcctgtggctcctcaggctgccccttgccctctgtgggaggagttgccacaggaagtccccagcccctgtagagtgtgtctgtgcctgagggccagggagccaggccagagccctgtcttgctggtggtgggagcgccccaggtctctgtaggtgtggggctggttgagtcacctttctaagtgggaagggcctgagctaggccgagggtgaggactgggagagtggggagggtcctggggtgaggctgtggagggttggggtcaggagctatgccatgtattagatgagcccggtgggctagagtatgtcctggttgcagggggcagaggcaggaggcagcggtgagggcccagaagtccaggcaagctgaggggcctgggttgaatgggggcagtgtggatgcagggcaggggtgtgcccaaaacatggtaaacaggaaggagttgggggaagcggcaggggtccccagacccattaggggtcgggggtatgtggtggggccagaggggcatagtatgtgataggctttttgacaaagcctaaaaccaaaccatttaactttcagcttcatttatttgcaagtg

SEQ ID NO: 21837 - DNA, 1183 bp, Artificial sequence
  DNA replication origin
cctgggcatccccctctctcctccccaacccataatgcatagggcaggggtctgcctgtagtcaggtgcagagtcaggaacccagggtctgcctcaggcctctagctcagtgagagacctttggctgggcatttatctttactgtactcaacttccctggagcttcagggaggggcagtaaggagcgactctggggatcccccaggcttaccagcccccagttgtgaacaggtcaggacagaaaccaaccaaattgggcaggtgagagggggagggggttggggggagggggctgttccactcctctccactcccttctcttcacactgagcagctagaattttaagattctgagtctgagattctaggctggtgagattcgaggattttagggttttatgtgcctgtgagtcccagcttctgaatttccgaaattctaggttccgagagcctaaaaagcctcgagttgggctgggtcacccccaagttgaggctggggcatgtgccgtgcttcagcctggttggtgcagacggctgaggcctggagagtttctcagtgctggctggtgggtcagaggcacagctggtctccaggtgccgggtgctccctgcatctaccacccccagcacacacccggctgtctccccttcaagaaatctgggaaccctgcagactaggtggtagcagaggggcactcagttatcttggcagtggggagagatgggccaggccccctctgcattcacgggttgtagtggggctgttcccgtggacactagggcggggttggggagggctggtggctggctaattcaaagagcaaggtcagggtcacactgctggccatcagggccagtatgggatgtggctcagcagaccaaggttaagccttgaagggtcagagccaggctcaggagcctctgcagaaggtggtggacagagatcaagagcctgaggggacgtattgctctgccttagggtatagaaggctgggcttgactgagggacttaggagctaccatccctagctgtttcccgtgctgtctgggcctgtgggcacagcagctgcactcaagaggctgcgggtcaggagcagctctgcccctcagagaagcacaacccagccaggagcccagccaggcagtcgtccaggagaagggcactgacagccaagattccagg

SEQ ID NO: 21838 - DNA, 920 bp, Artificial sequence
  DNA replication origin
agggaaggggggtgaaccagcgggacccggggcttccagcccgtagccctttggcgtgaagggtctctggagtcagccgccctcgggcgccttggggttcccatctgtgaagtgaaggctcccacctcgttggccgctgagacctttacatttctggagatctgtacgaccctatgccctgggcctggggctccagtgaccttgggcaggctacttccggtctctgcatctcaattccccaccagtaaatggggcatggcttccccagagcccctacctggcccagttgctggtgaaagaaagtatgtgctcagggaatggggtcacgctgggagtggggtggttgggcctggagagagcaggcttagggtgcagcctgggggcaggggatgggtgtttggtgcagggccggcggggagggggggaatctggccagaagccatcacgctgtggtttctgctatataccgtcccttcccccacatcccatatcctggggagccttccctgatcccagataggtgggaggggggtgcttcagggccagatacctgggggtactcggaaggatttgactctttggtgggtcccagggtcccagactgaggcactcatgatacctgttcgcggagagtccccagaggccaggctgggagagactgcccagcaagatcatcacagggtagaaggagcccagcagagccttgaagacaggtgtggacaggtgcaggccccaggggaggggatgactggaatgggcttggcagttaagtggcaatttacaaggataaggaccctccaaaggcgagggcgtagcttgtgcaaagtcaggaatttggatggtgtgtctgaggaatggcagaaaggtgggtgtggctggcagaggtgtagagagaactcatcctgtgtcccattcctggc

SEQ ID NO: 21839 - DNA, 1224 bp, Artificial sequence
  DNA replication origin
gaggaatttctctaaaacacttatctcctcatgactctcatctgcttgaagttactctgtggctctccattgccctccaagaaaagcctaagccctgtcccaggtctcctggtgtctctcacacctcacccatccccacttctgtgcccaggcagcccttccccgaagcctcccctcctcgcccctccaggggtgctgtgggtgtcacctcctgatccctgacactcaggggagtcactggctccctgttctgtagtccattcccctctagtagaacagtcggctcctgttgggcccccagtgagttcctctctgggtccccagggctggcccagggtgggtgtcacagtgaacatggagtgagtgagtgagtgagtgagtgaatgactagaggatggggaagccttgagcatccttgcctggaaatgcttcaagccccagagcgcacagtggtccaggcctagcactcccccggcacctcattgtgttgggtgtcagaggtggagtggacacttgggaatgagatagggtggagagctgggcagtggattccaggtcaggccaggctggggtgctcagccagaggcctgtgtggtcaggggaggacttggaaggacaggcaggggaggggctgagcgtcaggggcattcctgggagggaggttaggttgagaagggatgtcagtgtgattgagtgaggcagcaggtgcagcagggtgggtcagagtttccacccatgtatagcctgtgcttacctaggaccctgtggttttcttccacgtaatctttgaggctgggcagagggaaagtgggggacagagctaagcctgaggacttcggtctgaggtggaagggagtgagggtaaaggcttgtaggacttgcctcacacacctcctcctcatggggaagacagtggcctccctggaagctctgggcagagggtggggcttttgtcaggggcggaggggctgggtccctgaggctgcttcctcccttccctgccctcacaggctccttacccaagtgggtggtgaataaatcttctcagttcctggctcccaaggtgagtggccttgggattttggggaggggtgttgaagactggaaagaggactatggaatgaggtgggtggagtcaagcctggagcctgagggccaggcgtggtggctcatgcctgtaatcccagcactttgggaggccttggcaggtggattacctgaggt

SEQ ID NO: 21840 - DNA, 1462 bp, Artificial sequence
  DNA replication origin
tcacctttcattcaatttgttccttggttctttcctcccccctctcttccaccaatatccctgctctaactgtgttggatgctggggacgcaaagaggacaggacctgagaggctgaagcgggtggatcacttgaggtcaggagttcaagaccagcctggccaatgtggtgaaaccctatctctactacaaatacaaaaattagctgagtgtggtggtgtgcaccagcagtcccagctactgctgggaggcaggagaatcacttgaacctgggaggtggagattgcagtgagctaagatctcgctactacacttcagcctgagagacagagtgaggcttctcaaaaaaaaaagaaaaaaggataggagacctgtccctgctctcagggaacaaccagctgggacatgccagctgccttccccatccctgctcctcaggctcagacacaggttctgaggccctgggcagcgaatcccaaagtgggagacacacatggaaacccagagggaaaaacagtcagatggccaaggtgcagacagagtcagaggggagaaggggaggcagaaagtgaaaagcagataatcgtgtggggatggacagaactatatgtaaatgattaagacaaagtgaggcagaagggctcagggtcagaggggaaaggtcagacatctcaggtcttggtaaggggccaagatacatgcctgaactaagtctgagactaggtcccaggcagaaggggagggtggactcctccacatttccaggaggatagcagaagggagaaggcaaggaagaggaaggcgaagggcacagcctattgccagagcccattgcaaggggacctaccagccctggaaatgcagcacccacagcaacatcagatgtgttgggggcagctattgaggcccttaaaccagagtcttcacgagcccctgccccatctggtcccctgggggatatgcgttcccagggtcccaaaccccaagcctgccctgcacggcaaagagaggagaattgtggggttgggaagagcaggggagatggctgtgagcgactgatgtgtctgcaactgctccctatgttggcttcccttgaccccaggccccttccttccccagcccacctgtagcctggctctgtgcaaggcaggggtattggagccctgccttcaggatctgccagccacaatcctgagtccctgcaggaggctaagggagcagccagggagggagggaagggaaagagcaagagcagggcatcgggcagtaaggaatcgggtcctgggcaacccagggtgcagaaagcggggaaggagacccagctcaggctgagaaccaggaatcagggagagaagggcccagtctcccacctggagtaactcaagtcaggaaccaggtgcaggcttccccagcagaggggtccctgagggagaccactctcctagaagggcctggcagcagcc

SEQ ID NO: 21841 - DNA, 1089 bp, Artificial sequence
  DNA replication origin
gcaggggagatggctgtgagcgactgatgtgtctgcaactgctccctatgttggcttcccttgaccccaggccccttccttccccagcccacctgtagcctggctctgtgcaaggcaggggtattggagccctgccttcaggatctgccagccacaatcctgagtccctgcaggaggctaagggagcagccagggagggagggaagggaaagagcaagagcagggcatcgggcagtaaggaatcgggtcctgggcaacccagggtgcagaaagcggggaaggagacccagctcaggctgagaaccaggaatcagggagagaagggcccagtctcccacctggagtaactcaagtcaggaaccaggtgcaggcttccccagcagaggggtccctgagggagaccactctcctagaagggcctggcagcagcccagatccctggaacaggcaggggcatgcagaagcctgggttccagctgagagaggcagggtgagtcactcctgctctccaggcctcggttggcccatctgtgtgatggggcttggcccagcagactgtgtctcctcccggtccctggaaggagactctctctgggcccagatatacagccaggtgtctagcccggagagaggaccaggagactccgggagagaggcagtaagggtgcagtggaggctgcaggtatagcgggcaaccctaccttgatcttgtgcagcgtccgatccatctccacagcctgcacccagacagacaccccagccctgctataggtcaggttccagcccacctcagcctcacactctgaccggaagctgcgaaagtcttggtcatcgggcacctggacactctcacggcccaggaccggccgaggcccttggggctctgtagaggccgccagcttctccatggggagtgtggggaggcccagggccctggtcctagtccggctctcctgggtcctccgcggaggctccgacaacgtcgacgcggctgcagatgctgacgccaccttcctgggacctgcaagaccggtttggggacgggaatcagtgcgctgggggcgcgggtggggctgttcggggtcctgg

SEQ ID NO: 21842 - DNA, 1482 bp, Artificial sequence
  DNA replication origin
gagaatcagagcctgggcatcctgagcccagagccagccccctgccacctactcattcccagacacttttcaggagtgtggtttagaagggatggggtgattatctgactgtgcctcccacactgcagatggaaggcctggagatctaaggtcattcacacaggcctcatgaggacctgcagcacattgtccaggattcactttgcaggatgccctttagggtcacttgccatcatagctccccgctcacccccactcatttttaaaatgtggcctaatttacaaacatctcagtgctttaagcacttcaggaagaaacacctctatttgtgaagcaccgtgacaaatcctcgactcctcgtttttttcttagcacatttaagaaaatctgttccaccctagagctctaggctggtgaggctaggaggcaccttagggttatccattctgattcccttttctggaaatggaaaactaaggaccagagaggaggaggcagcggggcacagacaggaacggaggtgggaggaggctgagatctgcgtgctggtcaggatgaccgtggcaggttcttgttgggccctgttagttgctcatccagaggagctcaccacagtcactgcgacagactgccacactcaccctggcctggcctcagagaagttgagctactggcctcagttcacacagagcagatggaggaagagctggcactaggacccagggggcaggggggagcctccctggctggaagggatggcaggagcgctggtgcaggtagctatggagctctggccaactctgcctggggaggtaagagagcccagagccctgggccagatgctcttgagagcctagtctagtccatagcaggtgtgcgtgtgtgcgtgcatgtgtgtgtgtgtgtacacgcgcgttgtgtgcatgctgagaaggggtgctggtggacaagggccagagtgtggggctggagggagtcccggttcaagctcccaggtaggagtgagactggggtggagattttgcccacatctggccagcttgtgaaccttgagccttgtgggttggatcggcttcctgctgggtttgcacagcccagtgggaatggggttgggtgtgtgtaggcttggtgtgcctctagcttggtgggggatgcaagctgtgggcatctctgagctgctgtggggctgtcatccctgcgagttagtctcttgattgtcatgggggtgtgtgcccatctttggatctctggggtattgcatgggggcgtctctgggttgttctggggacagcgtgcctgtgtgtaaatactgtaggttgttgcagaggtgtgtacctgtgagtatgggaggtggtggagagaaggggttcaccgttaacttccagaattcctcttcttgcacctcgtggcccttcctcgcagagcccactctgtcttggcatctcctcacccctttccctgtccccgctggggacttgccc

SEQ ID NO: 21843 - DNA, 1548 bp, Artificial sequence
  DNA replication origin
gcgctgcgggggcaccggggacgcccggccccgccatggccgcgctctcccgcctagcggcgcgttcctcccgcccaggacggcgccaggccggggcggggcctcgcggggactccgtgacgccagggggcgggcggcggcggggaatccccggcttgtcccaagagggctttggcggggaggaccgaaggccgacgccgggaggatctgcctccgggaggagccgcctccgggtctgaaccgccggggccccgtccgaaatgttcacctaagtgggggctcctgtggctgcgagggtcataagcaggagcgaggtcggagcctccggggaggcttcccccacgcgggtggagcgctccggaggcggggccctcaaggcccgggtgtcttaaccccgccgcgcccgggccgagttcgagagccgctggtgcttcccaggccgtcgcgctcctggccgcgcacccagccagggacccagaggccctcagccccgggctctgcgcgtacactgagggcgcggcgcagcaggacagcaagataaggaagcagagactgaagggaggaatccccgctttccggggatgatggcgttcgagttgggtctgtgagggatgaaataggagttggccagagggagagagggactctaggcctcgagaagagcacgtgcagaggttccgtgacacgaaaacgccaggtgggtgcggggctgggaggacaggaggcagaagggtttacggctccacatggtcgccgaaattttaggtccctgagagtaaaggggtgcagctgatttcatctagaaagcccctggccgggaggagagaacgagcttgcttgcctggggttgcaaaggagtgggtagctgagacggccagcaccccagcatcctgactcagggccagacgcttcaccccattgggcggcgtctggaggagcagacacatctcttgtgggtaccctcgaaagtgaatcatgggtcgcagggaactgtggtcaaaccgtctctagctagatgctagagagccagctctgcaggctcaggctactgtgagacacgaaaggagggactcgctgggcacagcctcaccctggggcatgccagcaggccctgccctctgagtgttggcagacttgaacatccctagggaacgagagaagttgggcaacgatgggagagcagtgcaggccctggaggtgacgagtctgttgagattctgatggggatgggtcagaggacgtagaaagcagtgaaggcctagacgcccccaggtcagtgtagcctgctctgcttccagtgagctgggctcagtcccccacatgtcattgtcttagacgcccatggcctttgcacaggccgagcctgatgtttggaacatcgtcgcctctagggggcctggctcctaatcatgcatcacctcctccaggagaactttcctgcccctacactgagttcaagcttctcagacaccagccccagttgagttcgagttataaccgtcaccagttatcacaccatcctgtaatctgtgcggtgccccttagggc

SEQ ID NO: 21844 - DNA, 1458 bp, Artificial sequence
  DNA replication origin
ggtgcgcggccaggagcgcgacggcctgggaagcaccagcggctctcgaactcggcccgggcgcggcggggttaagacacccgggccttgagggccccgcctccggagcgctccacccgcgtgggggaagcctccccggaggctccgacctcgctcctgcttatgaccctcgcagccacaggagcccccacttaggtgaacatttcggacggggccccggcggttcagacccggaggcggctcctcccggaggcagatcctcccggcgtcggccttcggtcctccccgccaaagccctcttgggacaagccggggattccccgccgccgcccgccccctggcgtcacggagtccccgcgaggccccgccccggcctggcgccgtcctgggcgggaggaacgcgccgctaggcgggagagcgcggccatggcggggccgggcgtccccggtgcccccgcagcgcgctggaaacgccacatcgtgcggcagctgcggcttcgggaccgtacgcaaaaggcgcttttcctggagctggtgccggcctgtgagtgcgccccggtgctgagaggatggcggctgaggggacgcggctacgggcgcggggagagggtttggctggctcctccgcctgtgacccgagtgcgctgtgccttatgccttgagcctgtgcgttacgcccatcccgactgccaggactccgccccttgccatccaggctctggttagaacctggacgagcccctcctggtccccctgccctcgtcgcccctcaggacgggctctgcctcccacaagctgggcttccgagacgcaagtgcgtcctcgggtgttggttttgcagggtctcttttgcctccccacccgggcagtccccggggtaggggcttgatcagtgcacttagtctcggtagcgcagtgaaagaacgcgggacttgtccagagcagccacttattggcccatccggagaggggcgacactcggaacctctaaggaggaggctgtgcatctcaggctctgccgctgacaggcgacgctggcacaggcttatggaacacctccctgtcagcctacccagcctgagggggcatcagggggccccgggctgctggtggatgctggctgagcccagcgaagtcggactctcagaattgtttctgggcagctggtcaggatagggtgtggcatttcaagaggggatgaacaggtgtgcctgtgtgtcgcacctctggccgcctgcgattgtatgtctgtggttggaagtctaaccacaatccctgcggctctctcactggggctaatcttggccaaacccccacaatcaaatctgctcttagccaggaaaatttctctgcaagcttccaggctgctggtcctctaccttcagggttgcgaggccagcccccacctccagcagccacacttctccactgctcagacagacagtggaaccgtccagt

SEQ ID NO: 21845 - DNA, 1125 bp, Artificial sequence
  DNA replication origin
tacaataaaatattgaatggtacaacacaacataaatgaaagcaagtgacaagtgagaaagtggaggtggtgatcagattgctcagtggtgaaaagaattatgttataaatggggccaactatgaataaaggtgccccaacccgcatgtgcagattccttcttcgcagactcactcacatagcgcgtcatgtcagtgcaggtggcagcgccaaccgtgctcctcagtctgtcctcaccaggcccacgtgagaacacaggaacagattagcaacaagagcccccagccttggcctgggccagaggcgcctctggccctcatgttctcttgtcacactggtgggagctgccttgcctggggtctgtctctcccaccgaccctgcttggctctgggttgaaggcatgacgagtgaggcgggagtgcagatgaaatgaccctcacccactctcctgggctgccagcgctgttcccatattgagtctgggccctggctccccgagtccatgcctgatcttagccttgtgtgcctctgcgcagggcctctcgctgctgagacctgtgcttgggcaggcctgggttgggtgaggccaggaagccagcagggaggggtggggaacagaactcacattcccctgaccagcctggagggtgatgcagttaggtaggtggcttgtgcccaaatctcttagctacgtgactttgggcaagacacttaaacctctctgtcggtgtccttgtctgtgaagtgagagtggcagtaccagcctcctggtgtggtgaggatggaaggagcgtgtagcctgctgggaacatcatggcgcccgagggccggatgggcatttggcagcctctgcgcgaggagtcctcgcagtggttatgcatggtgctgggagcggagcgctggcttcccactcttcaggcgaggcagtggagcgggttgctcttgccagagaggttcctagtagggtcgcagagaaacgaagcggcacggcgaggattgggacccagggctgactccagagcccgagggccttccactgctccacaaacagcagcgcgtccctgtgcaaggtcccaaacctgtgtggggctcagcttgcttttcaggaagggggcgggcaggtg

SEQ ID NO: 21846 - DNA, 1991 bp, Artificial sequence
  DNA replication origin
gagtaggagctcctgccctgcctgaggctggagctcttggtcccctgtgacgaccttggatgaagacagacccttgtgaggacagaacctggaagacagctgaaccggggccggggctgaggccattcacctggctcctgtctccaaggcccaacagactcacaggcagacagctgcacatcacagggatggacaggtcgaggcacagacacagaccaagcctgggctggggagcccgacacacacgtgggtgcacacacaggcacacacacacttactccagaagccccttcaccacatccacacagtgggacagcgtcagggaggtggctgaggcagacctgagacaaaaccaagagagatatgctaagggactggctggtgtgtgtacaaatggctgtccatcatctccacactttgccagagacctggaggcttgtaacctctcaagtctgggataagaacttgacttctccaagatcaggagaccagggtgacccagatcagtcccaggaaggtcggggcagcaatggatttggtaatgaaagtctcccaaggtctccctcatgatgggaagaactgccttaccctactagtacccaccaacaaaagttcctgggaagctgagccggggcctacagggaggagagacgctgaaggttcccccaggctggggatgggaggaggggggagcctaggctcactgggtgacctcagcaatgcccaggagagggtgtgtcctacaatgacttggcccacaagggctcccaaggactttggggactggcatctcatgcccctccccacggtttcttcactgccccaaggcctggacaccagggacctgcaaggaaagactgagaagaggtgttaggctggggaatggcgcccagagcgggcagcctcaatgacaggcaaatcaagaaggatggaggagaccctgcggacaggcacccaaggtctgaagccccaatcaggtcccacaagtgtgagcacacatctacacatgcttatatattcacacatacagacgggctcagtcaagcttgtacacacctgtggcctcatgtccctgcggatgcacatgcttgcacacctatggctgcgcacacatgcctggcatgactgggctctgggctttgcccacaggttctctcctggtgacagctattcagaagcctgactccccacccccagagctctgatcccaagaaggagggaaagggttgagggtaggggttgggggggtgagatggaactgaccccaagtggctccagacaatggaggtcagactagccctgggagatctgagctttctggcctctcctcaagccccctcccaacccaagagctggctccaaggtccaagaggaagaccctggcagcctctggggtggggctcagctcagagctctgagactgtcacctgggtcctcacctgaagggcctcttccacttctcacaagcttccttctccaggggctctggctcaggggccagagccagagtctcccttctctccctcatcccatcgcctagggtgtccgggcccctaggagaggtaatgaagttcagaaaggccaagggaccaagccagcccctcccgaccccagcacaggatacgctgaagacaggaattcccagtgatgagggttctgtgtgggtgtacacgtgcagcggtcacgcatgcaggctcctacgaccacacggtcctctgcaggtgtctcgtgggctccgaccacatgggggcctcaggacggggctgtgcacaagtacagtcggcagcctgggtcgccgcaggcaggcggggcgggaggcagaacgcaagggtcggaccggcccatccccactcttactcgctgatgctcacggtccgcttggcagccttcttcagctcctgggacacccgcgcctgcttggcccttgttgggtaaaaagcatcctgagaccctggcgcggcgcctcgcacgcaggcggggctagacccggt

SEQ ID NO: 21847 - DNA, 1052 bp, Artificial sequence
  DNA replication origin
ggcgctcctcacttcctagatggggcggccgggcagaggtgctcctcacctcccagacaatgggcagctgggcagaggtactcctcacatctcagatgatgggcagccgggcagaggtgctcctcacttcccagatggggcggctgccgggcagaggcactcctcacttcccagatggggcggctgccgggcagaggtgctcctcacttctcagacggggcggccgggcagaggtgctcctcagttcccagatggggcggccaggcagaggcactcctcacctaccagacggggtggcggccaggcagaggcgctcctcacatcccagacggggcggccaggcagaggcgctccccacttcccagacagggtggcggccggccagaggcactcctcacatcccagatgatggacagccaggcagagatgctcctcacttcctagacggggtggcagctgggcagaggcgctcctcacttcccagacagggcggccgggcagaggggctcctcacatcccagatgatgggcggccaggcagagacgctcctcacttcctagatggggtggcggctgggcagaggctgtaatcttagcacttttggaggccaaggcaggcagctgggaggtggaggttgtagcgagccgagatcacgccactgcactccagcctgggcaacattgagcattgagtgagcgagactccatctgcaatcccagcacctcaggaggccgaggcgggcagatcactcgaggtcaagagctggagaccagcccggtcaacagggcgaaaccccgtctccaccaaaaatacaaaaaccagtcaggcgtggcggcgtgtgcctgcaatcccagacactcagcaggccaaggcaggagaatcacgggagcccaaggcagggaggttgcagcgagctgagatcacggcagtatcggcaacagagggagaccggagagatggaggggggaggggaagggagaggtggaaaaaatttaataattcgatttaaaaatggggaaaagatctgaatagacatttctcaaaaaaggaca

SEQ ID NO: 21848 - DNA, 872 bp, Artificial sequence
  DNA replication origin
tgaccgccctcgtcttgggcttgtcaccgacttgccgccggctccaggtggggggcgcgcgtgtgagttgcctttccgacagaggggccgccggggctcgtccgtcctctaacgcaggagacccccagacatttcacaagagtttcgggtgtgcatttgtgtgtgtgcgcgcgcatggcaatgctgcccgctgcaaagtgcattctcggggctgcaccgagggggaggcggggacgcccctgcagctttgcagagccttgtgcgtgtgtgattgtttagtctgcaccagctttgagccctccagccgcttgtcgccagccccgcccgtttgcaaatttgcgggggatttgtttctagcctagccttagggtttggcctgcttttcccacggggcggccgaaaagaagttggaatagtcaccgcctccccaccccaagggaaaacaaattaaggattgacgggtcctgcctcgtccccggctgaggggcgaggaggctgtcgtgctgtcttcagaaaagcgaggaccgggcccgggaggtgcgtggggtgtgcactgcgatccggggttggatgaccagggtgggagtgacggatgcacccggcttgtcatcagtctccccgctgcgcccttccccagctttcccaggggccgaggctgtgtccttgtctttttaatcctacagatggatactgaatgtctactctgggcactgggtggatgaggccgttctgtcctcccctcgtgggcaaacatttgcctaacgcctaactcacccgtgtctgctgccgctgctttctctctttcctaatccgggtttctccatttaagtgagtccttttctttcgaacatgtacccccacccctccgggtg

SEQ ID NO: 21849 - DNA, 1228 bp, Artificial sequence
  DNA replication origin
aggcggcccggccctcgctgggcctaacgcccccgcccgcccgggaggaggaaggtggcgccgctctccccgctagggctccaccactcaggccgcgggaatttccggcctcgccgcgcggcgcagcgccccgctccggatgctgagggaaccgctctgtccagagcggggttcgaggggccggtccgggctgccaggagggagctaggccacggcacggggcttcgtaccgcggcaggggaagggggaagctaacggattggtcggtgggtgggaggtgtagaaacgccagcgccacgcgaaaatcccccctttctctccgagagtggcacgttccagacgcctcctgccctccctcccccacgctgggagccagccgggggcttcccgcgcgctttcccgccagctcgccccggcgcgcgcgtctccgctcgggggcgcgcacgtgggcgggagagggctccgcgccgacgcacgcgcacaggccgcccccgcctcctgcctgcctttgcgtgtgtgtgtgtgtgtgtgtgtgtgtgtgtgtgtgtgtgtgtgtgtgtgtgtgtgtgtgtcggggggcgcgggggacgacgctcgcagggaaacgtttgcagtggggaggggggcgcagcatgcctgtgggatacgagaattccggcgttttcttcctctcagcccctcaacaccctactctccctaccagctagatgtgcgcgagagaggcgagcaaggacaagtcgctttgcggctggccgcaggtgccaggccattgcgattgtagggcggaaaggcagttgctctgcaaaggaaacggcggcactctactgcagggcattcaagtcaaacatcactgactccgctgagagggagccaagagaacgttaaggccgaggcccccgtttcacagacggggaggcaagtgcccatagagggaagcctttctaaaggttacacagcaggactagaatctgcgtcaggaagtgttctatgggttattttaaaaaagaaacaggtgcaggataataagcacgaggaaaagtagaagaggcaggagaggccatagaggaagcccttgtctgggagtcaggatctctgggtgccagtccactttgcctgctccttaacaggctaggtgagctcggcttccttatctgccagtgagggtgcttatctaagcagtgcaccccaccaccacacatgaaccttcctgctctgttcagaccatcta

SEQ ID NO: 21850 - DNA, 1335 bp, Artificial sequence
  DNA replication origin
cgggaggcctccttctggcccggcagtgagagcgtcgccgcccgaccctcccgttgcagcaccggtacagacacgctgaccccgcggccttgtcgctgggcggcgtcccggagcgggtggcgcggtgtctacccgggcgggttgagggcggtgccagggtcagtcaaaagtccgccccgccccctgcctggcccggcttcggggttggggaacagcgcagggaggtgggtagccgggctcccaggcacgtgggtctctgcggctgcggcgggacccgggcactggcacccgggagcggcggcgacggcaccctgagaggagaagcgcagcgcagtggcgagaggtggggtggggcgtctggagggaacaaggcgctgggagaggcccggggaagcggcgggccagactggcgcaggtgcggactgggcgcggggcaggggagggcgctgtggagcggctgtcgccccggggcacagttgcgagccggcgtgtagcgcataactggacggcttgaacgcgcctgtgggtccgtggttgaactttgtctccacgggagcgtcggtctcggtgagtgtggacgggcgccccagtagtgaggctgtgcgcgtcagcgtactggggaggtctgcgtgttagcgggtgagtgtgtgcgcccctcggggcgactggccaagcctgcggaacttgtctgtgtgtgctccgatgtgagcgtccccgtggcgtgaggcggtggccggtgcccagagacgcgaacccctggagaccccctaccactgtcctaaccccagggtcactctgggtggccacctaccattggtaatgttgagggggcagttgcagggagtgggcgggggaggagggagtggccagaaaggacagttaagcctctgtccccgggcttttaatctggcaaatggtgcggtagaaagggtcagtcaggagaaaggcgataccccaccccccaacccgaaggctgccagtggccctcttggggtcctccaggagcgcagcccaagggttggggactgctggagaccagaattgccagctcgggatttgtggggtccatggctgctgttcctctcagcatggcatccccagcttcccaggaccacagcctgatctgcctggtttgttttggatctaagctgaaataattatgagttttgaggatctgggtggagacccaggcaagtttattacctgtgggtggaagtggaaggaagaagattctctgagcagacaggtccacaagagagctctggagactcagagatctatgttccaatcctgtcttggccactgtgtggcctgggcaagccgtcctttctctga

SEQ ID NO: 21851 - DNA, 1313 bp, Artificial sequence
  DNA replication origin
gtgggcctactgtgtgccaggctctactccagacattttatgcaaatgactcgaccctcacagcagtcccatggtggagattctagtaattgtcccattttacagctgaggaaacagaagcagtctggctccagcgcccaggttcttaatcactgggttctctgcactgagggataaagagccgtgagtttaacaggtggagacgagggctatgaatgaactccaggtagaagaagcagcagcaactaaggctgggaggggagagtcttgggcacattcaagaaactgcaggtcacaggggttggggcgggtgaggttggcagaggctcagttatgaaaacctcaggcaccagacttgagggctgggctttctcctgaaacagggtaggagcggcaggaggatttcaagtagggggatgctttctttgagaaaggccactctggatttttgtgggtgggtgggtgggggtggcgctggaggagggaagccagtgcagtggttccagcaacaagaggtagagcctggaacgaagttggcagcaggaactgtcctgaccctgggtaagacgggtctcagccacttgacctgccagagccccagcatctacctgtctcttcttaacttggcaccacataagcatctcccggcctcctcgccctggttttgccctggctcctggggagccatctgtgtccatggcagggggaacaagggtgcaggcccccttccttctgagtaaacatttgctgacaataggagaaagagaagatctgggagtcttggtgaaagaagggaaactggccaggcgccatggcccacacctgtaatcccagcactttaggaggccgaggtgggtggattgcttgaggtcaggaattcgagaccaatgtgggcgacatggcaaaaccccatctctactaaaaaatacaaaaaaaaaaaaaaaaaagctaggtgaggtggcacacacccgtaatcccagctacttgggaggctgagacatgagaattgcttgaacccaggagacagaggttgcaggaagctgagatcacgccactgcattccagtctgggtgatggagtgagaatctgtctcaaaaagaaaaaaaaaaaagaaagaaaaaaagaagggaaattgaaggatctctacaccccccagcacccctaatctcagcctcttgggccttgaactgcctccgggaagccagggctggaaaagcagctcagggtctatgggagtagaggttgcaggccctgcagagtcccccagtcccttagaactccaggatctaaaataaagggaattattccaggca

SEQ ID NO: 21852 - DNA, 1142 bp, Artificial sequence
  DNA replication origin
tctgcccagccaggaagtagagcacggggtcaaggcaactgttagcactggccagcggccgggtaaccttgtaggccatgttgatggcgttgagggtgtggcagctgaggtccagcgagcggaaggagtagtagagggtgcgggtgacgtggaatggcaggaagcagagggcgaagacagccagcaccacggcgatggtgcgcacggacttgcgcttggccctaggcaggccgcccgaggtcccgtaggctggctttagcagtcgccgagccatgagcacgtaacagacaaggatgacggcaaagggcaccgcgaagagcaggcccagcatgactgagctgtaggccacgaagcggctgaagagctcgggtgccgaggtgtcgtggcaggttacgcggcccccgcgcgcgctggtggtgacaaagtagagcacgggggcctggcaggccagcaccaacacccacacggccccggccacccggcgagcgtagcgggcccggccccagcgcagggagcgcagaggtcgtaagacgcccagacaccggtgcacgctgatgcaggtgaggaagaggatgctgcagtaaaggttggtgtagaagaggaagcgcaccagcttgcagagcaccgtgctgaagggccagtggtcgccgcgggcgtagtaatagaccagcagcggcagggaggccgcatacagtgcatcagacacagccaggtggaacatatatgtggtggacgcattccaggtcttgaggcggcacaagaagatgtagagcgccacggcgttcagacacagcccaggcacgcacaccacgccgtaggacacaggcagcagcacgtacttgaagtcctcgttgaagcggcacctgtagcccagctcatccccatcccaggtgccattgatggtgtcattccaggggcccaggtctgctgccatcgccctgcagggaagggaggggtggggccatcagggttgtggccggagcgcccctaggggacctgacacagccacctgaccagggctttcattgccatctgacttggatctggacctggaacctccaagctctggaaccttgagaatgcatgagatcaatgaataaatatcaggatcacacaattgtcaaacttgagaacaggggtag

SEQ ID NO: 21853 - DNA, 1483 bp, Artificial sequence
  DNA replication origin
aggttgaggtgagggactccctggatgctggtctcaacacagagaggaagcactttcttgctacagagatattccacaactcaagaggctgcccagagagtggagagtgacctcctcatcctgtggggtatatgagtagcaagcaggttctggagtcccggctgagtcctctctctctcattcggtagtcaggcaatccctgggtgtctaccatcctttcctatcctcctgcctgcccctctcctctgaaccccgtctcctagcctagtctggcccagctacatctccttggctggacctggtggcagtggggttggctgggtaatgcacagactgctgacctaactatgtgtccccgaggccttgctactgggggttggaggggccagggcagtttgaccaggcctgaagaaggctgggcagcgctggaggggcatgggtcagaccaggttatcctctgttcctgaggagagtgagctcaggcccaaggaggagaaggaggagactgggggctcaaaggaacgagaacctccttcttcatcaggatttgggggtgcatctcagagctggctggaggagcatggtgtttgaagcccctgaaatctgaattttagcaggagctgctatttcctgacttgcatagtggtcaaagttacttctccttcacggtccacagagaaggggtaataatatttgtccccaagggtggtttgtggattttaaaaaataagttaaataatattgcccatacattataggtactccatacattttcattcgttcgttcattcgttagttgggccgggaggatgaatgggatctagaggcaggtgggaatgcggaaggggatgatgccccaataccgagaacaatgtgagactcagacggaggcaggggcgggaggggagctcaagcgagggatcagcgtgaagccagagaaacaaccgacacttttcctgccaagaaggtgaagcagctgcgggtaagagtataggtttggcagtgggaagtcgagggcgttcccgtcgaagctccttttgtgtataaggcctaagaaggggcagtgcgctttgcgaaggtctgaaaaagactaaggggattaggtaacgactgaaaggaagttttcacaactctccgtttttgggggatgggtgctgctttatccgtccaggactccgtgcgttgggaaaatcacgccgcgagggggcgcaagagccgcgtactccagagcaagaagaaaaggctcggggatccaggcggagagtccaggagaagagccgccagactgcaggggcaggtggaaggcgtggcagctggaaaagtaggggtgggggcgcggtcgtgaagggtgggacttctggagcaacgctgggcgggttgggggccggtcggagccggacaggcggctgggaggtgggatgggcggggcgcttgggagcgagatggggggacaagggcgtggctacagctaaattcgccgcag

SEQ ID NO: 21854 - DNA, 932 bp, Artificial sequence
  DNA replication origin
gcgttcccgtcgaagctccttttgtgtataaggcctaagaaggggcagtgcgctttgcgaaggtctgaaaaagactaaggggattaggtaacgactgaaaggaagttttcacaactctccgtttttgggggatgggtgctgctttatccgtccaggactccgtgcgttgggaaaatcacgccgcgagggggcgcaagagccgcgtactccagagcaagaagaaaaggctcggggatccaggcggagagtccaggagaagagccgccagactgcaggggcaggtggaaggcgtggcagctggaaaagtaggggtgggggcgcggtcgtgaagggtgggacttctggagcaacgctgggcgggttgggggccggtcggagccggacaggcggctgggaggtgggatgggcggggcgcttgggagcgagatggggggacaagggcgtggctacagctaaattcgccgcagagggcgggcggggagggggagggaaggggaggaggcgtggcctgggcggggagtagggcgcgacggacccttcagttagcccgcggctccccgggctctccctggcgccgagtcccacccctttcccggcccagagagtgtgcgtctgcgtgcacctgagtgtcagtgtgtacgagagtttgtgagtccgaggttgccatgttggagcccctgggcaggaggtgtttccgcgcggaggctggtggcccgcggtggacgcggcgccctggctgcgagtctgcggagctgagcacgctcagcggttgtgtgtgtctcagcgactccctgggggcagctcggcctgctgggctcccgagggacctctctggagggccagagggtcgcctcagtctgcaagtcctccagcaggctttttcttcttcggctcctccctgattccctcccaccacgcggttcccaggctcg

SEQ ID NO: 21855 - DNA, 1758 bp, Artificial sequence
  DNA replication origin
ggctctgcccgctgctctacaaggatgggctcgctgctggatggaggcagcatgggctcaacttctcggatgggctcccctccagggccctcgaatccaggcccagccagctccccacggcggctggggtcactcagggatttcttcttgggggctttgccagcaatcctgtcgtccaccacacgccccagggtgccaggcccctgaactatgctctgaataacctcctgatatcccttgctctcttcactgcccacagaccagtcactgtgaccactggtcaagccctcatccatggctgaggtggcagggagccctgtcttggggctcagtgagcccaggaggttgctgtccacagagaacccagtaggctcttcagaggtggcagcccggtggcgctgaggaattgggtcactcagggacctgtaggcctcccctgcctccccattgctcaattcgctcccaccagaacctgaaggtgggactttgcgtcgtcggcggagggcacctggtgtgggaggggtctcaggcgacaccagggcccacccgcccagactgtcctcagtcccagggccatggtggttcgtctgggccgaggatgaggaaagaggtcgccacatccctgtggtacccaggccgcaaaatgctgcaacaggaggctcagggtctgccccaatgccttcatctgtcagactggactcagggcctgagagctcctcctgggaccgctgccctcgggtcacatcccctgcccagtcagggcttccagggggggcatcgcttccatcatcttgttgggcacccatgcgctggatcttctcaaaaacctggcgggcctcctgcacatattggtcctggacgatgaggggcagcggatcctcctcggcaccagggcctgtgagcaggagctcggaggagctggacttcagagcactggtgcggggcaggcggcgggccatgggcttctcagagcaggtgaatgactttgctctccgcagagtggctgtcaagtccttgagtgtggggcgcgtgccaggtgatgctggggctgggatgggtatgggttcaagttgccccacagggccacctgcggatggtgagtctctgccatctagggggttgcttccacggtccccggagctcccaccaggttttcggaccctcagctctgaaaggtctgagcgcaggaaactgagaagcgtcagggtctctgaggcgatatctggatttgacagggacttccgctgtcgactcttttcaggctcaaatcctccatccctcaatgccctagaggtgcctccaggtcctttggcacgggttcgagcctgggaccgcaggagcccttccccagctccaaagctaggggagcggtacacgccccagcccccagaacccctactagaccataggtcgtcgtccttgagggtctccgtgctggaataacggctgctaccgcgggagcctgcggggctggccaggtacgagggaaagctcaccttggccacacggaaagctcctcccacagagtcagacataggccgaagtccctcctggggacctgggacgcagggcggagagccactaccccactcccggagtccttcttctctaggggctcttggagatgttgggggctcagggctcccagaaacccctgctgagttcatgctgcttagatttaacccatcactgtcaggcctgcagtcctgatccaatagggagcttccaggcctgagcccgggcctccctccccagcgg

SEQ ID NO: 21856 - DNA, 1171 bp, Artificial sequence
  DNA replication origin
aaaagaaaaagcattactaggagagggaaaaggcatgggccaagaccctgaggcaggagagggcatggtcagtttctggaagttaaaacggaagtggctggagcacatcaagcaaagagatgagaggagtcgacagatgggcctggcttgagctatggggtcaggatgtccactgtgcaggaaactcaggggaaagcaggtttgggagaaggagtcagctgggggcttggtgagcgtggcagcgtgcagcacactaaaaggcatgaagttggccagggctgaggcacagctgcagggtgcttcagagcccccccatcttgctgggtgggagctggtgcaaaagcaggttgctcgcccccacccctcagtccagattgagtctaggataggttctgctgtcactctgggctttcaagcagcacgttatgaggatcctgcttggagacagtctaggggtgcacagtctaggtacgggagcacagtctaggggtgggagcacagtctagggatgggagcacagtctaggggtgggagcacagtctaggggtgggagcacagtctaggagtgggagcacagtctaggggtggggcggatggacagggacaggactggaaccctccaagatggtcccaggtataggacacaggacaagctggatccgggcaggggtagggatgattcaaggtgggtgatttgagtgatagctgccctccttcaggcccaagagctcctcccttgggtggaagaccagggatgtgtatgtgtgcacatctctaaatgtccgagcctggacatatgtgcctgtttctgctggcaatagttatgtaaacacagaagcacttgtctgggcgcaacgatggatcatgttcgtttctgtcaaggttcaggtctgtaagggactgtgttgatgtgggtgcacttggcctgacccccttgtgcatacgggtccaggcctgagggcaggtttccatgaacgtggcctattccgtgtaggtgtgttcgtgcccctgtgtgtgtcccgtgctccgtggctcctcggtgggaagctgcgttcagcgtgtgccggcgctgggtacaggtgcggacggaaagtacatgtcggcgcctttgtccacgggtgtgcgccgacttgtgtcctggggcgggggatgggtccgtgagcggacgctg

SEQ ID NO: 21857 - DNA, 1459 bp, Artificial sequence
  DNA replication origin
cgtgggggaaggggcgggtgcgagggcagcccagagcgtgctgggggagatggggcggcgcggagagggcggggaccctcctccccacaacggggccgcgcgcgcctggctcgccgggcgcactcccagcgcggaggaggcagcagcgccgccggcggccgggccgcagcgctcagatcgacgctggaactgaccaccgcgaccgccactgcggctgccgccgcggccgggctgagcccttagggagcgagagtgggaggcggcccctgactccgcgctgacccccgccccccgccccgccgccaccccggcgcccccgccccagcggctggccggccgcatgctgcagatggtgaagaccctggcccagttcaccatcgcgctggaagacatgcgcgatatgggcccagccgccgcctccggggagcctgccgggggcagcagcactgacgccgaggagcctggggaggcccaggtacggggagggggaggggcagccagggacctgggccatggcctagaactcagccgacccaggagccaacccaggagacggtggggggaggggaggcatggggcgcagggactctctgtgaccggggatggagacctggagattgccggtgaggaaccctggcaggcggtggtgtggctggcagggcgctgagggtcaaggcctggtggcactccgcttgcagaagtgcctgtagaagctgaggctgtcgccagtgttatcctgggtccacaggctcaggaaggagaggttttcccagccctcctcttaggcttgaggtggccctggtgtatgtgtgtgctggaaagtagagtcagttttgcacccccactgccatcctctccctgccgctgggcctgctggcccttggaggagtcatgctgcggtgggaacagcagcgtccccgttctcgctcagtgtgtgtacccctgcaggggaggggaggcgtcttggggctgtttccctgtctttgtgtgtctctgggcctggactctgtgccatgctcccggccccagtgggggctgtaattctgtcccctccccgtgcaatgatgtgtctctccacagcctcaagtctctgagctggcgggcctggttctcagctgcgtgacctggctgcgttttttatttctgtgtggggcggcttgcctttatggcgtctctgtgtgcgtgtctgtcttcacactgtgcccgtcagggtttcagtctttgggttgtgatgccccagtcatcccaggagtggccccctctgtcttcctgctgtatcccccagtgcccacctcagtgcccggtgtagcgaaggtctggggatggggctggtgagggatgaggggtgctgtggggaggctgggtgtgaagggctgttctgcctggaacaggtgggcctgctgttcaggctgacagctgcgctgtctgcctcctgcctcccctgtccacccccgcaacc

SEQ ID NO: 21858 - DNA, 1717 bp, Artificial sequence
  DNA replication origin
tggcgtggggtagggcaggattaggcatctgggcctgtcctcgggaggccttcctggccctccacgctctcccaagtctccatcctacagtgagccttgctcgcactgcctccttctggaagctgccctggttttttagaggtcacaagagtaccgaggatagatggtctgcttgtctccagaggctctgaggctctggtctgctgtttccggaggccctgaggtaccttcccacccgtcagagcccagggctggcaatggtgggctggcaaggatggggagagccagccccccttcctccctgccccaaggggtgtccttcacacccccaccactgagttcctagcatgggagctcacttttctgagtgtgcttcattataggacactgtggggacaggccttgcccctgagtccctggtcagagggcaagggatctgaagtgggtgtgccacaagcagagggggagcagtggctgggtcaggcaggacaggcctgggctcaggtccactaaaacatgagccctgggcatagcagtgaccaggacagccccactggttgagttcctaccctgaaggactagaggtggaggctggagggatgccacagacatggacaccctggcattgccatctgcacagcacttgctcgaaccagtaagccttgatggcaggaacccgagatacggtccacagatgctcaggccaagccgagacctgggaggggaggggagagaggagaataacccagagatctggagcctagaggagttaggggccttgcccaggatcactctagggctttagaggggtcaggagtggagtctaggggtctagggcttggagtggagtctctgccagagaagggaagttgttggggctggtgctatctgggaaggcttcctggaggtggggattttgaggggagaggtgtagggactggtggagaggagcagcaggtaagttcagtcccaggggctgaacacaaggcatcccagacagggatgagcaccctgtgcctgggggtgtgggtgcagaggctgtgtgaccccttggggactcagtaattcaggtcatcagatccataggttggaggcatcggtgtctgggtttcctttttcccctccctaacatgaagagaataataacatatacctcacagggtggccaggattattgaataatatgtcatgcttagaacagtgcctggcgcataggagggcatagttaatgtttttaaatgacagaattgggatccagccttgtctgagactggctgaaccctgatactgcccagctgtgtgaccttcagcactgacttcccctctctggtccacagtgtcttcctctgtagcagggtgatggtgtctactcttagggatggtgggcagcccagccaggtgggcatgtccccatagcactgagcctgaagttggggtcttcagagatggcagctggagtgggtgctggcctggaggcattgttctttgcaaatgtgaaaggttattgatttttttaaagaccctttttcaatagcctggcagaggagccaagaagtgggtggatggggcaggggcagaggagtgagtgcctaactgtgcaaggccacgtgtttgaggtgtaagtcgggggcagggggagcagctgagcaaagacctggcagagtggagggcctgggggcctcgggggaacagcccggagccctgggcggcaggaggg

SEQ ID NO: 21859 - DNA, 1205 bp, Artificial sequence
  DNA replication origin
ccgagcctgcaatggagatgtgaaggcagggctgcggccccggctccgcgagcgtcgcggcttcctcgtctgcagcggcctcgacgtccagctccggcccggcgggctccggtgccgtctctggaggactcctcagcgacggaggaggctccctgcgagaagacggagtgaggatgacagcagctacgagccagacggggccccggtggtggacacgcccaccgaccccgcccacactcgccgggccccgcccacaaccacgccggggcggcctgagagtgtgctgggacaggggttggttctcccaggcccgcggtgccgcccaccccgccgcccaggcctcaccggtggcagcgaggctgcagcccgggcaccgccccgatgcagaggatgcgggcggaacagacggcgatgcaggcctccacgtccggctcggcgcgcaggctcagcaggcacacctggcccacgtagccgtcgctgttgcagacccatacctcaggcgagggctccgggcagctgttcagggtgggagccgcacaggagaactgcaggaggcgccaatggacaggagaaggtgaatggaggaactgctgccagcattccccactcctgggaaaccccggcagaatggagggaggcaggcctgcatgggtgtgtgtgtgtggatgccctatacacccttctacacacgcgtacacatacacgcggcacaggacccttttttttttttttggattggttcttgctttgtctcccaggctggggtgcagtggtgggttcatggctcactgcagctttgacctccagggctcaagcaatcctcccacctcagcctcctaagtaactgggaccacaggggcgcgccactaaacgtggataatttttgaattttttgtagagatagggtcttgcctagcctggtcttgaacttttaggttcatgtgatcctcctaacttggccccacaaagtactggaattacagacgtaagccaccgcaccttgcccatgtgaccctctacacatcaaatgcactcatgcctatgggatacaggcatcatgcctacatgtacacacacatatccccagatataatcatggatacatgcatagaaaaaatgtgatgctggtaacctctgtacatatgtatgcagcctcatacaagcacataaatgaagctacttcccatcattcatataacctttgt

SEQ ID NO: 21860 - DNA, 2141 bp, Artificial sequence
  DNA replication origin
cgcccgcatcctctgcatcggggcggtgcccgggctgcagcctcgctgccaccggtgaggcctgggcggcggggtgggcggcaccgcgggcctgggagaaccaacccctgtcccagcacactctcaggccgccccggcgtggttgtgggcggggcccggcgagtgtgggcggggtcggtgggcgtgtccaccaccggggccccgtctggctcgtagctgctgtcatcctcactccgtcttctcgcagggagcctcctccgtcgctgaggagtcctccagagacggcaccggagcccgccgggccggagctggacgtcgaggccgctgcagacgaggaagccgcgacgctcgcggagccggggccgcagccctgccttcacatctccattgcaggctcgggcttggagatgacgccgggcctcggcgagggtgacccccgcccagagctggtgccctttgacagtgactctgacgatgagtcttcgcccagcccctcggggacgctgcagagccaggccagccggtccaccatctcctccagctttggcagtgagctttggccatctcctccaacttggccttggcaggcagggtggactgcccagaggagggggagaggagggaccagtgtagggcaaaggcatggcgtcagacctcaggatgttagcacacagagcaatgagggcaggggatgtgacaccaaggatccagaggacagtgggacagtcaggcgggatcatgaagaccctggagcactcagctaaggaagatggggtgctggtggagtggggacccacggtgtggccactgggtctgaggggccaggcaagatcaaggattctgtagtgctgagctgtcggtgagcagggcagcagggcagcagaccggagcaggccggggaagaacagctttgagaggccttccggaggggcatggccaggagggatgcatggcctagaaagatatcaggtcccaggcctggcagagggaaatggagacagagacctttgtctccctcagatgaggagaccccgagttccaaggaggccacggcagagaccaccagctcagaggaggagcaggagccaggcttcctgccactgtctggctcctttgggcctggtggtccctgcggcaccagcccaatggatgggagagcccttcgccgctccagccacggctccttcacccggggcagccttgaggacctgctgagtgtcgaccctgaggcctaccagagctccgtgtggctgggcactgaggatggctggtagggacaggggagggactagggacacagtgccagaactctgagctccctgctctggaaatcatgtggtcccctggagccaaggcaggagggctttgggtcacacctcaggggtactgctgaccagggatgtcagtgggtctgacaatcccagggaggctgtgggacctcagtaccttgggcaggcacccagcattgaagacgtggtgctaggggcaaagaggtggagggatgactccaggggctggtgtgccccaagcatttgtcccaggtgcataccccgatccacagtgtccacgtgtaccagtcctccgacagcatccgtgaccgcaggaacagcatgaagctccagcatgcggcctctgtgacctgcatcttgtaaggccccagggtggcccttcctatctagactcttctcagccacacgtgcaggcctccttctgttcatctggtccccctgctctactgtccctcctctgtgtggaggctggaagccagaggcctggccctaggctagctgtgcctcttacacactgtgtgagctcgggcaagtcacccccttttcttagcctcaggcaacccccacctggagaacaaggggtgggaagaggtggcctctcgggagccatacccattctatctgtggttcccctggtcctgggtgacccactttggctgcctgaactcccttactgcttcctcttttccctacccaggtatctgaataaccaggtgtttgtgtctctggccaatggagagcttgtggtctaccaaagggaagcaggtgagtatctgccctcccccacaccctgcccctgtccccttactggtgttggggctctctcctggagatgtggctttgggcaactcc

SEQ ID NO: 21861 - DNA, 2065 bp, Artificial sequence
  DNA replication origin
aaggcgccgggacaggacgcgaggcgggaggagtggggtgggggggcgcgcggccgggctgccgcatccgccgagcccgcgaacttcctcagagacacggggaggcagggggcgccactagggtccgtatcccgctggcccggccgcggagagcagactctggatgggcgctccgcgcgccctccttacctggctgcgccgcggcagctccagctcggctccccgttcgactcggcgccgcggcccggctcggcgagcgcccggacagccgcgcagcctgcgcgccttttgaatgaatcgccggctgggccgggaaggtgcgcagacccgcccccgcgcgtcacggccgctccgcccccgacgtcagagcgcggtctgcgccccgcgcccgactcaccccgagccgcggaggggctcgccgctctgccgctgggcggtgctgctctacgtcgccctctctcgcgcccctgggaactgcagggggctgcgcgggactgggcggcggtgcccagagggcctcttgtatccgcctcttcaaggctctgaaccaagcaaggagttgtgcgaagcaagataaagagactggagactgagatactcctctgggtcctctcagcattgccagtgtaactagagccacctctgcccctttctgggcttcatcttcctcctgccagttggtggccaggaagaataacctcactttgctttgttgacgaggcccaggcccaaccctggaaaccctcacctagttggcgaaaaggcctggtgaaggtgagtctataaaggaagcccacacggtgggcttcggcacatccttcaaggcctagtgaaatcctccaggaggcgtctcctgcctccactcccctactccccgcaccacttctctgtgccagggtagttagtttccctccagcaggacaggtgactcagtgcccccctccctactacagccatcccaccctgccagtttccaatgccagtcatcacaaactccaggcagtattcacactgtattccgactccgaatcgtgtcccctggagttgtgctacagggtgtgccaggactggagggagcagctcagtggcccgttccccctctcagtactattcaggggatctcaggcggtcctcctgggacagtagggctgatgggagactgagacaccagggaggacctagtgctgggccagaggcctggctggggtcaggataatcacagcccatgacagagatggagaaaggaaggtaaataagtcagctggggatagatggctgggggtggggttctaaacagtcatagaatctgaacccaggggctaggagacggaaaaggtcaggtccccagggtccaggagattccaggaggcgaactggacaccgcatggggaggggagcaggggatgagttttcatttccctgggtcatgctcaggttgtgggggaagggcataaggagctacaggtcattgatgtcaggatcatgacatcagcaccctcatatgtcaatggagacctccagggctggggcaggggttcttccagggtcccacatcccagcctacggaaggccagagcatccagaatgcctccactcctggaaatgttttctttgtaaggggaccatctacaccccagctctaggttctagagttcaaatggtggcaatttcaggtgtcgtcactcaataaaccaaatggggaaggccaggtgtagtggtcacacctgtaatcctagcaccttgggaggctgagttgggaggatcacttagcccaggagttcgagaccagcctgggcaacatgatgaagcccagtctctacaaaaatatgtgggagaatcacttgagcccaggaagttgagactgcagtgagccgcgatcgtgccactgcactccagcctaggtgagagagtgagaccttgtctcaatcaataaactaaatggggaaatgctttttggagcactggctattaatcagacatcccagagagggtccaggcccctctctaccaccagctctctgtgaggttttcatcaaatccacccccaactcagtttcctcatctg

SEQ ID NO: 21862 - DNA, 1284 bp, Artificial sequence
  DNA replication origin
gtaaggagggcgcgcggagcgcccatccagagtctgctctccgcggccgggccagcgggatacggaccctagtggcgccccctgcctccccgtgtctctgaggaagttcgcgggctcggcggatgcggcagcccggccgcgcgcccccccaccccactcctcccgcctcgcgtcctgtcccggcgccttccgcgcaccggccaccgccagtctccgagccccgtgacctgcaggtcctccggccgcgactccgggccggccctgcgtggtggctgtcggggggcgcgcggggaagcagcggaacttgcggtgtgaggggccggcggggcccggagcggtccccggcccgggaaacttggaccgagaccaggttgtggtgcgggctggacggcggcgcctcggcgcggctgcggcgcggggcggccaagggggggtctggatggtgtcagcccgtgactgtgggtgacacggcgcgtgaggcggcctggccgggcgaacgtgtggctgggacactgggcggtgacgccgggccgagcgggcgacacagaggggctctgtgtgtgggagacaggcagcgtgtgtgcgtgtgttgtgtgagggaaagacccggggtcactggggtcacgaagtgcgtggcttggggcgtgaccggcgcagggccagggccacccgttactgtgagtgtgaaatagagggagaggagcccaagtgactgagaacgagccgagctcgctggcgccatggtgtgcgtgtggggtcaagtggtgtcagtgtgtgtgtgtgtgtgtgtgtgtctgcgcctagggtgatgatgagtaagaggcaggaggaggagggaccggacctaggacaccttccggcagatgtggggcgatgaggaagttggggagccaggagacaagggtctccaggactgtccccacgagggcacccctcaggagttcagcttggtgaggagatggaccctgagggataggccctggctgagggagaaagccgaggctgggcaacatctggtggggtggcccagatggcagcagggtaggggccctgtggtagtctcagcttccccccgcccacctgcatccacacactcacgcatcgaagtccctacacctggcaaagttctgcccctgtgtaatctgtattctcagcggacccggacacaatcttgttctcagacccccccgcccccctcccccgcgcaggcctcagtctccccatctgcacactgaggtgctgggctttgaatggactgtgaatcatcactttgggatcctctat

SEQ ID NO: 21863 - DNA, 905 bp, Artificial sequence
  DNA replication origin
ttccggcagatgtggggcgatgaggaagttggggagccaggagacaagggtctccaggactgtccccacgagggcacccctcaggagttcagcttggtgaggagatggaccctgagggataggccctggctgagggagaaagccgaggctgggcaacatctggtggggtggcccagatggcagcagggtaggggccctgtggtagtctcagcttccccccgcccacctgcatccacacactcacgcatcgaagtccctacacctggcaaagttctgcccctgtgtaatctgtattctcagcggacccggacacaatcttgttctcagacccccccgcccccctcccccgcgcaggcctcagtctccccatctgcacactgaggtgctgggctttgaatggactgtgaatcatcactttgggatcctctattgttttgggtcaactgcctgtgttctcccttcccttcaggcagaaagactgcagtggggggtgggggcaggcttctcctggggacacagcggcccaggggctgcactcaggggctactgatagggttggaagcacagccttctccaaaactggtcaaggaaacgttagcctcccacccaaaggcttcctggtcctctgtcacgaaatggatccatagacaatatggatccccaaatccatagacattcacttctctgcctgggtgtcctttcttcagttccttgggttgggggagagtggggagagacttgttccccaggagtggtctctggtctgggaggctaagttcttgctggagagctggagcggtaccctttcgccatctgggcaagacccttctgaggccccttctcccgtatgaaggtctgtggggttcatgcagggtggggtggaagctgagctccctagtctagga

SEQ ID NO: 21864 - DNA, 1820 bp, Artificial sequence
  DNA replication origin
aaggaccaggacctagatggggtggggagctgtgggagccagacccactttggggaaagcttctagagaagcttctggaaagagaggccttcgtgttgagctttgaagggtaaaggaaaaggccttccttggaccagaaccagcaggagtgaaggcagaggccgggcatgcttgcagacctgtgaggaggaggcggggggagcctgagcctggagcgctgggctggagtgtggaggccgggctggggtgttgggtgttggttgcaaccctgtcatcacggacacaggccgccacacgcgcttccttcccctgctgatgcctcggggcacctggcagtttaaggaaggggaaggaagcccttcctcctctgggaagcctcccagcctgcagagccttcttcctgccttcctgcctgtgctgccccgtgaggccggctcccaggcagggcagccccctctgcttgggcctgtgcttgcgggtgtggagccggcctccccgggctctgcctgcccagcagcaccttgcctgctccccatgagtcctgtcatcctggaagtggtgctgaggggacagcagctgcctgcctgtccctgccgctctgccgagcctcctctccatctgccctaggccggcgaccaccaggggcctgaggatgaagccaagtctgctgtgccggcccctgtcctgcttccttatggtgagctggggatgggccctgggaaggagaaaagccgcaccctcagccctgcagccctccagcaagagggtgcagacactcccggggaaccccctgctgggcagggctcagttactcagctcgtcaagaatctgaggcagctggaccctaggaagcacctctgggcccacccaggcttgtcagggagatggagaatgaagggcttgctggcatttatgggcaaggcaggcatggctgagggcaagatgcccattggcacgcaggcatgagaacggagcccagcccagagggtatgctgggcaccaagaggaaactgggcaaaagaggcctgggatttggaccctgagagccatagcacctcaggtgctggggttcaagatctgtattggtctgggggatcccagattccaggtcccaggatcacaggatcaggccagctgcccggagctgcaggcaagtccacattacagacttgcagcatcttggggtctgccctggggcccatctttctgctgtgacgctagaagctcagggagggtgagacttggccttgggccttgctaagggttgctccatgtacaggaggccttccagccttagcaggtgctgggagccgctctggggtctgaggagatccctattccatctccagggcagctgatggtagcctcatccagcctaggccaaattgggggactctaggagggattcaggagagacagttcattcctaagaatgggaagcagagagaactcctagtgaaatgggctggggacacacactgagaagatggagctttcttttgggatgcgtctccctgtttgggtgtgtgggtgtgaatggggtagcctcgccttgagggaagattgcagaggaggatgtggtcctggagactttcgctgaagggagagcccagaataggaagcgccacctgcagacttggctccagggattataaatgaggctggttaatgatatgcccagctgtgatggggccagggatggacccaaagtaggaggaagtgggggcagaatacgagagaggattcggaagcatttcctcctcatcgttctggttagctggaagggcttgagatcctgatgtggccttatctggggcttt

SEQ ID NO: 21865 - DNA, 1993 bp, Artificial sequence
  DNA replication origin
tgcgcatgcaaacactcacatacccacacgcacctcctcccgccactgagtcagtcaccccctgaggcactagattcatggccaggccacagggaggcagatcccacgtccctgtgcccagacatgtgtcctgtgtgccatctcttcaccccctgaccccagcgtgaggggagggtggggctgggtgtctggccgtcctgaggaggccttgttcaggacaatgcttcgatggccagaagggaaaacaggagggcagtgggttgacctttgcatccccagcatggcggggagtgggctcccctgggcacattggctctcctgcagcccccactgactcgggccctgggcccctgtctctctgtgtttgtgtcactctgcttttgtcctgcctccatcgtctgtgatgctcagagtgggggcggcgggcccgacgtggcgtggaggtggcagcaggggccagcagcggtggtgagacacggcagcctgggaacggcacccgggcaggtggcccagaggagacagccgcccagtacgcggtcatcgccatcgtccctgtcttctgcctcatggggctgttgggcatcctggtgtgcaacctcctcaagcggaagggctaccactgcacggcgcacaaggaggtcgggcccggccctggaggtggaggcagtggtgaggcccagctggggtccaggtgggaaggacgggggcacgagcccagccccagctccacttgggggctgccagcggaatcctgcctggcctctggggtctgagagggagaggcttgggaggtgatagctgcagactgacaacatgggaggaaaggtaaggggacgaaggtgtggccgtgggggcagagcagaggtggcacagctggtcaagtggcttcagtggatcctaccctgggtgaagccttgcccagatgtggggatctggactctttggaggccacagttgtgtgtatggttccagggtcggatggtggccttggagttactcaaggtgacctctgacctctggcctggagtagcaggagtgccctgtggcaggagggctggcagggcagctgtcctgtcctgggcaggcaccataaggggctcgggttttggttccaggctgtagtttgagttacaaggcctggaaccggagggacaggcatgcgccaccaccttcacccccagggccccgggcccctttccttcttccccacaccactactcccctgcagggcaggggcccactcgcacacaccctgccctgggcccatgggagcctgtggctacctcaagagtgaaatggcatctcccatgctagcaccctcggctgtctggggctggcatgggagccagagacccttctaagtcctgacactgaagtctggcgggggcaggaagcggacaggagcagtaagccggcaggaggaaacgtggtgactcagggccattttgcctgggactgtgcttgttttcctagagacttccctttaactgctggatgctgcctgggtgcaagtcctgggagctctgtttgctgctgggcccagggctgatcatcgtggcccattctcacacccttgagatttgggcccaaagctgactaggggcactcagttaaattgttacatagggcacagtagagaggccatggaatagcagtttgctgtagatttggggagttctgggtagggtggcagcccacagctccttgaggctgaggaggagacagtgcagacccagaagacgctgacgcaccgccccctcgcccgcccaattcaatgactggagttcacgtggccctgaagcctctatgcacccgggctgttgggtgcaggaagcactggtgttgaatcatgaaggtgatatgggcttctctgagcctggatcccacatttgcagggctctgggaggcttgtcacctaaatgcacatgctcagggcccttaagaaggccagggttgccctctgctggcagatcatggtttagctcaggagtgc

SEQ ID NO: 21866 - DNA, 1335 bp, Artificial sequence
  DNA replication origin
gggtaaggtcatagatcaacaggatcccaaggcagaagaatttttcttagtacagaacaaaatgaaaagtctcccatgtctacttctttctacacagacacagcaaccatccgatttctcaatcttttccccacctttcccccttttctattccacaaaaccgccattgtcatcatggcccgttctcaatgagctgttgggtacacctcccagacggggtggtagctgggcagaggggctcctcacttcccagtaggggcggccaggcagaggcgcccctcacctcctggacggggcggctggccgggcgggggctgaccccccacctccctcccggacggggcggctggccgggcgggggctgacccctgacctccctcccggacggggcggctggccgggcaggggctgacccccacctccctcccggacggggtggctgccgggcggaaacgctcctcacttcccagacggggtggctgccgggcggaggggctcctcacttcccagacggggtggctgccgggcggaggggctcctcacttctcagatggggcggctgccaggcggagggtctcctcacttctcagacggggcggctgggcagagacgctcctcacctcccagacggggtcgtggctgggcagaggcgctcctcacatcccagacggggcggtggggcggtggggcaggggcgctccccacatctcagacgatgggtggccaggcagagacgctcctcacttcctagatgggatggcggccgggaagaggcactcctcacttcctaggtggatggcggccgggcagagatgctcctcactttccagactgggcagccaggcagaggggctcctcacatcccagacgatgggcggccaggcagagacgctcctcacttcccagacggagtggtggtgggcagaggctgcaatctctgcactttgggaggccaaggcaggcggctgggaggtggaggttgtagcgagccgagatcacaccactgcactccagcctgggcaccattgagcactgagtgaacgagactccgtctgcaatcccggcacctcaggaggccgaggctggcggatcactcgcggttaggagctggagaccagcccggccaacacagcgaaaccccgtctccaccaaaaaaatacgaaaaccagtcaggcatggcggcgcgcgcctgcaatcgcaggcactcggcaggctgaggcaggggaatcaggcagggaggttgcagtgagctgagatggcagcagtacagtccagcttcggctcggcatcagagggagaccgtggaaagagagggagagggagactgtggggagg

SEQ ID NO: 21867 - DNA, 874 bp, Artificial sequence
  DNA replication origin
cgcctctgcccagccacgaccccgtctgggaggtgaggagcgtctctgcccagccgccccgtctgagaagtgaggagaccctccgcctggcagccgccccatctgagaagtgaggagcccctccgcccggcagccaccccgtctgggaagtgaggagcccctccgcccggcagccaccccgtctgggaagtgaggagcgtttccgcccggcagccaccccgtccgggagggaggtgggggtcagcccctgcccggccagccgccccgtccgggagggaggtcaggggtcagcccccgcccggccagccgccccgtccgggagggaggtggggggtcagcccccgcccggccagccgccccgtccaggaggtgaggggcgcctctgcctggccgcccctactgggaagtgaggagcccctctgcccagctaccaccccgtctgggaggtgtacccaacagctcattgagaacgggccatgatgacaatggcggttttgtggaatagaaaagggggaaaggtggggaaaagattgagaaatcggatggttgctgtgtctgtgtagaaagaagtagacatgggagacttttcattttgttctgtactaagaaaaattcttctgccttgggatcctgttgatctatgaccttacccccaaccctgtgctctctgaaacatgtgctgtgtccactcagggttaaatggattaagggcggtgcaagatgtgctttgttaaacagatgcttgaaggcagcatgctcgttaagagtcatcaccactccctaatctcaagtacccagggacacaaacactgcggaaggccacagggtcctctgcctaggaaaaccagagacctttgttcacttgtttatctgc

SEQ ID NO: 21868 - DNA, 2305 bp, Artificial sequence
  DNA replication origin
gcgctctgaggctgtgggacgtgtcgcggcgccgcgccggctcctccttccctgcccttctgagcggtcccccgcctcctccctccgcctcctcctccctcgcccgcagccgagcgtcccctccccccacccgtcgggctcctcggcggctactgcagaggattcagagccgagtcgctgaggaggaggctccggtccccgcgcgccatccgccaccctactggacacgggcgagagcgtcgccgccgtagcctccggagaagacaagggcatcgccgcctcagccgccgccgccgccgttttcgcctgcagctgctcaccggtgaggagactccccccgccacagggtccgctggtcctgagtctgggccggtggcgctggcgagaatgagaggggaggctgcggagcccccgtgcaggttggggggagggggttgaggtcgcgatggaacggcgggctggcgggggagacttgtccaggcgctggccgggggtggggtgagggtgggacccaagcaggttggggggcgggcgacaagggaggaggacttttgatggagaataacccaacctgggacaggagagtggggtgggggcgtcgggttggaattcgggatggtcttggggcgaggtggaagatgagactagggtgggatggcttttaatgggggaggggactgaatgagggtggtgatttgggtttggcctggagcagttgacagcttgggatctgagctggggtgaggggcaggggaatgatttcaacggagagtgagtggcatgtacagggttggttagggccctgcgtagtgttaattcagaagggtggaatttggggtggacctggggcaggatgatggaggtggcaggagttgggggtgaggggcttggcatgggttgagacccaagcttgaagtgggtgtttgtcatctggggctggtggaatttgtggagacttatggaatagcatgggttaggatagagcagaagagtgcaatttgggggtttcctggggtgggctgatggaggttggaataggagttggtggaggtgggacattcagtgaggggagtgtgatggtgagctggcaggaaggggccacattggaagtcaggcccgaaatgggaggacagggatggaaatggagtgtggggcacagtgggttggatttagggtgatcttacaatcactggaaagggcatggtggctccttggttgcagagtcaaggcagagggcacataaaacatcactgggctgctttcattgaaaggatagcggcaggggtgagcaaagttgggggatggtatcttgaagaaaatatcccttggccaaggtggcagagggagttttggagaaggactttcggagatgagctggtaggcctggggaggtggttgctgatggtgaggtggcacaggggaaatttaaggaatgggagacctggagctgttggtatggatggggcagagaggatggagagggacagtgagctgtgctggagagcaggggggaattgggttggattattttggtggtgaaggattggggtggcctccaagagacacatgagggttaagggttggaatacttaaatgaacagccttggtggctgtggttgggtgagaggcagtaaggctgttagaggggactttgcaggggacacggaagagaccttctcattcttaggggccattttaatctgttcgggtgatgtttttgtttgttttatttatattagtaaaatttggaagtcaagtcagcccaaagggtaaagttgaaaggggatttagttaaggtagaattaaggaggggagggtgtcttctgttatttgtatatcataaaaagtaagttgggggaaaaaagcatacttccaaactaaaggtgggagaagataaactggaatgtaatggatatctttctatatgatgtctctgccttttcttttcccctctcctcctggtgtatttaaaaactagccaggcattttgaaatttaaatagatttgatgagcttgagattgttaagggtgcattccttgcttgagaactaatgagtgagcctgaaaaatatgagactgaatttattttgtaggtaggtaacaagcacataggcaaaaagagcttgggccttttttaccccctctttaaattgattgcttgaagacgccatttgttagtgtcctggtttgcaaggcaattaggcccatcattgtattgcaggctaataatcctgagatgagtcttggcaccaccgctttatgtaaacagagaagacaggaaatatggaaatgtcataaatattca

SEQ ID NO: 21869 - DNA, 811 bp, Artificial sequence
  DNA replication origin
ctgtagagctgggcagaagcagccccgcctgcaattttacttttctattaagacatttgttcactcatttatcatgaaatactttttcttaagaatcattgaactcagttcctagaaaaaaagaaaaagtaaagttgcaaggagaagccaagctcctagttttgcatgtttttttgatgcttcccctttccatccccagcttccagtctagtgagggagattacatggaaacacacaattggagcacaaggtgtgatttaacaatggaaaagatgagcctgacttttctcaaggggttcaggaaggcttcccagaggaggctgaaaggggccttggaggatgaggggcagtttcctaggcgacccgaaatttcccctatgaatactgtcaggatgttgaagagtgcccagcatttccgtgtgtctagaacataaagcgcaggggtggggagggcatcgggagtgtcaggcgatagagctgcagggtttggaaagaaatagcacagaggccttgcatgacaggcggagagcttggatgttaggacgcagtgactggagctgggggtgggagtttcaagatgaggagtgaggtgtgtgattagggggtcggaaaggcccctctagggcacagtgaagaatggactggcgggagcccacctggagaaaggaagactttctgtatctatcacctcggactgtgatcatttccttcaatagctcagccccgcaaaccctcacctaccagcagccacaggatgtcattcagagaccagaggatgtcagggcctaaaagacttctgtcccgtccccta

SEQ ID NO: 21870 - DNA, 1706 bp, Artificial sequence
  DNA replication origin
aggtctgggagccgagtgcggaaggagggaacggccctagctttgggaagccagaggacacccctggctcctgccgacaccgccctccttcccttcccagccgcgggcctcgctcggtgctaggctactctgccgggaggcggcggcggctgccagtctgtggagagtcctgctgccctccagccgggctcctccaccgggccttgcaggggccgagagagctcggtgcccgcccttccgctcgcctttttcgtcagctggctggagcagcatcggtccgggaggtctctaggctgaggcggcggccgctcctctagttccacaatgtccacgggcggagacttcgggaatccgctgaggaaattcaagctggtgttcctgggggagcaaagcggtgagtgcgtggctcccctactcctggcagctggccgcagcgtccccgcaccgcccccggtgcggcccttccgtccgcggaggctccctgcccgcctcgcgtccgcgctcgttgccaccgcagcccttcccgatgtgccccccggtgccactggctcttcgccagtggccgagtttttaccctgttccccgggttcttcaatcctcgactccccggctccgttccccgcagtccggccatctccggtcgatctgccctccctccccagacctcaccccgcccagcctcttgtccatccctttcttcctccggtctcggtcattgcccgtaccccggccccctttcttgagccccacccttattccttgctcttttcccagttcctcagctctgtgaggcccactcagggaagccccactcccgagagcgggccctcttcaaccttggccaaggagggtgggatctgggcgttgttttccccagaggcttggccctgcgaagtgctgatgtcgtggaaggtgggaaggggtggtagtagaaaaaattaaatgattttcacctgggtgggaaattagtctgggccatagaggaaacatctgaattggagacgacttgagcatggggtggttgggggtgaaaggggtagcgtcggcagtggagatttttgccccttaggttagatggggctgtggcttgtcggaaaacctcattttgttctcttgactttcatcactgacaattcttttggcaatgttgatgatttttcaatctctgccagatgctatgtcatgatcattttacttggaatttttctcatctcacctcccctttttctcttttcaacatgaagcagcgtctgagtctcatggtggtacaaaagggaattactggggaaatgttaattattcattccttcttgagtattttccaatgatatattgaggattcatgtgagagaaggcttggaataacaaacatctttgttttgtcggatttcctttggaaaatggagtagagtaggaacagactcatcatctagttacctaaattagatttaaataccatttgggctaaataattcttttatgcttaatattctgtactgtctgatgagtgaaattgttatgtcatttacctggtcaggttctgctgtcactgtacttttgtattagatactagatcctaattttgtgatggttgtatctacgattacttcttgtagtaattccagttttatgctgtattatacaaacttgacactcgacaattcagagatgattaccctcctttgtttttctcatactttgcatgc

SEQ ID NO: 21871 - DNA, 1015 bp, Artificial sequence
  DNA replication origin
gggaagagaagctgagggtggcggagccggaaccgcagacgtatctgggacctctcacgcgcagcgcctgagcttccacagctgccgccgccgccgcagcccaacctgctgagtgcgcgagcctctggagcggcgcggggcgagcccgggcgcgagcctgcggccccgccggccgctggcgtgcgtgcgtgcgtgcatgcgtgcgcgccaccgccatcgccatcgccttcctggtttggacagctctaccggctcctcccgcacggcggcgacggggcaggttaggtttccactggcgtcaaaagaagccaggaggaggcggggcaagccagggataagttagtgggaggctggagcccttacgtcacttacataatgagccaatcggaaggggctgagggcgagcccacacgcgagtgaggtggcagcgtgagagcgcgcgcagccctcgagctgtggaaagcggagcactgtggcggccataagaagtgtggcgcctctcagcctgaggggaggggaaggaaagaaaggggagggggagaagggtggggcggaggcggggccgggacaaaggtggaatatgatcccccaaaaagtgtgggtggggtcctatagccttaaaatttgtaatgggagcctctttcctgagccctcagccgtgcctcacagtcctcagatcccttcttcaccattgcacacaccccaccttctccatcctctcatcataattcctcacaggcatcttactaaataacattctcctccattgctcccaggaatgttataactgccagaatcatggcctcccaattttgcagatgaggaaactgaagcttagagggagtaaatgacttgcaaaatccataaagcgggctgggcgcggtggcccacggctgtaatcccagcactttgggaggcggaggcgagtggatcacgaggtcaagagatcgagaccatcctggccaacatggtgaaaccctgtctctactaaaaatgcaaaaattagctgggggtg

SEQ ID NO: 21872 - DNA, 1239 bp, Artificial sequence
  DNA replication origin
accctgagtggacacagcacatgtttcagagagcacagggttgggggtaaggtcatagatcaacagcatcccaaggcagaagaatttctcttagtacagaacaaaatggagtctcctatgtctacttctttctatgcagacacagcaacaatctgatttctctatcttttccccacatttcccccttttctattcgacaaaaccgccatcgtcatcatggcccgttctcaatgagctgttgggtacacctcccagacggggtggcagctgggcagaggcaccccccacctcccggacggggcggctggccgggcaggggctgccccccacctccctccctgacggggcagctggccgggcgggggctgccccccacctccctccctgacggggcagctggccgggcgggggctgccccccacctccctcccagacggggcggctgccgggcggagacgctcctcacttctcagatggggcggctgccgggcggaggggctcctcacttctcagacggggcagctgccgggcagaggggctcctcacttctcagacggggcggcggggcagagacgctcctcacctcccagacggggtcgcggccgggcagaggcgctcctcacattccagatggggtggcggggcacaggcgctccccacatctcagacgatgggcggccaggcagagatgcttctcacttcctagacaggatggcggccgggaagaggcgctccttacttcccagactgggcagccgggcagaggggctcctcacatcccagacgatgggcggccaggcagagacgctcctcacttcccagatggggtggcggccgggcagaggctgcaatctcggcactttgggaggccaaggcaggcggctgggaggtggaggttgtagcgagccgagatcaggccactgcactccagcctgggcaacactgagcactgagtgaacgagactccatctgcaatcccggcacctcgggaggccgaggctggcagatcactcgtggttaggagctagagaccagcccggccaagacagcgaaaccccgtctccaccaaaaatacatgaaaaccagtcaggcgtggcggcacgcacctgcaattgcaggcactgggcaggctgaggcaggagaatcaggcagggaggttgcagtgagcagagatggcggcagtacagtccagcttcggctgggcatcagagggagaccgtggaaagagagggagaggga

SEQ ID NO: 21873 - DNA, 702 bp, Artificial sequence
  DNA replication origin
gcagctgccccgtctgagaagtgaggagcccctccgcccggcagccgccccatctgagaagtgaggagcgtctccgcccggcagccgccccgtctgggagggaggtggggggcagcccccgcccggccagctgccccgtcagggagggaggtggggggcagcccccgcccggccagctgccccgtcagggagggaggtggggggcagcccctgcccggccagccgccccgtccgggaggtggggggtgcctctgcccagctgccaccccgtctgggaggtgtacccaacagctcattgagaacgggccatgatgacgatggcggttttgtcgaatagaaaagggggaaatgtggggaaaagatagagaaatcagattgttgctgtgtctgcatagaaagaagtagacataggagactccattttgttctgtactaagagaaattcttctgccttgggatgctgttgatctatgaccttacccccaaccctgtgctctctgaaacatgtgctgtgtccactcagggttaaatggattaagggcggtgcaagatgtgctttgttaaacagatgcttgaaggcaacatgctcgttaagagtcatcaccactccccaatctcaagtagccagggacacaaacactgcggaaggccccagggtcctctgcctaggaaaaccagagaactttgttcacttgtttatct

SEQ ID NO: 21874 - DNA, 969 bp, Artificial sequence
  DNA replication origin
ccgcctggcagccacctcgtccgggagggaagtgggggggtcagccccccacacggccagccgccccgtccgggagggaggtggggggggtcagccccccgcccggccagccgccccgtccgggagggaggtgggggggtcagccccccgcacggccagccgccccgtccgggaggtgaggggcgcctctgcccggccgcccctactgggaagtgaggagccactctgcccggccagccgccccgtctgggaggtgaggggcgcctctgcccggccgcccctactgggaagtgaggagcccctctgcccggccagccgccccgtccaggagggaggtgggggggtcagcccccccgcccggccagccgccccgtcggggagggaggtctggggggtcagcccccccgtccggccagccgccccgtccgggaggtgaggggcgcctctgcctggccgcgcctactgggaagtgaggagcccctctgcccggccaccaccccgtctgggaggtgtacccaacagctcattgagaacgggccatgaggacaatggcggttttgtagaatagaaaggggggaaaggtggggaaaagattgagaatcggatggttgccgtgtctgtgtagaaagaggtagacatgggagacttttcattttgttccgtactaagaaaaattcttctgccttgggatcctgttgatcggtgaccttacccccaaccctgtgctctctgaaacatgtgctgtatccactcagggttgaatggattaagggcggtgcaagatgtgctttgttaaacagatgcttgaaggcagcatgctccttaagagtcatcaccactccctaatctcaagtacccagggacacaaacactgcggaaggccgcagggtcctctgcctaggaaaaccagagacctttgttcacttgtttatctgctgaccttctctccactattgtcctgtgaccctg

SEQ ID NO: 21875 - DNA, 1320 bp, Artificial sequence
  DNA replication origin
ggggctcctcacttcccagtaggcgcggccaggcagaggcgcccctcacctcccggacggggcggctggccggacgggggggctgaccccccagacctccctccccgacggggcggctggccgggcgggggggctgacccccccacctccctcctggacggggcggctggccgggcagaggggctcctcacttcccagtaggggcggccgggcagaggcgcccctcacctcccagacggggcggctggccgggcagagtggctcctcacttcccagtaggggcggccgggcagaggcgcccctcacctcccggacggggcggctggccgtgcggggggctgacccccccacctccctcccggacggggcggctggccgggcggggggctgaccccccccacctccctcccggacggggcggctggccgtgtggggggctgacccccccacttccctcccggacgaggtggctgccaggcggagacgctcctcacttcccagacggggtggctgctgggcggaggggctcctcacttctcagacggggtggctgctgggcggaggggctcctcacttctcagacggggcggttgccaggcagagggtctcctcacttctcagacggggcggccgggcagagacgctcctcacatcccggacagggtggcagggcagaggtgctccccacatctcagacgatgggcggccgggcagagacgctcctcacttcccagatgtgatggcggccgggaagaggcgctcctcacttcctagatgggatggcggccgggcagagaggctcctcactttccagactgggcggccgggcagagaggctcctcactttccagactgggcagccaggcagaggggctcctcacatcccagaagatgggcggccaggcagagatgctcctcacttcccagacagggtggcggccgggcagaggctgcaatctcggcactttgggaggccaaggcaggctgctgggaggtggaggttgtagcgagccgagatcacaccactgcactccagcctggggcaccattgagcactgagtgaacgagactccgtctgcaatcccggcacctcgggaggccgaggctggcggatcactcatggttaggagctgcagaccagcccagccaacacagcgaatccccgtctccaccaaaaaaacacgaaaaccagtcaggcgtggcggcgcgcgcctgcaattgcaggcactcggcaagctgaggcaggagaatcaggcagggaggttgcagtgagctgagatggcagcagtaccgtccagctgggcatcagagggagaccgt

SEQ ID NO: 21876 - DNA, 926 bp, Artificial sequence
  DNA replication origin
ggggcgcctctgcccggccgcccctactgggaagtgaggagcccctctgcccggccagctgccccgtccgggagggaggtgggggagtcagccccccgcccggccagccgccccgtccgggagggaggtgggggggtcagccccctgcccggccagccgccccgtccgggaggtgaggggcgcctctgcccggccgcccctactgggaagtgaggagccactctgcccggccagccgccccatccaggagggaggtggggggctcagccccctgcccggccagccgctccgtccgggagggaggtgggggggtcagccccccacccggccagccgccccgtctgggagggaggttggggggtcagccccccgcctggccagccacccggtccgggagctgaggggcgcctctgcccggctgcccctactgggaagtgaggagcccctctgcccggccaccaccccgtctgggaggtgtacccaacagctcattgagaatgggccatgatgacgatggcggttttctggaatagaaaagggggcaaggtggggaaaagattgagaaatcggatggttgccgtgtctgtgtagaaagaagtagacatgggagaattttcattttgttctgtactaagaaaaattcttctgccttgggatcttgttgatctatgaccttacccccaaccctgtgctctctgaaacatgtgctgtgtccactcagggttaaatggattaagggcggtgcaagatgtgctttgttaaacagatgcttgaaggcagcatgctccttaagagtcatcaccactccctaatctcaagtacccagggacacaaacactctgcctaggaaaaccagagacctttgttcacttgtttgtctgctgaccttccctccactagtgtcctatgaccctgccaaatccccc

SEQ ID NO: 21877 - DNA, 1298 bp, Artificial sequence
  DNA replication origin
ctcacttcccagtaggggcggccgggcagaggcgcccctcacctcccggacggggcggctggccgggcagggggctgacccccccacctccctcccggacggggcggctggccgggcggggggctgactcccccacctccctcccggacggggcagctggccgggcagaggggctcctcacttcccagtaggggcggccgggcagaggcgcccctcacctcccggacggggcggctggccgggcggggggctgacccccccacctccctcccagatggggcagctggctgggcagaggggctcctggctgggcagaggggctcctcacttcccagtaggggcggccgggcagaggcgcccctcacctcccagacggggcggctggccgggcggggggcagagccccccacctccctcccggacggggcggctggccgggtggggggctgacccccacctccctcccggacggggtggctgccgggcggagacgctcctcacttcccagacggggtggcagccaggcggaggggctcctcacttctcagacggggcggttgccaggcggagggtctcctcacttctcagacggggcggccgggcagagacgctcctcacctcccagacggggtcgcggccgggccgaggcgctcctcacatcccagatgaggcggcggggcagaggcgctctccacatctcagacgatgggctgccgggcagagacgctcctcacttcctagatgggatggcggccgggacgaggtgctcctcacttcccaggtgggatggcggctgggcagagacgctcctcactttccagactcggcagccaggcagaggggctcctcacatcccagacgatgggcagccaggcagagacgctcctcacttcccagatggggtggcggccgggcagaggctgcaatctccgcactttggggggccaaggcaggcggctgggaggtggaggccgtagcgagccgagatcatgccactgcactccagcctgggcaccattgagcactgagtgaatgagactccgtctgcaatcccggcacctcgggaggccgaggctggcggaacactcgcggctaggagctggagaccagtccggccaacacagcgaaaccctgtccccaccaaaaaaacacgaaaaccagtcaggcgtggcggcgcgcgcctgcaatcgcaggcactcggcaggctgaggcaggagaatcaggcagggaggctgcagcgagccgagatggcagcagtacagtccagctttggcccggcatgagagggagaccgtgga

SEQ ID NO: 21878 - DNA, 743 bp, Artificial sequence
  DNA replication origin
tgggcttcctgtggactggctattggggtgtttactgcctggtacactgtaggtctgggtgaacaagtgaattcagcaatgcaacaggaggaccagaagattcaggcctcttgattgcccatcgcatcttagagggacatagtgtagtcacctcaccatccctgcctaaggtcatttcaccattctagcctgtgaagttcattccatggcattaaccatgagaggcagaatatgaaaactcttaaccatagcgcccctcgagtttacagcttatgaggggcttccacatctagcgatgcggcgtggcacagtggttaaggacacaggttccgtagtcatattgtcctgtggttcagatcccaactctactgcttactagctacgggaccttaagcgttttgtttgggctccctggaccaatgaaataataatgtaaggttccaaaaatagcacctgacgcatagtaagctctcagcaagttttagctcttcatcttaatggtggaaggcaggtcaggcattattaccccatcccacagaccaagacactgaagcccacggatcacacagcacatcaggggcagagccaggatggggctgtctttgcactgggaggaaggatgggggcagcaagaggggttatgggtgcagagctgggcaggggcaaaagaaattgaggaaagaggagtttggggaatgccggtggcctctcaaattgttagggaccaaccctttccctccccc

SEQ ID NO: 21879 - DNA, 1754 bp, Artificial sequence
  DNA replication origin
cagctcctcagttcgttcttgctgttttatcagccccaggcacagacagggcctttcacaaggaaagttctcacaggctgattaaacagtactgagaaggctcaggcaaatggtatcccttctctgggcatcagagatatgatgacatgagtctgtcacattcctgaccttgagctgggttgcaggatgttgtgaaggccagagaagaataagacccagctgctgcccaaagacaagtgcacagaggttcagctgccatattctgaatgttgccttgggcttgccaagtcaggtccttcagagggtgggtaagatggccctactaacagcaattaaaatgcaggactagaaatagttaatcctattttacagtccccagcaaataaccagtttcagagccgggctgattaccaatctcggtttcagggatagtcaaaagctagcatcaatatgaagttagaacaataggttcctgtcctagctcttctgctggctcccgggatgacttggggccaatcactgttacacgtgggcctcagttttctcctttataaaatggggaccaagatccttggcttgtccgagtcagctgaagggccagaatgagagcggggaggtgtgagagtgctctgtgaactggaaagagccacttcactgtcgggggtggggatggtaattatttttgttaatgccctgctgactcctgcccctagaccacagggttaggaggcagcaagagacctcttccttggactggactcttacccggctttgtaaggtctcacggtgaggcctccaagatcaagcttctctaaaggtgtcccgttcttcaaagctgccagtggctatcatggcccgatccccttggttttccatagaaaatgggtgggagacgaaacacctaatggtcatactatgtgtcctgtgggtgagcaaaggcagagagtttagaaagggccacctgccccaagacacacaagcccacccaatccatgccttggagggggatggggaacagggcccagggactggttaagtgcacacactggaaaggggaaaagcagggcggaaaatgaacctaggtacactccccacccccaccccacctgcttaatatcacaaattggttctcatccagacttctgcttttgtaacactcagtactctatataagcaccccctagcacagtcatcagactttggtgagtgggagagttgtgagggggtcacgatgggacagagactctccgggaattggctaggtcccaggtcgggctgtgaggaggttggaagggctgggagccggccctgcagaggccagattgagcagctcaaagcccactagaaaaagcccccaagccctgggaaaggcggtgcaggaacactgcctggagctgcctggtaagggagaggtcattgtggtcatcgctgatggtccccatccaaggcagggctcggcatcgtggtggaaaggagggagtgaaaaggtggaggctcaaacgacagccaactgaacgggagagggaaagaacaaaagggactaagaaaaagagagaagagaaataaagaaccaaggacagaaaggattagcacaggccggacccggaggctcatgcctaaaattctaggactttgtgaggccgaggcgggcggattgcttgagctcagcagttcgaggccagcctggccaacatggcgaaaccccatctctacaaaacacaaaaattagccaggcgtggtggcgggcgcctgta

SEQ ID NO: 21880 - DNA, 784 bp, Artificial sequence
  DNA replication origin
atctaggaagtgaggagtgtctctgcccggccacccatcgtctgagatgtggggagcgcctctgccccgccgccccgtctgggatgtgaggagcgcctctgcccggccgcgaccccgtctgggaggtgaggaccgtctctgcccagccgccccgtctgagaaatgaggagacctctgcccggcagccaccccatctgagaagtgaggagcccctccgcccagcagccgccccgtctgagaagtgaggagcccctccgcccagcagccaccccgtctgggaagtgaggagcgtctccgcccggcagccaccccgtcccggagggaggtgaggggtcagctccccgcccggccagccgccccgtccgggaggtgaggggcgcctctgcccggccgcccctactgggaagtgaggagcccctctgcccggccaccaccctgtctgggaggtgtacccaacagctcattgagaacgggccatgatgacaatggcggttttgtggaataggaaagggggaaaggtggggaaaagattgagaaatcggatggttgctgtgtctgtgtagaaagaagtagacatgggagacttttcattttgttctgtactacgaaaaattcttctgccttgggatcctgttgatctatgaccttatccccaaccctgtgctctctgaaacatgtgctgtgtccactcagggttgaatggattaagggcggtgcaagatgtgctttgttaaacagatgcttgaaggcagcatgctcgttaagagtcatcaccactccctaa

SEQ ID NO: 21881 - DNA, 1167 bp, Artificial sequence
  DNA replication origin
gcatctgtttaacaaagcacatcttgcaccgcccttaatccattcaaccctgagtggacacagcacatgtttcagagagcacagggttggggataaggtcatagatcaacaggatcccaaggcagaagaatttttcgtagtacagaacaaaatgaaaagtctcccatgtctacttctttctacacagacacagcaaccatccgatttctcaatcttttccccacctttccccctttcctattccacaaaaccgccattgtcatcatggcccgttctcaatgagctgttgggtacacctcccagacagggtggtggccgggcagaggggctcctcacttcccagtaggggcggccgggcagaggcgcccctcacctcccggacggggcggctggccgggcggggagctgacccctcacctccctccgggacggggtggctgccgggcggagacgctcctcacttcccagacggggtggctgctgggcggaggggctcctcacttctcagacggggcggctgctgggcggaggggctcctcacttctcagatggggtggctgccgggcagaggtctcctcatttctcagacggggcggctgggcagagacggtcctcacctcccagacggggtcgcggccgggcagaggcgctcctcacatcccagacggggcggcggggcagaggcgctccccacatctcagacgatgggtggccgggcagagacactcctcacttcctagatgggatggcggccgggaagaggcgctcctcacttcctagatgggatggcgggcgggcagagacgctcctcactttccagactgggcagccaggcagaggggatcctcacatcccagacgatgggcggccaggcagagacgctcctcacttcccagacggggtggcggccgggcagaggctgcaatctcggcactttgggaggccaaggcaggcggctgggaggtggaggttgtagcgagccgatatcacgccactgcactccagcctgggcaccattgagcactgcgtgaacgagactccgtctgcaatcccggcacctcgtgaggccgaggctggcggatcactcgcggttaggagctgcagaccagccggccaacacagagaaaccccatctccaccaaaaaaatacgaaaaccagtcaggcgt

SEQ ID NO: 21882 - DNA, 1290 bp, Artificial sequence
  DNA replication origin
ttcccctagtgtgatgggcacagtggaaacaccttcccagggtcgcgatttagtggagggcggcggagactgatgttgcaggaagcccccacgcattccgaggagctgaggaatagagagcgaggtgaggcgtcgaaacaaggaaggagtcagggggcgtggagcgagactgggcggtggacgggacgggccgggccggggccagagggcggggcctgagccgggagggggcggagacaggggcggggcaggcgagggcgggagcggctgccgccgcgcggccaggactgtctgaggggaagttcgcgagcgctggctatgggtcctggggcgcggctggcggcgctgctggcggtgctggcgctcgggacaggagacccagaaagggctgcggctcggggcgacacgttctcggcgctgaccagcgtggcgcgcgccctggcgcccgagcgccggctgctggggctgctgaggcggtacctgcgcggggaggaggcgcggctgcgggacctgactaggtgagggcacgacgagtgggagcgaccgaggggcctcagtgggatacactgtgccgcagggtggggtgactcaggttgagtgtgaccccaggctcattgtcatgctgcgtgggaccccagacccactgtcgcaccgtgcgactgagacattgtggcatggggtggggagtggctctgagggccagtgtgaccccctagacccattgtcaccctgtgtgggaccctgacactccgtggcatgaggtgttggcgagggttgggtcacactgggactgcagactccatcacacacatagtggcaccccccatatccagcgtcacacagcaaagttgatacactgtggaagagcggggcggggtgactctaggacctcacaatgtgctgtgcaaagctgtgtgagccccaggccctgtgtcacactgacacagacacagtggacggtgctgtgacagagacactgtgagagtgacatggagagaatacggtgacgctttagctacgcaagtattgacctttcaaggggggatcgtgaaacaccgcatgacctagtgagctgatgtttagtgttaggagtcaggtgacagtcttccaccatatgtgaggtttacatgtcattgggactggatgggcacgacactgtggatatcatactctgcatgtgaatgatgctgagtaactgtacaggtcgctatatgaataatgcttcagttcattaattcatacaacacatatttttgagtgcctactaagagccaggcagtgttccaggca

SEQ ID NO: 21883 - DNA, 1789 bp, Artificial sequence
  DNA replication origin
ccgggctgaccaggtacccaccttatcccagcggagccactgcccgatggccgtgtccagctgagggtccccggtgtggtagggggcgtggagcaggttggagttcagatccccctctgtgttttcagccatggcgaccagacaggcgtacgggccgggggccggcgaagacactgagttggggtggggggtggcttggggttcgctcaccagggtccaggcgtccccacctcactgaagggcatcggagaccaaccgcagggtgttcgtaacagctcctgccgcggcgtcagggaaccgggagagagggggtttatggccgcctgctccccagcggaccaggtccgggtctctgggcgaagtgactgaggcggtcgcgccgcgagagaacaacagtcccagatgtctgggtcctggctccgccgccgccgccgccgcccgccccgcctacggccccgccccgcgccttaggccccgccccttcccgcccttgctgatttaagtccccgaagttctagactggagcccgggagcgcgctccccacgcctccgaagtagtgggggtttacagcccgtccgggtggtgaggcaatagtgcacggttctttttattttttaatttgccaagggtctcctttcctcgatctgctctcacggctaccactagcaagctgcctttgcgcttgccctgcaggtccccagcgcgcgcgcaggcccccagtttctcttgggggcacgcgccggttgggggaggaggggcagtgcgagctgtccgcgcactgcctcacgggagttgtagttctttcctttgtctgagctcagcggagaccgccgccgagactacgactcccagcagctccgcgttccccctttcctcaaaagaaaaagatctacctcgaggtagttccctacagacacgccctatccctattagttatgctgcgctgtgtggccctggcattaaattaaacaaggaatgacatagtaaggggacaaagtggtatccgtttagtgctgtgcagtttacgaatcgcgttctatcgcctcaatccctcagtaaggtacaggggcgtagtccttttccgtttcacacacaaagaagaaactgactccctgagacacctctcctaagaggccgagttcgtgagcggtcaaactagggttccaatctcatttcagatcccctcagctggcagttattttattaggtcggtgcaaaagtaattgctgtttttgccattaaaaataatggcattaaaagtaatggcaaaaacggcaatgacttttgtaccaatctaatatctctgctgctatagtaaactaggaggtagggagaacaagattactggaaaatagataaggaagttgttgagggaagatggtcggcatttaacctaaatataagaatgtataagcatcacaagataccaagagcaatggtaatgggaatacggaggaaaaggaaattggttcacccaaattgaaatagtcttccgttacttcttagccgtctctcctatggaaagctcacctaagttgaggtctgggaaatgctgagaagtgctgacctgtcagccacctagctactcctccgtttcttggtttggccttcttagaatggctatgattttgggcaagtacattacaactctttccctagtcagcttttttgtaaggaaggtatgataatatttacatcatggctgtacagtaacttaataaatggcattaggctgctttgaggttcacagataaaagacatattaagttcaaagtattactttatttc

SEQ ID NO: 21884 - DNA, 875 bp, Artificial sequence
  DNA replication origin
ccgttcggttggtgcgcctgggtcgggtgccgtacgccgagctactggggctgcaggaccgctggctgcggcggctgcaggccgagccaggcattgaggccccgtcggggactgaggcgggcgcgctcctgctctgcgagcccgcggggcccgtgtatacggccgggctgcgcggcggcctgacgcccgaggaaactgcgcggctacgggccttgggcgccgaggtgcgcgtcacaggccgcggtggcctggccaccttccacggcccgggccagctgctttgccacccggtactcgacctgcggcgtctcggcctgcgcttgcgcatgcacgtagcgtcgctggaggcgtgcgccgtgcgcctgtgcgagctccagggcctgcaggacgcccgcgcgcggcccccgccctacactggcgtctggctagacgatcgcaagatctgcgcgatcggtgagcgccgcggagcagggcggtacctgagagccgaggtcggagcttgaggcctgggggcggggtctgacggggctggaccaacggaggtgagggccgggaggaggcgtatctagcgcgggttttgaatcacagctacccgctgcgtttgagtttttaagccccttttcagatatcgtatattcagaagcagaaggctcctcacatctagtccaacacgcatttctgttaagggagagacaagagaagtgaattgccaggttacgtcctgcgaatgacaatgtcatggcaaataagggtgctaattttcaaacttttttttttttttttttttgagacagagtctcgctttgtcacccaggctggagtgcagtggcgcaatctcggcccactgcaagctccgcctcccgggttcacgccat

SEQ ID NO: 21885 - DNA, 1159 bp, Artificial sequence
  DNA replication origin
ttctactagctctgcctacctccgtctgcgccgtctccctgactagtttgacccttcgagggccgccgtagtgcgtcgcctccgttgccggggaaacgacccgggacctgggagggagcaaagacgtttcccgccggcgggagctgtggctgtgattgagagaggggttagaggcgggtcccagcgctgccgcaccatggcggaccagctttatctggaaaatatagacgagttcgtcacggaccaaaacaagatcgtgagcagctactactggggaacgcgggcgtgcgaccggggtcctgggcccggctagggcggcgggagccttgaccctctgtctgcttgtggcttcgtggggaccaggggagacaggtccccacgaggggacctgggcgagctctgtgccccagagcgagcgaggactcgtcgggaaggtcctccagcacacacggaagtccgcgtcccttgggtgggcgtgctgggaacagagcctggggctggagccgcggagaccgggcgcggagggagggccgttggctgagagttctaaggcgtccctacacctttcttttaaggtggttggcgtttaaagttttaagtttacagttgaggaaatcgtgtcttaactgtgttaagttacaagttgcgtaacctccagatactgtttcctcttcctggaaatttaagcattgatagaggtttgatccgcttcacacgggtgaggaaaagatcgagcgaattgatggatgtgagtgcactttgcaaaccgtgatgattgagtgcctgctgtgtgccaaggcactttaatctttacagtgacctccccgcaccccatcccaggtcggtggtggtatcccgagatgaggaaattgaagctgaggggccaaataacttgtttatttgcgtttggtaagggataggcagtttttcaacctaggtctgtcctcttactaatgctttcttctacatcacactgcctttgcctaacctgtgcaagtcttctaactattggaagcttgacatttggaattggaagagactttgagagaagagagtgcaggcatcctgggtctaggagggatgaaggcttgatgctggtagttcccaatctaatctcttataaaaatatttacccacttttttcgtttcctgacccctg

SEQ ID NO: 21886 - DNA, 1314 bp, Artificial sequence
  DNA replication origin
gctcagagcgtcagtaacttgccccaggttcctctgctgtaaaaggcgagattcgaactccaaacagctgcccctggagggctccacttcccgcggttgccagcaggggtgcgcggagccgcggggatccgagaggcgggggccgcggtgggggccgcggtgggggcgctggaagaacgggggctttgattcccatctcccggcgcagacccagacgctaattaaaatcgcctgggccgcgggggcggcgggacgggcacaaagccggctttgaccgggcggcggcggcgctggcgggcgcggggccgcgtcgcacaggggctgcttgtggccgtgtttgttttcgcttgtaaagcgcggccgcgagcagtgcccgggcggcgtgggggtgcccagcccggggagggcccctgaggccacggcgcccgcccggccgcgctcgctacccagggccaccctgggcaaagccctgcccactagggcctcagcttccctttctctcacaggatgatagcggtgtcactaggaatgaacgcttattgggcgcttactgtattccagggcctggaccgaggcttctcccacttggttttatgtcatcctcccggctctattaatatccccattttacagatgaggcccagggaggttgaacaccttgcccaaggtctcacgggtttaaaggaaagagcaaggcctaaagtccagcagagggagagcagggttcggggcagctgggtcacaggaggtgggtgtatcggggagaatgttcctgctcagagcccgctcactgcctatcaagctgcgctttgagagtgaactcccatcgccggggtactgaagcggagccttagactgaaccagtgggggccctctgagcttccttccagcttgggccattagggtccctcagtgtgcgggagtggcactgccctgaaaggaaagccttttctgggctgcactgggcattgggggtggggtccgagtattgccagtgctggcagaggagtaggtctctgtggatgggtgggaaccaagaaaagataggagcttcttccttgggagcccccatgtttggaagaatctcctggcttctatagtcattgaatcaccaaatcttagtggcctttgcacttgcacccaccctgtggttctgtctttcactcacttttcactgagattcccactcatccttcagttctcagctcagagcaagttataccctcccagcacccatcacttcttcatacccatcacagtggtaatggtgcactcaaggcattggccctttctgtctgactcagagccctgagg

SEQ ID NO: 21887 - DNA, 2089 bp, Artificial sequence
  DNA replication origin
gttgaggaaactgaggcaaagaagagtttagtaatgctacccaagatcatactgccagtgagtgaacgcggagtgtggtttcaaacccatgcactgtagttcagagcctgcactcctttttttttttttcacccatttcccctttcaagaaggagcctgcactcttatctgttactctgcactgcccagacactgctccaaatactttcccttccttatgtccccaaatttccttgaaaatacaaggaggaaatggaagctcagagaggttaaggaactttttcaaggtcacacagtactggagtcagggccacaaactagatttataaatctccaagacccaagatctttagagcttgtttggaggttctagtaggggagcatagctcctcatatacccttgacagagggatggtcctcctgtatcaggaaggtcatcctctttgaccaagcatgcagcttcaggagggatgcactggagtggtgagggaggaaggggacacccgcctagccagccagaccggccaaatcaaccctgtgatcattgaggtgacagatgtcacagccagattgtcttcacatcaaaaacccaagatcttaaccagtgtagaaggcagtcagtgctttagcagaggactagagagtacggaaggagttcacaggagacaaagagcacccctactggggcagggtggggcacagtcatagagaaataacaacatatagctatttgaaaatgggggagagggaggggagaaagtatatttccaaggaggggacaggttaagcaaagtcaaagctgcaggaaagcacaggtgtttgggattgaacaggggtggagggtagttttgggggcactgagaaaggagactggagatgtagccaggtcccaatttggaacacgaggctgaggggtcagagctttattctgaagacagtggggagccacactccagtgaccccactcctctgcccacagggagctctcaaagggtgctgagcagcagcagtcatgcacaaaaatgcctttaagagggtgaatgcagtgtgtggaagacaggactgtttaggggtcttcctgcctctgatggcatttcccactcaagggcacctgtgattttcccatatccctaggaggaagggttgatgtgaggtcatgaccattttatgagtgaggaaactgaggcccattgggagacatgcgggcctgtgagggtaacaaggcccagtgatgggaacaaatgtctcacttcagtcctggtgctgggagtatggggaccagcgattatacttttcctagtttatggctcattcatcctcattcatgtaacagaatcagcatgaggctgtggattccaaggccccaagcccaagggttccgattcagcagatgtgaggtggggccatcaactggcctttttaaacaagcaccctggtgactcagggccagagtatccttcaagaaaccctcaagggtgtaaggatcccaacctcagtgggagaacgctgcccatgatgcagccttacctgtgagggcctcctcctgccccttcctctgggggtgcctcagcccaactcaggcctcatcaagtcactgcctccagcctcagcccttcaacccctcctttacacagcagcccaagtgaactttccaaaaagcaaagctggctttctcacggcccagctcaaacccctcccgtggctccccgtcacacaggtggaagtcggcctcccctgcccgggttcccgggtccagctccagagaaggcaacgcacctgagttttactcccccgttgcctctgcctgggctgccttttcctgtgtaccgggggacccctcctcaacctcacctaagacgcagccccctgcccccagaaaggctttctgtcccttgccccaggactagaatacctgctgaccttttgtttcttatgtaaacctcccagcaatactctaagggctggctccggctagcgctattaataatggggaaacggaggctcagagcgtcagtaacttgccccaggttcctctgctgtaaaaggcgagattcgaactccaaacagctgcccctggagggctccactt

SEQ ID NO: 21888 - DNA, 1515 bp, Artificial sequence
  DNA replication origin
caggctgtgccatgtatgtcctggagaaacccactgcttgaatgaagctcctttcttctgattaagagaatgtggtttggttttccatcctcacagcattctaagagattggctgggcatggggaggggggaccaccagcctattgtgggcgcagtgaggaaactgaggctcagattgatgatgtaacctgtttgatgttacactgtatctatgtggaaaagcataattgggaactgattttttttggaagctatcaagcaccagtcttgtgctagctgctttacctcttttctctaatttaatcctatcaactctcctaggatttttacttccgctttatagattaggaaacccagggtcagagaggtgcactctgtgacggcctcccagcagctggcattcagcggggctgggatggtgaagacgctggtctatctcactgtgccctgccgcctcccagagtctcacactgcaaattcagggttccttctagacaatgtgaggcagggaataaagcatgggatctggaactagagttctggctttggatggcttacccgctctgtaagttttagcaagttcctccttgctcagcctaagttttctcatctgtaaagtgcgaatgataatacccacctcactggagagttgcgaggatcaaaagagagaaaagaatgggaaggttatcctaattacctctcatttctgtccaatggctctttccaaaggcaaaaagccttttcttctccatcacactccttacctgtagccagacatacccgactccctcctaggaacagtaagtcctcccccaacccaaaacacagtgccctgccctctccccccgctgcccttggtgcccctcctcaggtccctggcagcagccctctctcagttctgagttgtgccgagttcctccggtcccccggcccatactggtcctcacggagtctccacccctccggcacaggtgctgcctggacggctgtcagaagagcttggggtccaggtcctggcgctgtccctcacattccaggggccgcatccctcctctgcccacccagcctcccggtctacttacgggctcgagcgtgggagtccagggggaaccagagcagcgcgagtcccagcaaggaggagaggaccctcacctcgggaaccatcctttccccagggtcaggccgctggtccgggagcggagtcgggaggaagggagacgaaaaggacacggaggcacaggggccacagatcaacccacagaccccaggaggtctgctgctagagcggggtcggagaagggccaggaagcagcggtgggcaggaaaggagggcaggaagggaggtctaaggtgggaagaagagaaaggtggaaagagaacgcggggaaaggagggagagatggagagacgaaggaaggtccagcagaagggagaggcgatcaaagaaagggggaaggtgagagggagaggaggagaaagcagggagaggaccggcgtctgccgagcgcgcagcgc

SEQ ID NO: 21889 - DNA, 1339 bp, Artificial sequence
  DNA replication origin
gagagacgaaggaaggtccagcagaagggagaggcgatcaaagaaagggggaaggtgagagggagaggaggagaaagcagggagaggaccggcgtctgccgagcgcgcagcgccgggcgaggcgcgcgggaccagcgggtgttgcgggcgcgcgggctagaggcggccggcgccccctgctcggtgggctcggggtcgggccgcgggggcctggggcccggcggggcggcggtcccagcagcggcggcggcgcggcggccgcggagggaggctgagcgcgggccggctgtgctcgccaagggcttcaggcgccgcgctcgggcgcatttgtactttgccgcgggaagcaggcagcccggcctggcgctggcctagcgctggcgcctcctctggggcaccgcgggctcggtggattggccacccgagaaacaggcccactttttcccctcctctcttgtgcgggtctccgggacggacgctccaggcgcggcgccgagtggaggcgagggggctgcggagggggaaggggccacgcgggccacggggtttaacccctgactccccgcgacgccaagaatgcaggagggcagagttgagggagacctcaggtggaactttcaggtggggaaggctgagctgtcggggctgcgggtaccgggaaggctcagggtaaggcgctcggcggtgcgtgcccggaactccgcagatggatggaatcagaacactggcgttcttaattcagtttgtggtctacagcacgccaccggagagtctgttttcccagctttaaaatgggcattttaagatcttaaaatatctctactatcttcccacgagtgttgctaagatgaaataaggtaatgaacgtcgaaacactcaccccacaaagagaaggggtcctaattccaggtgcctacaataccagtggcccctgtccccactccgtctgcccatgcgccattctcaggaaagtcagcccatagggatcctgtgccttcccctggaggtcttcctctgctccccgctcccactcccgaatcaaggcaagatctctcctttgcctttgcaggtgaggcctgcacttctctgggagtgatggtcaccttcagtcatctttagggagagctgattgtcaaagagttttctttcccaccagaaggggagctccctgaggacagggccctgacaccctccagccctcaaatggtgctccatctcttgtgttgaatgaacacatgcactaataggacactaagaagagaatagccagctctggccagaccagaaacacacaagctctgaaatcaaaagggcagagtcactgtcctggctccatccg

SEQ ID NO: 21890 - DNA, 936 bp, Artificial sequence
  DNA replication origin
ttgtcgccgccgttgctgcagccgccgctgccgccgcggccggaggaatcgggctgcgccgggtgcctggagccccccggagaagcagcggccctgccgtgcggccactcgctttgccgaggctgcgcccaacgcgccgccgacgcggcgggcccgggttgccctcgctgccgcgcccgcggcccaggctgggcccgccgtcgggcccgcgacgacggccaggccgactcagaggtgctgggcgagtgcgcccgccgcagccaacccgagcgctgccgcccgcgccgggacgggggcgcggctgccgcggggcccaggccagagcaggagccgcgtgccgcgcctgcggagccaggtggagcttccccacttccccttagggtctggagcgaggccgagcgcgccccggcccggcctggtgagggggtggagagtcccgggccctactcgggcgggtgtggagagttctcgtgggattagaacccgggctctacccaggtgcagtgtgtttgtgaattttgaacttcagagtgaaggacaggcacgttgcatgcggaggggcggtgagggcaccctgtgccttacgtaagtccgaagtttggagggaaacagaattgttggaacaagttaggggcaggttggaattggtgtgtgggagtgggaggggccttggatcagagaagtgcttggtttaatgttggatgaagagtttgggggtcatattgcttggagagatgtggctcctggccttgaaagggtcagtgaagggtgtggagaatccggagtttagggaacaggttgaatttgaggatgtgaagggagcttttcagactcgagagcagagggggttgggagcacacttgtgcagttgttttcatacattttggaaaatgtatgcttagcacagaacttggcacatagtgaggaagcagtaag

SEQ ID NO: 21891 - DNA, 908 bp, Artificial sequence
  DNA replication origin
gcttcatttctcagaaaatcagagctatgagtgtgggacccgatcaggagacctgaccacccgtgggatctccagcctgttcctgcctctctgggcctcagtttctctgcctgtcatggccatcctgcagtctcactcccaccaccctgttcactgtgtccagggcacattttagtcccacttgcctccctccaagggcctgttcccaaatccctggggtgccccagctccaggtggccagggcaaggtgaaggtgggcaggggcaggatgtcagagggaggcttagtctgagggggaggtcaccctgggaggagggcagggaggtgtcccctgggactcacagtgtcacctggcttcacgctagcggggagcacagctaacctgccagggagacagaggcccagagaggctgcgcctttcagggtcacacaggggtccagtggccaggctgcagaggaggccaaaggcggaagctggatgtccctgtcttgggcttggggtgggtgtggggcagaggcccaggatgatcagtgaggctgggactggagcttagtgaaatgtcagttccatggggaagagggtgagcaggagctggagacagtctctagccagggtgtggagtggggaagtggggcatggggcaaagtgagctcctctccctccctggggtgagggggcactctatcagagagggaaggaagatcatcagccacaaaatatttcctcttcctcctctgccagacagtgcttgtgtgtgtctgacaacatcttggcacatctccctcggggtgggggtgggagtgggaaggctggcactgtctgagctgagggcccatcaggaggcagtgccaggggactctgccaagggtgaagcacttcccagaaccctctgctagcagctggaaag

SEQ ID NO: 21892 - DNA, 2127 bp, Artificial sequence
  DNA replication origin
gggcggcacgtcccgcggaggctggcggagctcggctcccgacgcgcagcgcagcagcagcttggggccgccgaagcagtagcactggaaggggcagggtgccgcgggctggctcagcgccgccgccacgagcagcagcccctggagccccggctgtcccgcgcgcggggccatcgcggccgcccccgcatccagcgcccgggccgccgcgctcaccagtgagttgggagcgcctggtggggggcacgggtggggcgagtccttgacccggagcggctggcagtcccggtcggtccgttcgctgtctcgaaagtctgaggagccgcacttactggctgactggccgggggcaagaggggtcagacggggagcggagccccccgcccccggtgccctcgccctgcgcgccggcctccggcttccgcggccgctccgggctccgagccgagtgggcagggtttgcctcccccctccccgcctcccggtctcgtcctccgcccccagcggagtctccgcgccctcctcgccgtgggaggcggggtgggaggctcccgagaatcagggctgtcggctgctgcgctttctcttcatcctctccgcccccgcccctccgggctgccgagaagtttggctcctggaggctccgacttggttttcctcctcctccacccccaacatttaagctgggtccttcctcctccttctccagcacgtgtggggcggggcccgactgcggagagcaggcaggtgggtcaccaccagggagaattcgggggttggggaggactttagagctgctcctactaccggaggaagggatgaggggtgggctgagaaagttactcattttccggcctcttcctaaggcagagagactggaaaatccccagtctctgcttcctcctctgcgaccctagttccattagacctggctgtgtcaccacccctgcaggtcctatgggaccagctttttctccatcccatcccatcccattctcaggagaagtctgtggcacccgctcccctcccacccaccaactctggctgctctgcctctgccaggagttcccccgtgtggtttcctccaccgggctgggcttctctgccaagcactgtcctaggcacagagacccgggggtgtagtgattctgctctttgctttcactccctgcccccaaacctcttaagactcctggggttccgttggacactgtcaactagtccctccaggcttctccgcctgtgagtggggtttggggcaccagaggttgggagagcaggagcagattttgcagcatggagttgggggtctcagaaggggccagggctgagggtgggggggctgagctgtttacagatttgttttgttctggattttttttcccccagaactgggaagctctaaacctgatttaaagagacaggctcctgagaagggaggattcctggccttagcatgaattattcaggctggagaggctgacacttgatccgcaggccattcgggtatcagcagagctggttggaatagaggctccccacctcctcccaagaatcagtctctttctcctgaattgggtacggttgttatgttgactccttccctgaggttatatttaacagatcgaccaaaggatcaataccacttaaggagaagaggcagaccctgcagtggcctgggtcttgggcaaggaccaacattaaggaacagagctggtgatgatgggggtctcccagctctcccctcctccaagcccctctctcttccctaccccctgtcttaactctcccaggtatgagagctcagatgtgtctcatgcaagtccatgcagactcattcatatgtggacataggatcgtaggtttgagtgcgtcctggcatgtgtccataaattcataaagacatacatatttgaatatgcacacttctgagcccatgcaggttcgtggatacattctcagagggcaagcttacaggcccatgcttaagccatgccaagcatagggacccagcgattggctagcacagtcagaccctactcctcctgccctgcaccatgcccttggtctgtggaggtaacaggctggtgatgtcttttctcacatgggcacacgtgctcaagtaga

SEQ ID NO: 21893 - DNA, 1314 bp, Artificial sequence
  DNA replication origin
gagggggtcctctcccccactcaccaattgtgctttgggatcatggagaaggcaaggtgctgagcttctgaccctgaaccaggagggcttgtgcctgaggcaggaggaaagacctacttctctttcagaagatacacggggtgaggtggtggtggtagcggtggtggcaaggaatccccaagggcgaagagccacaggggtgggagagagcatagagaaatcgaagggcagcaacttccagcccttcagaccccacttcctgcccctctctgaggccacgatgccccactatccctttcacacacccaagactctctccttccctacaaggatctgccagtatgcactaggggtgcatggcacctgcacctatccggcaggactgaagagctcgtcctgggacgaaaaggggatgaggacatcccagggacggattcctcactggaccttgactagtgaatggcaggggtgggtgctgagtgccagcattgggtatggggggggggtcaagagccaaaggcttgggcaggaggacgaaagtcagatcggggtgaagagctgagagtctgagactggggaccagcactgagtatcgggaggtcagcgccctggtgggaaaggctgagagttggctccacactaaggctagatgggctgtgcttgtccctgggatgggagggacagactaggagctgagccccatgcctgagccgaggaagggaagggcctgagccagaggcgggggtgggtgaagggggggcaggggtatgaaatatattcttagatgaggggagggtgcccaatcctcagagccccagggttgggcctccatgcaggatggagggctctgagctctgggatgggacaaagggctcaaaatccacaaaaccattctgatgggggtgctgtgcttcgagtccagaatgggatggaagggccctcaagccccggaggggactgagggctccgagctggcgagggaggtcagtgcagtctcgggtgtcggagctccaagcacagggtgctgggggcaagtctcagagctttggccttgaaggacagattctctgtgtgagctccgagacggggaacggactttcagtggttcaggagggaggtttcggaaactagggtgggcaggcggggtttctggattcggaccggctatctctgggtctttgacggtgggagctctcggaggcgggaacgagagggtacggcttagcgcctccgagtcaggggaaggtctcagagctcggggctcgcgggtgtctcatctccacggcttcgggccaggcaagggaagccccgagc

SEQ ID NO: 21894 - DNA, 1103 bp, Artificial sequence
  DNA replication origin
gatcccccacactacgcctagtatacagcaagagcttaataataaatggaaacgaggagaggggaggggaggaaaggaaggaggcagaagtcggacacaagaatagaagagaaagacagaaaacaatgagaaagagggggagcccagggagaggctgctgtgcccacttagggggtggggagggcaacggggaaaatagggtggcaacgctgagcccctgaccagcgctggtcctgtctgaagggctgcccccaggggctgtcctgctccagccccctcctccttttgtcccagtttcccctttcagaggcagagactgtttctgagtatttcaggacaggttctaggagaacgggaggggttctcccagccctaggttcaaaacagcccctggccagccactcctcaggaggtcagagggaaagggaacagagtagatggatgggatctatttggatgaaatgcgatctgttttccccaggctgggggtggcggggggcgctctaccctgtgtgatgtgtgtgtttccacttctggccatgtggggcctgaagcgtgtgtgtcagcgggccttgggctagcagctcgtgcctgtggggtgccagtctttgagggcatcagtctgattgtgtctgtgggggtcagtgttggtgtggccttgcgctccgctgtgttggtgagacatgccagcacaagtgtgtgtgccagtgagggtgatgtgtgtgccagcaagagtgtttgctacagcgagtgcaggtgacagtgtgcgtatcagtgtatgcccacacgtgtgtgccagcacgagggtgtgctagaattggtgtgtgttggattgtgagctgtgcatgccaacaaggctgtcagcaagaatgtgttgaccgaggcgtgtatgacggcgtgccactgcgtgtgatgagcgtgtgctagcggttgccagtgtgtgcgccagcatgcctgtgccacgggttagtgtgcccgtgcgtgtattgtgtgtcaacctgcccccgtgcgtctctgcggctgccggccaatgctgggtgtcagcgagctgtgtgtccgggccaggagctgcggcccacatggggcggcccggccctcgccct

SEQ ID NO: 21895 - DNA, 874 bp, Artificial sequence
  DNA replication origin
cgcccacggccctgccggggagaccacacaggagacctcgggtggaggagagctggtactagatcccgcggtggccgcgaacgcagaaccaggacgcaatcggagcccccgcccgtgtcctcgccgaggtcgcccccacgcgccccccgccgggcggccgccctgcactcaccgggtccctttgtcgcccatggtccgcgacggtcgcagggaggtccgcggcgtcagcgcccaggctggaaaatccccagccagcaggaggagcgcgggccagcccgctcccggctccctgctccgcctcctccgctctcccggccgccgccgccgcccccgcccccggtccccgcccgccgcccgccgcgtcgagcagcgcagcgcccgggccgcggccaggggcgtggaaccgcgcggggtgtgtgcgtgtgtgtatgtgtgtgtgtgtgcgcgtctgcgtgtgcgcgcgccgcccagcgaggcagggcagcgcggcgggacgcgtcagggccccaaggtcggcgtttgtggtgggggagggggtccacccgcgtgcgagtccgtgtgagagtgtgtgtgtgtgtgtgtggtggtggtggtggtggtgtggtgtatgtgagggcgcacggctgtgtgcgggccctattagggagtgtattggtgtggatggaggagtgtgcacgtctttgtgcagttgtgcgtgtgtgcgcacggccgtgggtgcgagcgcgctctcccgcgcatgccggggcagcctttgtgtgtgcgggtggttggaagccgagggtctggcgaccccgaggccgcgctccctgcggcccctcgcttagctggagaccccgggatgcctggcaaggccttcgccctgtgctccaccctt

SEQ ID NO: 21896 - DNA, 1019 bp, Artificial sequence
  DNA replication origin
gtatgtgtgtgtgtgtgcgcgtctgcgtgtgcgcgcgccgcccagcgaggcagggcagcgcggcgggacgcgtcagggccccaaggtcggcgtttgtggtgggggagggggtccacccgcgtgcgagtccgtgtgagagtgtgtgtgtgtgtgtgtggtggtggtggtggtggtgtggtgtatgtgagggcgcacggctgtgtgcgggccctattagggagtgtattggtgtggatggaggagtgtgcacgtctttgtgcagttgtgcgtgtgtgcgcacggccgtgggtgcgagcgcgctctcccgcgcatgccggggcagcctttgtgtgtgcgggtggttggaagccgagggtctggcgaccccgaggccgcgctccctgcggcccctcgcttagctggagaccccgggatgcctggcaaggccttcgccctgtgctccacccttccccattccacccaccccacccccttctactggagagataacacccagccacacaacagggacaggaagaaggggcggagggggcagtagacggccttgacactggggaactgagcggagacccgcggccagcaggggctgcaggaggccgcccaggaagaggaagctgtgagaagtgagaagaggcgataaaggaagagggcagagctggcccgctgctgtgaccgggtagcaccgtggaaagcgcccatgcccagctccatggctcgctgtgggtgaccctgtgcactaagcttctgagaacccatgtccggacctgtaaagtgaggatacactaatatcagcctgcagaattgttaataggttgaaagaactcgcttgtgtttgctggcctcccctgagcgcctgcatacagtaggtgcccagtagatgttagcccacttctctgcaggcttcttgatgtcctgtgaaatcttggctgggaccctgctttgtctgaggtgccttcctgctttgcaggtagtgggaaacggtaaggtctttaccacaccctcactactgagatttggct

SEQ ID NO: 21897 - DNA, 997 bp, Artificial sequence
  DNA replication origin
aggagcccctccgtccagcagccaccccgtctgggaagtgaggagcgtctccgcccggccagtcgccccgtccaggagggaggtgggggggtcagccccccgcccggccagccgccccgtccgggagggaggtgtggggtcagccccccgcccggccagccgcccagtccgggaggggggaggggggggtcagccccccgcctggccagccgccccgtccgggaggtgaggggcgcctctgcccggccgcccctactgggaagtgaggagcccctctgcccggccagccgccccgtccgggagggaggtgggggggtcagccccccgcccggccggccgccccgtccgggaggtgaggggcgcctctgcccggccgcccctactgggaagtgaggacccctctgcccggccagccgccccgtccgggagggaggtgggggggtcagccccccgcccagccagccgccccatccgggaggtgaggggcacttctgcccggccgcccctactgggaagtgaggagcccctctgcccggccacgaccccgtctgggaggtgtgcccagcggctcattggggatgggccatgatgacaatggcggttttgtggaatagaaaggcgggaagggtggggaaaaaattgagaaatcggatggttgccgggtctgtgtggatagaagtagacatgggagacttttcattttgttctgtactaagaaaaattcttctgccttgggatcctgttgatctgtgaccttatccccaaccctgtgctctctgaaacatgtgctgtgtccactcagggttaaatggattaagggcggtgcaagatgtgctttgttaaacagatgcttgaaggcagcatgctcgttaagaggcatcaccactccctaatctcaagtacccagggacacaaacactgcggaaggccgcagggtcctctgcctaggaaaaccagagacctttgttcacttgtttatctgctgaccttccctcca

SEQ ID NO: 21898 - DNA, 1327 bp, Artificial sequence
  DNA replication origin
ggcacacctcccagacggggtcgtggccgggcagaggggctcctcacttcccagtaggggcggccgggcagaagtgcccctcacctcccggatggggcggctggctgggcggggggctgacccccccacctccctcccggacggggcggctggccgggcagaggggtcctcacttcccagtaggggcggccgggcagaggcgcccctcacctcccggacggggcggccggccgggcggggggctgacccccccacctccctcccggacggggcggctggccgggcagaggggctcctcacttcccagtaggggcggccgggcagaggcgcccctcacctcccggacggggcggctggccaggcggggggctgacccccccctcccccctcccggactgggcggctggccgggcggggggctgaccccacacctccctcccggacggggcggctggccgggcggggggctgacccccccacctccctcctggacggggcgactggccgggcggagacgctcctcacttcccagacggggtggctgctggacggaggggctcctcacttctcagacggggcggttgccaggcagagggtttcctcacttctcagacggggcggccgggcagaggcgctcctcacatcccagacagggcggcggggcagaggtgctccccacatctcagacgatgggcggccgggcagagacgctgctcacttcctagatgggatggcggcggggaagaggcgctcctcgcttcctagatgggatggcggctgggcagagacgctcctcactttccagactgggcagccaggcagaggggctcctcatatcccagacgatgggcggccaggcagagacgctcctcacttcccagacggggtggcggccgggcagaggctgcaatctcggcactttgggaggccaaggcaggcggctgggaggtggttgtagcgagccgagatcacgccactgcactccagcctgggcaccattgagcactgagtgaacgagactccgtctgcaatcccggcacctcgggaggccgaggctggcggatcactcgcggttaggagctggagaccagcccggccaacacagcaaaaccccgtctccaccaaaaaaaaacgaaaaccattcaggcgtggcggcgcgcgcctgcaatcgcaggcactctattttttattattttttgagacagtctcgctctgtcacccaggctggagtgcagtggcgagatcttggctcactgcaagctccgcctcccaggttcacgccattatcctgcctcagcctcctaagtagctgggactacaggtgcct

SEQ ID NO: 21899 - DNA, 1743 bp, Artificial sequence
  DNA replication origin
gctgggcgtggcgggcctgcgcgaggcctgcgtgcgctttctcgagggccgcctgcgcgccgccaacagcctagcgctgcgccgcgtggccgccgccttctcgctggccccgctggccgagcgctgcggccgcgtcctgcgtcaggccttcgccgaggtggcgcgccacgccgacttcctggagctggcgcctgacgaggtggtggcgctgctggcggaccccgcgctgggcgtggcgcgcgaggaggccgtgtttgaagcggccatgcgctgggtgcgccacgacgcgccggcccgccgcggccagctgcgacgcctgctggagcacgtgcgcctgccgctactggcgcccgcttacttcctggagaaggtggaggcggacgagctgctgcaggcctgcggcgagtgccgcccgctgctgctcgaggctcgcgcctgcttcatcctgggccgcgaggccggtgcgctgcggacccggccgcggaggtagggccgccatcccctagcttcccgccctccgttcttcccgcctgcttccaccgctcattcattctttcatcatcttttagtactgcctcttgatgatattcagtcattcgttcaacattttagaggctcggtgcccataattctgcccttgaagagttaacaagccagtgagggagatgcagagaccccacagctgcgcacactctctttggcccatgcaaccgtaattccgagtacttactactctacgcaagttctgtgcagggtgccgggatgcggaagtgatttgaaaacactctttgccctctgggagctcgcagtctaatgagggatagaaataggcaggggcatggggaagtagtgaaagcagcctgccccacctttggaaagccagactgggaggctctgggcagagtagcccttaatcatgcccccagagacgacactctctctaacactaagcacagggcctgggacagagatcctcaaatatgtgccaaaggaattagaaaaccaatggctaaaagggtatggaaattctggtggcgtcagatggtggggtcagtgagagggaagaatgatttactgaaagggtgagttatccggcttaatggaattagggatgaggggatgtcataggaggagggaggcagcagaatcagcggttggaggtgagaaaagggtgttgaagatgagttagcgacagacaaacctgggcttgaattccagctctgacgcttaatggctttgggcacgccatggtatgtgagcctcagtttcctcccctgagaaaggggtaataatccctactaatagaactgccatacagattaaacgaggtgatttttctaggtgagggcaagggctctgtaaagatttttttttctgtagtttagaggtcagcagaatgcggtaagcattagcgattctcttcccagtacccacaggcaaagttggaagtggcagggtctagcgggattgaggccgggggatcgggtgggcgggggtgatggcagaaacgcatgaaagggcagcgggaccgtgcagtgtggtcgagagggtaagagagggccgaacttgggtgcggcccaacaggcactgggcttatccgcacgccagattcatggacctagctgaagtgatcgtggtcatcggcggttgcgaccgcaaaggtctcctgaagctgcccttcgccgatgcctaccatccagagagccagcggtggaccccactgcccagcctgcccggctacac

SEQ ID NO: 21900 - DNA, 1275 bp, Artificial sequence
  DNA replication origin
gctcggccagcggggccagcgagaaggcggcggccacgcggcgcagcgctaggctgttggcggcgcgcaggcggccctcgagaaagcgcacgcaggcctcgcgcaggcccgccacgcccagccgctccgccagcgccagcacggccgccgcctcgtcctccgcgcgcagccgcacgcccgctccgtacacgtagtcgagcaccacggccagcgccgccgccgccccggccgggctcgtgcctggcgcctcgggagctactggcaccactggcaccacggccgggccgcgctcgggccgcccggccgcgaacaagctgcggaagtaggcgctgcccgcgctgagcgccgcgcggtggcacggaaagtcgcgcccgccggcgcgcagcaccacgtcggtgagggtgccgctccgccggtaggcgttcagggcctgcagcacgcgctgcgcgtggcacggacccgcgcacggcgcttcgcagcccggctccgactcctccggcgcatggccttgccgcatcctgccggggagagaacacaaacagcgtcggggaagccacctggctgcgcccgggagaggcgacagccctcatccgtttatttcctctcttgaccatttgttcagcgactctcccctccgttcagcatccaggttccttacggctacagtgccccagccccgcctcaccagcgcgacattctgccctgcctacccactcagacacagtgcccttttcggttcttcaaacttgctaagcgttttcctatcgatatctgcaggtaacagatggcacgctctcaaacagggtaatcggaggagggtctaataaaggaactattttcaacagcggagtaggcgttagggactccagtaggagtagggctgtgtcccaggatactaacagcagggcgccttggccgccccggggtctgtagcgggagagcagggaagttactggaacctggaaatatatctgtgtaaggagggtcccgtgacaggagctgaagccctgggtcaagggactcaggctgccccacagagacccagtgtgtgcatgtgcaggggagagagggtacaataactccaccgccctctgctcaatccagcctgtctcctgccgatctccggtaggtgctggacactgaccacaccctgagcactcccctgacagacagcatcatacacacagctttcgcgcaaacgaattcgacaagtatttattgggagccctttctgtgccaggcagtgagcaagacaaccatagttacggtgtgccc

SEQ ID NO: 21901 - DNA, 817 bp, Artificial sequence
  DNA replication origin
atctcagacttgcggacaccacgcagccgggtcagccctgcagcctaagccttgccccatgcacctggcacttacctggccataccctctcccaagtgctccgcagctgctgctctcacaggtatcactcccgtttgtgcctgccgcccgcacccctggcagcccaagctccagtgttcatgctgctctgcccagactcccgtttgctgttcgctcgggctcagctgcgggaggacaaaggggctggacgccaggagggaggggaagggaggggaagggagaagcgagcagggagggggatgctgggcttttgttccactcttggactagccctgggagggagggaaagaaagggggggcataagagtgggattgactgtgtgtggaactccaggatttggtatgcctgggtttgggggtgacctggtgctggccttgtcccggaatgacgatgggttcgaaggtgtgtggtgctggagttggggtgtgggaggggtgtcatcatgcagttgtaggcatgtaggtttcagggtgactatgcgtgattgtggaagtacatggaatgaagtgactgtgtagcattgggctgcgtgtggacatgtggctgtgtgaccatgtagatgccaatgtgactaagcatgtggggcggggggcacagtggctctgagtctcattcccttgagctcagggagaggcgggagctgacctctgccccaggaagcagagcacttgccagacattcagtagcaggggcaggagggccggtcctcgaggttactgtgggggcccagtggagcttccaacatttgcagagggc

SEQ ID NO: 21902 - DNA, 818 bp, Artificial sequence
  DNA replication origin
cagttggacactagcgtggctgctgaatggatggctgtacagggcacaagaaaacaggtgaaggcatgcccaggcctgctggagagtcagggagggcttcctacaggaggagtttgagtggtgactacagagctgtttgggggatgagaggaaggagatagagaacagagctgggcttggcgtcagatggcactggcgggtttgaagaaaagggagatggggagggtgattctcatcttccaggcctggaggttggagggaatggaggtgtcttgaaatgcgtggaaaggaagaggagttcccatttggccactgtgggtatgagcttcctgtgggatgtccaggtgcagatgaccagagggttgcaggatacttgagtcttgaacttggtccagccagagatgggtggttgaaaccgtggggtggatgatactgccaagaaggatgtgatgggcaagggagggaaagggggcttaggattgagagcagcagcattcaggcctgggcagagaggatccagcgaaggggctggtgaggtggggccagaaagggggacaaacaaccaggcaatcagtggctgaggatggagaagtgccccatggatttacccacacagaagccattgttgaacttggtggcagcagagggtaatgggttttgcagtgggtgggacgaagtggagatatgggtgcagacaactctcagaagtttggatgagaagggaggagagaaagggaggagagctgggaaggggtgcaggggatgaactgcatgagccccaggcctgctcactgctgattggaaggagccagaagagg

SEQ ID NO: 21903 - DNA, 1379 bp, Artificial sequence
  DNA replication origin
gcggccgggacgcgcggagccccggccctgacccgctgcgccgggacgggacgctcctaacgccgccgtaccggtccgtggttgcagggtcgctccgcgcctttccgtcagtgagggtcggaaccccagctccagggctagcgcagtgtggccccaggccctcgcctccggtgcacgggaccccggacccccccagcctctggcttcacgagaccccaaccttcagttggaacagcttggaacagcgcgagcgcccgggaagccctggccgggtcgtgcgctcggtgaggggtcctaggcgggcaggacagtcggaccgaaccgccgggctggtgccgcgagcccaggctgtcaccttcgtcccgcctcaggtgaggggttcagcgcctgccccgaagataacacaggggtccccttctgtcccggcggcctgcgagagccaaggctgcaggtgagagccccggatgcgcggcaggagcggtccccgaccccatcgcggcagcgcgggggccagcggagggagtgtcaggggaaacaagcagaggctggaactggctgggagggggcgcgggaaggggaggggaaagaaagaaaacgggtacttattgagcgcccattgtgtgcgggttcgcgccctgccccgccccgccccgcctaagcctcactgctactcctgaaataggtgttgtgtattattatcggcgcttgcagatggagaaactgaggcttaacggggctgagtgacctcctttcactgcggggaggagactggggaagcgggagaggatagagggggaagaggcagagcacttgagcgctgatgctaaagctgaggaagtggcttcttcttgcctcccgctccctggccatgtcacccgcgaggaaaggtgactcagagttgagggtagaggtgggaagcttcccagttccaaagcttctctccctgtgggcccaggatgtgagagcagcagctcctggcccttgtgtgtcagactccagggtctctaagacactctggaggtcctgagacgtgcttatctgttggtgaattcactgcagagatccccaagtaagggtctgtcagagctggagatgtagcccctctggggtggctggagatgtggctcacgtgactcacctccctcacattactaatggggacactgaggcccacccgaagggagtgccagttgtccgatcctaaagccagtgagtccttgagccacaagtagacttgagaaaaccttcctgagcatccttcaaggtatgcacactcctccccagttaggatcttctggataggtggctggggctttccctatcgctgatgtgagatctgggcgaccatgtatgaggctgtggtgagaattagtgtggtt

SEQ ID NO: 21904 - DNA, 1247 bp, Artificial sequence
  DNA replication origin
agcgtcccgtcccggcgcagcgggtcagggccggggctccgcgcgtcccggccgcacgccccgaaccgcggggctgggacgggcagggcagggcaggcgccggcggggaggcgcggcggccggagccccgcggggaagtctttccaggtcccgactcggctctctctgcaaaacggggcgaacctcggcgcggcggccgactcccgagctcccggccgcggctccacttcctcctcttcccctgctccctcgccgctcgctcagcgccgcgccgctgccacctccgctgtcatccccgccacccacccccaccggagccgcagcccgagctcagccgaaacagcgccgcccagcgccccagcgccagcctgcgcggccccgcccggacggggcggagtcagcagagaccccgcccccggccggctgcgggcaggggcggggtgcgcgccctctccccttcccgggcctcgcgcgtggggccgcaggagccaatccgagggtgggagcggagcggcgccctgcggaaagcggattctacctcggagagggcggggcggacaatggagaggtgcggctgcaagaggacaatggcggggctgggggttcggaacgggccgaatcggggagggggttggcctcgggacccggaaggagggagaggcgagagggctggcttgcctgggacgggggcatggggactgctgtgcggggattgcgggggtcacggggaaggagcaggggccagtgtaggaaaagaagccggggcgaggcaaggtggaggatatccggggtcaggggtcccagggacgctggagcgagccctcctgagtggtgggatgccaccgacaccttgcttctccctagcttctagtgctcggcgctcagaggtgagagttgggctgggaagtgttcagatttcaggaaacggtgaaaaataagtttttggaaatgagcgaatttgtcttccacaagcctcccttccctgcgcccatccccgaggaggagcgtcgtggtcaattttaaaaatacgaactcaagagcagagttgtgtgaggacacacacttcgaatcgtgatgcatctgcagtccgctcccgccccttcccaccccgcgcgttgggtgcaggagccgtctttattttctatttcattttattttgagacagggtcccgctctgtggcccaggctggagtgcagtggcactatcacggctcactgcagcctcgaacttccaggctaaagagatc

SEQ ID NO: 21905 - DNA, 1583 bp, Artificial sequence
  DNA replication origin
ctttggaagagtggccagagggcaaatgtgggtgtcttgagacctgtttgctagtcacctcctgacgaccttgggcatgcctccccctcacacacccccagcgcctcaggggtcatggagggtctgttctgaaaatctccttttattctgacatcctgctcatctgacccagctaaggaggctctcgcagcaggggcagccagagaactctctgagagcctcattcatctcccagtgccgagatctcacaagggcaggccatgtaccaggctggatggtggcgggtgggagggaaaccagacatggaaatcaatcattacagaaccttcaagctgagggagcccagaccaaaggcaggcagcctgggggagttcaggaaggcttctcggaggtggtgataaatcttggtggagataaatcttgataaatctcatgagagatgggtcatttattcaacaattgtttacttggcacctactatgtgccaggctccgtgctaggctctggggatacagcagtgaagagaacagatgagcatttggcctagaggttctgcccttcagcccagcagagaaatgagaattaactccagagagaaggggaacagcaaagcaacacatggaggagacaactgcatggagacagaatgcatcctgcttgctgatggagctgagagaagttggcgcaagtagagagggaagtaagcaatggggagatgaggctggtggagtcagcaggcagagagcaataacaaaggggctggaacgccaggctagggatgtagggcttggtcatgctggcaaccgggagccagagagggctctggacagagggaagggccacaaggtttcttagcgtcaagttcaacaagtaaaggcaaaactgccttctcccagccctcaggctccagagaccagtcccaacttcctgggcccaacttgcctactcccaacccctgggcctgaagaagacagggcaccctcaagtccgcagcctgaacttcagcctccagctcaccctcttctttgttcttccaaccagtctctcagccatagtctgatgccatttcttttgcagggaatgcccatgcttcaccctctgaagcctgctgcctgcccagtccctcacctggttccctgccaagtagcacctttattcttcttttatagatgaggaaacagaggctcagagagggagagtaacctgttaaagccacacagctttaccctagaatttgataatgatgggtggatagaactctgtgccagctgtgtggtctcgggaacgtcacttagcctctctgtgctgagtcctcatctgtgaaatggggtacctatcacaacataaggttggtgtgaggtttacaaagagactgtactgtgccaccaacatcccttagctccccaggccagttagcggctttcacatggtccctaccccactcccccgcggcacacattcaactttcattcatacatcagttccctccaacaccttctctgcgcctggtcctgtgcacacactgaagacggctccttggccaagcacagggctcacacctataatctcagcactttgggagg

SEQ ID NO: 21906 - DNA, 989 bp, Artificial sequence
  DNA replication origin
gtgcttctcagagatcactgaggtagacagactggggcctgtgttaagagtcaaggtgacaaggagaggcgcgggtctgagcctgggccccggctgtggcccaagtgggtgggaggcatcccagaacatctacagggaaagaggctcgagctactgatttgtgtccacgtagggcaagagtgagctagaaatgcctgggtgactcccagggcccagctggtggtgccatttcctggggtggggagcctggagatgcaggtatggggaaaggtgatgatgtggcttggggacacagtgagtttgagggaccattgggagatacatgggatattcctcggtagagctctggggggcggggccgggcttgagtccacctcttgggaatggacagcctttgggaggagaggctgagtagcccctgggagggaagcgtggctcaccacggatgaaaaccaacagggaggggatgggcaggggcaggggcctgaggaggagccctctgaggggaagaagaggacagaggggagcagacagtgagaggagagtgtgcagggagaggttagccagggccgggagggccaggatggaggtgtcccctggggtgggccattgggactgtgggtgacttgggaagggtgatgtgcatagggtgggaggcaggagcaggggctcacttggtgacatggtggacagcccctttcagggcagctggcagggcaacatggttggatggcagctggcggggaaggcagaggcagaggagggttttggttttggtgttggttcctggaggagggcttcagttaaagctctgtgaataagggaggggcaggaagctgacctgggactgaggagaggctgtatttgggggttgggggtgaggaccacagtggggacaggagagacagagctgaagcagccccttctcacttcgtagagggggctttgggaaatgtctgtgtcaagttaataaaaaatgatatcatggc

SEQ ID NO: 21907 - DNA, 1086 bp, Artificial sequence
  DNA replication origin
ggcagagcccctgcggggaaaggggcgcctgaaaggacgtgcgattcggagtgggctagcttatgcagagagcctgggggtgggaggaagctcgcactctgaaggacacgctgatccccgtggggactcccggcgccccgcagcccgggccgccgagggaggcagtaggacccaggggccgggaggcgccggcagagggaggggccgggggccggggaggttttgagggaggtctttggctttttttggcggagctggggcgccctccggaagcgtttccaactttccagaagtttctcgggacgggcaggagggggtggggactgccatatatagatcccgggagcaggggagcgggctaagagtagaatcgtgtcgcggctcgagagcgagagtcacgtcccggcgctagcccagcccgacccaggtgaggggcgggagacgcctgcgtgcgtgcggcccgggggagcgccgagcaatctgggggtgcgcgagggagtaagaggggcgaggggaccctgcgaagcgttgggtgccgagccagagcctacaaattggagtcctcggcactttgggggccgctggagggtttggaatcgagagcccagggctagccagtgatggtgccagctgagggctagggcggagatcggagccgggttgggagtccgtgcactcggaggactgggaaaaagtgcagggacccctaaaaggtggtggtggcagatacgagactaggtgctgtgtaaagggggctgggggcagagagcagagcctctgcggaaagaaacagaggaggaaggagatgggtctggtgcctcttcccgcaagggtagggaggataggccggcctcgcagttccaggtcacttccgttctggggttgaggctcaggggcagcggtgattggtggcccagcctcctcacaggcttgctgagggaatttgagcttccggtggtgggaaaggaggtgaaatcgtctcgactcctggggtccgtgtgctctggtagaagtgggcgacagtggctcaatttctgatcagcagcttgcagcctagatgatggcagccaaaggaaagacttggcc

SEQ ID NO: 21908 - DNA, 1109 bp, Artificial sequence
  DNA replication origin
cccactcgttgatggactgcagcgcgctgcgcttgtcgcggaagttgatcttggagtgctcgcagttgtagtgctgcttgctgctgcgcacgaagtcatcagcgaagctcactgagctgggtccgtacagtcggctgcccagcttccaggtcacgttgcgcgccgtggagttgctgagtgagcgcagcagctcgcccaggccggcgtgcacctcctcgtcgcgcagctgctcggcgctcagcactgccttggcctgcgacgccgtggtcgccttgccgcccagcgacacgagccctagcgacgaggccaccaccacgggtgacaccaggatgttctccactgcctggtccttggccatggcctggtacaagctgaaggccaggccggcgctgcgctcggcaagcgtggccgccttggggctcaacttctccgcagtgccaggagctgctgcggctgcaggtttcttcacctcggcggccagggccgcctccaggaggcagaaggcgctgagaagcaggagggagcgcatggccaggaagtggtttgcgtgcaccacggtgggcctgtgaggattgcacagacagggtggtcttgaagcccaaggccttcctccccaacaaccaccctcagctctctggctgccacaagtcccctggagatgggggcaagagagcccacagtccaggaatcccagacttgactcagagctgccagcctctcagaggcctctgttacctccctactcaaagaagcattcccagcaagtcaccaccagaccaccttattgatttcctgcatcggccagccaacacttccacttatttgtgtgtttatttcataactatttctgctcctaagtaggctgtggcctccaggacagaaaagctagccaatctggttgccactatatctcccgtgcctagtacacagtaggcctcagctcttcctgaacgaaggtaaaacagggtcacttggccagacctggggtcctcatcagtttatagagtggtcagccctgatctcacatagccctgggagcccttttccagtgagaaaaagcagcagctgagctgagaatctgcaggaaacccagatgcctgggcaaggga

SEQ ID NO: 21909 - DNA, 1128 bp, Artificial sequence
  DNA replication origin
cagagagctgagggtggttgttggggaggaaggccttgggcttcaagaccaccctgtctgtgcaatcctcacaggcccaccgtggtgcacgcaaaccacttcctggccatgcgctccctcctgcttctcagcgccttctgcctcctggaggcggccctggccgccgaggtgaagaaacctgcagccgcagcagctcctggcactgcggagaagttgagccccaaggcggccacgcttgccgagcgcagcgccggcctggccttcagcttgtaccaggccatggccaaggaccaggcagtggagaacatcctggtgtcacccgtggtggtggcctcgtcgctagggctcgtgtcgctgggcggcaaggcgaccacggcgtcgcaggccaaggcagtgctgagcgccgagcagctgcgcgacgaggaggtgcacgccggcctgggcgagctgctgcgctcactcagcaactccacggcgcgcaacgtgacctggaagctgggcagccgactgtacggacccagctcagtgagcttcgctgatgacttcgtgcgcagcagcaagcagcactacaactgcgagcactccaagatcaacttccgcgacaagcgcagcgcgctgcagtccatcaacgagtgggccgcgcagaccaccgacggcaagctgcccgaggtcaccaaggacgtggagcgcacggacggcgccctgctagtcaacgccatgttcttcaagcgtgagtcgggggcgcgttcaggggtcctcctcctcctcccaggaccccctgcaagagttaggacgacattccgtgcgctccattcttcactgcctctcatttatgctgtgacaacccagggaggcaggactgtcactcagctttttgtacagactggaaactagattcagagacaggtagcagcgtgtaaaggaatggttcagggagcggaggccccagagggactccatggaatgtattccgaccgaatttcgtcaaagtgctcgtccttgtgtatcttggaatgaataacatttaataatccattctgcctcagtagtgagctagagaaagaactcaaatcctttttttaaaattatttttattttgagatggagtctcactctgtcacccaggct

SEQ ID NO: 21910 - DNA, 1121 bp, Artificial sequence
  DNA replication origin
ctctccctcctccctcctctccttcttcctcccagctgcgggaactcacaaagcaggggcgaccgcaaccccgcagtccgcgggctcccgcgcccctgctgcagccgcccggggaggggagaggacggccccgcggcgccgcagaaagggcgcccctacgccgcgaggggcagggagtcggggggtctctggaatgggaggctccccacccggcccagaggcaaaggcgacccgctgaaactggatgggccggcggcggaactccgacccgagagtcccactccgaagatgcccaggctcgggagggcgtctccgcccacagagccccgctaccagggctctcggctcggaaacagcagcccccgtccccgcgcactcgcacagccccccgcctgcaggctcatctccggccccgccccgggctccgggctccgccgcccgtgcagcctggccccgcgagacctcgggacgcgggatcgggccggtgggaaggatagtgccctggcgagggtgggcgaaagaggccccggtatctgcgctctgcctacccgctttgggccgctagaaggcctggctgggagaccctttccgggagctgggccgaggcctctctggagtccccggtggctggtctggggaaaggccgcgatgttagtcctcacacaatggaccccacccgtgatacctgccgacgccccacacggcctaggcaccttgtgccatattgggggagcggggagacggtctatgtggacaagggacaggagccaactcggactggagcgacactttcgggagtctgtgccgctgagtggatggatggtctagaggaagtgggtgggaatgcactcgggttgacccagttctcagccagaaaccgggaaatccttttcagtaccagtctccgaccctcagcttccaaactatcagtaagacctgcctggccttcctgctaaatagcaaatttgcccacttttcactatctctatggccaccccctcttacctcacccatctcacaatttgtaattcagtctatgcatcacagcatggcactcaggtgtaagaaatgccacgtctttattttggtaaatctaattaaatagactgggagcccccttc

SEQ ID NO: 21911 - DNA, 1424 bp, Artificial sequence
  DNA replication origin
gcccaccctcgccagggcactatccttcccaccggcccgatcccgcgtcccgaggtctcgcggggccaggctgcacgggcggcggagcccggagcccggggcggggccggagatgagcctgcaggcggggggctgtgcgagtgcgcggggacgggggctgctgtttccgagccgagagccctggtagcggggctctgtgggcggagacgccctcccgagcctgggcatcttcggagtgggactctcgggtcggagttccgccgccggcccatccagtttcagcgggtcgcctttgcctctgggccgggtggggagcctcccattccagagaccccccgactccctgcccctcgcggcgtaggggcgccctttctgcggcgccgcggggccgtcctctcccctccccgggcggctgcagcaggggcgcgggagcccgcggactgcggggttgcggtcgcccctgctttgtgagttcccgcagctgggaggaagaaggagaggagggaggagggagaggtggggaaggggacgccgcgggagactgggaagtggctgccgcagggaggagctaggcctcgagtgaagcctgcttgtaagaagggccaggagagtcgggtgcgcccccgccctccctgccccaccccaagatggggacccagagcccctcctcccgcactgggccttctttctgggtagtggagggctggactggactgagctgggaaggcctgcagctcagaggcgctgctctgtgcgtcaggaccggcttgcaaatgaagatgttgaggggctggctctgggctcatagcagaaactgccagatctagcggccacccctcagtcctcatctgcgccggccctcccagctttcgacccggcctcactgtctcctgattgaatcactccgggcaccacagttccctggttcctccttacagctccgggccagcccctctgaactttttctgggcgattctctctgacctcttaagtccgcaacgcttggaacaggacccacatctctttccattctgacactctctgagggagcgcagcgtccttcatgtggggcttgtgaccatcctccccccagccccagggcagctgactaccaggccctgtttccagacgtctcttcagaggtcaagccttggtagccagtggcctggacatctgcccccgggtgtctcggaggccctcagggaaaccttgttctgcttctcagagatggcgccacggttcgcttggcctgtggaaacgtgtgtgtcatgggacctggtgtgtgggtcagaggaaggactgggaggaggaggaaggtgtccacatgcgatttttttttttgagacagagtctcgctctatcgcccgggctggagtgcagtggctagatctcagctcactgcaatctctgcctcccaggttcaa

SEQ ID NO: 21912 - DNA, 1088 bp, Artificial sequence
  DNA replication origin
cgcgcagcgaataccagccctccgacgctcccttcgagcgcgagacccagtaccagaaggacttccgcgcctggccgctgccgcgccgcggggaccacccgtggatccccaagcccgtgcagatctctgcggcctcccaggcgtcggcgcccattctcggggcgcccaagcgccggccgcagagccaggagcgctggccagtgcaggccgccgctgaggcccgggagcaggaggcggcccccggcggagcgggtggcctggcggccggaaaggcgtccggggcggacgagcgcgacacgcgcaggaaggccgggcctgcctggattgtgcgccgcgccgagggcctggggcacgagcagacgccgctgcccgcggcccaggcccaggtccaggccaccggccccgaggctggcagggggcgcgccgcggcggacgccctcaaccggcaaatccgcgaggaggtggcgagtgcagtgagcagctcctacaggtgagacgcggccgctgctagcgcgggggagtcaccacgcagaccctccccgcgggctgcccggggcccaggatccccagcgcaggcctagcgtgcagcctccctccagtcccaggccacaccctctccccagccgcctcccaggccacctcctgtcgaagccttctcttctgccctgtcccatgcgcaagctgttagtatattccatctcagcctgcctggctctttcactttaccgctgtagcccttttctccatccctcccacctcagatccctgccttcccacagagaccctttgcaatgtcagcagaggctgtgcttccgtcgtgcccccatccaactcacctgctgcgttagcctggatgttgccctttgcagggtccccattcttccagaagaagaattctttccaagtggcctctcgccctcctccctagcccagttcccttggcccttcattctttcctccctttctcagtctctgggcaacacccaagcaccatacctttttctagattacccacaggatctttacaaattaccccccaccttccaccgctggaactttgaagtcattgtccttccacctctccctag

SEQ ID NO: 21913 - DNA, 812 bp, Artificial sequence
  DNA replication origin
gcacccggggagagctgtcctaggagagtctgtagagtccctcgattaccggtcgcaaacgcctttgggagcgcagtctgctgcgagcgccgaagggtgagacgcacggcgttcccgagtccccggcgagggtgtctgggacgcgcccctccctgcggctgcggcggcgcacagacctcggtcgagcgaggcgacgtgaggagaggtggctacaggcttaagccatggcgcagaggaggggccgggcggtgtggccgcagggtccgcggaccgggctcgagtctccttcctgccggcgtcctagtgcagccggccacctagcagggctgggaggccatcacctccagcggagaccgagcattgctgcctccgccgctgcccgcgaggatgccgcagccgccgccgccaccgcctcttctcctgggaagcgaccccacccttttctgcagctctcggtctccgccgctgcccgcgaatgatgctgcagccgctgccgccgccgcctctgcctctgctgcagggaagcggccccacccttttatgctgctcagcagtgagaaaaaaatccaggaacgatgctgactgaaagagtgctgcagaaaaaaacaaaacaaaacaaaaacacctgctgtcgtcagcttgcgctgctgggagcttgccttccctccccaccaccctccgccctggcagctcctccctcctctactcccgggcaacagcagaatctggggacgtagtgggttcaagtcccaagctcgtgaggactttctgtccttgtgcttgtcgcttcatccccaggagtcggaggctcc

SEQ ID NO: 21914 - DNA, 1190 bp, Artificial sequence
  DNA replication origin
tggctttccatctctttattaagaaacctcacagagcacctataccctgctgggtgctggggacccagccagatcagcccaggttctgcccttgggatgctcacgctggggggcagcagagacagccgcacacagtcactggtgacaacggccgggacaagcgagaaaccagggggctatggaaccacagagtagagaagactctgccctgggctgggggagtgggggcgctggtgcacttcccagagaggttggtgcacagcaggtttggaatcagatagactaggagtccagttcttgccctgcctctcttgagcctcagtttccatatctgtaaaatgggaataataattattatttttgtgaggtactttgagaagtaaatgagataaggtataaaaagagcctaggtagtgtctggcacatagaaagcattccagaatggtttgcccattaatgaataggaattttgcagatggaaggtgtgagggcaaagcagaaagataggcataaagtgttagaaaagccagcatgtttggggcagggctgggggccctggagtggctggagcccaggcaactgtggaaaatgaggctgaagtgagaggcgcgggtgcttgaactgagagaggtttgggagtgccactcttgagatattgggggggagccgggtcttgggagagctttagtagggaaatggctggtcaggtgggttttaagtgtccttagccatggtatgggaaatggacaggagaggctgtaggtcaggagggcagtggggaggctgtaggggcgggggatccatgtgagagaggatgagcctcaaggcacggcagtggtagagggaatggagggaaggcctgatctagggaagagcataggaagcgagatccaccagcatgtggtggagcgacttgttggatggaggctcagggaacgagtggggacaacaagcatgtcagtgataagacagatttcttaggcatagctggagcgagatagctgtggggtcacagcataagaggagaggaattccctgcctttgtggtctttatcatgttctcacagggggagaggagaatgacagaagttacaggcacagggcagcaggtaatagatgcctctggtgcaacctagagatgcttccatttgttcagccctctcaaggccacaggagtaaatctctcaacc

SEQ ID NO: 21915 - DNA, 1397 bp, Artificial sequence
  DNA replication origin
gggatctcccggaggttcggccatcactggacccctccccgcacaaacctcctgacagtcttcctcagtcccgcgagccctccgggtccctgctctgggtgtcccggctcgcggggtcagcccggagccagcaagctctccacgcgggcctgcccgggtccctcccgagtgctgcgagccgcgcgggcttacctgctgagacggcagctccacatgcagggcccgcgcggcagaaccgggaggcagagcagcggccgggcccgggggtggctgggggacggggcccccgaccgacgcggaggcgctcatctcgatccaggggccgccaagcggcggggcgggcactcttccggcatccgccgccgcccccttgccaccacctaccaagcccctgcagcctagaaacccgccacccgagaggcactactgctcagcccagacagtagccgccgccgctgccgccgctgccgccgttgccgccgctggctaaggaagagccatattaccgcagtgcaacccctccaccccgctgagacccggagcgctcattggcttagccctcaagggggcgggacccaacggcagaaaaggggcgtgctattgggtagaaggtctgtccatcgctggcattactggacttgggggcggagggactcaaggatggcctcaattgcgtctgtcaagccggggtgaaacctggggcgttgcttctttttttcccagtctaattggttcttttactaccaacgggcagagtctcctggtggaggcggaagggccattgcaagaggtcgctgtcaattgtcagtaaagggaaagaggggtggggtcttgattaggtagagcgcgcttctgggctccggtgtcacgtgcaggaggcgggagagtcacctgattagggagaaccggtcttctgagccacttccgccctcactggttgccgtggtaacaggcctccggtggagggcggggaccctcggaagccagctgggtggcgatcgcttgtctgccttggcaggccccttgtgcagtcttttcccggcgtgagcgtgcagggattgaaaaggaatgctttatggttcagcagagagccaccacgcaggatgcactgggacctgagaaccgtcgggcagtcccacgagctctttcatgaccagctccaaccgacaagtacacgccccttcgcactccactagctagtaagctgagctacaaggtgtgccaggcacccaggacgccgattcaccgcttcaggtgggctgtttgtgctgtgtccccagaaagcctttgctacttatccatcagtcttagctggggcaggagtcccttcttccaaaaggcttctctgagcctctctgggaccttgagttaggaattttgaccctaccgtgggtctg

SEQ ID NO: 21916 - DNA, 1053 bp, Artificial sequence
  DNA replication origin
ggtgggggggtcagccccccgcccggccagccgccccgtccgggaggtgaggggcgcctctgcccagccgcccctactgggaagtgaggagcccctctgcctggccagccgctccgtccgggagggaagtgggggggtcagccccccgcccggccagccgccccgtccaggaggtgaggggcgcctctgcccagccgcccctactgggaagtgaggagcccctctgcctggccagccgctccgtccgggagggaggtgggggggtcagccccccgcccggccagccgacccgtacgggagggaggtggggggggtcagccccccgcccggccagccaccccgtccgggagggaggtggggggggtcaccccccgcccagccagccgccccgtccgggagggaggtgggggggtcaccccccgtccgggaggtgaggggcacctctgcccggccgcccctactgggaagtgaggagcccctctgcccagccaccaccccgtctgggaggtgtgcccaacagctcattgagaacgggccatgatgacaatggcggttttgtggaatagaaagcggggaaaggtggggaaaagattgagaaatcagatggttgccgtgtctgtgtggaaagaagtagacatgggagacttttgattttgttctgtactaagaaaaattcttctgtcttgggatcctgttgatctgtgaccttaccccccaaccctgtgctctctgaaacatgtgctgtgtccactcagggttaaatggattaagggcggtgcaagatgtgctttgttaaacagatgcttgaaggcagcatgctcgttaagagtcatcaccactccctaatctcaagtacccagggacacaaacactgcggaaggccgcagggtcctctgcctaggaaaaccagagacctttgttcacttgtttatctgctgaccttccctccactattgtcccatgaccctgccaaatccccctctgtgagaaacacccaagaatgatcaataaaaataaaaataaaaaataaaaaataaaaaaaaaacataaggg

SEQ ID NO: 21917 - DNA, 1308 bp, Artificial sequence
  DNA replication origin
cacctccctcccgtacgggtcggctggccgggcggggggctgacccccccacctccctcccggacggagcggctggccaggcagaggggctcctcacttcccagtaggggcggctgggcagaggcgcccctcacctcctggacggggcggctggccgggcggggggctgacccccccacttccctcccggacggagcggctggccaggcagaggggctcctcacttcccagtaggggcggctgggcagaggcgcccctcacctcccggacggggcggctggccgggcggggggctgacccccccacctccctcccggacggggcggctggcctggcggggggctgacccccccacctccctcctggacggggcggctggcctggtgggggctgacccccacctccctcccagacggggcggctgccgggcggagacgctcctcacttcccagacggggtggctgccgggcggaggggctcctcacttctccagacggggcggctgccgggcggaggggctcctcacttctcagatggggcggttgccgggcggagggtctcctcccttctcagatggggcggctgggcagagacgctcctcacctcccagacggggtcacggccgggcagaggcgctccttacatcccagacggggcggcggggcaaaggtgctccccacatctcagacgatgggcggccgggcagagacgctcctcacttcgtagatgggatggtggccgggaagaggcgctcctcacttcctagatgggatggcggccgggcagagacgctcctcactttccagactgggcagccaggcagaggggctcctcacatcccagacgatgggcggccaggcagagacgctcctcacttcctagacggggtggcggccgggcagaggctgcactctgggcactttgggaggccaaggctggcggctgggaggtggaggttgtagcgagccgagatcacgccactgcactccagcctgggcaccattgagcactgagtgaaccagacaccgtctgcaatcccggcacctccggaggccgaggctggcggatcactcgcggttaggagctggagaccagcccggctaacacagggaaacccagtctccaccaaaaaaatatgaaaaccagtcaggcgtggcggcgcgcgcctgcaatcgcaggcactcggcaggctgaggcaggagaatcaggcagggaggttgcagtgagccgagatggcagcagtacagtccagcttcagctcggcatcagagggagaccatggaaagagagagagagagagaccgtggg

SEQ ID NO: 21918 - DNA, 1814 bp, Artificial sequence
  DNA replication origin
gcacagtgtttttcctgtctcaacgctccccccaaataattgcatttgatcccaaggccagcctgcagagtgtgtgggcaaggtgttcccatcactacttgacccaggaacccacaggaaacccccaaagaaggatgacctgctgaagatcacacagatcccaaggccacactggggccggaccaggccctgacctctcccccagggctctttcttccgcaccccaagccctgtggaggccccacagcctctccttctgtcccacccatctgaacatcctgccctctgccgagagtcctcccgactccgcagccccagttaagagggaggagcaaatccgggggacatctctgtgcagggagtggaaaaactgagcacctcacagcattgtgctatggggtgtggagcaactttaagggggaaaaatgtgtatttataactgccggaaatgcgatataactgtcaaaagtccatgaggtcggccgtgtacataatgactcacaggcataaaaggggcgggggtaagaggggcaggaggtgcttctttgaggactccccttagctgtgtctgacaggcaggtcgagggggtgaaacggggccagggctaccagccagggtaagaagcaagaacaaaggcgttgctgggaacctgcattactcgtgcgtttaatggttactgactgcacactgcacaccaagcgctggactaggctccagggtgagaaatgcacaaggcagacacagtgcctgccctcaggaagctgccaggcctgtggctgagacaggaaagtacagagggcacagagctgcgctggagctgggtgtaaggcaggtagttggggaggggaggactgagcctgtgtctgagggccgggggcaggggatatggctgggtggggggaaggagggggatctgtgcacagggttagcagaagagcggccagaacagaggcccaaggagcttcccccaaggctgagcgtggaagactgtgggactagacacaggacagaaaccatggagatggggaagggtcaacagggccaaagacccaggagccatgggaggtgagggcaggcacagcctgaagcccttggtgacctccatgggagctgtttcagggttggggagcagcaaggaagcaaggggcagtgggcgtgcacagtggggaagtagagacagtgagtgtagacaactcttgcgagtttagctataaagtgctggagaaaaatatgggtgggagttggaggggactgtgagaccgaaggaagatttcctgtaaatgcgagtgggatggagccagtagcagggagaaggcaaaggttcaggaagaagacgggacaatgaaaggagcaaggccccagagaaaatttggggtgacaggggagaagggggagccccagggcatggtgaggacagcaaggaagggtggccgggcaggagtgggctgagctgtccatctgcatgggtgggaggctgcaggcgaatttcccgcctggcccctgaagagggacagcctgggatgggggcctgactggagtgactattccagggtacaggccagggcagaaggggcaccatgaaggtggcttggagcttcttgggccttttgaaggagattcctgaggtttatgggaaggggtggtttgctgcccctgagttcagcatgcctggattataatcacctcctccccaggcgctcttcagctactcttgtgccctctagcccactctccacatggcaagcacctgacctgtcctaaacacagctctcaccctatgagaactgttacataaaagaaagcaacatttact

SEQ ID NO: 21919 - DNA, 1816 bp, Artificial sequence
  DNA replication origin
actcacctcctggagcttcatccacctgagtggggaggcagggggagtcccctctctcctcctccaagccagctttgctgttgggagttaggggttgggagaaagcaggagatgcacgatgggagtggggaagggcgtgggtgctgtttccaacaccagactgaccgctcacagagggcccgagggagcgaaggcaggaggagccagagtggtccaggtggtgagataaacctgtttgcaaggacaagtccctttcccagggtcacaagggaaagagagtccccctgcccccagggacacctctgtgcaacctgagcctgtagccccaagggaggaaacgacacgcacaaggggacacacacgcaggggggacacatgcacacggggacacacgcacgggggacacatgcacacggggacacacgcacgggggacacatgcacacggggacacacgcacgggggacacatgcacagaggggacacacgcacggggggacacatgtgtagccccaaagggaggaaacgacacacgcacagagaggacatacgcacaggggggacgcacgcacaggggggacacacgcgtagtcccaaagggaggaagcgacacacgcacagaggggacacacgcacaggggggacacaagcacaggggggacacacgcgtagtcccaaagggaggaagcgacacacgcacagaggggacatacgcacaggggggacacacgcacaggggggacacaagcacaggggggacacacgcgtagtcccaaagggaggaagcgacacacgcacagaggggacatacgcacagggggcacacacgcacaggggggacacaagcacaggggggacacacgcgtagtcccaaagggaggaagcgacacacgcacagaggggacacacgcacaggggggacacaggcacgggggaatgcacgcagaggggggatgcacgcacaagggcaacgcacgcacgggaggacacaggcacaggggggacacacacagcagggactcatgcacaaggggaacgcacgcacagggaggacacaggcacggaggggacacaggcacggggggacgcatgcacgggaggacacacgcacggaagggacatgcgcacaggggtgacaaatgcacagggttgactcacgcacggggggccgcacgcatggggagacataggcacgggggggacacaggcacgggggggacataggcacgggggggacgtaggcacagcggggacatacacacaggggagatgcaggcacagggaggacgcatgcaaggtgggacacatgcacaagggggacgcacgcacaaggaggacatgtgcacgggggggatgcatgcacggggggacgtacgcatggggagagacatgcttgggaggacgcacgcacagggaggacacacgcacggggggatgcacgcacagtggggacacacgcacacggaggacacatgcatagggtcgtgggaagtggagctgctgccaaagacaggcccggggagtggagatgggttctccctccacgcttgcccgccctctctcttcatccttctgctgctcttgttcatccatgtattcagagaatgttgtcagggtccccgagggctgtctgggacctcttcatccttggtttgagcccactagagctcagaagcaaaaccagtatctcagaacccgaactccaaactcaagtgtgcagcccagaatgaggactggcgggcaggggaggctggcagccactaccctcacaaggcttccacaactctaaaaatccatgctccctttcggtggccata

SEQ ID NO: 21920 - DNA, 821 bp, Artificial sequence
  DNA replication origin
tacctgtccctcacccacagcaggtgtgtagtctaggagctggagctggcttacctgtgtccccagcctgcagcacagggcagggcatggagcccaagttcaggggagctttggggaaggaatggcaggttgtataacaggcacaacccacctagctctggctgggcctggtcagccaggcagggtgctggagactttacacacttgacctctcccgagtgtcaggacaagctgtgttcaccctcattttacagccaaggaaagggaattgggggtgctgtgatgtgttcagggtgactcagcttggaaggggcagtgcagggttaaaaccctgtctgtgtggctctgacaggccgtgctcctgcctgctacccaggacagcctcccgcagagttcctgcatttcatgtgtgttctggagagagagagagggtggggtgggtgggtgtgggggtgttggcatgggaggtacgctgtgtatgtgcaggaggtggtggggtctgtttttctttgctcctaaatggattttacaccatgcctgggctttggcctacacaggaagtgttgatcatcattccggagaatctggatcagcccctggtgccgatggagtctctgtttgctgcgagagaagcccccaggggcttgcaggtccacccagcaagacagcaggagggaaggacagcaactgccaggagggaacagcctccaaaccgacccagatgtcacctggagcacggagccccatcacaggcctgcaggaagaccatccaggatgaagagccaggccccaggagctggctttggatcagagggtgcccc

SEQ ID NO: 21921 - DNA, 1191 bp, Artificial sequence
  DNA replication origin
gccttggaggaggaaagcgacacaagccccaagcagctggcgagggaagggctgaggatgaggatggtgcgaggcacatcaggtgtgggccagtcagggcccgtccccccgcaccccccaccactggggcaagctgggtggcccttttctggccaatggcacaagcacaactatctgggggtgggtggggtgggtggttacctgtctccccacttcactgttgtgtagacgcatcagtttattggcttgggatcctgtttttttcaccttcataggagcatcggaaaacttggcccccatgaggagcccgtagctgaggttgtccgcacatcctccccagcggttcccgggcccgggtggctcacctgggacggggccgcaggagcagccgggcaggtcgccggaggtgcaggcccgggcgatggcgtggctgatggcggcggccgacagcgcatacacgaaggccgactcccgggtccctgagggtgggaggggaaggtcagccgacgctgatccagggctaggaccctgcccaggtcagaggtcctccaccttcgcccacaccctgctgtaaccaaggtgacgccagcaggggtcggcactagggccattgagatgtcacccctgcttccccaattccttctgaatataccagctgacagccacactcaggaccccacacccacaggcatgccctcacccacgtcctcctactcacactcacagctctaggcttccacccacttgccctgcactggcattaggggatgctttacagtagtgaggcccaggctctgagctcctgatgcgccagacaaatgcacaaaggacctgctatgcgtggacctgtgtccccccgaaggatgtgttcaagtcctgacccctgtacctgtgagcataatcttatgacgaagtggggtctttgcagatgtaatggggctgagacgaggtcataccggatcagggtgggccctaggccagtggctggtgtccttataagaaaggggaatttcggatacacagacacacaaagagggagcttgccctgtgatgacagaggcagagaccgcagtgacacagctgcaagctaaagaatgccaaggatggcgggccgccaccaggagctagggacgggccaggaaggatcctccctagcaccttcagggggagcacggccctgctgacacctcg

SEQ ID NO: 21922 - DNA, 1426 bp, Artificial sequence
  DNA replication origin
ctctgtttcctcctctgtaaaatgtccctgcctcccgcaggcttgcgaaaagggagtgagacgggcgtggaccacaatggaagcgcctggtcctgtgcagctgacggtggcgcaagggccacggagtttctggccacctccgcaggggcagatggaaaaagacattctgttcagggggcgcaatccagagcggccagcccaggagcggtccttgtccgtcagtctccttgaccctagcgggagttccgctgagacactcctgacccctccacctgggcgaccttgggaaagtgtcactctacttcttggggcctccttgtcctcctctgtcacgggagggtgagactccccacctccctcaaatcagatgagaagaggctcctgaaaggacctcagaagctgtcagatgccactgtgcacatgtgcagggcattcctttagatagaaattattcacgcaggggtaggagggagagagaggcttggtgccgagctgaagggagtgcctgctcagggggctgggggtggtgaagagaggagtaaacaccagccccttcccggaggagctgcgctctaagttgagagagataagcccaggctgtaaataactccacaagtgtccaagtgcccgaggagaaaccagagcgggaatctggaggcctagaggaaggaagcccacctggtggggacacagatgtgagacaccgggaagcttttccgaggctgtgcctctggtgactgaagcgctgctgggagttggctggttcgggcaatggagaggacgctgtgggcagaggggctccctgagagggaaagtccaggacaggacaagggtctggaatctggggccagggcagggagcctgcagataagacagcagggggcaggttgtgggggctggggagggcgctgcaaagggtttgtgaattagttggaagacagggtgatagtggctgcgccgccagcaaacagtctggaggtcactggccctgccccttctcaggccaagttattgattaattgacgattcgaggagggaaccccgtcttcctgcctttcttgtttacaagaagcctggtctcagcaatctcccagccctgggcactagcttttcccagctgtccctgaggagttctgtgagaaaccagccaccttccttttgcaatggggtacccagcactgttccagctggcagggacctccgatcagcgagtccaagctctctcatccaccgccaccattttacagataaggatactaaggtccagggaaggagaggattggctgaaggagcgtcagaggccttgcagtgggcttgggtgtcatttgccgcccataagagtcctgtggggtcactgccatcatccctgctccacagtgggaacaccgagaccctgcaaagggcatgatgcacgcaagcccccacg

SEQ ID NO: 21923 - DNA, 1437 bp, Artificial sequence
  DNA replication origin
ggaccccaaaacgccctccgccgccccagtccctggcctgtgcgcgtggacgcggggtccctactcacagccacttgatgccatagcacacgccggtctggagcgccagggcgaagagcagcgcctcgcagacctgcggccgcgccctcatcgtcgcgcggcgggcgcgcccggggtcacacccaggaggagccgcgccgaagtcctccgcctgcacggccgccgctggtcctgcacgccgcctgcagccggggagagcggaggcggcgggttaaggcggcgcgcgggcgggggaggcgttttattcaaattacaaaggaggggtcggggcccggggaggccgagcgcggcgggcgtcccctcccgctccgcccggccgggggacgcgtcccgcgcctggctcgaattaggcgcggccgaaggcgtgtctcccagcgtggccccgggccccaacgcgccttcgagcccctctggccggggcagccggaaggagggacaggaggcggcagaaccggagacccaggagagaccgggcagacacagcgagagggagaaggacgctcagaggacaaggctgagagccacggagacagagggggaaacccggacagacgcaacctgggacggaaaggagaggaatgaggaatcaggagtccaggcgaggcagcagagtcgaggacccggagctggggcttatccctgcaatattgagcattagttaatagggcctcggcaattctccttcccaaacgtgtttcagtttacctcctcagtaagctggggcaattcgggcacaattccgcttttataaagaacgttccctggccgggcagggtggctcacgcctgtaatcccagcactttgggaggtcgaggcgggcgggtcacctgaggtcaggagctcgagaccagcctgcccaacatggcaaaaccccgtctctactacgaatacaaaaaattagccgggcgtggtggcgggcgcctgtaatcccagctactcgggaggctgaggcaggagaaccgcttgaacccgggaggcggaggttgcagcgagcggagattgcgccactgcactctagcctgggcgacaagagcgaaactccgtctcaaacaaacagacaaacaaaaaaagttccctaacacgatcgcatctgctcctcccagcaccccgtgagataggcactatcgctgcctcatctcacagatgaggaaactgaggcacagaggtggggttcagctagggagcggcaagccgggtgtccggcgaaatcaggaaatggggcttgctcggggccctgctttctcggtgtgggaaggggaggatgggaaacgggatggtagggctctttgtacagtgaggattccgagtctccaagtccgtctttagccgctccactttggagggtgggagtggaagcatgcgggctgggactgggca

SEQ ID NO: 21924 - DNA, 1072 bp, Artificial sequence
  DNA replication origin
agccccaggcggccgcctcccgggcccgctgcaggcagggtagctcggaccaacttcgaggaggtgaccgctcgctctccaaaggtgctacgcctggcgcggcccactacgcgcccggccccaagcaaggggccgggcaggtcagggcggcccacggcaagtgtcctatagaacgaccaggacacagggggcactccctcgacacgtcgtcccatccccagacggagaagcgggggcccaggaagaggacttgaccccagcccgcgacgcaggaggcagccgcgattcccccctcctcgagccccggcttagcgccccctggcgggctgggggcttcaggaggcgcgtgcaccctgacccgcgagctcaggcggaaggtgaccccgtggcctgcgcggctgtcccgggcgctcgtacaagggacaggaacagtccgtcaggacccagaggctcgggccaggcgctgcctccccgcgcgacgagcttgggcggcggagggagagccttgggacagccggggctgcaccgaaagagctgggcggggctggaggcctgggtccccgtccgctgtgcgacctagggggctcctcctctccctgggagaccaggctggacacagatcccccgctgtgagtccgcgcgcctccgtcctcttgcagcccccgccccctccccacccaggaatgccgggtgccttcggggggcggcgcactttgggagaggggaagacggtgactggagttttgattcccccctccatatccagcggatatttttctcgttctgagaagtgcaagaaacttgcaggaccaggaagacaaaggatttggatacaggctgggtgggaggacgggactgggttacaccgagaacccctctgagacccccagccttgacggcatgtttgtcgcaggcgcccctgtgctgggcgctagctgcggggctctgcggaggaaaaaaactgtacgatccaggcttctcctcgccttcctgtgggttttgccgacaggctccagaaaacagtggggcttcccatctctgcgtgctgactacccacgcgcaggaacgcgcc

SEQ ID NO: 21925 - DNA, 1156 bp, Artificial sequence
  DNA replication origin
cccgggaggcggccgcctggggctgtgcacagggagaacaccacgagcgcagcgccgcagcccagcgccgccaacagatggtcataggcccggtctgtggaggactctggaaagccggccgctgggaccaggccacgccggcccggcgaggacttgcggggtcccccctaccccgacgccccacgggcaccgtgcaccggggccgattgtccgcgcggcgcgcaaggtcggcacgggcgggtcccgaagcctcccgccacgcagctcacggagctgaccccgccaaccagggacgccgagcgacggcttcaaggttacctgcggggcggggcgaggccgggcctgccacccggctttgaccccagccgtgaggctttcgagagacgtctgcttggctgcgcacgcggcgccgggtcacccgggagacgggttgttttggaagtgggaagggtgggtgggagcactcgagatccctcctgctaaccccctggagccggaccctgcacgcccagggccttgagggacaccgaggcacttcagccccgggggtgggaggcgtggagctcgtgcgcgagctcagccagatgttccgggcggttgcagatgtgcctcggggccggggacaggactttcctcctccctagcccccagcctggagctcaggtcagtaaacaaactcggttctccccctccccccgccgcccctgggacccgttctcaaagccaggcttctgcccccatccccaatttactaggcgctgccgcatttctttgccttttgccaccctttccccccgcccaccacacacaccctctgtcgcgggatccaagtcccccacccccgggggtggctcgggcatgacctcatccgccgaacgactgggaaggagggggtcgcctggggtgcgggggcagaagaggggggccgggccgggaaagttcgaggagggccgcaggaactgcacaacccaccaccgtcccgcgtgcccctaaaccccgcgtccccaggctcccgaggcttcgctccgcaaaggggaactcttcggagtgctgcgggggaaaggtatggaggagcgcttggtttgcttacccgggagtgggtgcccaagggggtcgtggcgggtgcgagaagcgtcgtccccctcggactcgggcg

SEQ ID NO: 21926 - DNA, 1390 bp, Artificial sequence
  DNA replication origin
tgcgtgcccgggtgccccggcctgcccagggagcggcgagtgcggtttccagcgggcccgtgcgcactccggctgggcgagcggcgaaggcgccctcttcgtgaagcggcgcgagaaggacgccggggatcctggcaagctgcggccggctcaggacccgcgcggagtcaggcgcggactccggctgctctctgctgcgctcagctcccgtggcctgtgctcgccgctcgcccgagctctcctcctcgcctggcgcgatctccggcgcgagcctcccaaactgctttataaggcgggcggccgctttgatccgcccacgtcagcgcgtcgcaaccccaccgggtggccccggccgcgcgcggggggcgggggcggggtccccgcggacgccactgaccggcggcgcccgccgctccagagaacttagtactctgtcgagttacaaagggggactcgctcactacagctggtgtttactaagcgtgcgtgctgcgtgcctgcgacacgcgtggggcccgggtaaggcccatctcgaatcgtcgcagcaaccaggcaaggagcctcaactggcagggggaagtcagacttgggtctcagtctggagccggggcatccttaggtgttggtcgcgcagcgtggttactgtagacgtctgaggtcccgaaacctgccttcgtgtcctagtcctggtccttcggggggccatctcttctggcctctggttccagttgtggaaaaggaatcaacgatcctgcaagagaaagagacacgaggactccgcgctacaaagcccgctgtaaaccttaggtgtggagctgggcggcgtcccagccgttggggtgactgctggggagtgttctggacacaggggagggggagcagaggaggactgggtttcctaagttaaaggagcctagagaggcacctcctgcgtcgagtagcccaggcgtgtggtgcttctggaccccctcacttggcctcccctgagcagaccagctgcttaccccacaacatgactgcgatttctaactgcccatcgggtgctgtgggttcatccatgtctccccctccttctaggggcctcaatcccaggacgtcctcaaggataactggttcattagcagaaagggaaatggagacttagtgaggacacggagcctgtctcaggtcccccaaaatgcctgacattcttttccccattctttgcagctgcagatgaagtggcactcctaggctgccccacacccagctacaggtacctccacatacaacacaaacatctgggcccacagtgcccatagcagcctcccagccataccagtactcccacacagccagtcctcacacacaggctggggcatatcaccccgcatatggttacaaacacact

SEQ ID NO: 21927 - DNA, 936 bp, Artificial sequence
  DNA replication origin
tgtggccttgctatgccaggcagcctgatgagcctggtttctatcactctcttgctgtgtgactttaggcaagtcacctctcctctctgtgcttcactctcttctgcaaaacagagttagtaattccagtgtgaccccaccaagctgttgttaggatttcgaggctgtgcatggaagtaccagcacggtgcctggcccattgcggtgtaccgtgatctggtaaggatgctctcagagtgcacctgtcattcagtcattcatccaaaaggacagcacaaagctcccatgggggccaagccccgtgccacggggagcaatgtgaatcaggtgccagagtccccaccctgaaggcgctctgggtgattcagcagagaagatgggtgcagggaccctcagtcacacagtgtggtcacagctgtggcagcccagaaggggcacctaagcccccataccttggaggaccccactgagtcatggaaggtgagaaagagtgcgacattaggatcggcatggataagtcatgacggccagggtgagcaggggcctgggagcccagagcagatctgcatctgctaagcagcatttagggatgatggggggcagggaagggtttaacggagtgggggtggtgatcgctggatctgtgtgtgagggaaaatccctgggctgggtgggggatggatggggtggggaaaggtatgggcaggcatggaagagacaacacagccatctgtgaggaggctgggacagtggtccaggccaggtagatggtgggaaccgagaggagagggggcaatggggagggcaagaggaggcaaacgggagggatttaggagagggaagggatgggatgaactcccacatcaggcactggaaccacccctgagctactaacccattcagtgactcaggcaagcccctcccccttgggggcct

SEQ ID NO: 21928 - DNA, 1938 bp, Artificial sequence
  DNA replication origin
cctgagaagtgggcagagtcgagactccgagggtgccacgccccggctgccaccccgccagcacaggcgagcgccacacctgcgtctctcccaggctccctcccttctccgtcccgcccgcccgggtggaaggaaacagctgggggctcttcttttccaggctgcggtcgcctcctcttcggttgcggacgggccgaggttgggggctcgggccgctttccgcacgcgccgacccccgccggggaccgcaggggacccgagtgcgcggggcttcccgcccgccgggcagcctcccccaccccgcctgccccgccggcagcccacaaatattcccgaggcccggagggggcagaaaacgcctttccagcgcgtcttctggccccggcccacctttctgcgcgcggaacccttcgaggagaggcctggacacccgtcagtaccgcgcccccaaaccctcgccctgcgcagcccgagggcgcaagcgtgggccttgtggggcgggcatgggcagggcaggcagacacagacccagggtgggagctgggggagggcaccccactcaatccggggctcagggaaggcgtcctggagggatttcagctaagctctgaaagatgaacggatatgatggacagagggaacagaatatgcaaagaccaacaggggggcagttggagaaattccaaatactgtgtgttgttgaaacgctgaattcaaggtgtagtggctcaagatggggctggagagagtggggagagccagtcccgagcaggtccttggcaaaccatgctggaggatgggcgactctgagggattgtaagcaggaccctgactggccagtcatttgctttccgggaaggccactctggctggtgtcgggggggggcggggggggactgggggagtggcaggggatgggtgaggaggctgtaggcagaagtcacagtgcctgcacccaggtgacgggagtgggaatgtctccctcctgccaaccctcctccttcctcgttagtccagcttggaccctcttccaaggcctctctcagtgccccactcaccacctccaggaagtcttccctgctccctcagggtctcagaacgccaaagcctgtatctggttatttgctgccttgtctttggaattaatttgtgtgcgtcagccttcaagggagccgagcatggtgatcaaggccacccgagaaccccagttctactgcagacatgtgacctgggaaagtctttcattcactctgagcctcactttattcctctgtaaaatggggagaatgatccctccactgaaggattctatacgcctggcatttgatgtatgcttagtgagtgagctttttctccattagagttggtcagcctggaaaccagacaagggccctttgagtgtctcccgaaacttctctagggcttttagatagaagtaaccggatagcagcgatcttaaggccgaggattggaataccggagtccctgtgtgacttcaggcaagtcagggccccactctggataacaaaggggcaggcaggaggacccctacagtccccactgctgctcttttaggcattccctttctggcggagttccttgggtttccttgggaggcagaggcacctggaagaccaacccagagctgaagatctaaaatgacagattggcagggtcctggcttggagcagctgcagcaggtatccaggcatgggagcaggcatcttgggcacaacaggatcagatgattgtgagcaaagccacgggatttgggtaggtcccagatgaaggagccatgagtagtgtcagcacacccttctctttgcccagatgaaagtccagtgagccacccatggttatgtggcaagctcatgggaaggcattttggctgacaggaagagcaggaacaaagtggtcaagactcccatgttcaacaca

SEQ ID NO: 21929 - DNA, 1186 bp, Artificial sequence
  DNA replication origin
ccaccctgggtctgtgtctgcctgccctgcccatgcccgccccacaaggcccacgcttgcgccctcgggctgcgcagggcgagggtttgggggcgcggtactgacgggtgtccaggcctctcctcgaagggttccgcgcgcagaaaggtgggccggggccagaagacgcgctggaaaggcgttttctgccccctccgggcctcgggaatatttgtgggctgccggcggggcaggcggggtgggggaggctgcccggcgggcgggaagccccgcgcactcgggtcccctgcggtccccggcgggggtcggcgcgtgcggaaagcggcccgagcccccaacctcggcccgtccgcaaccgaagaggaggcgaccgcagcctggaaaagaagagcccccagctgtttccttccacccgggcgggcgggacggagaagggagggagcctgggagagacgcaggtgtggcgctcgcctgtgctggcggggtggcagccggggcgtggcaccctcggagtctcgactctgcccacttctcaggcagaaaactgaggtggtcccatggccagagctaagaaaggcagtgctgattcctgggcccccgctgctcacagcgtccttcagcatcccagtaggccgagggcatctcactcttaggtgaccacaagaatcacggggacagttgttaaaatgcagatttcaaggccccatctcccagagacgcagtaggtctgagatgggacccagaaatcagctctttaaaacaaggaaatagtccacatgttgtgaagcactggtgaagagatgctttggaataggaagcttccccctcggcctagttacagcagagagcagagagcgaggactcggaagggagggacttggaccctgaagcccaggctttcctgctgggtgactaacttctctgtgtcttgattttatcttgcctaaagtggagataacattcagcccacaaggttctgtaaaatcaaagagatgtgagtaaaagtgctttactaacttcaccaccaccatcattattattcactgtcaccgcccatcccctaggcaaggaaagaagccatcctgaacctgtggggtgatgagctcagatgctaccacctctgcaaaggcagccctggtcatttgggaggaagccctctttcctctgaactgaacaccactccttc

SEQ ID NO: 21930 - DNA, 1389 bp, Artificial sequence
  DNA replication origin
ctcctggccctcgcggcttctagcccgcccgcccctcccccgcgcgtcggccctgccgagccggccggccggcctggctcccctccccggccccgacgggcgggcggactgccctgaggaggcggggaggggagggctgggccggccggcgggcgggcgacgatgccgaacttctgcgctgcccccaactgcacgcggaagagcacgcagtccgacttggccttcttcaggttcccgcgggaccctgccaggtaagcggcgggcgcagagcgggcggcccgggcccaccttcgcggtgagcgctgccagccgccggcccctggcgggctcccgggctggctgagaggggcgcaggaggcgggcgcagcgcactgccgtcgaccccagcgttggaccgagatggggagccggccccgagccgtgggcgggcgggcgtccggggacctcggagcacgtgcgctggtgggggctctgcgcggaggacaccaccccaaacgcgagggagctggggcggcgcgcggacgcgggatgctgtgggttctcgccgtggctcacttgctgtgtgacctcgggggagtcgctttcctctctgggcgttagtttccttagctgtcaaaagagagcaggactctatggttgtggccactggggcctttccctctccttgccaccacccccgggacagtgtttctgttttgagtcccgctaccttctttcatctcatcgcaactgctttctccttcggacttgtcattgcacggttcaggattcattttctggctgtcaccgttactcattttctcgcttgggtattgtagggataacagagggtgtacgcgtgagggcgtggaaattggtattggaacctcttccttcggataacccccacacactgacatatttagggaatgatagcatagggactgtgtttgaaaggctgagatgtttcataggcctgtcttgttggttcattcatttaaaatcaatgcctactatgtgccgagcgcaaatgttaggtgctgggagttcatgggtgaataagggtgtcactgcttgcagaaagctctcagtccagtaagggaacaggtgcagcaacgggcgactataatttatgttatttattaattagttcaattaattattgaaggtctacttgtgttggcattgttgtgagcagtgggggttacagatgaacaaatcgaagtccttgctttcatgaagattacattctaatggggggggaataaacaagtaaaatacgtagtgtgtcggatgatgataaatactgtggagaaaaataaacaaaggttagagggtaggggaataagtagtatcaagggacgcacaattgctattttaaatacagtgattagagaaggcctcactaag

SEQ ID NO: 21931 - DNA, 1151 bp, Artificial sequence
  DNA replication origin
ccgcgtgcagttgggggcagcgcagaagttcggcatcgtcgcccgcccgccggccggcccagccctcccctccccgcctcctcagggcagtccgcccgcccgtcggggccggggaggggagccaggccggccggccggctcggcagggccgacgcgcgggggaggggcgggcgggctagaagccgcgagggccaggaggggtgccgcggtccgaggccgggctggggacgcggctccacagtgctgtgagcggccgggaggatttaccgccgccgccgccgctggtgcacctcccgcccgcccgagacgctgccgcctccttcccacaatgcaccctgacgcccgggggtgccctctcttccctcagccttcctcccccgcccctcctttccgccttctcagcaggcgggcacgcgcaaggaagcgcgcctgccggggtgtggcgaggcggaggcgggacctggcgcgcgccgccgcagtgcgactgcgcacagtctaatccgcggggagagagaattgcgcatgcgcgcctgtctcccgggacgctagagcaggcggttcctgggctgctccggtaggtttggcgtgcgcgggtttctgcagatctagggcgagcttgcacgttacatcaccgatgcatctcttcttgcttgcttaatttgccaccacttaggcctttcttgcagaattcgccatatactccttaagggccgcggaatcggagcgaccttggtgactggcaaactctcggcagatgtgcgtgcactggtttgatgcagacgtggttgtaggcgatttaatttttcccagctttgcagcgactgttggcttcccagaacggatctccccagcctcgactggaagctgagggacaaaaattcataaaagcaattactctttcccggcgaggcttctagaagagcaagaagagcgatatgattacacctgcagccctataaagattgatctgtccgtctttcccttacagtcgtggcctgttaaacgttcctgtgttgttcagtgccagaatgagtgaccgctatttagaacaaaggattagtatcaaattttgcgtgaaattgaacaagtctgcaagtgagacccaccatcttttaaaagaagcttatggggatgaagtcatgtcaagggcc

SEQ ID NO: 21932 - DNA, 874 bp, Artificial sequence
  DNA replication origin
gggaagtgaggagcgtctctgcctggccgcccatgtctgggatgtgaggagcccctctgcccggccgcccagtctgggaagtgaggagcgtctctgcccggccgccatcctgtctaggaagtgaggaacgtctctgcccggcagcccctcgtctgagacgtggggagcacctctgccccgctgccccgtctgggatgtgaggagtgcctctgcccggccgcgaccccttctgggaggtgaggagtgtctctgcccggccgccccctctgagaagtgcccctccgcccggcagccgccccatccgggaagtgaggagcatctccagccggcagccgcccagtccgggagggaggtggggggcagcccccgcccggccgccacccagtccgggaggtggggggcgcctctgcccggccgccccttctgggacgtgaggagcccctctgcctggccgccaccccgtctgggaggtgtacccaacagctcattgagaatgggccgtgatgacgatggcggttttgtcgaatagaaaagggggaaatgtggggaaaagatagagaaatcagattgttgctgtgtctgtgtagaaagaagtagacataggagactccattttgttctgtactaagaaaaattcttctgccttggtatgctgttgatctgtaaccttacccccaaccccgtactctctgaaacatgtgctgtgtctactcagggttaaatggattaagggcggtgcaagatgtgccttgttaaacagatgcttgaaggcagcatgctccttaagagtcatcaccactccctaatctcaagtacccagggacacaaacacggcggaaggccgcagggtcctctgtctaggaaaaccggagac

SEQ ID NO: 21933 - DNA, 1148 bp, Artificial sequence
  DNA replication origin
ggcacatcttgcaccgcccttaatccatttaaccctgagtagacacagcacatgtttcagagagtacggggttgggggtaaggttacagatcaacagcataccaaggcagaagaatttttcttagtacagaacaaaatggagtctcctatgtctacttctttctacacagacacagcaacaatctgatttctctatcttttccccacatttcccccttttctattcgacaaaaccgccatcgtcatcacggcccattctcaatgagctgttgggtacacctcccagacggggtggcggccaggcagaggggctcctcacgtcccagaaggggcggccgggcagaggcgccccccacctcccggactgggtggcggccgggcgggggctgccccccacctccctcccggactgggcggctgccggctggagatgctcctcacttcccggatggggcggctgccgggcggaggggcacttctcagagggggcggccgggcagagacactcctcacctcccagaaggggtcgcggccgggcagaggcactcctcacatcccagacggggcagcggggcagaggtgctccccacgtctcagacgaggggctgccgggcagagacgttcctcacttcctagacaggatggcggccgggcagagacgctcctcacttcccagactgggcggccgggcagaggggctcctcacatcccagacatgggcggccaggcagagacgctcctcacttcccagacggggtggcagccggtcagaggctgcaatctcggcactttgggaggccaaggcaggcggctgggaggtggaggttgtagcgagccgagatcatgccactgcactccagcctgggcaccattgagcactgagtgaacgagactccatctgcaatcccggcacctcgggaggccgaggctggcagatcactcgcggttaggagctggagaccagcccagccaacacagcgaaaccccatctccaccaaaaaaatacaaaaaccagtcaggcgtggcggcgcggcgcctgcaatcccaggcactcggcaggctgaggcaggagaatcaggcagggaggttgcagtgagccgagacggcggcagtacagtccagcttcggctcgggatcagagggagacc

SEQ ID NO: 21934 - DNA, 758 bp, Artificial sequence
  DNA replication origin
ataaacagctcgggcctccctctcccccaccccgccctccccattctcagccaccacagcccaactgtttccagtgcgataggggtgggggtggggggagatgaccaagaagagaagaatgggagacgagggggagcaaaggagggggggaggacaaagataagacggggtcctagaggcctgaggaagctgcagggaatggagggtggtcagagaggattctttgcctccccactggcccctgctgccgtgggcagcccacagtctgcattcccctgtcctctctgtgtcccctaggtctgttcaaaaagcctcctcaccacactctctgagggcttgtctcaactccacaagcttctgagtcctggaagacaggggccattcactcagaaaaccttttctgagctggctttagtctgtgttggctcacaggccctggggacagataggactccaggtaggacctccccccaggacctcctggcctggtgggtgggtcaggcagacacccaatgctgagggcagcccagacctgtgggcagctggaggagagaaatccagacagtctccccagagaaggtgatggaggtgatacaggcgagggtggtgaaggagattgtgcaggtgggtgggggggtgagctggttccggcagaggaggcgggagaggtgcaggaggcagtgctgcctaatggttaagactgctggctccagagtgggacagcctgggttcaagtctcatcgctggagctcagttct

SEQ ID NO: 21935 - DNA, 831 bp, Artificial sequence
  DNA replication origin
actttcaggagaggtggggctggagacagagatgtgggccatcagagcaatggggtgtttacagcaatgaggccatagtgttcccaagggaaaagggcttaggatggagccctggccatcaccacttaaagctggctcaaggaagatgagcaaagagtggcctgaaaaggagtggcctgggagggaggagatggcttcctgtgtgggatcacagctgtggggagagcatgcccagcaggggtatgggtggggggcctgctgcacagggcctagggagaggaggtctgaaaagcgtgctgagtttggcaaaggatacccttgacgctgttagcaagggcagcatggagctgggaggggctgaaggcagctccaggcgggttgagaacgggaggggcgggaagggaagtgactttaccaagaacctggcctgtgaagagtgggaggacgaaggggaaagtggctgaggggcttctcactatttttaagacggacaagacttgagtccagctgaagtctgagaggaagacgtaaacagggagaggctggaggcagaagagagcatgacggggtaagggagagaggacggggctggggaccccaaggaggaggggcagtgcagcctctgagatagggcacagagggctgagcacagagaaggggagggggcctgtagctgtagcaggaaggaaacaaacggaagccctcagcctctcagccctggggtggggagcacagtcgcctgttgagtgtggggcaagaggtgtagcaggggccatgctagtggctgcggcttcaaggtccagggtggtgctggcccagagtctcagtgtc

SEQ ID NO: 21936 - DNA, 1425 bp, Artificial sequence
  DNA replication origin
ggcagctgagcggcctgctcctcctcgggccgtgaccccggggtctggcgcggggtgggacccgggggcgggtttgcgcaaaatgtgccgagactgcccgggagaggagctgcggccgcgctgagccaggtaggagccgccgggcaggcgaggctggccggccctcggggggcgcactgtcgcgcgcctctagcgagcgcaaggcgggggctggtcccaagggacgccccccaaacactcccctcccgccatccccactgcgcgcgtggagccggggctgaccctccctcggtccctgggagttccccagcgctcctgtcttggcggatctttcccgcaaaggggtgaggccggccttcccatttgacagctgggaaaacaatggcctgaagaccgtgacttgcccaggaacacacagctaggcaagggcaaaccggaatttgaattcaggtttcctgcaacgctccgatcccagccaggcgtggggctgcccatcccacagcactagatggcctgcccatttctcgtagtggggtagggggcacccaccgctctccaaggggctctgaacccagccttcttcatgggtggtaagatgtgaggggcccccacccccacgccgagctgcctgaaattccgccatcacagccacattcctttgggttaaggtctaattcccccgtgggatgcacatgtctccagaacgaggcttgcccttagtgattcactgcttgacaggaacgtccgcagcagctctcccaggaccccactctgccagtaagtcagctgaggccgagaggagggagagaggacctcagaggccagactgtgagctagtctgccctgctcctgcgtgtgaggggtcgttggcagggcttagggaaggagaccttgatttggtatagtgggaacatttgctttggagacagatgaactggattctgatcgtgaccctgctattttctccttgtgtgactttgggtaagtcacttctctgagcctccttttcttcatgggcaaaaaaaagacagttctattgggggcagtcggctcagcatgtgctggagaaaacacagtattcaggtcatgtagaactggataaatcccagctccaaagcccttatgagctgggtaactctgggggtaagtcacttcactttccggaaactgttttctcatccgtaaaatgggaattacagtaatttcctcaataggtgattgtgagaattaaatgagatgatataggtcaagtgcttagaagactaacatccttaaatgtaggggtgggcttattgtggtagtagtcattgccccccgtacccctgctctttctctctcactctctctctctctctcacacacacacacacacacacacacacacacacacacacacattctttggcacttttctgagttggactc

SEQ ID NO: 21937 - DNA, 1631 bp, Artificial sequence
  DNA replication origin
tctcccgggcagtctcggcacattttgcgcaaacccgcccccgggtcccaccccgcgccagaccccggggtcacggcccgaggaggagcaggccgctcagctgccccaccggagcccccgcgctccggctgcaatttaaatacctctcccgccggcccgccccgccacgcccccctctggcgaggccgtggggtcctagcgcctggccccgtgcctcggtttatccggagccggcgggggcggagtggggtggggcggcgaagcatcttcaccaccctgggacctcggccgggaaggggcgggggcccagtgtggggggatgagagggcgggagggagaggggttgcagaggaagcgccgtgggagcgaggcccatcccagcggccgccgcacgtgcagttcgcggccccgcggggtccggaggggggcgcggtggctctaggagccgcaggtccacagaggaaatccggcctggccccgatttcccagctgctggcgccgccgcacttaacgcgggggcaaacaggcgaggtgacggcggggctgaatgcggaaggaaatgacccttcgctggccctggggcggccgcggagggggttccccgcaccaagccgtccactctggtgggtcctggcaggtcacttttcctctccggattgtgctctagtgtctggacccgtactcctccatcatctgcgggacccttcaacagcctgtgaaacggcaccatcaaagtcctgttttcggatggagaagctgaggctaggggtgggggcagtgtgtacacatgaaaaccaattgtctgagactagtaaggtccctatttatagctggggaacctgaggctcagaaaaggttaaatggcgtgtccaaagtcaacacagctaataagaatcagtgatttgagcccaatctgttcataaagctaagtctgattcagtttgggcattatcttgcccgaatttttaaagtactgtgcaaatatggggtggcggtattgtcatttagattggaggttgaagcagatctttcccaaagccacctctcttctagatgccttgaccctaccaaatcacaggtaccctgccttgctgcctgtggactctagtatgcgggtccctagaagagaggggccctggctgtcctccaggtcctggttccaagtgtagaaggggcctcttccacagtgtttctcttccctgatcgtcaccagccctgagagtggggcagggtgccccattttacatgcatgaaagtgaccacccagggccttgtggcaaatcagggtaaggctgggctcagaagcgggattccctgaagtctctacagttactgccttttcttacccctgttcagtccactgtggagatggatctggggagatggggtcaacccagagaggacaagccatgatagcaggtgccataggggcctgacctagtcttagaagaggaaatcagggaaggcttccctaaggaggaggcctgagctgcagtgaggggatgggcaggaggtgcaggtaaggaatctctcagcagggcctgcgaagggtatccaaacctctttcccttccctcccagccacccaaggcctcagatctatgtccacagggtcctagctggtccatccag

SEQ ID NO: 21938 - DNA, 1088 bp, Artificial sequence
  DNA replication origin
cttctctgtgtacccaccagtcccaaggccagttctctgctgttacagtgtaatgttgggttgttaatgctcatgattacctcaaaggcagagaaaggtctgtaacctgtgcattctctctcaacattaccattctataaaggcaatggtacagcattcctttcagtgacttttcttcctaccccacctcctcttcctcaaattcctaagctgaagccaggtctagcagggagaccggagcaatctagcttaaaggcctgatgcactgggtcccagaaattcggtgccatatgggactcacttcattacactgtggaacgtcggtgcaggagggtgcagcacagagacgggcagcaacttgttcatgatcacacagcccgtgaaggccagcaaatgtggaatcctttgctctgtatggctggggttaggggagagtgagctggaataagtcagggcagatgtgtcttatttaggggggtgaacactgggcgtcctgaggaatggatgacttatgccagaaagggacacagagagttgtggggagggcagcgaggcgtggagagggtagagaggcgtggggagggcagagaggcgtgtggagggcagagaggcgtgtggagggcagagaggtgtgtggagggcagagaggtgtgtggagggcagagaggtgtggggagggcagagaggtgtggggagggcagagagatgtgcggagggcagagaggtatggggagggcagagaggtgtgcagagggcagagaggtgtgcggagggcagagaggtgtggggagggcagagaggtgtgcggagggcagagaggtgtggggagggcagagaggtgtggggagggcagagaggtgtgcggagggcagagaggtgtgcggagggcagagaggtgtgcggagggcagagaggtgtggggagggcagagaggtgtgtggagggcagagaggtgtgcggagggcagagaggtatggggagggcagcatgccaaccttaggctcttcaggctggcccaagggctccaaggacaatattcatcccatagagccctggcccaggatgggacatggaacctccagcccagc

SEQ ID NO: 21939 - DNA, 965 bp, Artificial sequence
  DNA replication origin
aagagcccagctgtgggaaatctgagcatctcctgtctccctgccatccccacttccctgcagtgccaggcccagggagggatctcatgcagatcaaatccagcagcagggaggccttgaaggtccagtctaggtgcaggacctctttccgaagcaggttccccagagatcacgaaaatgcccaggcaggtggcgacgttctcacaccgcagctcccgcatctgtcagggaaattggcaccttagcagccctcaggggccgttcgagggctggaccaggtgcaatccacatctaggccacctgctcttagcaccaagcacaaggctaagcatggagaggcatcagaaatgttgaatgaatggatggaaaaacagacagatggatgaatgggtgggtggtgagggatggatggaggatggatggatgaatgtatgcatggatagatggtggtgggtggtagatggataaatagatggatgggtgggtggggagctggtgggtaggcaggtagatgggtgggtgagtggttgatgggtgggagggtggatggatgatgggtgaatgggtgggtgagtgggtacttggtgggctggtgggtagatgggtgggtggatggatggatgagtgaatgggtgggtggctgggtggatggatgggttggtgggcgattggtcagtgggtggatgggtggttggtgggtgggtgagttgttgggtaggtggatgggtggttggtggatgggtgtttgcatggttggtgagtgggtgggcagatggatgggtggatgggtgggtggatgaacgggtggatgggtgggtggatgaatgggtggatggatggatgggtgagtagatgggtggttggtgggtgggtggtgaatgggtgaatgagtcaataggtggataaatggcagatcacttgaagccaggagttctagatcagcctggccaacatggtgaaaccct

SEQ ID NO: 21940 - DNA, 989 bp, Artificial sequence
  DNA replication origin
ggatggatggatgagtgaatgggtgggtggctgggtggatggatgggttggtgggcgattggtcagtgggtggatgggtggttggtgggtgggtgagttgttgggtaggtggatgggtggttggtggatgggtgtttgcatggttggtgagtgggtgggcagatggatgggtggatgggtgggtggatgaacgggtggatgggtgggtggatgaatgggtggatggatggatgggtgagtagatgggtggttggtgggtgggtggtgaatgggtgaatgagtcaataggtggataaatggcagatcacttgaagccaggagttctagatcagcctggccaacatggtgaaaccctgtctctactaaaaatacaaaaattagctgggtgtggtggtgcacacccgtaatcccagctacttgggaggctgaggtgggaggaccgcttgagcccgggagccggaggttgtagtgagctgagattcagccactgcactccagcctgggtgaaagagcgagaccctgtctcaaaaaaaaaaaaaaaaaaaaatctactcacatagttgcaagatgcccactgggaaatgcctaacttaacttccagtcacttaatccttctgaactttatttcagactgtggtgatattggagatatcaataaaattcaccatgtatcaaaagcacaccacttgccaggaagagttctaagttatttcatgcattctctgcaatcataatcccccagaaggtggctatcactagctccattttacaggaaagctaagagttccatggaggcaagatttcacccagatcttcctgactcaagtctcatgctctgtctccatccctcagtgcctctcaggatggtaatgatcttgggggtgaaaatgcttatgtggttagtgataacaggtgcttaggatctccctgagggaggggactttttctctcttctccattctgtatccccaaagcccagaacactgcac

SEQ ID NO: 21941 - DNA, 1305 bp, Artificial sequence
  DNA replication origin
ccttcagtgttggaggttttatccatgtcttaacatgtaattcccataacagtgtaccaggagggaatctgctgtaccactttacaagttaaaaacagaggctcagaaaaaagaaatcgtttgtctgaagcctcccattggcagagcctaggatcccacagggctgaatctaacctgtagattcccacctcagggttcacattccatcccatttttcctttctctgccttgccctctcgtgcctgggttctcttatatccctcgggctgggttctggggtgaaaactgaagcagcgagctatctaacagcccagctcccagcgggctctgcgggggaaaggcagcagaggaaagcattccccggtgtgtgtatgtttgggggtgggggcataagtgcagccccggttctgagggctgctccctcgccaggcactggagcagtcagggcctggaagggaccaggctacttcatgcagggtaggggtggggcatctctaggccagctaagctcagatgaccttggccatgggtcacagtcagtcccttctcccccttgggaaggcagcgctgggatgttgtgggtccagtacactcccccgactgtcctggggcacacacccgacagaggtgtgtggaggaggtggggtgggagaggggactcaggctggtcagggcaggttcggaggcgggcctggtttggagaaacaaccacccatcagccaggcttggggaggggaaggccagaggagaggaaggaggagtctggagaggggagagaaagacgtagaaaaacagacaaggagagagggcaggagtgggggacacaggtactgggagagagtagagacacagagacaagagagaaaaggcaacaaagacaaagccagagacgcccagcccgagagacagagccacacggagagaatggagaggggagcagggtcagagggcccggacgacgcagagaaggacgcgaaaggacgtgagagggacttcccccaggggcagggagaggccttgggcagctcctccgctgggccgggctgcctgcctgctggactccgggaaggaggcagtgaccgcacccatctggaagctgtcaggtccctcaaggatgagggcgttgggaggaagccagacatgagccacgtctagagagaggaagcggcgggatttgaaaaagatgtgagtgggcagagggggcagggaggttgcagtagactgggctctcctgtctggaatttttcagtggggaaaagagagagtctggcagtttggggctcttctggagaaggcctggactgg

SEQ ID NO: 21942 - DNA, 1045 bp, Artificial sequence
  DNA replication origin
cctgggcgtagcctttgtctcccgcaagacctctcccctgggtcggcgttccccactcccgcccagccctaggcgtccgacgaaagttgaggggcctcggcgggacccagccccgcccctgcgcccggcgtccccagcccgccctccgaaggggccgcgaggctaggatcggggacttgggatcttcaaccgcagcgcggactctcgccccgcccggggaactgcactcacctggaagcctgcgccacagccgcctcggcacgctcaccccggcggcccggccgcgggccctccggccagcgcttttctccgcgcggcgcggcccgccccccggtccccgcccgcagccaggctcccccctgccgggcgccgggtggcggctcgggccggccgcggggcggctcagggagtgtcgccaaagtgccagcctctctcggcgcgcgccccgcccgcggagcctgagccgagcccgggttccactctagggagcgtctcaaaagtgcgctgctcccgccccctctagttggcctcgctcacagcttcctgcatcccggatccctgccccctccccctgcgcgccccagcaatctaagcagatggccgcactgtcgggaacatctggaggtcgccggagtacgtgcctgtgtatgtgtatgtgtgtgtatgactgtgtgtgtggaaagagagagggaattagttgctagtaagaaagagatttggtgggtgggtgagggcttcctctttgcttgttcaccgcccctccccatttttttttaaagagtgaaagaggttcagggactaccgggagcaagaaaccaagaatctgaagcagagaaagactggctgaaagacgaacccacagagaagagagagcccggctcgggcagaaaagctggcaggagaggagagagaaagtcaacagattgagtttttcttttaggaggaaaccattggcttctggttagagttctaagaagggaaactggcgtgtgagtaggcagcagtttcagtctattccccctgctgtagctcttgggctctcacc

SEQ ID NO: 21943 - DNA, 1282 bp, Artificial sequence
  DNA replication origin
gagggggcagggatccgggatgcaggaagctgtgagcgaggccaactagagggggcgggagcagcgcacttttgagacgctccctagagtggaacccgggctcggctcaggctccgcgggcggggcgcgcgccgagagaggctggcactttggcgacactccctgagccgccccgcggccggcccgagccgccacccggcgcccggcaggggggagcctggctgcgggcggggaccggggggcgggccgcgccgcgcggagaaaagcgctggccggagggcccgcggccgggccgccggggtgagcgtgccgaggcggctgtggcgcaggcttccaggtgagtgcagttccccgggcggggcgagagtccgcgctgcggttgaagatcccaagtccccgatcctagcctcgcggccccttcggagggcgggctggggacgccgggcgcaggggcggggctgggtcccgccgaggcccctcaactttcgtcggacgcctagggctgggcgggagtggggaacgccgacccaggggagaggtcttgcgggagacaaaggctacgcccaggggccgtgtgggtctttgtgcggacacgtgcatctcacgtttgtgggtctttgtggatttgcggtcggggacgcgccgctgtcggtgcctttgtgtgtccgtggctttgcgcggctgctttgcgcccgtgtccacgtttgcgggcctgcgcttggctgtgggcgtcggtgggcgcatcgcgtgtctccgcgtacgtggtcggtgcctgccgacgtgtctgggctgggtgtccgcagagggtgtgcgcaccgagagcccaacgccgccccacccccccgctcccccgccgtcccctcgggcccacgacttggctccaaacttttctcccggttcctcgggcaacagccccagtcctccccaccgctacccggccgggggcgcagacagccctccccctccccctcctgaggtcccaggacagcaaggggctgcgacgggattggtggtcgggggatcggcagcgcctggggactggctgggcaggggctgggcggagcgtgcggactccccctcagaccccggctgggaggaagaggcgagcggtgggtcccaggctccggccctgggctggggagaggaagggacagggcggctggcgttgccctccccgcgcttcttggaaagagtgtgatccagagttgcgtctgtttggtagggagacaggctccgctttgagacccactctccgtttgcagcccgcccccggggtaggggg

SEQ ID NO: 21944 - DNA, 1043 bp, Artificial sequence
  DNA replication origin
cgctttgagacccactctccgtttgcagcccgcccccggggtagggggccaaccctcggacccggtaggggagagggggactgccagtccagatctgggcatgcccgaggcgccggctcacaggacccggagctgggctgggggccgtgggagcctcacatacacaggtttcaactgggacggccactggcccctgtgcggcgctggcaagttgctcagcttcgcggagtcgcggtcactctggcacggacagggcgagaactccctcgcggctcggggcgtgcggtgggaataacccgcgcctctggagccgggcggagagcagcgccagcccacacttggcctggcgaggaggtgactcaagaccttcgattcttctttcatctttgtgcgccctgcccttcggataagtctagacttgcagtgcctggggctgaccggaggtgggggggggggggtgctcagagctgcaggagcctgctgggcttttgagcctaagtcgcaaagataaccgtaaacaccctcctccccactgctcactccagtctttaacctagaactttgtcggatgctgcagacatgatggaagggcacaggccgctaacctgggaaagaaacaactgtgggcattttcctttccctctccggcctcagtttcccttctggaaggggaggtattgatagcctcttctgttctggctgactgcttcagatcccagaacccagaaacactttgatgtttaacctacacctccattctgacctgacctattccgaggcactactttgctccccaggaaggctgcaatgcaaccgccaccgggcttccacctacccttcctccaacaccaggaaaggcaaaagctgataaatgagtcaaaaatggagagggaagggagggggattgaccttttctcctcttactttttaaatgacagtttgtggtggtaaagtccagatcagtcttcttcttaatcataactcctgggtcaacacaggggatgcagttaagagttcatgcttcagttttcagagcaaggctg

SEQ ID NO: 21945 - DNA, 1462 bp, Artificial sequence
  DNA replication origin
caactcctgtggtgacgctgccacataggcctgcgggctccccactggtgttggcacattgaacataagttactcgggacctgaggcagcccaggacagcagtctgttatgtggccctgggccacaccatttgtcacaagatggtggggcccctggcagcagaatcccgggtgtctacgcagtgcagggccaccttggggctggagccaggcctccgggggtaggtgccctcccgcaccaggcgccggcaccgcacatcctggcccacgctgacgctctgcagtgccgggaggtggaggagcagcgcctcaggcaggggcaccaggttggtgcccgaaaggtccagctcctgcagggagctcaggcctgaaaacacctcagctcctgcccagttaagcttggggttgcccgacaggtccaggacctgcaggcccggtagctcacggaagccactgggcgccagctcagggagcctctgcaggctggccagagacaggtgtgtaaggcctcccagccccgcgaaggcacccggaccaatgacagctagagggttcccatccaggctcaggtagcgcaggggcaagtctcggaggttgggcacggcatggagccggttccaggccaggttcaggctctgaatggtgggcgcaggcaggccggccctcgtggggtggggcacgaggcggtgaatgaggttgtgggagaggtccacgtgtagtgcccggccctgactgtgcgtcgtgaaggcagacactgagacctcccggagctggttgtggctaaggttcacgtcgctcaggggtgagctggtgaagctctcggctggcagggctgtcaggccattgtggctgaggtcaagcgactccaggtagcgaaggcgggagaaggcagtgggtgagatgctggtgagcaggttgtggctgagatccaggccagccaacgtcgtgtagcccggccccgccaacaccgactcattcaccatctccagccggttggaggacaggtccaagtgggctgtgtccagagggatgggcaccggcatgatgtgggggcccaggccgctacaatccacccgagtcaggctgaagctgtcgaaaaggccgaaggtctccacctcgcattggcacccggggaagcatggccgggttgtctgggccccactcacggccagcagcagcagcaggggccacggcatggtgggggctagaaagagagccacaggtgaggaatgaatgcaccagatggtctaaagccaccacacaggacatgagcccagtctagacactgttggaaggtgtcacagaccccgacctcctggaatgcttcctggaacactccccagagttcctagtcccagttcttctctggcctctgcctctccatttgtatggtaaggggcgtgaggccaggtggtgaattttcaactagaagcagcagatccctttcttaaacaagagcagca

SEQ ID NO: 21946 - DNA, 1260 bp, Artificial sequence
  DNA replication origin
atccattttgagttaatttttatataagatgtgagataggaatcaaagatttaaaaaaaaaaattgcctatgtgcagcttaatttttttttttttaccagtttctttttttttttttttccaaggcagaagaatttttcttagtacagaacaaaatgaaaagtctcccatgtctacttctttctacacagacacggcaaccatccgatttctcaatcttttccccacctttcccccctttccactccacagaactgccattgtcatcatggcccgttctcaacgagctgttgggtacgcctcccagacggggtggtggctgggcagagggtctcctcacttcccagtaggggcggccgggcagaggcgcccctcacctcccagacagggcggctggccgggcggggggctgacccccccacctccctcccggaccgggcggctggcctggcgggggctgacccccacctccctcccggacggggtggctgccgggtggagacgctcctcacttcccagatggggtggctgccgggcagaggggctcctcacttctcagatggggcagctgccgggcggaggagctcctcacttctcagacggggcggttgccaggcggagggactcctcacttctcagacggggcggctgggcagagacgctcctcacctcccagatggggtcgcggccgggcagaggcgctcctcacatcccagacggggcagtggggcagaggcgctccccacatctcagacgatgggcggccaggcagagacgctcctcacttcctagatgggatggcggccgggcagagacgctcctcactttccagactgggcagccaggcagaggggctcctcacgtcctagacgatgggcagccaggcagagacactcctcacttcccagacggggtggcggccgggcagaggctgcactctaggcactttgggaggccaaggcaggcggctgggaggtggaggttgtagtgagccgagatcacgccactgcactccagcctgggcaccattgagcactgagtgaaccagactccatctgcaatcccggcacctcgggaggccgaggctggcggatcactcacggttaggagctggagaccagcccagccaacacagcgaaaccccgtctccaccaaaaaaatacgaaaaccagtcaggtgtggcggcgcgcgcctgcaatcgcaggcactcggcaggctgaggcaggagaatcaggcagggaggttgcagtgagccgagatg

SEQ ID NO: 21947 - DNA, 1501 bp, Artificial sequence
  DNA replication origin
tagctgggcgtggtggtgcacacctgtagtcccagctactctggaggctgagacaggagaatcgcttaaacccagggggcggaagttgcggtgagctgagatcatgccagtgcattccagcctggccgacagagcaagactgtctcaaaaaaaaaaaaaaaaaaaaaaaaagatacactgcttccctaggttttgcacctagcaaataaaagttctgcatctatttcctgctaattggctatggttattttgtagaaaggctgtgggctcttcatctctccttgtcctctcttttacctttgacttgcaccacatctgacttatttatttagaaaatagcagttgtatcatccttcatttttactcttcatttcttactgtgtattcaggcagagtcctaatactaagaccataaagaagggaaagcaaggtctctgatcaggatgtagcacagtaggatgtgaacaaagggcaaggaagctctagggtgtaaacatctgggatggcttcagagagctggattttaaaagaagagtggggagttggtcaaacggagaagagagttaggctgtcccagttgaactgtgggagcaaaggcaggtgacccagcgcattctaggagaggggaaagtttgagtttggtgtagctgaacactaggggcaagggtggttgcatctgttttaggaagagctctctggcagacctgtggagtactagactttttatttatttatttatttatttatttatttatttatttagagacagggtctcgctctgttctcccaggctggattggcacagtctcagctcactgcatgcaatctccaccgcgggggctcaagtgatcctcccacctcagcttctcaagtagctgggaccacacgtctgagccaccgcgcccagctaatttttgtatttttcgtagacacggggttttgccgtctacgatactcccagacgggggctgggagtattagacttgaagttggaagtaggggtaggctgttggttgcctgaagagcagggcacaattatagttagaacgtggaaacctctgtgcttggaggcccaaacgaagcagggaaactttgctttagtgctctagctagcagcattctttttttttaggatctcagaacctactttttttttttcggtcctgggttgttcaccctttccctttgtaccgaagagacacttacacctttatcagaaaatcacggtttatttcctgagaatcacggggattggttgggggtactctgttttggggctccatttgaggcctgtggctcaatggaagacatagaggcgcttcgccgcacaggtttaatcaagcaagggcttgatagaagtattcatcccacccccgccccgattaaatcaaaccacacgcacacaaatagaggctctggcacatcctgacagaatatagcctctgggatgtcaggaacccccaacctacggccattggcgtgtctgcaccggccaggaagc

SEQ ID NO: 21948 - DNA, 1592 bp, Artificial sequence
  DNA replication origin
acacaaatagaggctctggcacatcctgacagaatatagcctctgggatgtcaggaacccccaacctacggccattggcgtgtctgcaccggccaggaagcccaggcccccggctccttcctggatcacgcccctgccccgcccaagggtgaagaggggcggggccagccggcgccctccgagtgggccttacaccaggtcgggcctggcccggccccgcggcccagcggcgccggtgggcggggcctccgtcagggcagtgtcagtaacggcgccaggccccgcccctcggggaggcagggccgggcggggcgcgagcgagcgcgcgggctgggccggagccggcctggtcgccagcctaacccggcacagtgagcggagcgcctgggcggcggcggcggcggcgtgatggctccggccgcggaccgagagggctactggggccccacgacctccacgctggactggtgcgaggagaactactccgtgacctggtacatcgccgagttctgtgagtgtggcctgaggaggggagtgggggcgagagggcaccgggctgaggagacgccgtgtgaggaaggcaaagagcgaacctggccgcgaagggaggtgccaggcctggccccgggagctggaatgcggcgccctgggccagcgggaggctgagaggagcgggccgggagtccagtgtgtagagggaggagtaccggggtctgggagggaggaagggggcctgaggattgggggggcagaagagcagtgggaagtggggagcccctgctggacctaagggggaaagcctgaagagccgggttgggaatgggaattcctgcccgagagcggagtggggccaggctgggagagtggaggaccctgccccttggaatgagggcccaggacacctgctctgctgttgccaccaccagaagggtacagttcctagcttcgtctttcccccaatccgtgagaattctaccgtctttcccttcccttttcactggaatattagacctccttgctcacctccagggaacagtttcactagtctgagatctgaaccatcccacccctatcccccaggatgtcttcaagtaccagaggtcatctgctctctgagtatgattattcaactgtcatcttgcaccaggagtcgaaggcatcttgcacctagcctgtaccttctgcccctgccaggctcccaagagcacagaggaccaagtccctgctccattctgtcctatccaactatctaggagttaggggtcatctgaggacactacttccaccgactgcaccttctgaggatttaagcattcttctttagcggctgctctgtcaggcactgctggtcaggttgggcttgttctgtgtgcctatgtgggtgtctgtctgttttcctagacgatttttcctgccaggctaggagaaatctgccacttctttttctatcatttaatcaggttttgagagcacaatatttgatccttcttttaggtacctgcttctggcaaagtgcaaagactatcctttggctaatgattactgccttcttttagttggatctacttctcaggacgtgaagtgaaactctt

SEQ ID NO: 21949 - DNA, 1737 bp, Artificial sequence
  DNA replication origin
agcacatgtttcagagagcacagggttgggggtaaggtcatagatcaacaggatcccaaggcagaagaatttttcttagtacagagcaaaatgaaaagtctcccatgtctacttctttctacacagacacagcaaccatctgatttctcaatcttttccccacctttcccccttttctattccacaaaaccaccattgtcatcatggcccgttctcaatgagctgttgggtacacctcccagacggggtggctgccgggcggaggggctcctcacttcccagacggggcggctgccgggcggaggggctcctcacttctcagatggggcggctgccgggcggagggtctcctcacttcttagtcggggcggccgggcagagacgctcctcacctcctagacggggtcgcggctgtgcagacgtgctcctcacatcccagacggggcggcggggcagaggcactccccacatctcagacaatgggcggccgggcagagacgctcctcacttcctagatgggatggcggccaggaagaggcactcctcacttcctagatgggagggcggccgggcagagacgctcctcacttcctagatgggatggcggccgggcagagacgctcctcactttccagactgggcagccaggcagaggggctcctcacgtcctagacgatgggcagccaggcagagacactcctcacttcccagacggggtggcggccgggcagaggctgcaatctcggcactttgggaggccaaggcaggcggctgggaggtggaggttgtagccagccgagatcacgccactgcactccagcctgggcaccattgagcactgagtgaacgagactccgtctgcaatcccggcacctcgggaggccgaggctggcggatcacttgtggctaggagctggagaccagcccggccaacgcagcgaaaccccgtctccaccaaaaaaatacgaaaaccagtcaggcgtggcgtgcgcctgcaatcgcaggcactcggcaggctaaggcaggagaatcaggcagggaggttgcagtgagccgagatggcagcagtacagtccagctttggctcggcatcagagggagaccgtggaaagagagggagagggagaccgtggggagacgggagagggagggagaccgtggaaagagagggagagggagaccgtggggagacggagagggagaaggagagggattgaattagaaatcttgtaagccacttaaaatctttactctctctataaaatagaccccccaacatgcagcctatttccatgtaaaattagggtaaaaacagaaaatgagaatcaaaaccatttgcgtgatagaatttcttctccacaacaaactgtgaaacagaaggaagatgtaatacaatactcctaactgaattaagttgcctcaaacaaagaaatgaatcaaaaatttaaaaactaataacagaaatagctcaattcctctcctcaaaaaagacgaaacaaaattagaattcatcgaacttaataaagaaattaagactaaattacagtgtgcttgagggagagtagagtctactgaatatttaataggggctgttgtagaaagtcagagaaacaagcaagaaaattaaaaggagataaagaaataaaaagggtcagagagaaaaggattgaaatggaagacaagcagaaaagatccaacgtgcatataattggagtccctaggtggcatgggggaaac

SEQ ID NO: 21950 - DNA, 817 bp, Artificial sequence
  DNA replication origin
agggaggagggggaggaggaggggagggggagggggaagaggaggaggaggttattagagagggggaactgagcaaagggaactgagaaacatggtcaaaaagaaaggaggaaaggcaggagagcgtagagtctgttttaaggagggagaaggaacggggcacagtggctcatgcctgtaatcccagcacttttcggggctgaggtgggaggatcacttgaacccaggagttcaagaccagactgggcaatatagtgggaacccgtctctacagaaaaaaaaaaaaaaaaaaatttaatgacccaggtgtggtggcacgctcctgtagagcgcctcaactactccaaaagctgaagtgggaggactgcttgagcctaggtggtcaagactgcagtgagtcatgatggtgtcactgcactccagcctgggtgacacagcaagaccctgtctcaaataaataaatagccaacggtctgagatgcagaacctgatgtgactgaatttttagcagggcacagttaaatacgggaaaggttgttctgacctgggattcgtcctgggggtcttcataaaagccaggcctgaggtgcacctgggcaggctacatgcaggagagggcctgaaggtgaatgtttgggaacagcaaataataccagcaggtagaatgaggaggcagagctagaggatgccgtggagatcatctcacccataaggtcatatcacccgtgtcacccagtcactggccacttcatactcatttcatgctcacaacagccctgcagtaggaattcactaacccttcgtcacagatgagaac

SEQ ID NO: 21951 - DNA, 1091 bp, Artificial sequence
  DNA replication origin
agactgcagtgagtcatgatggtgtcactgcactccagcctgggtgacacagcaagaccctgtctcaaataaataaatagccaacggtctgagatgcagaacctgatgtgactgaatttttagcagggcacagttaaatacgggaaaggttgttctgacctgggattcgtcctgggggtcttcataaaagccaggcctgaggtgcacctgggcaggctacatgcaggagagggcctgaaggtgaatgtttgggaacagcaaataataccagcaggtagaatgaggaggcagagctagaggatgccgtggagatcatctcacccataaggtcatatcacccgtgtcacccagtcactggccacttcatactcatttcatgctcacaacagccctgcagtaggaattcactaacccttcgtcacagatgagaacactcagacccagccatcggaactgactgttcagacggtgcagatggggaagtggggatggcagaattcggctctgggtctgagttcagtgctatcacctcatgcttcctcgactcgggaggcaacgaggggaagtgattagagatgatccgagctggacagaggcggagaggagggaataaatgagagggatgtagggcgcagaatcaacaggatgcggagagcaggtagcagctgagaaggacaaggaagaaggctggggcttctggctggagtagtcaggtgaacggaggtgggaacagcagggtatgggttcaggggaagatggagactcagacgatgagtccactgggcctatgtgacgggttgtggggcggtgttgtcaggaggcaaagagagactcaaatctgaaggtcagaggaacggtccggagtgtgggagaccagagaccgtcagtgtaatcttggattttgattcctttttaccacttaacagcagagttgagaaggggctggagctgggttctgggagagaagtgacggggtacgggtggtgtcctgccggtgtcaaagacgacttccggctcacctctgactcggtttcccccacagatggcttttccctgccgcaggtccctgactgccaagactctggcctgcc

SEQ ID NO: 21952 - DNA, 1590 bp, Artificial sequence
  DNA replication origin
tcgtgcacaccgccaacgtagtccgcttcctgcaggcgcagccacccggccgccacctgttctccggccagctcatggagggctccgtgcccatccgcgacagctggagcaagtacttcgtgccgccgcagctcttccccgggtccgcttacccggtgtactgcagcggcggcggcttcctcctgtccggccccacggcccgggccctgcgcgcggccgcccgccacaccccgctcttccccatcgacgacgcctacatgggcatgtgtctggagcgcgccggcctggcgcccagcggccacgagggcatccgacccttcggcgtgcagctgcctggcgcacagcagtcctccttcgacccctgcatgtaccgcgagttgctgctagtgcaccgcttcgcgccctacgagatgctgctcatgtggaaggcgctgcacagccccgcgctcagctgtgaccggggacaccgggtctcctgaggccagttgggcggcttcagccccgggcctccaaccatgtccatgctgagaaggcagctttcccgctctgggtaccttacgtcctgcccagctctgtgcacctgaaccccagctgcgcactgaaatcagctggggtggggggtgtggaaaatgcctacatcctggctccatctcccgaagtttcgatttgattagtctggggtggacccagacatgttaagtattttttaagttcctccagtgatgcgaatgtgcagctaggcctgaggaccactcggctagactatctcttcatcctcgcaaagccagctccaccgccctctctgcaagaattccgggcccctcgctcccacactcgggtcctcttgagcagtggagcaagggagacctgggagcgtgggagccaggatcagcgccccctgccatgtgcctacaaatgtcagttgtgatttccactgtttacaagtgagtggagctggagctgggctgacagtatcaggtggatcccgcttccccctcccccaagaagtcagccaacacgcagctgaggcgcatgtggtggccttcttcccaccactaccccagtacaccgtgaggtagaaatcttcaccgtgcaaagtggaaaccagaggcccggtcagacagtgactaatccagggccgtggcattcccagacagcacaccactgtggtcccctccacactcaccccaaccaaagctaatggcctagttgggtcctgcccgccaataatcacccccacgggtcagagacaggctccttgccggggtctgggcctcaggctcagtgggccttggacaacccagcagggagttccggggagtccgaagtggagaaaggctggtgggaacatggaggccagtgttggggagcctgtggaggcaggtgtgtagaattgtgttcgggaggtgggggatctgagaccgaagtggacagtggttaagattgtggggccgggcgaggtggctcacgcctgtaatcccagcactttgggaggctgaggaggtcggatcatgaggtcaagagttcgagaccagcctggccaatatggtgaaaccccgtctctattgggagtacaaaaattagccggcc

SEQ ID NO: 21953 - DNA, 1413 bp, Artificial sequence
  DNA replication origin
tggcctgcggcgggggctggcgctcgcattccccgggttcggccagctgggcccggctccgccccgccccgcccgcggcctccgcccatttgcccgttgcgagccggaggcgtggtctcccgtggggcggggtgggcggcccggtggccgggtgcgcccatgcgcactggtgcggtgggcggccgctcagaggagcggtctcattccagcccctgtgttgaacgcggacttggggcccctagcggcacccaccgcctctaccggctcggtcgggccctcgttctctctccttcccagcctatctgtctgcggttggtgcgcatccccatgggcagcctcccaagggctggctgcaccgtgagggatcgggccggggctggggttcagcccccacagggcgggccggggccgcggctgacttggggccggcgtgtagtaccgaggacccgcaagggccagggtgcctgccagaaccaggacttggtgggcggcgcccctccctttccgggctccaccttcacatccatcccaagtgttcggatggagaagtgggagcccaggcccctgtgagcagcagagggcctctgtcagatgggaaaactgaccccggcccgtgttgaggacttaatcccgtgctgccatgggctcccgggctcgggctcatgtttgactctctgtccgtgactggctaccggaatgccctgggatggcacggagcctgcatttcctgatctgtaaaacggggactataatctctacccaccccaggccgcttggggaatccgatagagaaggtttaggagtgactagttcttgcctacagtaggagctcaggggtgccaccaccccccgccctgaggcagcaggacagacgcccatctgatctgatgagcccatcggcccactcgctggtggagcgtctcaggcccgttcattctccgcctccaatttgtttcgaagtctcagttaatgatttcgtcaacctcttgtgttaccgaaacaaacttgggtccgcccacccagtgcagcaaagccaaacactgacaccaggatttgcagcggcagaaagggaggcatttattgcagggtgccaagcaaggagaataggtcggctaatgcttaagacccgtactccccaatggtttacatgtaaggctttttaaaggtggggagacagaggttataggcaaagtcataaataaatactctggagctatacattggcttggcccaaaaaggtgagacattttgaggcagggtcataggtggattcagagattctgtgatttgcaattggcttaggaagcaagactgtctaaaaacctggggtccacagataggagagttaagcattggcttatgggtgtgactctttacagaacccttgggaagaaatttaaagaacagccctca

SEQ ID NO: 21954 - DNA, 1317 bp, Artificial sequence
  DNA replication origin
gccagcccttgggaggctgcccatggggatgcgcaccaaccgcagacagataggctgggaaggagagagaacgagggcccgaccgagccggtagaggcggtgggtgccgctaggggccccaagtccgcgttcaacacaggggctggaatgagaccgctcctctgagcggccgcccaccgcaccagtgcgcatgggcgcacccggccaccgggccgcccaccccgccccacgggagaccacgcctccggctcgcaacgggcaaatgggcggaggccgcgggcggggcggggcggagccgggcccagctggccgaacccggggaatgcgagcgccagcccccgccgcaggccagtcccagctggatctccggccagagcccgaggctgctgcgccgggcggctgcagcctccgctccagcgcccgcgccgtgccctgcatcccgggagcccggctggacccgcggcggctcggccggtaggaggcgggcggagggaggcgtgtgcttctgtgtgtgtgtgtgtgtgtgtttcgggggggtgtgtgcgggtgcagcgcgggccagtgattgctccgggaccacgaatcagtggagggggctgcacctcccgcgggcccggggggaaaggaagtgagcgctggctggggggcggggtcctggagcatccgcctgggccccctcggctcgtccccacccccacccccggcgaggagtctttttttcacctccctctgggtgtctccgagtcgttttcctagtgcggacgcgctggaagcgcctaacacccggggctagactgtcacttcctctcatcttccttacagttccccccttctcttccctgcttaacccccctttcatccctgcaatccaccaaccccttctgggtgctccaccacccaggcctggggaaggggcagggccgaggctcctactgccccagcctatccgcttcttggcactactccccaggttgaaagggggcttttctccttgactgcagggcgggcgcacgtgtgtgtgtgtgtgtgtgtgtgtgtgtgtgtgtgtgttgcgggagtgtgggggagtggtctgggagggaatggatctttgtttctcagacctcagagttcccacctctgttcctttgcgttgggggtctcggaagactggcctaggggaccagaggcgaaataggacaaaagatcattaacaggtgcgacgttctctctcccagtcatttcatgtggtgggattcacccccaagttccatacagatcagaagagtggggcacagagaagcgaagtcagctgccctctcaggattgctgagccag

SEQ ID NO: 21955 - DNA, 859 bp, Artificial sequence
  DNA replication origin
agccagggtggtcttgatctcctgacctcgtgatccgcccacctcagcctcccaaagtgctcagattacaggcgtgagccaccgcgcctggctgtgggaggcatttttaaatgcctccactggcccctcccaggccccacccagggttgctcaccccaacactccctcctagagacacccaggcattcgactgggactctggtcacttccatgcttttttttggccaggagctgcctgactcctcctgggcccaggcccggctctgtggctcagagcaggcatcaggtctgcccctgtggctgctccaggctccagagaggtgagctcacagcagatcttggcttaggccaggccaggaccaatggcaaatgttcagccaaactgtcgcaacctgatttcaagttcctaaaacctggtcacctgaagtccactgccctgccctcagggaatgtaccatcaagtcggggaagctaaaatgcccccatcagggatcccgtaggagcagggcaggaggccaagagatgtctgacagaacagagaaacaggtgggccatctaagagggggctggggagggaaagtaacaagtgcagagagcgcaaaaggcaagggtttgccttcctccggcccctttaatcctccacgaccctgggcactggaaaggtcaatttacactgaggacgaaaacagctagcaggagacccggccagaatcaaatccaggtcaggctggcttcgaatcctgtgaggggtaagggtggcttgctgtgggggcgtgtgtgttgggggcgtgtgtgtcgaggatgtgatgctcagtgtgtctgaggctcagaatccccaagtgtgaggtggggagggcag

SEQ ID NO: 21956 - DNA, 941 bp, Artificial sequence
  DNA replication origin
gtgaggggcgcctctgcccggccgcccctactgggaagtgaggagcccctctgcccggccagccgcccggtccgggagggaggtgggggggtcagccccccgcccggccagctgccccgtcccggagggaggtgggggggtcagccccccgcccggccagctgccccgtccgggagggaggtgggggggtcagccccccgcccggccagacgccccgtccgggagggaggtggggggggtcagcccccctgcccggccagccgccccgtccgggaggtgagggacgcctctgcccggccgcccctactgggaagtgaggagcccctctgcccagccagccgccccgtccgggagggaggtgggggggtcagccccccgcccggccagccgccccgtccgggaggtgaggggcgcctctgcccggccgcccctactgggaagtgaggagcccctctgcccggccaccaccccgtctgggaggtgtgcccagcagctcattgagaacgggccaggatgacaatggcggctttgtggaatagaaaggcgggaaaggtggggaaaagattgagaaatcggatggttgccgtgtctgtgtagaaagaagtagacatgggagacttttcattttgttctgcactaagaaagattcttctgccttgggatcctgttgatctgtgaccttacccccaaccctgtgctctctgaaacatgtgctgtgtccactcagggttaaatggattaagggcggtacaagatgtgctttgttaaacagatgcttgaaggcagcatgctcgttaagagtcatcaccaatccctaatctcaagtaatcagggacacaaacactgcggaaggccgcagggtcctctgcctaggaaaaccagagacctttgttcacttgtttatctgctgaccttccctccactattgtcccatgaccctg

SEQ ID NO: 21957 - DNA, 1198 bp, Artificial sequence
  DNA replication origin
cggccgggcagaggcgcccctcacctcccagacggggcggctggccaggcggagggctgacccccccacctccctcccggacagggcggctggccgggcggggggctgacccccccacctccctcccggacggggcggctggccgggcagaggggctcctcacttcccagtaggggcggccgggcagaggcgcccctcacctcccagacggggcggctggccgggcggagggctgacccccccacctccctcccggacggggcggctggccaggcggaggggtgaccccccccacctccctcccggatggcacggctggccgggcgggggggctgaccccccacctccctcccggatggggcggctggccgggcggggggctgaccccccccacctccctcccggacggggtggctgctgggcggagacgctcctcacttcccagatggggtggctgccgggcggagaggctcctcacttctcagacggggcggctgccgggcggaggggctcctcacttctcagacggggtggttgccaggcagagggtctcctcacttctcagacggggcggccgggcagagacgctcctcacctcccagacggggtctcggccgggcagaggcgctcctcacatcccagatggggcggcggggcagaggcgctccccacatctcagacgatgggcggccgggcagagacgctcctcacttcctagatgtgatggcggctgggaagaggcgctcctcacttcctagatgggatggcggccgggcggagacgctcctcactttccagactgggcagccaggcagaggggctcctcacatcccagacgatgggcggccaggcagagacactcctcacttcccagacggggtggcggccgggcagaggctgcaatctcggcactttgggaggccaaggcaggcggctgggaggtgtaggttgtagtgagccgagatcacgccactgcactccagcctgggcaccattgagcactgagtgaacgagactccgtctgcaatcccggcacctcgggaggccaaggctggcggatcactcgcggttaggggctggagaccggcccggccaacacagcgaaaccccgtctccaccaaaaccagtcaggcgtggtggcgcgtgcctgcaatcgcaggcacttggcaggctgaggcaggagaatcaggcagggagg

SEQ ID NO: 21958 - DNA, 1405 bp, Artificial sequence
  DNA replication origin
gtgggatcctgggctacctgaacagcagaggggcaccaagggagacagaatacccggtcctgttaaaaccacactgcaagccctggggtcagttctgggggtcattggcagaaattcccccaagggtatttgagagaaccatacagctagatgtcaaactgcctgatcctcacagaaccttttgctttgtagctggaggggcaggggagaggggaacaacttggctaaggaactaccatgggaggcttccctttcctccacatgggggagctgtttctaaccttcccagcaccacattctgctttttatttgttgagttgctcagtttttgcctgtgacacacagtcctgagagggtaggaagtgtgtcttgtcattactctaggccagcaaccagaacggggcctgccacacagaggcctcagaaatgcttgttgaatgaatgaacgaatgatcgaatgaatgaatgaatgaacggatgaatgagtgaatgacactgacaagggacaggtgatgtgatggaccacgggacacaagcccaaggccaagaggaaggtgggcaggtggggagacagtacacaggtactggccagggccaaaatgaagtgagcaagatggctggaaggtgaggtcagagagactgggcctttggctgaagacctccagggagagcagttccgggcccgggctgtggcatggcagcaggtgactgaggcggctgaaggtgaaggctgatagaaaggagatggagaactaagacaagggtaaaagggcaaagcgagagggcaggacgttagccacatggacacagtaaagcctgggacacagcagttcttggggtagaatgggctggaaaatggcaggaaccaagccctttgtgcccaggtgactggccagggcagctggctggtggagacagcaacacagtgggctgagggtgggagtccagtgaaggagccaagtgcttgtatggggacgctgtggtccgggcagcactgggaaggaggatcccctatttctggatcctgagggatgggatgaggtgggtgtgatcaacttctactgatgaggatttaggggcacaagacccctggggagggtctgagcagaggggcaccgaccttctggaggccgaaggtggggggcagttgtgacgggagcttgagtctcacagactgggcgggagggacgagcggtgggagccaagggaaggcctggggggaaaaggaatggaagagggaggggaggaggcagagggggtggactgaggcttgtgggcaagggagcaggcaggatgcaggaggctgcagctggggacagggcccactgatgtccacagacctctgctcagccatcggacaccttgggaggacccacccaaggctggatgtagcaatgaatacaga

SEQ ID NO: 21959 - DNA, 1322 bp, Artificial sequence
  DNA replication origin
cacccacggataactgagagaggagaccgtgtgtctatggtgatggggcagtaaccatgggcaaactcagggagggagggtgactgtgtgcaggctccgggaagctcgagcacttggtggacactcgcccatttcaccctcacaacagcctcgagagaggtgccattgctggccccaactcacagatgaggaacaagctcagaggttgcccaaggccatccagctggcagggcggggctggctaggtcgctcaccacactagctgcctctctgggcacagagctcagggaaaggcaggtttctttccctgtggtttccagggaaaatgggtcatttgccattcctgcactctggggatagagccaggcttctactgctgtcctgagggtgggaggctggattcctctgtctcgggcaactccaggagtggctggaaggcaagcttggggagggggtgtcagggaggcagagacccctgagagaccgggggtgggggttgggtgcggggctggggaagggttctgcgcatgctgtgaggggtgtgtgaaagggaaaccagggggcagcagctactctgaggcgggcatgaaaggggctgtgtgacccaggagagtggtggggttggattttgaagcagggctcattccaaaacaaaaccactggtgagacccccaaggcagggcttgacttggtctccaggaaagaagccagcccaacccgagcctgggttctcaggtgggtggggcccatctccccggtccatcccagggaccagtgtcatggggccaaaggtccacaggccaagagcctggcccacccacacctgcttccagcccctccacgccctctgtgacctgggcaggaggccgcctcctctgggcctcagttgtccctgtccaaaaatgagtgcgcttcagagtggtgatgagggaacagagctgtgaggaaggatcaagtgaggcactgaagtcacgtggccttggggctacatcttgcccatgtcagtctagcccagcacaggtttgacaattcctggagggtggggctggaaggaccttcacagaaccaagctgttcactctggaaggcctgagtctgggagggggttgggagctgcctgaggacacacagcacatcagtgacagaagccagactaaacccaggcacaggccggacctcaccccacctctcaaactctgcccttccatccaccccctgcccagtggccctgcaaggcagggagactcgagattgcacctggtttggtgccttcctaccccaagccctcggcggcgcccagatggcacctccctcagcacagct

SEQ ID NO: 21960 - DNA, 946 bp, Artificial sequence
  DNA replication origin
gtttactaaacatactctctgggtcaggccctgggctaggtgctgggtgcatagcagtgactgagacctatatggccctgcccccagagaactgacattcccagtgtaacatcagagctcaaagtcacagagttacttaattataacttggtaaaggtaagtatctcagatgagagctgccaagggccatgagactgagataggggtcctggcctaatctgaatagtcagggaggcttcctggagaaagaggatggacactaaaggacaaatggaagtctactgagtaatgaggagaaggaagaacctggagcagggagcaggggtgggggctgctgtgggggaggcagagaaatgaggctgggggagtgcattgagagtttgtgtcttattttctagggaagtgacaggactgggttggtctatgtggggcgagagtagatgtagctgcagacactgctacagttgtccctgggcgaggagatgggggattgggccagggtggtgccagtaggatggagaggaggagatggatttcaggagaatggaggcgctcagattgggctgactggatggagggagggaaagcaaagcagccagtggggctgccagccttggggtgggctggatgggtggatggtggcgctggtcactaggcaggagctggtggtagatgtggacggaagtctcggggaaggttgcagggaggcatgagaaagaggaaagctcacacactctgagaacaacagctggaaggaggccgagggagcctccaagcctcgcggagatgggaacctgagcctggagatggggaggattcatccgggtctcacgaaggcttgtggcagagttggaatccgaacccagtattcctttacattccgattcgctggaagcacacgcccccatttcctcaggaagccggacatcccctcactgtgttcccc

SEQ ID NO: 21961 - DNA, 1896 bp, Artificial sequence
  DNA replication origin
ttttccaaaactgccgtcaggtgcggtgccaggtgccacgtttatcccgggcctaccgccgcggtgccagtgaagccgcctgggattccgggcaaagtggggctgtggggggttcggccgagacggagggggccggggtggcgcgggcgccccctcgccgtcccgcccgcgggcgtcacctaagccgccgttgccatgggcccgcagcagatggcccggtttagggttccggggcgggcggcgcgcacgggattaggtgaattagggagccggagcagtgccgccgtcgccgtcgcagcgccatggaggaccccgccgaccctgccgaccccgcgcgcatcccgcagcccggcaagtgggcgctggtgcgcagcctgaaccaggcgttcaagacctacgccgtcctgccggtgaggcccgggccaggaggggagaagggagggggagggcgcctcgccccgggcctcagtttccccgcctgttagaagctgggcgggccacaaacagggtcgctaggcttcagggtgtgcatggactgcggccctaggatgccacctgcggtctctgacctcccccagtgtgaacttggccgcggctgccctttcctaggaggagaggttttgcatctgggaaacccaagccaggcaggccaggtctgggcgggggtgtcctgcatttgctgagatccagagcagggagcacctccaggtgcacagagggacccccagccatagtttatggactggctgaccgctgatggaagagaaagctaggcccactggtctcctctccaaactatgtttagcaactagacactagcaagatgcttggctcacgtttcccatctgtgaaaatggggtgataaaaccggtgtcccagagtgatcatgaagataacgagcggcaaaatgtcctgaaacagattccttttcactccacaaacagggactggccccaggcctggtcccagaggaaggaagaggcagaaagggctaaggccctgtggggaattattaatattggctcgagaccggcttgatgcctgggaggaaggagggtagacagaaagaacaatgtgcatttgcatgggtctctcatctttacatgcactgactccttccatttcatggctggtggaaactgaggcccagaaagattgagtgcctcacccagagagacacagcgttagtggtggagctgggactataagccagatctcctatgtgttcactgtggatatgtgctggctttcctggggggaggccccacaggggttttggagtacccctgagaacattcgaacagacccattctaggaaggcacgactcgggctgggagcctgcatagctggcagggcctgggaaaccctctgccctggtcatatatttgataggagaaaagctgggacttgccccacgttacacagccacactgaggcatgtgtcgtgtcacaaacgagatcttccattcaaggtgagtaccaagcaaggcgccccatacagtgtgtaaagttgtcacggaacatggtgtaggaatggggccagatgcagtggtggggtgcctggggctagccatggggatgggagggggtggtggggtcctacctggagcctggttccccattctcacctccctcctgcctctcaatgaagcttcatcttctttcatggcttccttcctcccttccttctccctctgagccagtgactcctgatccaccctgattttggtcctggctctgtcctccagatgctaatagtcctgtcagtcactgatttgatgagtgactgtggccaggttcctttctctctttggccctcagtttcctcggctgtaaaatgaggatccttacaacctgcctgccttgcgatgcttcaagaactttccctagggcca

SEQ ID NO: 21962 - DNA, 2552 bp, Artificial sequence
  DNA replication origin
aattgaccatgttcccttcccccagttgctggcatttcttcaggccaggcctcagctactgccctggttacactttggcccccggtaggtacctgtggaccttgacctgcagggtgctggcctctgttgggactcctcccacgcaggaaacagtgggagcggtgcagctactgggcaagtcattttacctcttgagtccggctcgtcactgttaaatggggtcagtgattctctgttagggatgttagagaagcaaatgtaaatcacaaggcagtagagtgacaatgcccagctctggatgagcatttaccaagcagcagcactctacagacctggcaggagaaagctgtcaacaaagatggatgtcgtgatcacatccatcagtcctcccaaaacccctgggaagaagggattcttactctcattcccatttcacagctgaggacatggaggctcaggagggcaaattgatgtgctcaggggtccggggtcaggccgtggctgagcactgtcaacctgtgtgctgaactgtcatggggagggatgtggggacctgaggctggggtcaagtggcgacagcagacagcctgcccaggagccctctcccctcctgtccacactggggcctgggacagaggcagggagcggggaccgcatggggggattttccaacaggatcagcttgtataagaaatagggtgcctgggagagaggaatgttccacacgggactggaaagtccaggcaggttccctaacagtacccaccccctcgccctggggaggctgcgtgagagcctgccctgcgttgaagtgctgctggcccagaagtgccgtggagtatcagggaaactggggtggggggctctgtccagcgcagcccctaatccccctgagggcctgggcaggctgccaccctcctccgagcctgttttctcatgtgaagtgagggggctggaatgggggacttctggggtctgtccatgactgacttctgcctctcattcagacctggtcccccgcagtcaccagccagccatctgtcccatcagaggctccctgccacatcatttgtgcccggcccctgtgtgaggcaccgtggcctgagatgtggccctggaggcagggggatggcacagatggagcatgtgagggtggccagcactgtcaggggaggcttcagaaactgggaaacctccgagccaagcctcgaaggctaaggagaaagaaggtagagggaacagtggagcgaagtcacagaggcctttggggacatgaaacccgtgttccctggctaggatgtaccgggggtagctgggatggaggttaggggtccttgtgtctagcgcatgctggcccttgatgccaggctgaggagcccaggggagtcagggaagggctgagagccccagagtgacagggtcaggagggtgcctcaggaaaggcccaggggacgagggatttgatggaagagctggaggtaagatggggacagcaagaggccggggccgggccagtgagagacggtggtctcaatcagggtatgggcttgagggtggcaaggagggtactgcccactcagcagccttttagagggttgaatgggcaggactgggtgacctgttggactggggtggtggtggggggagctgatgtccagattcctgctagtgtccagctgttggggttgactatgccagaagggacctggaggaggagcaggtgggggaggacatggcatgtgcatcacatctgctcagcgagtctcagggcctgagctgggaggtggcagagaggtcccctttccccccagaaggcaggtcctggggctactgggtcatggcatttggggatgggagggctgacgtactctcaggcaatggccacacttccctgagagtctgggattttgcaaaggtgctggagaccctctgggggcggggagggccccagggccctgaggaaaccagggctttgccagcttgttgaaagagctggtgcacttcccaaatgctcacccatctgccaccacaaggcagctggggaatattgcggagtaaggagagctgggcaggcagcctgtgtcctccacttcagctcacacgtcccaagagttcacacctcttgctcccacaggtcatcagcaagccccaggaaatatctcctgggtgggtccccttctccccatcaccactgctactgccctgccttccagctttcccctgaacctgccaagcctttgccagcctgaggagttgttttgctgttccctgggcctggagccctctgcccccctccccctaatctttttacagtggtctctttctcttccttcatgcctcagctcatatgccacctcctcggaggggcagtccctgaccaccacatctcaagcagctccccccatgactctccaccacatacacctgttgaggtattcttggcactatctgaaatcactttttaatgtttttctttctttctttctttcttttttaccggagcctgaatttgagaccaagcttgtctacttctaattattaccctttccact

SEQ ID NO: 21963 - DNA, 1205 bp, Artificial sequence
  DNA replication origin
cacacgcatttacacacgtgcgcacacatgcacacgagcacgtgcatacacacgcacgaacctgcagctccagccagctgggcggctgtgtccgtgtcccattgacaaaggtccttctcaggcgctcctcacagtacggggcgtagccgggcgggcccccgtggatgaagttccgcaggtactgcagccagagtacccgctgaggcggcccctggggctccccatgtggattttgagggcagccgccaggccctcccggcacttggaggccgctcctccaggccaggttgctttctgtggcttccctaccctctcagctccaccatctatttccagccacgtctgtggcctcccccacctcccgctagcttagcctagtggctcctccccataccccttcacagcaccagccagtcgggtcggtcctgccatgacctgctccactctgaccccagcgcccagggcctgccccaagacgagggtgcagagggcctgggacacgctcctgtcagactcagccccctcctaagtagaatggggctgaggggagtgtggggaaaagaggtggctgcctgagaggagggggtgccaggaagatggggctcagtaaggagtggccgggtgggccttgtgaccaggccctttggagcccctggctattgctctccccacagtgctgggacagggcctagctccccttcccactccaggaggccaggcaccttcctaccttgacaaacttctcggagggggcgaaacagcccacgcagagagacacgagaatccagccccgggcatagctgctcttggaggggttgtgggtcagctgcttgctgatctggcagtagatctcgtccctgggcaggcagcagggcaagggagggggaatcaccccacaggaacagccccggtccccacctcctcctagcagccagtgggacgccacacagctgtcctctccaacttgccaagaccacccgggaggaggcagagtgaggctgggtggcagggctgagccaagggctggggtctggctttggagacaggatcatcgggcataaagcacctccccaactccaatccagttcccacagccagggccccaccatccagggtggtgcgtatcctgctctgggctcagcagccgcagccacagccacaggtgaccatgctaatgagaagcacagtccccgcctctgcctcgt

SEQ ID NO: 21964 - DNA, 1358 bp, Artificial sequence
  DNA replication origin
cgaggagtcaagtttggggagtacaggtgtgagaaggtgagtgggagggaatcttccgccaggctggcttggctcacagcctcctgctttccacgtttgggctgagtgctcctctgtgagccatcattagctcaggctggggtgagcctgactgcaaccaggcactcttcaggctcctggatggacaccgcctacttcagggggctcgtgaggagaggcgagatggcgggagcaagggcttctgaggatgtcctgaattccaccagtggaggaggcccccacactgctgtagtgactgtgcgtgctacagaggacgtgccgcaggacctgctgcaccattctgagtatatctagtaagcgctgcattaaatgagaaatacagccattccttgagatcagaatttgcaaatgtgtattcttttttctccttctgaggacaggagttatgtggttgttttgttttcgataatggtaatggtagctatggttctgttggtgattgtgatggagggatgagaaaggaggtggtggaaatgaagaggatagttggtggtagtaacgttggtggaggtagtgatgatggttggtggtgatggtggaggtagtgatggtgttggtaatgatgatggtggtgatggtggaggaggtagtgatggtgttggtgatggtggagggtagtgatggtgttgtttgtgatggtggaggtagtgatggtgttggtgatggtggaggtagttgtgatggtggaggtagtgatgctgttggtgatggtggaggtagcgatggtgttgttggtgatggtggaggtggtgatggtgttggtgatggtggaggtagttgtttgtgatggtggaggtagtgatgctgttggtgatggtggaggtagcgatgctgttggtgatcgtggaggtagcgatggtgttggtgatggtggaggtagtgatgttagtgatgaggtattgttggtactgatgactatggtaatattggaggtagggatgatgttagtgatggtggtggtggtggtgatggtggaggtagtgatggtgttggtggtgatgacagtgttgtgggtagtgatgatagtggtgatggtaaaggtagtgatggtggtgttgacaatgacagtgttgttggtaatgatggtgatggtggaggcagtgatggtgttggtgatgacagtgttgttggtagtgataatgatggtgatggtggaggcatagtgttggtagtgatgatggtggtgatggtggaggcagtaatgatgttggtgatagtgttggcagtgatggtggtgatggtggaggtagtggtggtagttttgttggtgatagtggtgatgataatggtggtattgg

SEQ ID NO: 21965 - DNA, 1282 bp, Artificial sequence
  DNA replication origin
cacggcaccacactgttcatgagggacccactcccatgacccaaacacctcacactaggccactgccaacactgggagatcaagtttcaacagagagatttggaggggacaaatatctaaaccatatcacagaccatgccccgtggccttggccttggcactcaaggctgctaggatcttgttcccatctttcccctgaagctagaccaaatagcagaagcctgtgcctttaatctgtagcctgtggggaacctcttctccctcccttcttctggctcttcaatactcatctcctgtcagctctccaagttagatcagggtcctcctcagtgttcccaaaagacccaccatcttcaagtgataacagcagtaacaactactctgcctgaggctaccgaggccctggccaagtgtgggaaagacaaagatgaaatggaccccaccctgtcctcagtggggaggggggtgggaagaagacagtgacaggcctgtgacagtgcagtgagcagggaagcccagagccacaggagcccagaggagaggccccatgccgactggggtccagggaggaagcccgtgtgaccagagcacagggggcagagagctaagcgtgatgccagcacagaggcgggagaaagctggcctgtccagggaactgcgaacagcttggtttggctgggaacaggcacagtgagggaggagaggcgaggtggaaggagtctgggaggcccgctcacaacaggcccaggagtgtggggcttcctcccaagggcaatgaggagccgtggaaggcttttgagcaggagagtagcccactctggtgatggtctctgtatggagagttgtgacaaggtggaggcagagtggcaagtgggcagacatgagtgataacacctcagttcttctgtgggaagatgttccaactcagcctgtctctgcccccatggtcccactcacctctgctctacagcaggcgaggagtcaggcttcctcagctttgccaagggagacctcatcatcctggaccatgacacgggcgagcaggtcatgaactcgggctgggccaacggcatcaatgagaggaccaagcagcgtggggacttccccaccgacagtgtgtacgtcatgcccactgtcaccatgccaccgcgggagattgtggtatgtggcctgggggtggcagatgggtgggaggtgccattagacccctctttgtccacttcccacagctgtacaataggttaacggtctagtgcatctgtgaagatgatcttgggatctt

SEQ ID NO: 21966 - DNA, 1572 bp, Artificial sequence
  DNA replication origin
gggtgggggtctcacaacctgggggtttctccccggggctgccagcgatggggcgttgctgacggtccctgtgctgcggcaggcccccacccaagcacacgctgagccgtgtcatggtgtccaaggcccgaggcaaggaccggctgtggagccacacgcgggaaccgctcaagcaggcgctgctcaagaagctcctgggcagtgaggagctctcgcaggaggcctgcctggccttcattgatatccgtgccactgggctgtgcccaggggagccagggaccgggcagggccttcgtctgcacactgccttcctcctgagggcctgctgcgacccgggcacacatggggagggttgatggagtaccccctcccttgcaccttttgatatgcaaggggctgcctcgcccactgttttctctgaccctgtcatttgggtgccaggtggatttggtgccttgtgctgggccaggcatgcaggtagagcagggaccagcccagcccctggcctcatgggaccatacacacatccagatcaatgttgagatgggacccggcagcactgtgacctgacccatgtgacctggagggggcagagaggacttcctggaggaagtggtatctaggctgagccctgaaggctaagtacgacttagccaggcaaaggggagggagggggagtgttccagagagagggagcagcagcaaggccccgaggcacacagagcagggctgttccagggctccggggcttcagcacagacaggatgggaagactgggcttaggcagggttcccaagccctgtgaggaagcttgggccgtgtcctaaggccagggtgaaccactgggcagggggtggcatggtcagattcaccatctgggaagtccatcccagctgctgtgagggcttgggatgtggggctggtgactgtgaggaggcggagagagggtggggcagatcatgcccattttgtgagtgtgcagcctgagggcccagggtcacagcttcaggtgatgcaggccctgtgggaagtggggcctccggaccccaggccagtgctccctctattcggcacaagcccttccttgacagtccccagctgtgctcaagtacatgggcgactacccgtccaagaggacacgctccgtcaacgagctcaccgaccagatctttgagggtcccctgaaagccgagcccctgaaggacgaggcatatgtgcagatcctgaagcagctgaccgacaaccacatcaggtgagccaggcacagtgggcggatgaggggcagacctcacctgctgtgacgggcagctcttaccctcctgaggcagctgctggctctgcctggatgcagtccttcctcacacagagccgggagctgctcatgggccccctcacatcctagcttggccccaacgcccaaggagggcctagcaggaactgggaggtggtggatgtcttcctttgagtctgtcctctaagggtaacagccccagctcctcctaacgtttggctggagcctcgtctggatgccccttccctgcctagaccctgctgtctgcctgcaggtccagc

SEQ ID NO: 21967 - DNA, 1075 bp, Artificial sequence
  DNA replication origin
atgtggtcctcatccccaaggggctcatcccacaagccccgcgtggccaggagcccgccccagtgtctgtccctgcccctggtggccgctgtacctcagggctttctggagccgttgcaggcagtcgatggcgagtgggcagtgctttcgggactgcaggaagcgctgcacgtggggcaggaggatgttgctgggtgggaaaaggcccgtgcacagccagagcagctcccaaccccgctcctcgctgtacctgcaggaggaggcgtgggctccagcaggggcagctgccatcgggagtcacaggacctgtgcacccccgggtgagggggccatgtacccctcagctgctcatcacagcagcaccgtccctcctgacctttaccctatctcaggacccctcaccctacctacagacccctctccctgacagccagatgcaactagtgctacccaaagtgtgcctggcccaccgcgccaggccacacactgctaccagtccacgtggagataaggggcttatgccacaatgaaaagccaccgggttaccatgcactctgcttcagctgaggctttttgtttgtttccatagcaagactttctccatgaaggaagcagtgtgatttatattttcgcagaagctctttaattcacctctactttgagtggcaacgagttagaccagtcccaccccaggctccttcagccaccactctgagcttcttgggcctgacagtgggaagtttggagggcttctaggaggaggtggcatttgaactaggctttgaaggatgaagcaaattacggcatgcagagaaggggctgaaaagttttcctggctgtgggcacagtatgtacaaaggtttggcactgtcaaaagagctgatgtgtagtttgaggatggatttgtggaagagatgtagagggtgacacagctggggaggaaggcggggggctgggtgtaaggagagagggtggagcttctctcagactctgagaggagcctgtgcctgactttctactcctgtcttgggctgtcccagcgggaggagaaggtggcaccctttgggcattggga

SEQ ID NO: 21968 - DNA, 999 bp, Artificial sequence
  DNA replication origin
tcatcttcaagtggcccacctttggctcagccttcttcgaggtgaaggtacaccatgggcttctcagagcagaggaggaggggaacagggcattgataaagcacagagactcctccctaggactgtgggaaagagccatggccttggacacctgccctggtgagggaaggagggcagcaccctcagccttgtcccagcttagcgtcttagctggggtaagtcctggggacagagggaccagaagaagctcagcctggcagtggaggcagacatgtaaacaggctggggtaatggaggatggcctgtgttctgacactggggagccctcgcccaggtggcagagctcgggaggctctgccgggtgtgagaaggcctcttagaggaggtgatatctgagctttccaggcagaccctggaaagagtgctcctggcaggggtcccacatagacaaaggcctggaggtgtgagaactcaggtctgggaaggaaatccaagtagtgagggcaggaggcgagagtgggctgtggagagcagcagcttggcaagcaggtgagaggctgggtttcctgcaggggtggcctgccttggagggttttgaacacaggtgacgtggccagaaagcctctcaggctgcgggtggaggaggggtctgaggggcacaacagaggcaggagtatggtgaggaggctggtgtgagaggatacgtatggtcttatcacacagctaggatgggaggccttttgaggagcttggctgtgcgaggagaacaggtaggtagctggaggcaggtgcagggtccaggaggctttttaaagatgggaggcccttgggctgagagggaggacaaagcagaggatggcctgggggacccaggaagggatgtggggcagcactgagggcccagcggaggtggaagccataggtcatggcagggccgtcagtaccacataggcaacaggagaggctgactttatcccagctggggccaggcttcattcc

SEQ ID NO: 21969 - DNA, 954 bp, Artificial sequence
  DNA replication origin
cctcgagggggctcacgaaagcgcggggctccgtggaaaagggaatgagagtccaagggggaaggcgtctgtgggggaggactgcagagcctgtgagggaagcgcgatgggcgagcgagggggcgggagcgtgtgggggaagccgtgagggggcgtctactgtgcagccaccaccttcggctccggctgcagccgcgggagggcagcctcccccgcccacagccgcgctattgtacgccgcccggcaggcctgaccgcctagttcactggctcccctactcctcctcctcccgcctcctcctcccctctgccctttccccttctccccctccccctcccccactccccctccccggcgcggcggcggcggctgcggctccggtggagccgtgcccgccccgcctcccgcaggtgagagggggcggggagggcctgaccgacccgtgggagcgaggccaaaccctggcccgcatgagggcgaacgcctgggattacgtcatcggcgcgtgacgccagaggctggggaatcacccgcttgctgcgtgacgtcatcgcgtcgcgtcactgttctcggtccgctgtccgtggcgggttgtttccgtgcagcctttctatcagacaattttgggacgatttctgggagggctactgtagtagtcaggatggagaaagacggctaacttccggcgctgagggtccttttcaggttaacaaagcaccaccgcatctatgagctcgttgtcaagggctgaatttgaaaactatccgatgtcgtgtgatctcacagccagacatgtattatgttttctttctgtgggagagggggcaggggtgggaggaagacaaagaaattataacggagatgtttgaactaatgtgaactgacatacgaaaagaatgggcttcctttcacgttttttcccctaccgtggagggtactttcgacccaaagct

SEQ ID NO: 21970 - DNA, 1293 bp, Artificial sequence
  DNA replication origin
tctacacagacacggcaaccatccgatttctcaatcttttccccacctttccccactttctattccacaaaaccgccattgtcatcctggcccgttctcaatgagctgttgggcacacctcccagacggggtggcggccgggcagaggggctcctcacttcccagtaggggcggccgggcagagacgcccctcacctcccagacggggcggctggccgggcgtggggctgaccccccacctccctcccggacggggcggctggccgggcggggggctgacccccccacctccctcccagacggggcggctggccgggcagaggggctcctcacttcccagtaggggcggccaggcagaggcacccctcacctcccggacggggcggctggccgggtggggggctgacccccccacctccctcccggacggggcggctggccgggtgggggggctgacccccacctccctctgagacggggcggctggccgggcggagacgctcctcacttcccagacagtgtggttgctgggcggaggggctcctcatttctcagatggggcggttgccaggcggagggtctcctcacttctcagacggggcggccaggcagagatgctcctcacttcctagatggggtcgcggccgggcagaggcgctccccacatctcagacgatgggcggccgggcagagacgctcctcacttcctagatgggatggcggccgggaagaggcgttcctcacttcctagatgggatggcggccgggcagagacgctcctcactttccagagtgggcagctgggcagaggggctcctcacatcccagacgataggcggccaggcagagacgcttctcacttcccagacggggtggtggccgggcagaggctgcaatctcggcactttgggaggccaaggcaggctgctgggaggtggaggttgtagcgagccgagatcacgccactgcactccagcctgggcaccattgagcactgagtgaacgagacttcgtctgcaatcccggcacctcgggaggccgaggctggcggatcactcgcggttaggagctggagaccagcccggccaacacagtgaaaccccgtctccaccaaaaaaatacgaaaaccagtcaggcgtggcggcgcgcgcctgcaatcgcaggcactccgcaggccgaggcaggagaatcaggcagggaggttgcagtgagccgagatggcagcagtacagtccagcttcggcttggcatcagagggagaccgtggaaagagagggagagggagaccgtggg

SEQ ID NO: 21971 - DNA, 951 bp, Artificial sequence
  DNA replication origin
aagtgaggagcatctctgcctggccgccccgtctgagaagtgaggagaccctccgcctggcaaccgccccatctgagaaatgaggagcccctccgcccagcaaccacactgtctgggaagtgaggagcgtctccgcccggccagccgccccgtctcagagggaggtgggggtcagcccccccacccggccagccgccccgtccgggagggaggtgggggggtcagccccccacccggccagccgccccgtccgggaggtgaggggtgcctctgcctggccgcccctactgggaagtgaggagcccctctgcccggccagccgccccgtctgggagggaggtgggggggtcagccccccgcccggccagccgccccgtccgggagggaggtggggggtcagccccacgcccggccagccgccccgtctgggaggtgaggggcgtctctgcccggccgcccctactgggaagtgaggagcccctctgcccggccgccaccccgtctgggaggtgtgcccaacagctcattgagaacgggccaggatgacaatggcggttttgtggaatagaaagtggggaaaggtggggaaaagattgagaaatcggatggttgccgtgtctgtgtagaaagaagtagacatgggaaacttttcattttgttctgtactaagaaaaattcttcggccttgggatcctgttgatctgtgaccttacccccaaccctgtgccctctgaaacatgtgctgtgtccactcagggttaaatggattaagggtggtgcaagatgtgctttgttaaacagatgcttgaaggcagcgtgcttgttgagagtcatcaccactccctaatctcaagtacccagggacacaaacactgcggaaggccgaagggtcctctgcctaggaaaaccagagacctttgttcacttgtttatctgctgaccttccctcca

SEQ ID NO: 21972 - DNA, 1282 bp, Artificial sequence
  DNA replication origin
aggtgcaggtgtcctgcagctcggaccggagccccagcagcggcgacatggctccgtcgccgcctgagcgggttgcgggctccggctctgggtaggaggcggtctccaggcccgagtccgaagtccgcagcccctcccctcctcacgcccctcggggcgggacgagcgggaggctcccgagcggcacacttaagaagtcctccccgcctccccggcttggcgctggggtgttggaaccagagccgaggaggcggggaggcggggaggcggggaggcgcggggaggcgcggggaggcgaagggaggtagcctagggcgccggccgcagggccaacggtcagccgagcccaccgcgcactcaccctccgcagtctccctcagggccttgtaggcgggcgcggcggcggagggccggcgcggcgcggtcgacgcagcgctcttggtgcccactgcgcacgcgtgctgcggcccttgcgcccctgcgggcggtgacacccggaccacggggcggagaggagcggcacggcgcggcggagctctgatggttgctttgcagcgaggaccttagagtttttctttccccgctccacactgtaaaaccgtggagctggaaagaccgctgaaggccatctcacatagccacctcgtttttatcaatgggcgactgaaattgagaggggagacgcggcgcagggggcgggtgagttagtgggcgtagaccggtgcgcagggcctcctggagccttgcttttcttcacctgccaaaaaacatttctaaaaatggtggtaatatatgccagataaaattcgccactttaatcaatttaagtgtatatttcagtggcatcgattaccctcacagtgttgttcaacagtcacctcttttttccagaacttgagcggtgattcttcaaagtgtagcctagttttagcatgtgactgtctataacctttggcatgaactctttacgtataatatgaaacagttgtgtcttactgttacatgcactcttcgtgaagaggaaacaacaggtaactggagaggtctgtttccaagaactgggggtcctggcgcacctcttccatctgctttgaaagcaggaatacggctgcgtgaggtggagcgcgtccggagtcccagcacggagaggcttaggtgggaagaccgcttgaccccaggagttccaggctgcagtgagctgagatcgcgccactgcacccctgcctgggccacagagcgagacgctgtttttagaaacaaaaacaacaacaaaaaccgggcg

SEQ ID NO: 21973 - DNA, 1366 bp, Artificial sequence
  DNA replication origin
gccctccgccgccgcgcccgcctacaaggccctgagggagactgcggagggtgagtgcgcggtgggctcggctgaccgttggccctgcggccggcgccctaggctacctcccttcgcctccccgcgcctccccgcgcctccccgcctccccgcctccccgcctcctcggctctggttccaacaccccagcgccaagccggggaggcggggaggacttcttaagtgtgccgctcgggagcctcccgctcgtcccgccccgaggggcgtgaggaggggaggggctgcggacttcggactcgggcctggagaccgcctcctacccagagccggagcccgcaacccgctcaggcggcgacggagccatgtcgccgctgctggggctccggtccgagctgcaggacacctgcacctcgctgggactgatgctgtcggtggtgctgctcatggggctggcccgcgtagtcgcccggcagcagctgcacaggccggtggcccacgccttcgtcctggagtttctagccaccttccagctctgctgctgcacccacgagctgcaactgctgagcgaacagcaccccgcgcaccccacctggacgctgacgctcgtctacttcttctcgcttgtgcatggcctgactctggtgggcacgtccagcaacccgtgcggcgtgatgatgcagatgatgctggggggcatgtcccccgagacgggtgcggtgaggctattggctcagctggttagtgccctgtgcagcaggtactgcacaagcgccttgtggagcttgggtctgacccagtatcacgtcagcgagaggagcttcgcttgcaagaatcccatccgagtcgacttgctcaaagcggtcatcacagaggccgtctgctcctttctcttccacagcgctctgctgcacttccaggaagtccgaaccaagcttcgtatccacctgctggctgcactcatcacctttttggtctatgcaggtttgtcattctcaccaaatacttggcacttccagagcctctatgacatgaggctgtaagttctttactaaaatacatttgaaaccgtctatcccgctatgatgtaaatgctggtatccccgttattctaaccattttgcagcccgttcttaaccagtagggccgacacgtagagccttcatgcagtgctgctttgaacacccagagaaaggagccacctctgtgctgaaactgagatactgtgagatattgccaagggttcagatatcctacaaagggattgttttaatggtagaaaggaaagataacttattaactgcctctttcttcatgccaaggtggtatagatcgtttcggatactcttactgaaaaatgatcctggct

SEQ ID NO: 21974 - DNA, 769 bp, Artificial sequence
  DNA replication origin
ggctgccgaccggcacaatgacccctccccgcctccagcccacacctagcccgcaacgcctccacctcagctccccgcccggccgagtggccctagggggcctccgccccgcctccccactgcccaagaccccgggggctgggcggagaagaccagcccggcggagttgcgtcccagggggaagacagagccgcggaggcccgagccgcgaagaaccggggcgcctgtgaagagcggagagtagcagagcgccagggccgcttcccgccgggcgttcgggcccctcgcttaccttctccgttgccgacgtccggcggcggcgcctgcagcacccgctccagctcagggaacggcaactcaggcaggtctagcagcggcccgtagcgctccaagaaggagcagactacggcgaagttggggcacgaacccgggcagcccggaggagccatcaccgccgccgctgccgccgccgtcgccattttgaactggaggatggaggaggaggcgatgggggggcgggggaagttgtggtgccgagggatggcaaggcaaccttacagacgacaggaggcgctctcaagtgggctcctctgcggatcccagcgtctcagggacggctccgcgatcccacaatacatcggcggcccggagcagtcgagaaccgagtcagacgggagacagagcggccctcggcgcctttcactttccgccctctttccgcccccttctctcctccccttcgggcttgccactgcctcgtgtgacaggg

SEQ ID NO: 21975 - DNA, 1366 bp, Artificial sequence
  DNA replication origin
aagaaggagcagactacggcgaagttggggcacgaacccgggcagcccggaggagccatcaccgccgccgctgccgccgccgtcgccattttgaactggaggatggaggaggaggcgatgggggggcgggggaagttgtggtgccgagggatggcaaggcaaccttacagacgacaggaggcgctctcaagtgggctcctctgcggatcccagcgtctcagggacggctccgcgatcccacaatacatcggcggcccggagcagtcgagaaccgagtcagacgggagacagagcggccctcggcgcctttcactttccgccctctttccgcccccttctctcctccccttcgggcttgccactgcctcgtgtgacagggggaatgaaaacaagggaagcggggcggggaggcgggctggaagcgggaggggcgggacttctcgagaacaatggccaatggacgcagagggggcggggcctcgggcgctgttcaactgcagggcgtattcccggagggcagttggggagcgcagatcccgaagcagcgctgggagcgtaagtgcgggcagagcactgcgccgtttgggaacgcaactttgaggagacagtgcggtgggtgagtttgcgggggaatcctgaaactgggccacgagatggtggagaggttgaggagaattaataaacagaaaaagggaatagggcgggggaaagcacagttgtgggagaaggttgggaaggggaaaggtagaggtgtgcccttaattaggggctgggctgggacctcggtaagatgtctctgtggaagtttgccgacggggtattgctctctgctggggtacaggaatcgcagctttgctggaaaagcaggatctgagggaacggaactctgggggaatcgtcggagtgaggagttggggccctgctgggagaagaggatctgaggagaccaggctctgctagggggccatggtgtgaggggaaggggctctgttcagggaccagaatcggagtgtgggctgggactccattgagaggcggaacatgacaggagacggtggagcagcgaaaagtttgttagaagacagggttccacttcggggcggggcgggggcagtgaacattcccacaaagaacgccagagagaaactaccaataatgtaaaatagaatgtgcagcctgagaagcagcagtacacgttatgcttagaagcctgagctttggattcagccaggcctgagtcctagcggggctacttcatgacactgtggaggtttctttatttctttgaactccttagagtggggtgataatagtacctacatcatacggtattactagataaatcacagtaaagtgattagcacag

SEQ ID NO: 21976 - DNA, 879 bp, Artificial sequence
  DNA replication origin
tggtgatgactcttaaagagcatgctgccttcaagcatctgtttaacaaagcccatcttgcaccgcccttaatccatttaaccctgagtggacacagcacatgtttcagagagcacggggttgggggtaaggtcatagattaacagcatcccaaggcagaagatttttcttagtacagaacaaaatggagtctcctaagtccacttccctctacacagacacagcaacaatccgacccctccatcccctccccacatttcccccttctccactccacaaaaccgccattgtcatcatggcccgctctcaatgagctgctgggcacacctcccagacggggtggctgccgggcagaggggctcctcacttcccagacagggcggccgggcagaggcgccccccacctcccggacggggcggctgccgggcggagacgctcctcacttcccagacgggcggctgctgggcggaggggctcttcacttctcatagggggcggcagggcagaggggctcctcacatcccagatgatgggcggccaggcagagacgctcttcacttcccagacggggtggcggccgggcagaggctgcaatctcggcactttgggaggccagggcaggcggctgggaggtggaggttgtagcgagccgagatcacgccactgcactccagcctgggcaacattgagcactgaattagcgagactccgtctgcaatcccagcacctcaggaggccgaggctggcagatcactggcggttaggagctggagaccagcccggccaacacagcgaaaccccgtctccaccaaaaaaaatacgaaaaccagtcagacgtggcggcgcgcgcctgcaatcccaggcactcggcaggctga

SEQ ID NO: 21977 - DNA, 1154 bp, Artificial sequence
  DNA replication origin
aacagatttgtatgctgcctttttaagcccttcaactaggcaggaaatcatgtaatctcacctagctatacctgaggaacctgcctgatagtgccactggggatcttctcagggaaccgtctgtaataccttcctggaggcctggctcataatgccagtgggtgtctgtgtgggactaggctagaggaaacactctttcccattcatctggggagagggtagaaattaggatgacatttaagccactccaggttaaattgtaagactgggttaaatactggaattcatgtatatatttggtggggtctgacgagaaggagcctaagtgttgattaatttgggaaaggtctgatagagaaaatggtacatgcactctgacgatgccctcagttccagccacttcttgaagaggaaattattgggcaggtgggggagtatttgccgcagaacgaaattgtaagctggaccaggtgtggggaggggagatgatagaagggttgtagggtggggaagtggaggctgaggaagagttggaagctgattcagcctggtggggagcgacctgaggaggagcagtctagggaggagggtagaagtcagatgggtcggtagaaaagaaatattcaaaagactcaccggcacttcaggttgggactgaagggacaggcgggagggaaagaaggaagatttgcggcaagtcgcactgggaacagagattagggaaggaacgaagtgtaaaaaatgcctggatgtagggcacctcagaccatttgcccattttatgacaaaaattatctagatcttgtaggctggagaaatcgaaagtgctcttttctggccatttagagccattatcaagtttgtattggggccaagtggtgttgcagaagaaaataagacacttaggttttaggtcaggtgagagttgaagaggttttaagtttttaagaacacaggctaagagaggaagaagaaggaatggagggctgaaggttgcccatagtaaaaaggtaagtttagagaaaggaggaggttgagacatggagagagggggggtggtacttgccacccaggggaagtggtacttgccaccaaggtggaagatcaaaacaggtgtccccgcagtgatcgaacacctctgaaatgtgggtgaa

SEQ ID NO: 21978 - DNA, 1853 bp, Artificial sequence
  DNA replication origin
tggcacaagcctctatgtatccaggaagcccgactctgcggcgcggccccggggctgcgggatgaagcatggggaggggcgaggtgcgtgaaatggggcggagccggagcgggggccaccccgcgagctgccactctgaccgcgtcccctttaaggccagccggccggacaccggcggggacgaggcggggcgcagagcaactcgctgcaatgcctcctgggagatggagttcgctctcgacgcgccgagctgcgaggagcccagagagaactaccagtcccggaaggcagcgcacagaccccggaccgccacgcccctgggctgggctcctaccctccgcccccctcgcaaagctgcgctggccgctcgcggagggagaggctgcagagcgagggcaggaggtgggtgcggcacggccggggtcgcggggctcggggactaccggcgagggtacgtgggcccactgagcacctgtcttaccatgagactaatctatcccagcctcgccattcccatctgtgaaatggggatggcatcgcctgtggtgcgggggagggggcgcgtttcggagcgaggtgagccgaagtgggcagagctcttagaggggcggggctgttgggagagcaagggcggatggtgatagtcggaaaagcccggataatgagggtcgggactgtgggaggagtccttggtgggtggggcaaggagaggcgggatctctaggtgggggtggggcacttgtcaggtcggagtgggggctgtagggctggggagtgggtgcggaacaagccgatgaggccagcctgggtgagattggggaaggaagggcggagacacagatgacagggaacttgccccgctctggagagccctgggccggccgcgctgtggcggcgtgggcaaaagcctgtgatgcatagaacacctccctttactgactggaaataaagagtccatccccgagttcagtgcggcacaccagtgatctcattgacctcccacgccctgaaaagtagaggcgtcactatagcggttgacaggtgaggaatgtgaggctcagaaaagcgaagggacttgcctaaaaccactcaggactccttacttcaaagaccttgcttttctccctgcactcggggaggcagaggtttagcttggcgtgggaggcaggaaagaaaagttttgatgccccgaccttcgcaaattgtctggcaggaccagtccccccaacccttccgaatgacagcctgtaaggcagccctcctatagtactgtgaggatgaaatgagatggatttgaaagcacggtgtttataaattactgtttggaggagacataggaagagagcggtttgaaatggggtgctggtgccggaggaaaagcacaaggtgaagcgtgagagtgagccgagaaggtgaaggaaagttctggaaggggctgggggatggtagtggttgttggaggtctacgccagatgaaagaataccttgccgtgccagattccgtggtctccttcttccagcccacctttctctcctcctgccttttgcgcagctcattctggggtccctgtgtctaggaagcaccttttctctcctccctatgggttgtgatggtaatagagcagccttcggatttcttagagatatggactgggcaagacagaattatagacgcagctctttgatgtggggtggtcaggaagaggaggtgaagaaagggtagtcgtcctaggggcttcaaggcaaagagtcctttctccggtggggtaaggtggggaagtctcccacttactggaaaacacagtactcactctgagcattgtcttttttgaaatttacccagccacgtgctg

SEQ ID NO: 21979 - DNA, 747 bp, Artificial sequence
  DNA replication origin
aagactggattttgcagtggaagcagcatctcttccgtctgggacctggctgagggcgtccccaccctggggggagcagaggaccagccctgacctagccgggcccagcctcgtcctgcccggcctgagcgccccgcccagcagccggctctggcccaccggggtccgggaggtaagggggttgggggcgtgtgactgtctttggggggcggtgtctgcaccctggcctttcgagaaccctggacttgcgagcccagggctgggagtcgggagatctgggtgcatcctgggcctcctgggcctcactgtgtgaccttgggcgagtagctattcctctctgggcattaatcccctcccttcatcaattgtatgtcgaagtgatcctgctccctcccctttcaggtaagagggcattcgcacccagtacctagtacattcgcttgctggcttttcgtggggccctccagctcaagcgtgggctgggcgcgggtgcactggagggagggaggtggcacaaactggggggcccgaggccaccattgcttggaatgggcttttcctattctcagtgtgctgggccctgggataccctccccaaccccctcttacggccctggcccttgcaaaccggagaccctgatgtgtcagcttggtgcccttccttccagaaagcttggggtggagtgcggccctcacaggtttgtgaggggtggccccgcagggataggtgtgtgtggtgggttcctg

SEQ ID NO: 21980 - DNA, 1080 bp, Artificial sequence
  DNA replication origin
ttatatcaggtcctgcctagattgggcatcgaagcaaagaaatggttctgcgctccaggagaggcattacgtgttagatgttaagagagcaagctgtgcccatgtgaacctgcatgagagggctcaaagtgggttggtgtgggacaaagtcttcaggaaacaggccaggtggaggagaagggcagaaggaaggctattatggctcagaggagtaaggtagagatgactcacactgcaccctgcatttgctcatccagcaaatgcctgtctgctgggcactgtgctaggtgctggggatactgtggtgaacaaaacctgaagctgccctcaagaaccatatacagcattggaggggaggctgaccccaatcaagaaatcatgacaagtgctaccaaggagaaggacaagatgttctaatttttaataagggagattgacccaggcagggagctcaggtgaggcttccttgatgaagtgactttcagctgaggtctgcagggggagggaagagcatacacaaaggcccaggggcagagggcacacggtgagccaagggtgacaggccggtgtgggctgaggcaggcagagccctaggtgtgcagggctggagcgcggagatgagatgctgtgcttcggtggaggggactgggacccataccccaccagcactaactgattccagctgtaatgcaagaggccccagcggattgtaggaattaagggtgggggatggattccggcctggaggaccagggctattctcactgaggacgggtgctttagataggctttgaaggaaaagacgcttgcttggttgtgtgagagcatggtggtcgtgggggcctcaggagataaggacgtgtcaggcagaaggcacagcacacacacgaagtggagtctagccaaggggtaggggaaggagcagggagttgaggcagaaagaaagagtgcgaggcattctgggacctctgtcggttctcccttggggcctcttgccctttctccacagaggtgtcattttttgtgtgtgccccatctcatctcccccatggaaatgacttggctgagactctggacagc

SEQ ID NO: 21981 - DNA, 1070 bp, Artificial sequence
  DNA replication origin
aggcggtggggtccgtcgggcacacagcgcgggtggcgagccagcagccgtgccacctgcgcgcaggccgcggggcccgggcgctcgcacacggtgcgcagcacctcgcgccgcagcagcgcgaacacctcgtcggccgcaggcccctcgggcagcagctgcagacccagctgcacgcaggcgagcgcgcgggggcccggggggccggcgccaccctgcagcaggcgcagcacgcgacgcgcgctgaagaactcggcgaagacgtcggggtggtggcggccggccacgtgcagcagctggcagcccacgcggcgcggcagctcctccgcgccgcccacgtagaggcgcgcgcccagcgccagcagcgccaggcactgctcacgctccagcggctgccgcgccgcctccagcacgcgccgaaccagcccctgcttcacgctgaccgggtatgacgacgtcaccaccgcctccaagatcttgtccatggcgcccgcgctgcggaggacagggaatgaggtcacagcccgacaaccgcggggctcaagagttcccggtgcagtccccgagtgctgagacttagggcaagcaactcaaactttctgggcctcagttttctcatctgtgaaatggggcaagggcgtcatttcactgagagctatcctgatgaaataaagcacaacacttggcacataataaatgccaggggcctgcgtggtgactcacacctgtaatcccagcactttgggaggcccaggcagcaggatcccttgagcccaggagttcaagaccagcctgagcaacagcgaggcccgtctctacaaaaaacacaaacattacccaggagtggtcacacacacctgtaatgccagctactctggaggctgaagtgggaggctcgcttgggcctgggagttcaaggctgcagcgagtggagatcatcccactgcactccagcctgagcaaaagagaccctgtctcaaaataaattaaccccagggacttgtagctatggttgctaagcgcctttaatcgcacaaaggctacgtgagcctcctccccatccttcccct

SEQ ID NO: 21982 - DNA, 1101 bp, Artificial sequence
  DNA replication origin
gtgagcgggctcctggcgcagctgtggcgcgcacagcccgccgccatcctgccctgcctcaaagagctgttcgcagtcatctcctgcgcaggtgcgtgtgcggccggggcaggagcgcgggcatgcggaggtcctgggtgggcgcttgggtaggtggctgtacgtgtggatttgtgcatgcgggcgcccgtgtggcacgagtgtgccaggcggcgaatgctcaggtggagggctgcagcctgccttcatgtaggtgacacaactgtctagagcacctgctgtgggtcctctcctgcagtgggtgttggaaacgcagggaggagcacactggtgtgaaaaggatacgggtcagcctggccggagggaggaacgggaagttgagcaagccacaggatttggggcgggggaggtgggggggggggtcattatggtcttcgggtcaggtgagtttgatagaagctatcactttagagccaggagttgacagattggtggcacctggcagcaggggcaaggttccctgggtaggcagaggtgagggtctggagaggtgatggagtctgctatgcagactcagaaacgtaaaatcttgatcctccattgacaacagtggaacttagactacagtgcaagtgagtgaaagcagatgtgtgccttccctggtgatgaggctctccaggggaaaggaagggaatgcacctggcagggtgaagaactgaggacaacagacttcgagaaggaaatggtctttctcatctaggcctctgtgtggctccacttggagtatctccttcctccagtccacgcagccctcccaccttctctagcgccagcgtttcccctcctaaaggccttgccctgaaacccactcttgatcagtgcttcgtctgtggccagcacaggagtagccccaaggctgtgctagtgaaggtttgttgagtgagtttaggtggaaccagagactttgcttgctataggagaggaggtggcctctgctgtgctcttcctagaggcccagcccggttcgttggctcctgcagggcatggtgtgctgggggaagggaggggcctgcctccctgctaagctcagccctgtcccct

SEQ ID NO: 21983 - DNA, 921 bp, Artificial sequence
  DNA replication origin
gtgtgcgtctcaatgtgtggctgttggggaaggtaaatgggcatggataagctgagtgccccggaaggggacccgcatgtacatgtagtgactctgtgctctctgccccaggctgcacgaagaggagaaaacgggcacaaggatctgccagaaactcaagcagtccagctcgccctctccgcccgaggagcccccggccccaagttcaacctctgtggaaaaaatgtttggaggcaagatagtgactcggatctgctgtctctgctgcctcaacgtctcctcccgggaggaggccttcacggacctctctctcgccttccctcctcctgagcgctgtcgccgccgccgcctgggctctgtgatgcgccccacagaagacatcacagcccgggagttgcccccaccaaccagtgcacaggggccaggcagggtgggtcctcggaggcaaaggaaacactgcatcacagaggacaccccccccaccagcctgtacatcgaaggcctggactccaaggaagctggtgggcagagcagtcaggaggaaaggatagagagggaggaagaagggaaggaggagagaacggagaaggaagaagtgggggaggaggaggaaagcaccagaggggaaggagagagggagaaagaggaggaggtggaagaggaagaagagaaggtggagaaggagacagaaaaggaggctgagcaggaaaaggaagaagacagcctgggagcggggacccacccggatgctgccatcccctccggggagcggacatgtggctctgagggctcccgctccgtcctggacctggttaactacttcctgtcccccgagaagctgacagcagaaaaccgctactactgcgagtcgtgtgcctccctgcaggatgccgagaaggtggtggagctgagccaagggcc

SEQ ID NO: 21984 - DNA, 842 bp, Artificial sequence
  DNA replication origin
tggcaggacagctgctgtggggtgcagaggcagaagatgaaggacaaaaggaagggaaaactgatggccaacctagagcagcaaggagcagggcttggagctcgggtggtggagatgacaaggacactgtggggtctgggtccccagaactctggagctacaggccactctaggcccaagggctagtcctcttccccagtcccctcagaggcccccgccagccccaccttgaaagcagcatacaggggaaggcttggaccaagctgggcgaccaagcacatggggcaggaacacatggtaaaggggtggggaatatgggagggagtgtggtgtggatgggggtgatgcagggactgaggggaaccctgggacaggcacaggctgggcagaggcacagggcagtgcaggggactctgcagtggggtcgggaagtgagtttctttgcagtgagcagtgcagtggaagtcgggcacagaggtagcagacagatgtgaagcagtggtgaaggccatgtagcaagtggggaaatacatccaaagggcctgggagttggggggtgcccaacgcaatccttgggggtgcagggtggagcagaaagtgaaggagggacacgtgcaagagtggtgtgcatggtggtgtgacatgaggaccgttcctaggatgggacagtgggtcaggcaggacaaggagaaagcagggcagaatgatgcctagaggaccacatcaggcatggctgacagcttgtgcccatgggctgtggcgtatgtcagatcgcagggtaggaacgagtctggcctggtgccggcccagtgtttcctcagctcatccgccctctgttgctc

SEQ ID NO: 21985 - DNA, 1383 bp, Artificial sequence
  DNA replication origin
ccgcgccgcgccgcctagtccccgccgggccgcccgccccgcccctggcctcccgcgagctgcgcaccgccggccgctgccccagctgcccgagcccgcgccctcgtccgcgcgacccggcggggggctccaggccggcagcatgagcggcggcggcgacgtggtgtgcaccggctggctgaggaaatcgcctcccgagaagaagttgaggcgctatgtgagtgcgggcgcggccgcccaggggcgggcggggggcgctccggggcctgcggaggggcgggggactcccggaggggcggcaggctggggagctcgggcccggagccgcggggggccgggggcgaggagcggccgggggcgtgtggggcacctgcacacctgtcacaggtgggccgccgaggggcggggcgggcggcaggttgaggctgcggctcctgctccgccaggcgggtgcggctgcggcgcctcccaagccggtctgctcgtgaactaaatacagtgtcgaagttttgtattgatggcttctggagaccgagagagttgactctcggggctggggctccgcggcagccccgagcagcttcagcccgcagggtcggggagagggcgggaaaggggggcgtaggctgtggggccgcgcggacggccccacaaagggcgagcgcctcacgccctctccttccctttctccgcctgcccctcccggccgccggcctccctccgtccgcggctgcatcaccggcagcgtcagcggcatgtgcagcccttgtattaagtgactcatttgtttgtcccccttctttccctttattccgttcgtctctcacaggcgcctccccccgaccccggtgtgacactgcagtttggtccccgtggctggcccgggtttgggaccgggcagctcccgggtgtctggggtcgggagagatcgaggctctccgcggccaggtgttgccaaccgacagtgtttactgagatcgctggaacagccttttccctctaggtggggaactggcagcctgggggaggtggaacagcgtggcgctgagccgtggagttctggctttttttttttttttttttaacccctctccccagaggatgccttgcctggtgaggtcaaagtacaagatggtgccagttactgagatttggccgaaatggtcttggggtagtcgcgggagtttggaagtgggggtaaggttgctggaaggtttcaaggtctctcatctgctccctctccgtttcccatgaaatgcccttgtttaacgggctgtggtgccgaactccgggatcactcccacagcctggaagggagccgttgcctccagctgcagtgcatcaagggagctcggaatagaccctgccctctgtcagctgcac

SEQ ID NO: 21986 - DNA, 1522 bp, Artificial sequence
  DNA replication origin
ttcttctcgggaggcgatttcctcagccagccggtgcacaccacgtcgccgccgccgctcatgctgccggcctggagccccccgccgggtcgcgcggacgagggcgcgggctcgggcagctggggcagcggccggcggtgcgcagctcgcgggaggccaggggcggggcgggcggcccggcggggactaggcggcgcggcgcggcgcgagcccggcagcctcgcgcgcgcccgctcccccgccccgagcgcgcgcaatccgcactctccgcccggccgccgggggagcagctgcagcaggaaggccggctcgctcgccacgcccgctcccgccgcgcccccgaggccgccgcgcacgcggacgcggggctagggacccgcgaggatacagaaagccaccgccgccggcgcgccccggagtctcgctttctcctgaggccccaagccgcgggcgcggaggccagggaggcgaccgcgcccctggcgctggcgggtgtgaggggaagggactgcgcgccctcggtcgtcgatcgatttttcaccgagcgtcgacggggaagggatactagggctgctcacatttccgatacattctgcgggtcaggttccggctgaaaggagggaccccttcccagcaagaagctccttaactctggcgtccctcggcgggaggaggagacggacctactacgcgccggagcctttgcttttgtagcttacaggattgtcttcagtattgttcctattttatggacagcctaagggcaagggcttgtacaaagccgagccaattttccaattcaggtgtgtgggggaggaggggtcccggtcatctgctattcaaaatgagggcattgccttaatgggatcgacctgggagcctctcattgcctggaaaccaagtccagctgactccctcctacactgcctctgggaaaacacagtttagtatagaaaattcgcatgatttgtagaatggaagaagcaaaactagtcaatgtatttcataacgaattggaaggcaaggtcaagtgcagaagaacaagaaattggggtccaaattccccaacgttcccgctcattgacacaggctatgagacctctgtttgtaaatataatggtatcccagatgtacgtggaagcacacaaccccagcacttcagcgggaggggggagaaaaaaatcttttgtacgagctcttttctcatcacaaagtgtctctctaagcagcattaaaaggcaggtcctccctaacttctctgataagtggatagtaacctgtttattcaatggggaaccgtgctgtgtggacagatgaattggagaagcagcatcttgcagtgccccacacaacctcagactaaagctgttttgtttatttctgtctctgtgcagctgagttgtttcaagcagttggacatcatttggtccaaaagatcttgattgggttgggggaagttcaccctcctcaatttggaaaagcgaatcccctaccacgtacttagctcttctagataccctgg

SEQ ID NO: 21987 - DNA, 1526 bp, Artificial sequence
  DNA replication origin
gcgagccgagatggcagcagtacagtccagctttggcccggcatgagagggagaccgtggaaaggagagggagagggagacgggagagggagagggagagggagacgggagagggagagggagagggagacgggagagggagagggagacgggagagggagagggagacgggagagggagagggagacgggagagggagagggagacgggagagggagagggagacgggagagggagagggagacgggagacgggagagggagagggagacgggagagggagagggagacgggagagggagagggagacgggagagggagagggagacgggagagggagagggagacgggagagggagagggagacgggagagggagagggagaagggagagggagagggagacgggagagggagagggagagggagacgggagagggagagggacgaaaatattttttaaactgtaattataatgaaaactgctttgcaacattaacaaaaccacacatttcttgacttgcatcacctattcatattgactatttacatttttatgtgattccttccacatttattcggccagaacctgtatgtctgtttgaatgggctgcctgtattagggtcttcatgatgcttcttgagggaataggggatagtgttgtattatttttgactctcattcatttattctaaaagtaaatactgaggatctgtcctttgccaagtcctgtgccaggtcttgaaggtcttaaagaaaaataagacttagtcctgccctccaaagagggcagagaggaaaaagaaagacatttgccatttacaaggtgcaaggccacgtatttacacgtgtgatctcacttaagcctcttaccaagggtgacacaggccttcttattcccattttacttatgaggaagctgagacttgagacataaacacagtgcccagggcaatttaactggtagctgacaagaggcagccacgggagtttgtgtctaagcgaaaaatgtgaccatcttttaaaatgccgtggtggtgaggtctaccaagtaagacaaacaggcaaataggggagtaccctgtaatggggataaagttagaggatttcttttttcctttcaagctgcagtaggagcacagagaagggagagattcacgttgcttggactgaaggttccagaaggctccccctttaaaaagaatgggagtcatctctatctaaatcctgctacatgtggaaaagcaacctctaagcctacaggtgactgcctctgaagcatttcttctaaccgtcagtggcgtagagatcccagagtgctctgtgatctgacaacaggagtggggccatcaacggaggctgcgcaggcaagtctgagttggcaaaaccagcaggactgggcaacttctgatgttgcgctctcaggcctctcttctattattcttgccagctgtggtcagtcaatattagctttggttccatttcaaatcaaaggaaaatccacttggcaaatacttatggaggccc

SEQ ID NO: 21988 - DNA, 1196 bp, Artificial sequence
  DNA replication origin
tctcccgtgtctacttctttctacacagacacggcaaccatccgatttctcaatcttttccccgccttgcccccttttgtattccagaaaaccgccatcgtcatcatggcccattctcaatgagctgttgggtacacctcccagacggggtggtggccgggcagaggggctcctcacttcccagtaggggcggccgggcagaggtgcccctcagctcccagaccgggcagctggccgggcagggggctgacccccccacctccctcccggacggggcggctggccgggcggggggctgacccccccccacctccctcccggacgggacggctggctgggcagaggggctcctggctgggcagaggggctcctcacttcccagtaggggcagccgggcagaggcgcccctcacctccccgacggggcggctggctgggcggggggctgacccccacctccctcctggatggggggcggagacgctcctcacttcccagacgaggtggcagccaggcggaggggctcctcacttctcagacggggcggttgccaggcagagggtctcctcacttctcagacggggcggccgggcagagacactcctcacctcccagacggggtcgcggccgggacgaggcgctcctcacatcccagatggggcggcggggcagaggcgctccccacatctcagacgatgggctgccgggcagagacgctcctcacttcctagatgggatggcggccgggcagagactgtcctcactttccagactgggcagccaggcagaggggctcctcacatcccagacgatgggcagccaggcagagacgctcctcacttcccagacggggtggcggccgggcagaggctgcaatctccgcactttggggggccaaggcaggcggctgggaggtggaggccgtagcgagccgagatcacgccactgcactccagcctgggcaccattgagcactgagtgaatgagactccgtctgcaatcccggcacctcgggaggccgaggctggcggatcactcgcggctaggagctggagaccagtccggccaacacagcgaaaccccgtccccaccaaaaaaacacgaaaaccagtcaggcgtggcggcgcgcgcctgcaatcgcaggcactcggcaggctgaggcaggagaatcaggcagggaggctgcagcgagccgag

SEQ ID NO: 21989 - DNA, 941 bp, Artificial sequence
  DNA replication origin
cgcgaccccgtctgggaggtgaggagtgtctctgcccggccgccccgtctgagaagtgaggagaccctctgcctggcaaccgccccgtctgagaagtgaggagcccctccgcctggctgccacctcgtctgggaagtgaggagcgtctccgccccccatccaggagggaggtgggggtcagccccccgcccagccagccgccccgtcggggaggtgaggggcgcctctgcccggctgcccctactgggaagtgaggagcccctctgcccagccaggagcccctctgcccagccagccgtcccgtccgggagggaggtgggggggggtcagccccccgcccggccagccgccccgtccgggagggaggtgggggggtcagccccctgcccggccagctgcccggtctgggagctgaggggcacctctgcccggccgcccctactgggaagtgaggagcccctctgcccggccaccaccccgtctgggaggtgtacccaacagctcattgagaatgggccatgatgacgatggcggttttctggaatacaaaagggggcaaggcggggaaaagattgagaaatcggatggttgccgtgtctgtgtagaaagaagtagacacgggagacttttcattttgttctgtactaagaaaaattcttctgccttgggatcctgttgatctgtgaccttaccccccaaccctgtgctctctgaaacatgtgctgtgtccactcagggttaaatggattaagggcggtgcaagatgtgctttgttaaacagatgcttgaaggcagcatgctcgtttaagagtcatcaccactccctaatctcaagtacccagggacacaaacactctgcctaggaaaaccagagacctttgttcacttgtttgtctgctgaccttccctccactagtgtcctatgaccctgccaaatcccc

SEQ ID NO: 21990 - DNA, 1337 bp, Artificial sequence
  DNA replication origin
ggaggggacgggactccgcggcaacctgtttcccggcgagccgggcccgcgcatcccagctccctcgccccagcccctcgtggcccgcctcccccgccggcctccagttgtcttcgtggtacaggagtcggccgcgactccctcgcgctctccgccggagtccgcgggacgccgccaactttgggctcctcggtggccggagcagcggtgcgaaccagcggggcggccgggtgggcggggcctgggcgggaaactggagccgagaagaccgcgttccaggccaagttccagccgcaagcgccgcgcggcacagtgcagggtcccggccgcgcctttctcccgtccccggcccggccgcgttcctgcggactcacagcgcgctccgggcgctctgcagttgggctttcagcgggggagcccttctcgtcaaagttacgaggggtgttttcactggtggtgacagtgggaactagttttctgcgcgcctgtgtgtgtgtgtgtgcatgtgttggggagcagagagatttgcagcgaagtcacacatagcacaaaaaacaggtttcccctttccaggtgttataagggaatgctgaggaggaatccgttttctccggtgagggtgttgacgggaagcccttccacttagtggaactggacctgttggagctgattgcctggagtgaacgggtgtctcctttagcggcacctgtgtgccgtaggtccttggaaatgtttggggaactgaaagtcctcaagatattcagccaggacttagggcatagatgtttgtgtgcttttagggggctaattcggggaagcttttatttccagcatgtgtcttgaactgaggggagggcagggtgcggaaggcttgtggaattgccatcttctgtggtgggggaagggatcagggacggagagctttggttttctagaaagagttcttgggttcttcctctgctctcatcttgttttcatcaaggcctctgtttgggggtggaggtagagtggtgcggtaagcggatcagccaccctaatagaccggccttgaccagtgcggatgccaacgggcagaactagtgcttggtctgaacaagaaccatcaaaggatagttctatagtgagtggagtgacctggaatatgaggtagaaggctaggtgttagagtaatgggttcccacggactctcttccaatagaatctgattctatttggtatagtctcctcaatcttttgtggttttgtgggagtaaggtgataggatgtgactttaatctcttaactattgggttggaatcatggctctgtggccttaggcaaattgtctttggagcttc

SEQ ID NO: 21991 - DNA, 1064 bp, Artificial sequence
  DNA replication origin
cggctggaacttggcctggaacgcggtcttctcggctccagtttcccgcccaggccccgcccacccggccgccccgctggttcgcaccgctgctccggccaccgaggagcccaaagttggcggcgtcccgcggactccggcggagagcgcgagggagtcgcggccgactcctgtaccacgaagacaactggaggccggcgggggaggcgggccacgaggggctggggcgagggagctgggatgcgcgggcccggctcgccgggaaacaggttgccgcggagtcccgtcccctccccctctgcggtccccgccgcgacctgattcccgccctgcccggggagctaacccagccgcctccggggcgccctccttcttcctggattcccacggctggaccagagcccctctggcagccgggttaaaggctccttcagcaaggtcaaggcgcggccggctggcacctggggatttttttccagccgagcactggcttttcaatcgcattgttaaggatcatggcagcggcaggaaatccgaagggccccacaggtctgcgggagggaggatttattttacagcaaggaacagattcagacagatcggggatttcagtgggaggggacgagaggtttcaggacgctggaatgtggcaaaaacaaaacactccccacccatgcacatcaccatctcctgactgcgggctggggggaagggagttcagggccaatgtgtcccagacttcagcgttccccacggctgtgtcagggctggggtggcttatccccctacagacgaaaatcaagatttaaaagcatactcttactgtggtttctctatcaaagcccatcaacgtgatacacaggctgcggcgctggagggaagcggcgaaacggggagaataaacgcaacagaagcaaactgctgtctgcagaggcgagaggcgaaggaacggaagccatacccgaccccagccccatcccgtccccatcagcgccgggctagcgcaggaaaccaggaataggtgtaggtaagggtggcagcccggcagagccagcgttctactc

SEQ ID NO: 21992 - DNA, 1770 bp, Artificial sequence
  DNA replication origin
ggcccaggaggagggaggctagggcgcgggtggccgaagaggcaagctgttctggagcctggagccgccgcagcccccggagcccgccgcggactggagcctgggagcaagggttgggggagggcagggaggtgggaagcgggtgggagggaggcggcgcgccccaggttcgtctgcctctcccggatcccgttccccgccccggcccggtcgcctgcagcccctctgcagactagctcgccccaggcccccgtcgggcgctggaggagcccgcgaggcggcgccgggcttcagcggctgcagcctgccctgcggggcaagtgccggctgcagcagccccgcacgggcggtggttggagctcagatcctggagatgcgaccccagctcctcgccctctgcaacccgcggggcgcccgcctctcctcaccgggcgcccggccgcggtattgatgttcgtctaggagccaactgaggctgcagccgccagatggacgcttggagggctcccgggtgtgagtgtgactgtatgactactctcacccccagcttcgggaaatgtgctctgggttgaaatgtgatcaccgagctcctcagtcattttaattgccatttttaaatgcggtcgttacattggaggagcagactggaaggtagtggggcggcgtgtgtgtgtgtgtgtgtgtgtgtgtgtggacacacacacgcaaccgaggaatacacaaccaactacttgggtgaagggcggggggttcacctagtgagtccttcttggcgggggggtcgggcgagttagctgcccgctgcccgccccttctctgcctgcccccgcctaggcgaggttggaaagtactggaaattcagctgcgtggtccttaactttggaaattggctccgctttcagggcaaaatgttaaggcgatttatgcacccgcgtccatgtggatgagtgtattactgctcagttgggtgcagagccctcaacagtaccgcgccaagcccccacccgatctctaactccctcccaccccctaaccgtggagagagggtttatagaaatgcagttatctgtaaaccatcgacgcagtgaaaggggcgcagggaggcagccagagttttgcctgaacctgcatactggcttggtgtttgtagcacacgagatcaccccgctgctttgtagaaggcggtggtggggcaagctcgggattccaatcgccggggtggggggtggggggaagagggtgcccatgtactgagctctgaggccgagtaaggagagagatctgctgagcggcatcgcgggcaattacataagctgcctcggtgattacccggaactgtgatgcgagctcccggttctcgaaagacaagcctgaaagtttgcctgcttggggagtgtaagtaccggggcgcccccaccccggcctgggtagctaggatacgcctcgcaccacggcgcccacttgtgcgatgggcgtcgggtgctgatgctgctgtccccaaagaaccggttaccgaggcagggactaagtgggggcatccggaattgatcgcagaggaggagtcagtcagaactgaggtttcattgggtcttcagagctccaagtcttccctcggaggtgttggaaggccttccagggaacgccgttttcagaaactgacttggtgtcctggggagccccaaagcccctcttttccgcccttcctgggcgcccctccttgtctttcaagccctgtgcccttcacgtgtttagaaacctgcccgcggtgcc

SEQ ID NO: 21993 - DNA, 796 bp, Artificial sequence
  DNA replication origin
ctagaaaagtgttggggtggggggtgtggagtaacatccagcgagcaggcagaagggaggccctgggcgccagagagacccagggaaaggcgaagaggagggagaggggacgagaccgtgctacggggagcctggagagaaagccaaaggaggaggaaagaacaaaaggcaagaggagaggaagtacaagaaagtccagaaaggaaaagagaaagtttcagaaaggggaagagaaagcaagcaaggagggtaaaagaagaaagagaccagaaagataccgaactgagagagctcggagaactcgagaaagcaaaggaggtaaaaggagagaagatggagaaggcggcggagaggaagggggaaggagacagaggaaccgagactggggtgagggagcggccgcgcgtggcccccggagaggcgcccatcacctgcgtggcgcccccccgcgccggagtgcggccctgctcccagcgccagtgcgccgcgcggctcgccggcctcgtaggattggctaccgcctcccattcatgtaacctgcgtgtgcgtgtgcgtgtgtgtgtgtgtctctctctcgctcgccctctctttctgtgtgtaagagagcgagggtgggggacggaggcaggcaggcgagcaggcagggaggggaagaagagaagggaagctattaaacacacacacacacacacacactcacacacgcgcgcgcacacacccgccccaaccccccagaagcctcgggattgcagctgtttcatgtggggcagcagtgctggcagggacgccggccggg

SEQ ID NO: 21994 - DNA, 1290 bp, Artificial sequence
  DNA replication origin
gacattttagttaatctcagaggctttgtcactggtcactgtacacttatcataaagattttaaaaatagattggacagattgtgtggaaacttcccacccaccccaacccatccctgcctttctgagatgccctagttatgagatgttgaaggggcattccagcaccccacgtttataatctgtgatgcctttataatcagcatatggcaactggctagacagtctcctcaccacacagaagagttttcaaaatagcctacccctcctttcacatttatgtgaaattagcattgtcacatttcctccttcattgactactttagatcagagagacacactgtagcagaagatcatgaaggaagttgtcttaaagaaggaaactaacataaattaagcatctcatatacacccagtgctttctttccattgttctctcttttaatcctcaccaaaactggtgaagtcggtatcatccattttatagatgagaaaactgaagccgggtaaggggaaatggctcgcactaagtcctttagccagcaggcagcagggctggagtgggaattcctccagtctcttccccaaagcccttccaagttgccactcagtcaaactaccgctctcatcacataaaaatgcccttctcttggaaatgtgcttgccatcacgatccaaacattcgagggacagaaatctcttggaccgcaatcactgctattttttaagtgattgttatcacgactcagtagctgttaccatggttttggggaagttgtccgaggaaggagggcctttctttgggcatcttgcatgcctgaagaaggaactcaagatctcagctcttaattactctgattgtgctgcagtagcaacttgaaagagaccgtccctagaaaagtgttggggtggggggtgtggagtaacatccagcgagcaggcagaagggaggccctgggcgccagagagacccagggaaaggcgaagaggagggagaggggacgagaccgtgctacggggagcctggagagaaagccaaaggaggaggaaagaacaaaaggcaagaggagaggaagtacaagaaagtccagaaaggaaaagagaaagtttcagaaaggggaagagaaagcaagcaaggagggtaaaagaagaaagagaccagaaagataccgaactgagagagctcggagaactcgagaaagcaaaggaggtaaaaggagagaagatggagaaggcggcggagaggaagggggaaggagacagaggaaccgagactggggtgagggagcgg

SEQ ID NO: 21995 - DNA, 1056 bp, Artificial sequence
  DNA replication origin
ccaggaaggcatctgacacatagtaggtgcttgagacatgtttgctgaatcagaagctctttttttttttcttacaagaaattttcttagctgtgcatgggtgttacacctatatttctagctattcaggaagctgaggatggagaatcacttgagtccgggaggtcaaggatgcagtcagccataattgtaccactgcactccagcctgggtgacagagggagagagggagggagggaggaagggagggaaggaaggaaggaaggaaggaaggaaggaaggaaggaaggaaggaaggaagggcaggagggagggctggagggaagaaaggaaggaaggtagggaagagggagggaggaaggcagaaagagaggaaagaaagaaataacgggaggggggaaggaaggaaggaaggaagggtgggaaggagggagggagggaagaaaggaaggaagggagggaagagggagggaggaaaggagggaggcaggaagggagaaagagaggaaagaaacaaaggaaaggagggagggagggaaggaaggaaggaagaaagagaaaggaatttttccttcccttttgaggggcatgtgcatacatttttatatctctaccaaactttacagatttataattaatgacaaagtacgcagaagttaaaaaaaaccactgtgtgatggaaaaaaatgacaaaaccaccactttcatcatgcctctgattcttcaagggctgccatgatggctcttttgccctttgtgtggcttcatgggagggaacagggcatgctgctcttttgttttattgctattccagtggtgtgcaggtacgcagaggtgcagggacagtggagtgcttttagttttacatttacactgaataaagcacattcatggcatccccatctcctttgaggaggagctcgagtctggggagggggggagctctgacctattagtattgagggagtatctactatgtgatgagtgccaaggccaaccctttatatcaactgcagtggggtcggtgtctgctcatgagcatccctggagtaattg

SEQ ID NO: 21996 - DNA, 984 bp, Artificial sequence
  DNA replication origin
cagctactcgggagactgaggcaggagaatcacttgaaccccagagatggaggctgcagtgagccaagatcacaccactgcactccctgctgggtgatggagggagactcaatctaaagaataaattaaaaaataaacaaacaaacaaactatattgatggtggtaggggtggcattgggcaatatacaaaaataaatgctcagtaaatatttgtggaatgaggtaagggaaggaaggaaggaaatgagggagggaggaaggaaggaaggaaggaaaggagggagggaggaaggaaggaaggaaagaagggaggaaagaagggagggagggaagggagggagggaaggaagggaggaagggagggagggagggaaggaagggaggaagggagggaaggaagggaggaagggagggaaggaagggaggaagggagggaaggaagggaggaagggagggaagggaagggagggaggggaggaagggaggaagggaggagaggggaggaaaaagcagggagttagaatagcagaatagctgaaactccttgaagttctcccaggtagtgaaaacagcatagaccatatatcatctttaacaacctcattccatagcagcagttctcaaccagctgcacattagaatcacttgagtaacctacaaaatcttgatgccatgactgtaccttaaatcaattaaatcagaacctctagggatagcccccacgccagagtattttttaaaagctacccaagggttccaatgtgcagccagggttgagaatcagggctctctagacagcatgcctctggaatcaatctctgactaataactggttgccatggaaatttatccaccagctgggtgagcattgtccaacctccaggttactttcaaaactaaaaataactgatactttcaatcattggaataataaatccttttatgacccacagaaaaatgaaaagtattgcaatacgacccgc

SEQ ID NO: 21997 - DNA, 1391 bp, Artificial sequence
  DNA replication origin
cacatgtttcagagagcacagggttgggggtaaggtcacagatcaacaggatcacaaggcagaagaatttttcttagtacagaacaaaatgaaaagtctcccatgtctacctctttctacacagacacggcaaccatccgatttctcaatcttttgcccacctttcccccctgtctattccataaaactgccattgtcatcatggcccgttctcaatgaactgttgggtacacctcccagacggggtggtggccgggcagaggggctcctcacttcccagtaggggcggccgggcagaggcgcccctcacctcccggacggggcggctggccgggcggggggctgaccccccacctccctcacgggcggggtggctggccgggaggggggctgacccccccacctccctcccagatggggtggctgccaggcggaggggctcctcacttcccagacggggcggctgctgggcggaggggctcctcacttcctagatgggatggcggccaggaagaggcgctcctcacttcctagacgggatggcggccgggcagagacgctcctcacttcccagacggggtggctgccgggcggaggggctcctcacttctcagatggggcggttgccaggtggagggtctcctcacttctcagacggggcggccaggcagagacgctcctcacctcccagatggggtcgcggccaggtagaggcgctccttacatcccagacggggtggcggggcagaggctctccccacatctcagaccatgggcggccgggcagagacgctcctcacttcctagatgggatggcggccgggaagaggcgctcctcacttcctagacgggatggcggccgggcagagacgctcctcactttccagactgggcagccaggcagaggggctcctcaagtcccagacaatgggtggccaggcagagacgctcctcacttcccagacggggtggcggccgggcagaggctgcaatctcggcactttgggaggccaaggcaggcggctgggaggtggaggttgtagcgagccgagatcacgccactgcactccagcctgggcaccattgagcactgagtgaaccagactccgtctgcaatcccggcacctcgggaggccgaggctggcggatcactcgcggttaggagctggagaccagcccggccaacacagcgaaaccccgtctccaccaaaaaaatacgaaaaccagtcaggcgtggcagcgtgcgcctgcaatcgcaggcactcggcaggctgaggcaggagaatcaggcagggaggttgcaatgagccgagatggcagcagtacagtccagcttcggctcggcatcagagggagaccgtggaaagagagggagagggagaccgtggaaa

SEQ ID NO: 21998 - DNA, 893 bp, Artificial sequence
  DNA replication origin
ctctgcctggccgccccgtctgagaagtgaggagaccctccacctggcaaccgccccatctgagaagtgaggagcccctccgcccggcagccaccccgtctgggaagtgaggagcgtctctgcccggccgccatcccgtctaggaagtgaggagcgcctcttcctggccgccatcccatctaggaagtgaggagcccctccgcccagcagccgccccgtctgggaagtgaggagcccctccgcctggcagccaccccatctgggagggaggtgggggggtcagcccccctcccggccagccaccccgcccgtgagggaggtggggggtcagccccccgcccggccagccgccccgtccgggaggtgaggggcgcctctgcccggccgcccctactgggaagtgaggagcccctctgcccggccaccaccccgtctgggaggtgtacccaacagttcattgagaacgggccatgatgacaatggcagttttatggaatagacaggggggaaaggtgggcaaaagattgagaaatcggatggttgccgtgtctgtgtagaaagaggtagacatgggagacttttcattttgttctgtactaagaaaaattcttctgccttgtgatcctgttgatctgtgaccttacccccaaccctgtgctctctgaaacatgtgctgtgtccactcagggttaaatggattaagggcggtgcaagatgtgctttgttaaacagatgcttgaaggcagcatgcttgttaagagtcatcaccactccctaatctcaagtacccagggacacaaacactgcggaaggcctcagggtcctctgcctaggaaaaccagagacctttgttcacttgtttatctgctgaccttccctccactattgtccta

SEQ ID NO: 21999 - DNA, 889 bp, Artificial sequence
  DNA replication origin
ccctgcccccgccgccgccgccccatcaggtgtcctacgattacagcgcgggctacagccgcaccgcctattccagcctttggagatccgacggggtttgggaaggggcgccgggggaggagggggcgcaccgggactgacttcgaggcacgcttcccttcattagagacggctgtggagagcgccgcgcctccgtgggtttctcctaaatctgaagaacgatgggaaaatgcacgtggagatgaaaccagatttttaaaaattcaattaataaaagcaacttcagaaaaaagagatgaagacgagttggggattgtttaatcacaacctcaagtgttaaaacaaaaacaaacaaacacgtttgtaggttcttactggaccagaggagtcaagaaaccaagatggtttggggtatggggtggggacggcaaaaggggtaagagctggcttctgtagccacctgtcccttctatttttcagcgaaggtcagtgtatttagtgtaattaccccttctaaacagtgtcctagtccctcccttccctctccttgagtgcattttgaattaaagcctatattgaaaagaatggaggtgagacttactgatttgggtgttttcttacaggacggttttccgtctggtcgcttagctttgttaggtgagcctgtggctgagggaggaggccggtggtccactgctgacctcctgtgcttgtccttgggtagggttctcttctgtcacggtttaactcttttttctgcccgcttcctgcttccatctccctccacccttatcacagtcccagtgcttactttccttctttctttgcctggcctctcattattctatttctttcggccggcttttcttgcacatctcttttgtaggag

SEQ ID NO: 22000 - DNA, 1433 bp, Artificial sequence
  DNA replication origin
tggcgtgtcggcggcgctcggggagggcgggccggggggcgcggcgcccatgaggccgctgcagcgcttgatctgcttctgcaggtacttgcggtggttcaccttccgcttcgacttgcccggcttgtccagcgccagcttgatgttgctggacgccgagtcaatgaagctgagtagatcgcgggtggcctcgcgcacgtcccctccttcggctcccgacagcagcgcacccgccggagccccggtctcatcgtcctcgaaacagcagcccttgtccagggctccgaaggcgccccctagcccgtccggggagcccccgaagccgaagggcacgaaagggtgcgtgctgaggagcgccgcctgcaccgccatcgccgcggctcccgggctgtccgcagcgctgcccgtgcgcccccgccagctcctgcccgccgcccagacccagctcccgccccggcgcggcgcgcgcggcgcagcctactagttccgggcctggctcgctgcgctgcctcccgggggagctcattaggtcttgtaagcaaggggcggagggagggagcgcgcggcgaccgtcccggtggtagaggggaggggcttacttagcctggcttggaggagtggggggtcgctttagttttctgagctttctgaagctcaacgccttaactccttcgtttccctttgccccgtggtgtttctcttgactcctctaaccgcaaggggtgaggaagagatggctggtctcaaactccagttcaggcccatgaggccgctgcagcgcttgataggcttctgcaggtacttgcggtggtgcctctcctgaggcaagaaggcaggagtctagagacgtgggtttcagtccagctgtataacaacacccaccagcttctgggcgcttgcttctgccaggcgctgtccatctattatctcatttaatccttgaacaacagccctgtgaattacatgttatcgccattcaacaaacgtggacactgcacctcagggaggttcagtgagttggccaaagtcagatctagcccattctgactccaaagccattcctaagcccttgacaatacttgcgtcctctcttgcccttgcctttctcatctattaagatggggaaggaaaatgagtatttcttaaagctctagacctgatcctaagattctaacctgagttttcccaggattctcaagcccagtgctctttcttcttgactgtttgccacttgattgttacgagtaacaattggctaacagtaaattgaggccagcagtggcccatcttttattaacacatagcaggaggcaatggagaaaggagtcgatctggctaagccccctgttacttgagaacactgtgtgtgtataaaactctcagcatgttagaataaaagatggattggaacctctcccctacctgtcatacca

SEQ ID NO: 22001 - DNA, 1236 bp, Artificial sequence
  DNA replication origin
aggcagaagaatttttcttagtacagaacaaaatgaaaagtctcccatgtatacttctttcttcacagacacggcaaccatccgatttctcaatcttttccccacctttcccccctttccattccacaaaaccgccattgtcatcatggcccgttctcaatgagctgctgggtacacctcccagacggggtggtggcctggcagaggggctcctcacttcccagtaggggcggccgggcagaggcgcccctcacctcccggacggggcggctggccgggcggggggctgacccccccacctccctcctggacggggcggctggccaggcggggggctgaaaccccccacctccctcccggacggggcggctggccgggcggggggcttacccccccacctccctcccggacggggtggctgccgggcggagaggctcctcacttcccagacagggtggctgccgggcggaggggctcctcacttctcagacggggcggttgccaggcagagggtctcctcacttctcagatggggcggccgggcagagacgctcctcacctcccagatggggtcacggccgggcagaggcgctcctcacatcccagacggggcggcggggcagaggcgctccccacatctcagacgatgggcggccgggcagagacgctcctcacttcctagatgtgatggcggccgggcagagacgctcctcactttccagactgggcagccaggcagaggggctcctcacatcccagacgatgggcggccaggcagagacgctcctcacttcccagacggggtggcggccgggcagaggctgcaatctcggcatttggggaggccaaggcaggcggctgggaggtggaggttgtagcgagccgagatcacgccactgcactccagcctgggcaccattgagcactgagtgaaccagacaccgtctgcaatcccggcacctcgggaggccgaggctggcggatcactcgtggttaggagctggagaccggcccggccaacacagagaaaccccgtctccaccaaaaaaatacgaaaaccagtcaggcgtggaggcacgtgcctgcaatcgcaggcactcggcaggctgaggcaggagaatcatgcagggaggttgcagtgagccaagatggcagcagtacagtccagcttcggctcggcatcagagggagaccgtggaaagagagggagagggagaccgtaggagagggagaccg

SEQ ID NO: 22002 - DNA, 948 bp, Artificial sequence
  DNA replication origin
gtctctgcccggccgcccatcgtctgagatgtggggagcgcctctgccccgccgccccgtctgggatgtgaggagcgcctctgcccggccgtgaccccatctgggaggtgaggagcgtctctgcccggccgccccatctgagaagtgaggagaccctctgcctggcaaccgccccgtctgagaagtgaggagcccctccgcccggcagccaccctgtctgggaagtgaggagcctctccgcccggcagccaccccgtccgggagggaggtgggggggtaagccccccgcccggccagccgccccgtccgggagggaggtggggggtttcagccccccgcctggccagccgccccgtccaggagggaggtgggggggtcagccccccgcccggccagccgccccgtccgggaggtgaggggcgcctctgcccggccgcccctactgggaagtgaggagcccctctgccaggccaccaccccgtctgggaggtgtacccagcagctcattgagaacgggccatgatgacaatggcggttttgtggaatggaaaggggggaaaggtggggaaaagattgagaaatcggatggttgccgtgtctgtgaagaaagaagtatacatgggagacttttcattttgttctgtactaagaaaaattcttctgccttggtatcctgttgatctgtgacattacccctaaccctgtgctctctgaaacatgtgctgtgtccactcagggttaaatggattaagggcggtgcaagatgtgctttgttaaacagatgcttgaaggcagcatactccttaagaatcatcaccactccctaatctcaagtacccagggacacaagcactgcggaaggccgcagggtcctctgcctaggaaaaccagagacctttgttcacttgtttatctgctgaccttccctccactattgtcctatgaccc

SEQ ID NO: 22003 - DNA, 620 bp, Artificial sequence
  DNA replication origin
tgtcagagcagacgccggccgaggccggtgctgcgggggcccgggaggacgcctgtcgggattatcagtcatcgctcgaagacctgaccttcaatagcaagccgcacatcaatatgctgaccattctagccgaggagaacctgcccttcgccaaggagatcgtctctctcatcgaggcccaaaccgccaaggtttttatacaccccgcagcctcctattacttctaatactccctgattttagtgtcagcctcatcccaggtctcgcttccatcccaagggggacagtgttccttctctccaacccccccacccccctccaactcaggctcggtctttggcccaggcttcgagcatgggcctctgggggggagggagtggggaggataaagggtggagtcccacttccgctttccaactccctttttaggccaccgcattgtatatcccgacacacacacgctttgaatagagccctttggggtgggggagacttaaaggcagtttgtggtttggggaagtaagagttaacataagccattttaattccctgggaagtgggagagtgggtctcccattttccccaagcaccctttttggtaattgtgttctgtgggttgg

SEQ ID NO: 22004 - DNA, 979 bp, Artificial sequence
  DNA replication origin
acagcaaggggttggaatgaggtttgagggcccccatggtcagtcagtagctggtctgagatttgagggacaacataatcaacttggtgggaaccttaggtttgagggtccacatggtcagccaggggttggtatcaggtttgaaggccctttagtccaacaaggaggtggaatgaggtttgagggtccttctgtaccaggaggtggcctgagaattgaagggcctctgggtcaaggtggtccaagatttgaaggttgtcatgctttaaggtttgatgggcagccaggtcagccgtcactcttgccaagatttgatggattacatggtcagccaggtcctagatttgaaaggactcctggtcagccaggccctcagaggtttgatggaccacctggacagcaggttcaacccagatttgacggtgtacctcaaagatttgatggtccacaacatcagcaagcatcaaggtttgatattcctcttggtcttcaaggcacaagatttgacaatcatccttcacaaaggcttgaatcagtatctttcaatcagactggtccatataatgatccacctggcaatgcttttaatgccccatcccaaggactacagttccaaagacatgaacaaatatttgattcacctcaaggaccaaattttaatggaccacatggccctggaaaccagagtttctctaatccacttaacagagcttctggacactattttgatgaaaaaaatcttcagagttctcaatttggaaactttggcaatatacctgctccaatgacagtaggaaatattcaggcatctcaacaggtaagtctgttattctaaaattgcgttgtatgcagataagttaaccattttttaatgtttctaggagggttttcaggacatagtttattgtgtagattggaaagaagtttttaatgtactctaaagccacatgctaaggaagtgggatgagcatcttttggg

SEQ ID NO: 22005 - DNA, 862 bp, Artificial sequence
  DNA replication origin
tcgtccgggaaggaggtggggcggtcagccccccgcccggccagccgccccatctgggagggaggtggggggatcagccccccgcccggccagcagccccatccgggagggaggtgggggggtcagccccccgcccagctagccgacccttccgggaggtgaggggcgcctctgcccggccgcccctactgggaagtgaggagcccctctgcccagccagctgcctcatccgggaaggaggtgggggggtcagccccccacccggccagccgccccatccgggagggaggtgggggggtcagccctccgcccggccagccgccccgtccgggagggaggtggggggatcagccccccgcctggccagccgacccgtccgggaggtgaggggcgcctctgcccagccgcccctactgggaagtgaggagcccgtctgcccggccaccaccccgtctgggaggtgtacccagcagctcattgagaacgggccatgatgacaatggcggttttgtggagtagaaaggggggaaaggtggggaaaagattgagaaatcggatggttgccgtgtctgtgtagagagaggtagacatgggagacttttcattttgctctgtactaagaaaaattcttatcctgttgatctgtgaccttacccccaaccctgtgctctctgaaacatgtgctgtgtccactcagggttaaatgtattaagggcggtgcaagatgtgctttgttaaacagatgcttgaaggcagcatgctcgttaagagtcatcaccactccctaatctcaagtacccagggacacaaacactgcggaaggctgcagggtcctctgcctaggaaaaccagagacctttgt

SEQ ID NO: 22006 - DNA, 1401 bp, Artificial sequence
  DNA replication origin
aggcgcccctcacctcccggaagggtcggctagctgggcggggggctgacccccccacctccctcccggatggggctgctggccgggcggggggctgatccccccacctccctcccagatggggcggctggccgggcggggggctgaccgccccacctccttcccggacgaggcggctggctgggcagaggggctcctcacttcccagtaggggcggccgggcagaggcgcccctcacctcccggacgggtcggctggccgggcggggggctgaccccgccacctccctcccggacgggttggctggccgggcggggggctgacccccccacctccctcccaggcggggcggctggccgggagaggggctcctcacttcccagtaggggcggccgggcagaggcgcccctcacctcccggatggggcggctggccgggcggggggctgacccccccccacctccctcccggacggggcggctggccgggcagaggggctcctcacttcccagtaggggtggcggggcagagacgcccctcacctcccggacggggcggctgccgggcagagacgctcctcacttcccagacggggtggctgccgggcggaggggctcctcacttctcagacggggcggttgccaggcggagggtctcctctcagacggggcggccgggcagagacgctcctcacctcccagacggggtcgcagccgggtagaggcgctcctcacatcccagccggggcggcagggcagaggcgctccccccatctcagacgatgggaggccgggcagagacgctcctcacttcctagatgggatggcggccgggaagaggcgctcctcacttcctagatggtatggcgccgggcagagacgctcctcactttccagactgggcagccaagcagaggggctcctcacgtcccagacgatgggcggccaggcagagacgctcctcacttcccagatggggtggcggccgggcagaggctgcaatctcggtactttgggaggccaaggcaggcggctgggaggtggaggttgtagcgagccgagatcacgccactgcactccagcctgggcaccattgagcactgagtgaaccagactccgtctgcaatcccggcacctcgggaggccaaggctggtggatcactcgcggttaggagctggagaccagcctggccaacacagcgaaacctcgtctccaccaaaaaaatacgaaaaccagtcaggcgtggcggcgcgcgcctgcaatcgcaggcactcggcaggctgaggcaggagaatcaggcagggaggttggagtgagccgagatggcagcagtacagtccagcttcggctcggcatcagagggagaccgtggaaagagagggagagggagaccgtggggag

SEQ ID NO: 22007 - DNA, 841 bp, Artificial sequence
  DNA replication origin
tcacttcccagatggggtggcggccgggcagaggctgcaatctcggtactttgggaggccaaggcaggcggctgggaggtggaggttgtagcgagccgagatcacgccactgcactccagcctgggcaccattgagcactgagtgaaccagactccgtctgcaatcccggcacctcgggaggccaaggctggtggatcactcgcggttaggagctggagaccagcctggccaacacagcgaaacctcgtctccaccaaaaaaatacgaaaaccagtcaggcgtggcggcgcgcgcctgcaatcgcaggcactcggcaggctgaggcaggagaatcaggcagggaggttggagtgagccgagatggcagcagtacagtccagcttcggctcggcatcagagggagaccgtggaaagagagggagagggagaccgtggggagagggagagggaagaggggagaggaagaggggagaggggagaggggagagggagggggagaggaagagggagaggcgaagcctagtttcttaacagcagcttgtttctaaggtgtggtattggcggtactggcaatgcatgattgccctttgtctggtgggacaggcagctggacaagtatctggacttgagtctggctctgactgctctgcctcttgtccatgccttatcccctctctgagcttcagtttctttctatgtacaaatttggggttaaattacataacttctgagatctctgaatactatagtaccatggtaaattatgaggagaagtgccaggatgcaggcagaaccctggatggaaagacatttccatgagacaagaagattaaaaggagt

SEQ ID NO: 22008 - DNA, 1753 bp, Artificial sequence
  DNA replication origin
tctggccactgtggtttaggcatttggaagttcttgtgtgctggagatgtggctggggtttgtctcacagtggaggcaaagaattgcaactcagaaatatgttgctacttggctgcctccactctattattgtacaccttgaaggtgaggttaattaagtcctgttgtggggtttgagggccagaatttaatttttggagttttatttaatgttgggaggatattgggtaataaaatgtatattgagaataagacggccttttgaccttttatggtgtagggctgtaaagcatctcagggttgctgccaaatgagccatgaactgggctgtgtttttatatttgatgaaaaagagcctaaatgctctccaatttgggataaagaaaaagaagcattaaccttgactatgcctttagctccagccacctttttaagaggaaattgctgggcaggtgggggtgggctactcatggaatgaaaatgtaagcctgacagggtgtgaggtggggaggtgataaaaggattatagggtggaggagcggaggctaaggaagaattgggacctagctcagtctggcaaggaggggagaggtcagatgggtctgtagaaaaggaagattagaaagactcagtgacacttggggttgggactgaggggacaggtgggagggaaagaaggaagattcgggacaaattgcattgggaacagagactagggaaggactgatgtgtaaaagaaggcctgggtgtcaggcacctcagaccatttacccattttatgacaagaattatctagatcttgtaggatggaaaaattgaaagtgccattttctggctatttggaaccactgtcgagtttgtattggagtcaagtggcattgcagaagaaaataaggcatttaggttttaggtcaggtgtgagttgaagaggttttaggtttttaagaacacaggctaagggagaagaagggggaatggagggtggaagcttgcctatagtgaagggggcaagcccggacaaaagagtagagacacggagggaaggggtttgggggttcttaacctccagaaaattaggaaaggggtcagggcgtggaaataaggggttggggtgcagagataagtggtcagggagcagaaataagggatcggggtgcagagatagaggttggggcacagatataagtgatcagggcacagagataaggggtcagggcgtggaaataaggcattggggggttcttgctcccccagaaaagcagagaaggggtagagacagggagcgaaggggtcgggggttctttcccctcccccagaaaagcgggacttgccactaagggtgaaggaccaaggcaggcgtccctgcgtggtcagacacctctgaaacgtgggtgaataatcagagaggcgtccctgcaatgattaaacaccaagggaaggctgccttcccaagtccgtgactggcgccagagttttgggtccgtggataaagtatgtctcctttgtctctaccagaaaatgagaggaattggaattaagagaagggagagattgaagggtggcaccaagacggaaaggagaaagtggttgagggatagtgagagagattggagaagagagtaagaagaggccgcttacctgacctaaaattggtgagatgttccttgggctggtgggtctgaggacccgaggtcataggtggatctttttcacggagcaaagagcaggaggacaagggattgatctcccaagg

SEQ ID NO: 22009 - DNA, 1151 bp, Artificial sequence
  DNA replication origin
aggccgcggctgctgaaatgcagcgcttctctgacctgctgcaaaggctgttaaacggtatcggaggctgcagcagcagcagtgacagtggcagcgccgaaaagaggcggagaaagtccccaggaggaggcggcggtggcggcagcggtaacgacaacaaccaggcggcgacaaagagtccccggaaggcggcggcggccgctgcccgccttaatcgactgaagaagaaggagtacgtgatggggctggagagtcgagtccggggtctggcagccgagaaccaggagctgcgggccgagaatcgggagctgggcaaacgcgtacaggcactgcaggaggagagtcgctacctacgggcagtcttagccaacgagactggactggctcgcttgctgagccggctgagcggcgtgggactgcggctgaccacctcgctcttcagagactcgcccgccggtgaccacgactacgctctgccggtgggaaagcagaagcaggacctgctggaagaggacgactcggcgggaggagtctgtctccatgtggacaaggataaggtgtcggtggagttctgctcggcgtgcgcccggaaggcgtcgtcttctcttaaaatgtagggtcaagtaatctgctctttatccgcgtttacccctttcaactcccttacaccatgtcaaacttaccttagtgggacatcttcaccggacacatttcagaggagagaaaaaaagtaatattgaatcttaaagtgtttagctaaaagcatgaatgtgacacagtaaccaactcctaatgataacatgtgactattaaatctctctgacagtttcttttttaggtgatttccttcctgccaggctccgttgtaggggttacagaacagtcgttcccgcctcacaacctggtaaggatccatctcttcccgtaacgctcatgctctgctgctttgtctactttaatgggcaacatctcagtttgtgtgtgtgtgatttttttttttttttctgttttggaaggtgggagggaaatctaatttgggccctgtccaccctggaaacagacttgtgctggtcaagaatgtatttaagatgcctcttctggttgaaatagctattaatgtgtccccttattcagacttgcgtgtacctagc

SEQ ID NO: 22010 - DNA, 1141 bp, Artificial sequence
  DNA replication origin
ttcaagcatctgtttaacaaagcccatcttgcaccgcccttaatccatttaaccctgagtggacacagcacatgtttcagagagcaccgggttgggggcaaggtcatagatcaacagcatcccaaggcagaagaatctttcctagtacagaacaaaatggagtctcctatgtctacttttttctactcaagacacggcaacaatctgatttctctatcttttccccacatttcccccttttctattccacaaaaccgccattgtcatcatggcctgttctcaatgagctgttgggtacgcctcccagacggggtggcggccgggcagaggggctcctcgcttcccagaaggggcggccgggcagaggcgcccccgacctcccggacggggaggcggccgggcggaggcgctcctcacttcccagacagggtggctgccgggcgcaggggctcctcacttctcagacggggcggctgctgggcggaggggctcctcacttctcagacggggcggccgggtagagacgctcctcacctcccagacggggtcgcggccgggcagaggtgctcctgacttcccagactgggcaggcgggcagaggggctcctcacatcccagacgatgggcggccaggcagaaacactcctcacttcccagacggggtggcggccgggcagaggctgcaatcttggcactttgggaggccaagggaggcggctgggaggtggaggttatagctagccgtgatcatgccactgcactccagcctgggcaacattgagcactgagtgaacgagactccgtctgcaatcccggcacctcgggaggccgaggctggcagatcactcgcggttaggagctggagatcagcccagccaacacgtgaaaccccgtctccaccaaaaaaaatacgaaaaccagtcaggtgtggcggtgcgcgcctgcaaccgcaggcactcggcaggctgaggcgggagaatcaggcagggaggttgcagtgagccgagatggcagcagtacagtccagcttccgctgggtatcagagggagactgtggatagagagggagagggagaccgtggggagagggagagggggagggggaggcagacaactttcttttacatcctaggagcgtcta

SEQ ID NO: 22011 - DNA, 846 bp, Artificial sequence
  DNA replication origin
gttgcccaggctggagtgcagtggcatgatcacggctagctataacctccacctcccagccgcctcccttggcctcccaaagtgccaagattgcagcctctgcccggccgccaccccgtctgggaagtgaggagtgtttctgcctggccgcccatcgtctgggatgtgaggagcccctctgcccgcctgcccagtctgggaagtcaggagcacctctgcccggccgcgaccccgtctgggaggtgaggagcgtctctacccggccgccccgtctgagaagtgaggagcccctccgcccagcagccgccccgtctgagaagtgaggagcccctgcgcccggcagccaccctgtctgggaagtgaggagcgcctccgcccggccgcctccccgtccgggaggtcgggggcgcctctgcccggccgccccttctgggaagcgaggagcccctctgcccggccgccaccccgtctgggaggcgtacccaacagctcattgagaacaggccatgatgacaatggcggttttgtggaatagaaaagggggaaatgtggggaaaagatagagaaatcagattgttgccgtgtcttgagtagaaaaaagtagacataggagactccattttgttctgtactaggaaagattcttctgccttgggatgctgttgatctatgaccttgcccccaacccggtgctctctgaaacatgtgctgtgtccactcagggttaaatggattaagggcggtgcaagatgggctttgttaaacagatgcttgaaggcagcatgctccttaagagtcatcaccactccctaatctcaagtacccagggacacaaacactgcggaa

SEQ ID NO: 22012 - DNA, 868 bp, Artificial sequence
  DNA replication origin
cggcgcttcgtggacaagaccaggagggcgcgacccccaggctgatctcgaagcggcgcaagcccaggcccgtggagagtggagcccgtggagggtggtcggggggaagcttataaagtcttcagtgtcagactggaaggagtcgggggccaagaaaagaggccagccagtctcctgacatcccctccacagcctgcaggggcggatacccggccctgggcggacagctcgcacttcctttcagcccgccggccaggcctaccggctccactgcagcggctgctgcgccctgcatttccaaggcaaccgacgtcctcctccctactccctccccacccgccctagcttagccgcgaacggcgggccgagcgcgccatctggtggcgacgcagggaagggtcccggccgagcgcccgcgccgccgccttggtagcagcggtagcgctctcccgccttcctccgcgcgggattttcggcgtccctcagccagctggtctcaaacgctcacgcgctcgttggctccctttagtcgcaagcctggaagttggtgactgtagacacagggcccacgggcttcgtgctgtgaccgtgagcaggtcatttggatctcagagtttgtgtcttccgctgtaaaatgagacgcctggactcggtggcgctttccgcacagttcgggggacggggacggggcctggttgtctggtgaggcttctgcgcgcctctgtcccgctgcgctccttccacaatggcggcttgtcttctttctactttcgtgcactaattctttggttttagctcttaataagaatggcaggtccctggactaaatgcttacagggcaacttcctgctgtataagtccttgattc

SEQ ID NO: 22013 - DNA, 1280 bp, Artificial sequence
  DNA replication origin
attttgagtgcggagttcaggaagctcggaccgaaggccgccactgggcgggcgcccagcctcccgcccgcgtccgcgcctcgagccccacacgctctggcggccgccgcgccagcgtctgggaaggccaagctgacgcacctggggaaggcgatcctggcaggcggcctggcgggcggcattgagatctacatcaccttccccacccagtacgtgaagacgcagtggcagctggactagccctcgaacccgccgcggtaccagagcatcggggagtgggtgtggcagacagtccgcagccatggcgttctgggcctgtaccgcagtctcagctccctgctctacggctccatccccaaagcggccgccagcttcggaatgttctagttcctcggcaaccacctgcgggattcccagggacggctggacagcacgcgcgggctgctgtgctgcctgggcgctggagtggctgaggccgtggtgatcgtgtgccccatggagaccatcaaggtgaggttcatccacgaccagacctccccaaaccccaagtaccgaggattcttctacgggttaggaagattgtgcgggaacaagggctgaaggggatgtatcagagcctcacggccaccgtactgaaacagggctggaaccaggccatccgcttcttcgtcatgacattccctgcacaactggtaccgaggagacaaccccaacaagcccatgaacccgctgatcactgggggcttcggagccatcgtgtgcacagccagcgtctttggaaacactcctctggacgtgattaagacccgcaggtagggcctggaggcgcacaaataccggaacttgatggactgtggctggcagatcctgaggaaggaggagctcaaggcattctacaagggcattgtcccgcgctgggccaggtcaacctggatgtggccatagtgtttatcatctatgatgaggtggtgaagctgctcaacaaagtggaagacgggctaagcccagtggggccactggtgccccaggcacctccagaggccccaccactcttgtctcacatgattccagtgcagtagtgccaaaaggctcctttccacatcccttgagctctgtgacctggtctgtgcattgtggccgtcaagtccatgtgtcctatagcgccgtgtctcccctgtggtctctgtgtgacaccaccactgtgtcccgctgtctggcccagccatgcttagtatgcatctggcctgtgaacctgtgcccacttgtccatgtgcttacta

SEQ ID NO: 22014 - DNA, 1478 bp, Artificial sequence
  DNA replication origin
tcagactaatgtgtccagtcatttaaaaagggaacttacttatcgtgactattgccctatttttccctgaaaagtttcaggtctaagctccattggcttgagtgatccaatgagctttgtaccctggggtaaaagagcgcaaagaaaaaggagggtattacaggtgacttccaggttagaaaaaagttacgaggagttagctctactaattgtatctacgttagcgaatggacgaatactatgtcgtgtaagagaagctaaagctagttcctcaaaaggtaactggcataattaaaacatccaaactcaagcatcatcaaacatcattttgccaatttttttaagggatgtatgttatttgtaagtaaatttattaatccatttggaattccaacagtctacgcttaacactcaagcttctgaattcaagccgccagaattaacagttccaggaactgataagagtatcagcaaaatgcctttttccatatccccatgtgaaaagctggggggcagagctgacagtcacaaactcaccccagtcaaaagtatggacaacacaacgattaaattccaccagaggcaaataaaaatcccaactttccagaaagctttccctacaccaaattgaatccttttactttcactcccacaaagaaggtaatctgaaataaaagtcgggtaactgggtatggtatttaaaatgagtcgaagaaactacactgaagctactatagaggcgatgaaaaggtaacccaaaagcaggagggaaggtggaacagaaagccaggaagggatgggcgaagcagctagtggagcaaaggaagtgggggatcccttccagggaggcagcccggagggataacaaggatctggatgcaaggaaccaggcgtttactgaaacccgaaggaggctgatgaagaaacaatggggcttggagacgctcagacgagggcgacgaggcggcaccggacgggtgggaaggaagagcagaaggctgcagtggagacgggtagggggtgagaagccaggtggggaagcaagttggttgggtatgatggggtgtggtagcgcaccgggcagggagacgagggtcccctaggaatagggaggggagtggcttgtcagattttgagacggggagcggaggccgtgaaggcaggtgtgatggaagcaaaagaacacagctcaacgggcacaggaccggccgtgccagagaagacgcagggagggaagaggcagtagaagggtgaaagacaagagagagagagaaggacgcgcgcgggtcgcgcgggcgccggggagcgggggccgcggtcggcttcactcacagtccaggtgctttttcttgggccccatgatctcgtgggtcgtggccttgcatactgtcttggatacggcagagccggtgacactgtgctgggcggcagtgattcggtccgtcaggctctggccggacatctctgcagctcctcca

SEQ ID NO: 22015 - DNA, 1193 bp, Artificial sequence
  DNA replication origin
aaccagactccgtctgcaatcccggcacctcgggaggccaaggctggcggatcactcgcggttaggagctggagaccagcccggccaacacagcgaaaccccgtctccactaaaaaagtatgaaaaccagtcaggcgtggtggcgcgcgcctgcaattgcaggcactcggcaggctgaggcaggagaatcaggcagggaggttgcagtgagccgagatggcagcagtacagtccagcttcggctcagcatcagagggagaccgtggaaagagagggagagggagaccgagagggagaggggagaggggagaggggagagggagaggcagaggcagaggcagtacagtccagcttcggctcggcatcagagggagaccgtggaaagagagggagagggagaccgagagggagaggggagaggggagaggggagaggggagagggagaggcagaggcaggggcaggggcaggggcaggggcaggggcagggctagttatatttttttaaaagaagaaagtcaaagaaagagacaaagagggagggggaaacaattgataaaggaggagaggaagagacaggagaaaaagaaaacaaacaaagtacacacatacaaagaaacagaaaaataggcagtgaaagagaggaagagcaaaagcaaacgaacaagggagcgaaacgaacaagagagcgacgtgctggtggtgagcaggtgatatggtttggatctttgtcctcacccaaatcgcatgtggaattgtaatccccactgttggaggtggggcctggtgggaggtgactggaccatgggggtggtttctcatgaatggtttagcaccatcccctcagtgctgttctcgtgatagtgagtgagtgagttcttgtgagatctggttgtttaaaagtgtgtagcacctcccccaactctctctcttgctcctgctctggccatgtaagatgtgcctgcttcctcttcaccttctgccgtgattataagatccccgacgcctccccagaaactgagcagatgctgccatgcttctgggtaaaaattacccagtctcaggtatttcgttacagcagtgtgagaacggcctaatacagcaggtgaattattctcctcataacttggagttcactgtggacttcaagtgtctgtcctttgaaatatgaagtagctgcttaaccactgccca

SEQ ID NO: 22016 - DNA, 1016 bp, Artificial sequence
  DNA replication origin
gcggggggctgaccccacctccctcccagacggggcggctggccgggcggggggctgaccccccccacctccctcccggacgtggggctgacacccccacctccctcccggacggggtggctggccgggcggggggctgaccccccacctccctcctggacggggcggctggccgggcggggggctgacccccccacctccctcccggacggggcggctgccgggcggagacgctcctcacttcccagacggggtggctgccgggcagagggactcctcacttctcagacggggcggctgccgggcggaggggctcctcacttctcagatggggcggatgctgggcggagggtctcctcacttctcagacggggcggctgggcagagacgctcctcacctcccagacggggtcgccgccgggcagaggcgctcctcacatcccagacggggcggcggggcagaggcgctccccacatctcagacgatgggcggccgggcagagacgctcctcacttcccagatgggatggctgccgggaagaggcgctcctcacttcctagatgggatggcggccgggcagagacgctcctcactttccagactgggcagccaggcagaggggctcctcacgtcccagacgatgggcggccaggcagagacgctccttacttcccagacggggtggtggccaggcagaggctgcaatcttggcactttgggaggccaaggcaggcggctgggagatggaggttgtagcgagctgagatcacgccactgcactccagcctgggcaccattgagcactgagtgaaccagactccgtctgcaatcccggcacctcgggaggccaaggctggcggatcactcgcggttaggagctggagaccagcccggccaacacagcgaaaccccgtctccactaaaaaagtatgaaaaccagtcaggcgtggtggcgcgcgcctgcaattgcaggcactcggcaggctgaggcaggagaatcaggcagggaggttgc

SEQ ID NO: 22017 - DNA, 958 bp, Artificial sequence
  DNA replication origin
tgaggagcccctctgccgggccagccaccccgtccgggagggaggtggggggctcagccccccgcccggccagccgacccgtccgggagggaggtggggggtcagccccccgcccggccagccgccccgtccgggaggtgaggggcacctctgcccggccgcccctactgggaagtgaggagcccctctgcccagccagccgccccgtccgggagggaggtgggggggtcagccccccgcccggccagccgccccgtccgggagggaggtgggggggtcagcccccagcccggccagccgccctgtccgggaggtgaggggcgcctctgcccagccgcccctactgggaagtgaggagcccctctgcccagccagccgccccgtccgggagggaggtgggggggtcagccccccgcccggccagccgccccgtccgggaggtgaggggcgcctctgcccggccacccctactgggaagtgaggagcccctctgcccagccaccacctcgtctgggaggtgtacccaacagctcattgagaacgggccgggatgacaatggcggttttgtggaatagaaaggggggaaaggtggggaaaagattgagaaatcggatggttgccgtgtctgtgtagaaaaaagtagacatgggagacttttcattttgttctgtactaagataaattcttctgccttgggatcctgttgatcggtgaccttacccccaaccctgtgctctctgaaacatgtgctgtgtccactcagggttaaatggattaagggaggtgcaagatgtgctttgttaaacagatgcttgaaggcagcatgctcgttaagaatcatcaccactccctaatctcaagtacccagggacacaaacactgcggaaggccgcagggtcctctgcctaggaaaaccagagacctttgttcacttgtttatctgccaaccttccctcc

SEQ ID NO: 22018 - DNA, 2038 bp, Artificial sequence
  DNA replication origin
ccacagactttcgctccctagcagcgggtcggagatcgaaggaacgggccaattgcggctgaaacgtctttggaaggaggaagggggtgagggagcatccctttgagtttcgcctcttctcgaggcggtggtgggaagggagacatacttaatactgccctcttaatccaacggaccttacatcgtgtagactgccgggagggcggcgggaaaagggcaagacgggagttggggaagggaaggagccaggaagccgcgcgggagggcgcgcgcgcgcgcccctttttcagcagtgtggcggggtcgcacgcacgcccgcctcggcggctgggcgcgatttgcgacagtggggggggcggtggaggtggcggcggcagcggcaactttgcggcaagctcgggccgggcttgcttgacggcggtgtggcggaggccccgccccaggcggcaggaacctggagggaggcggaggaatatgtccgagagggaagtgtcgactgcgccggcgggaacagacatgcctgcggccaagaagcagaagctgagcagtgacgagaacagcaatccagacctctctggagacgagaatgtaagtgcagcttctggcagttacgagactgcggagtgaaagttttaaattcttttaaaacggggggcgcggggacgagcgggctgctgtggggggagggagaggtgtcactcaggaaaacgcgggcgtgcgggagaaaattgaaattgcctacggggattttgatgtggggccgagagcaagcaggaactaggcaaaggagagtggttctagtgattgcgtgggtctgagaagtctgccctgaaatcagtttgcatgtgatggggagtgttttggcctttggggggatttaaggggagagtgcgggtctgagattctagtagtttaaaaggcacgttagagacttttctaagaaagttggaaggacggggcagagttagggaccctgttaaaggagcgtaagggttgtcactctaagacccttgtggaattttcaggatggaaagtgatcttcgatttgcggagtttgggagactttattaaagggggttttgtgtccgcctccgtcctgtccgcggagaccgggtgcgcctgaaggtcgccttttctgtaggaggagccgaattgagaggatcgatttttgatttgggggtggggagtgactacctttgaggaagtaagagtgggtgatttcttctttgaacgtttttacttaagataaaggtgaggggggtggcgacctggaagattttgggcaacagtggtataggcagatgtatttaagtgtgggttcctggcttcgccaagtgcgcgatgttttgcaatcagatttttttaagctctgaaatgggtattcgtaatcattcggtaccaacatttaacccaactgagttttaattgactcgccagtaagagccgaattgacataaataagttttcagtttcatgttttaggttgataaccagtaaggtcaacgaagtatcttgacaatttattcaaagatactactccaaaatgtgattctccttctcatgatatataacaacttgtgaatatcttttaaaaaatccttaaaatgtttcagaagagtggcgtaagttcttcattttctcagtttggctagttttaggaataaatgttacatcttctacacgcagtttctaaattctgtcataattcctagctgaaacatataatgatgtcatgactaagattttcacggaaaagatgggaaaggattctttttgcagagacaagatagatattcttgggattgtcagtttgtgggatcttagacttcaaatttcagaaaagcttgggtgttaagtgttacttttgtatttttcacccgattgtgcgccccaatctcactgtacattgggatctaacattttttaccctcttctttttattatttgaagaccgttcattttatttctgcgttttcttaaatttctctaggcagattagagtattaagagcacagatgctggatccaagtgataggtt

SEQ ID NO: 22019 - DNA, 1315 bp, Artificial sequence
  DNA replication origin
acatgtttcagagagcacagggttggggggtaaggtcacagatcaacaggatcccaaggcagaagaatttttcttagtacagaacaaaatgaaaagtctcccatgtctacttctttccacacagacacggcaaccatccgatttctcaatcttttccccacctttccccgctttctattccacaaaaccaccattgtcatcatggcccgttctcaatgagctgttgggcacacctcccagacggggtggcggccgggcagaggggctcctcacttcccagtaggggcggccgggcagaggcgcccctcacctcccgggtggggcggctggccaggcgaggggctgacccccccacctccctcccagacagggcggctggccgggcggggggctgacccccccacctccctccctgacggtgcggctgccgggtggagacgctcctcacttcccagacggggtggctgccgggcggaggggctcctcacttctcagacggggcggctgccgggcggagggtctcctcacttctcagatggggcggttgccaggcggagggtctcctcccttctcagatggggcggctgggcagagacgctcctcacctcccagacggggttgcgaccgggcagaggcgctcctcacatcccagatggggcggcggggcaaaggcactccccacatctcagatgatggccagccgggcagagacgctcctcacttcctagatgggatggcggccgggaagaggcgctcctcacttcctagatgggatggcggcgggcagagacgctcctcactttccagactgggcagccaggcagaggggctcctcacatcccagacgatgggtggccaggcagagacgctcctcacctcccagacggggtggcggccgggcagaggctgcaatctcggcactttgggaggccaaggcaggcggctgggaggtggaggttgtagcgagccgagatcacgccactgtactccagcctgggcaccattgagcactgagtgaaccagacaccgtctgcaatcctggcacctccggaggccgaggctggcggatcactcgcggttaggagctggaggccagcccggccaacacagcgaaaccccgtctccaccaaaaaaatacgaaaaccagtcaggcgtggcggcacgcgcctgcaatcgcaggcactcggcaggctgaggcgggagaatcaggcagggaggttgcagtgagccgagatggcagcagtacagtccagcttcggctcggcatcagagggagaccgtggaaagagagggagagggagaccgtggggagagg

SEQ ID NO: 22020 - DNA, 945 bp, Artificial sequence
  DNA replication origin
gtgaggagcgtctctgcccggctggccatcatctgagatgtggggagtgcctttgccccgccgccccatctgggatgtgaggagcgcctctgcccggtcgcaaccccgtctgggaggtgaggagcgtctctgcccagccgccccatctgagaagggaggagaccctccgcctggcaaccgccccatctgagaagtgaggagaccctccgcccggcagccgccccgtctgagaagtgaggagcccctccgcccggcagccaccccgtctgggaagtgaggagcgtctccacccggcagccgcaccgtcagggagggaggtgggggggtcagccccccgcccggccagccgccctgtctgggagggaggtgggggggtcagcccctcgcctggccagccgccccacccgggaggtgaggggcgcctctgcccggccgcccctactgggaagtgaggagcccctctgcccggccgccaccccgtctgggaggtgtgcccaacagctcattgagaacgggccatgatgacaatggtggttttgtggaatagaaagcggggaaaggtggggaaaagattgagaaatcggatggttgccgtgtctgtgtggaaagaagtagacatgggagacttttcattttgttctgtactaagaaaaattcttctgccttgggatcctgttgatctgtgaccttaccccccaaccctgtgctctctgaaacatgtgctgtgtccactcagggttaaatggattaagggcagtgcaagatgtgctttgttaaacagatgcttgaaggcagagtcatcaccactccctaatctcaagtacccagggacacaaacactgtggaaggcctcagggtcctctgcctaggaaaaccagagacctttgttcacttgtttatctgctgaccttccctccactattgtcctatgaccctgccaaatcc

SEQ ID NO: 22021 - DNA, 798 bp, Artificial sequence
  DNA replication origin
caacctccacctcccagccgcctgccttggcctcccaaagtgccgagattgcagcctctgcccggccgccaccccgtctgggaagtggggagcgtctctgcctggccgcccatcgtctgggatgtgaggagcccctctgcccggctgcccagtctgggaggtgaggagcgcctcttcccggccgccatcctgtctgggaagtgaggggcgtctctgcccggccgcccatcgtctgggatgtgaggagcgcctctgcccggccgcgaccccgtctgggaggtgaggagcgtctctgcccggccgccgccccatctgagaagtgaggtgcccctcggcctggcagccgccccgtctgagaggtgaggagcccctccgccccgcagccgccccgtctgggaagtgaggagcccctccgcccggccgccaccccgtctgggaggcgtacccaacagctcattgaaaacgggccatgatgacgacggcggttttgtggaatagaaaagggggaaatgtgggaaaagatagagaaatcagattgttcctgtgtctgtgtagaaagaagtagacataggagactccattttgttctgtactaagaaagattcttctgccttgggatgctgttgatctatgaccttgcccccaacccagtgctctctgaaacatgtgctgtgtccactcagggttaaatggattaagggcggtgcaagatgtgctttgttaaacagatgcttgaaggcagcatgctcgttaagagtcatcaccactccctaatctcaagtacccagggacacaagc

SEQ ID NO: 22022 - DNA, 1012 bp, Artificial sequence
  DNA replication origin
aaccctgagtggacacagcacatgtttcagagagcactgggttgggggcaaggtcatagatcaacagcatcccaaggcagaagaatctttcttagtacagaacaaaatggagtctcctatgtctacttctttctacacagacacaggaacaatctgatttctctatcttttcccacatttcccccttttctattccacaaaaccgccgtcgtcatcatggcccgttttcaatgagctgttgggtacgcctcccagacggggtggcggccgggcggaggggctcctcacttcccagacggggcggctgcggggcggaggggctcctcacctctcagacggggcggctgccaggccgaggggcacctcacttctcagatggggcggcggccgggcagagacgctcctcacctcccagacggggtcgcggccgggcagaggcgctcctcacatcccagacgatgggcggccgggcagagacgcccctcacttcccagacaggatggcggccgggaagaggcgctcctcacctcccagactgggcagccgggcagaggggctcctcacatcccagacgatgggcggccaggcagagacgctccccacttcccagacggggtggcggccgggcagaggctgcaatctcggcactttgggaggccaaggcaggcggctgggaggtggaggttgtagctagccgagatcacgccactgcactccagcctgggcaacattgagcactgagtgaacaagactccgtctgcaatcccggcacctcgggaggccgaggctggcagatcactcgcggttaggagctggagaccagcccggccaacgcagcgaaaccccgtctccaccaaaaaaatacgaaaaccagtcaggcttggtggcgcgcgcctgcaatcgcaggcactcggcaggctgaggcgggagaatcaggcagggaggttgcagtgagccgagatggcagcagtacagtccagcttcggctcggcatcagagggagaccgtcgaa

SEQ ID NO: 22023 - DNA, 1103 bp, Artificial sequence
  DNA replication origin
cccggggatgcgcggtgttcaaagggtgacggcgcgcgggtcccgggcaggagagcccgccagagccggtgctgcctggcgccgagaggcccggactggcgactgctgccgcgccaccggggcccacctgcgcagggacgctcggcctcaggccctctgggctgctccaccctgctccggccgcaggcgagcggcgaggggaggggggcacggtttatgtgcagtggggcgggcggcgtccgcgcggcttccccgaggccggaggcggggcgggcgggcctcgggtggcgcggggggcggacccgccagctgcctgcgctgctcgccagcttgctcgcactcggctgtgcggcggggcaggcatgggagccgcgcgctctctcccggcgcccacacctgtctgagcggcgcagcgagccgcggcccgggcgggctgctcggcgcgggtgagtgcgggcaccgactggggcatccgcccgggcgcgggagaggcgaggcgccgggaggagcgggacaaagggccgggtatgcgcggggtagggtaactgcgggctgccggaggcaccgcaggacttcgccagggcagtcctcggggttccaggacacgggctgggggcctgaaggagctctggggagacggcgggggctgcaggtcatttggattcatgcagtgtcacccatgaaacggatggggaaagaagatcctgctgtcttgggtgcaggatgttggttgggaagcagagagagccggctctcggcaagctgtccttcggcgggggcgatggctacacccccatgcacccccccaacacaccaccaccactacttcttttccttgagttttgcatataccggattccatcaagttctgaatattaagttttaaccctgggcatgtgattgtgaacacacctaagcaagcaagagaagtgcaaaagtgcagcaaatacaggctgggaaatagaatcttttctccggagtggttgtccgtgtgcgttccgggggtgctaaccctagacactacagtctgaactaacaacagttgttgtaagcaaatagttcttctgcctgtaggcattcatcacgagttaacttttaaataa

SEQ ID NO: 22024 - DNA, 1610 bp, Artificial sequence
  DNA replication origin
cccagtaggggcggccgggcagaggcgcccctcacctcccggacggggcggctggccgggcggggggctgaccccccccacctccctcccggacggggcggctggccgggcagggggctgacccccccacctccctcccggacggggcggctggccgggcggggggctgacacccccacctccctcccggatggggcggctggccgggtggggggctgacccccccacctccttcccggacggggcggctggccgggcagaggggctcctcacttcccagtaggggcggccgggcagaggcgcccctcacctccctgacggggcggctggccgggcggggggctgacccccccacctccctcccggacggggcggctggccgggtggggggctgatccccccacctccctcccggacggggcggctggcctggcgggggctgacccccacctccctcccggatggggtggctgccaggcagagacactcctcacttcccagacggggtggctgccgggcggaggggctcctcacttctcatatggggcggttgccaggcagagggtctcctcacttctcagacggggcggctgggcagagacgctcctcacctcccagacggggtcgcagctgggtagaggcgctcctcacatcccagacggggcggcggggcagaggcgctccccacatctcagatgatgggccgccgggcagagacgctcctcacttcctagatgggatggcggccgggaagaggcgctcctcacttcctagacgggatggcggccgggaagaggtgctcctcacttcctagacgggatggcggccgggcagagacgctcctcacttcctagacgggatggctgccgggcagagacgctcctcacttcctagacgggatggcggccgggcagagacgctcctcacttcctagacgggatggcggccgggcagagacgctcctcacttcctagacgggatggcggccgggcagagacgctcctcacttcctagatgggatggccgcagggaagaggcgctcctcacttcctagacgggatggccgcagggaagaggcgctcctcacttcctagatgggatggtggccgggcagagacgctcctcactttccagactgggtagccaggcagtggggctcctcacgtcccagacgatgggcggccaggcagagacgctcctcacttcccagacggggtggcagccgggcagaggctgcaatctcggcactttgggaggccaaggcaggcggctgggaggtggaggttgtagcgagccgagatcacgccactgcactccagcctgggccccattgagcactgagtgaaccagactccgtctgcaatcctggcacctcaggaggccgaggctggcggatcactcgcggttaggagctggagaccagcccagccaacacagcgaaaccccgtctccaccaaaaaaatacgaaaagcagtcaggcgtggcggcgcgcgcctgcaatcgcaggcacttggcaggctgaggcaggagaatcaggcagggaggctgcagtgagccgagatggcagcagtacagtccagcttcggctgggcatcagtgggagaccgtgg

SEQ ID NO: 22025 - DNA, 918 bp, Artificial sequence
  DNA replication origin
caggccagccgccccgtccgggagggaggtggggggatcagccccccacccggccagccgccccgtccgggagggaggtgggggggtcagccccccgcccggccagccgccccgtcagggaggtgaggggcgcctctgcccggccgcccctactgggaagtgaggagcccctctgcccggccagccgccccgtccgggaaggaggtgggggggtcagccccccacccggccagccgccccatccgggagggaggtgggggtgtcagccccccgcccggccagccgccccgtccgggagggaggtgggggggtcagccccctgcccggccagccgccccgtccgggagggaggtggggggggtcagccccccgcccggccagccgccccgtccgggaggtgaggggcgcctctgcccggccgcccctactgggaagtgaggagcccctctgcccggccaccaccccgtctgggaggtgtacccaacagctcattgagaacgggccatgatgacaatggcggttttgtggaatagaaaggggagaaaggcggggaaaggattgagaaatcggatggttgccgtgtctgtgtagaaagaggtagacacgggagacttttcattttgttctgtactaagaaaaattcttctgccttgtgatcctgttgatcggtgaccttacccccaaccctgtgctctctgaagcatgtgctgtgtccactcagggttaaatggattaagggcggtgtaagatgtgctttgttaaacagatgcttgaaggcagcatgctcattaagagtcatcaccactccctaatctcaagtacccagggacacaaacactgcggaaggccgcagggtcctctgcataggaaaaccagagacctttgttcacttgtttatctgctgaccctccctccact

SEQ ID NO: 22026 - DNA, 1298 bp, Artificial sequence
  DNA replication origin
gcccctagctgcccaccgcgcccggccattggagaggcccgctgtccgtcccgccccgccgccgcgccgcgagcctccagcgccgcgcagggctccggcggtgagagctgcgcagcgctggctgctggctggcctcgcggagacgccgaacggacgcggccggcgccggcttgtgggctcgccgcctgcagccatgaccctcgcagcctgtccctcggcctcggcccgggacgtctaaaatcccacacagtcgcgcgcagctgctggagagccggccgctgccccctcgtcgccgcatcacactcccgtcccgggagctgggagcagcgcgggcagccggcgcccccgtgcaaactgggggtgtctgccagagcagccccagccgctgccgctgctacccccgatgctggccatggcctggcggggcgcagggccgagcgtcccgggggcgcccgggggcgtcggtctcagtctggggttgctcctgcagttgctgctgctcctggggccggcgcggggcttcggggacgaggaagagcggcgctgcgaccccatccgcatctccatgtgccagaacctcggctacaacgtgaccaagatgcccaacctggttgggcacgagctgcagacggacgccgagctgcagctgacaactttcacaccgctcatccagtacggctgctccagccagctgcaggtgggcgcccccacccccacccctggcgggaccccttggggagggacgctccaaactaactttgcagagcccatgccaagttgatcatcctagcccgaaggagacagctctcctggaaaagtgatttccatccccacccccactttctcagggactggaagccaaaacgttgtgtaagtcatctggcctgggaaagaacccactcttacaccccgcccttccgtttttctctcttgcccacccatgtctggcccagacccctaaccccagtggagctgagggttatctctgccaaggattctggccgccactgctcggtgggcgagtgggagggagccagctgcagctaagacttggagggagtgataaggagaccatccttcaccgaacttccttctccccactatttttggggtgttattaaatgaaacactactgcacctttttctgctgaatagccccttctcacgacgtcccgcagcgttttagaggtcatgcatgaaggagtggttgggttggcttgagttctttcttatcctcacagttgaaggcacgtttaatgcttggagggtgagaagaagctgcaggaaggtggttggta

SEQ ID NO: 22027 - DNA, 900 bp, Artificial sequence
  DNA replication origin
ggcagacacccccagtttgcacgggggcgccggctgcccgcgctgctcccagctcccgggacgggagtgtgatgcggcgacgagggggcagcggccggctctccagcagctgcgcgcgactgtgtgggattttagacgtcccgggccgaggccgagggacaggctgcgagggtcatggctgcaggcggcgagcccacaagccggcgccggccgcgtccgttcggcgtctccgcgaggccagccagcagccagcgctgcgcagctctcaccgccggagccctgcgcggcgctggaggctcgcggcgcggcggcggggcgggacggacagcgggcctctccaatggccgggcgcggtgggcagctaggggcgaggcggcggggcggggccgctctcccgcaggaggagtcaggcccccgccctccggccccctcctccggccgcccctccctccctccctcccctagcgccccgccccgcccgcctcccggctcttgctttcctcccacccggatctaggcgcgcaggggccaagcagggacgcagcccagtggctccagccacgccgtcctgcccccttctgcaggtgagaagtgcgccctgttccatctgccccctttccttcctgtctcctttcagctgtaacctaggccggtggccacctccccgtcaggcagagaaacgtacacaaagaattggggatttggatttacaccgattgtggctttcagtcccggttgtgtgaccttgagcaaattgctcaacccctcggcgtcagtctcctctgtaaagtcacttgggaggattagagataaagtgtagaaggcttagcatggtgcctggtactgcgtgagtccacagctattttcactccggaccagcggcgatcggggcccggcctc

SEQ ID NO: 22028 - DNA, 962 bp, Artificial sequence
  DNA replication origin
cgcgcaggggccaagcagggacgcagcccagtggctccagccacgccgtcctgcccccttctgcaggtgagaagtgcgccctgttccatctgccccctttccttcctgtctcctttcagctgtaacctaggccggtggccacctccccgtcaggcagagaaacgtacacaaagaattggggatttggatttacaccgattgtggctttcagtcccggttgtgtgaccttgagcaaattgctcaacccctcggcgtcagtctcctctgtaaagtcacttgggaggattagagataaagtgtagaaggcttagcatggtgcctggtactgcgtgagtccacagctattttcactccggaccagcggcgatcggggcccggcctctccccgcccccagactcgcccgacctgcgcagggagccgcccacctccagccgccagcggggaggcgccccagagctgcggagctgcagacccgccgacggtctcgcgctctgatttcctcaccgtatgaaatgaaattccacagggggattcgaaaggaaatgagaccgggactctccgtgcttctcggcccgccgcccttcctgtctcggggacacggtttctaaataaggttgggagggtgagagggcgggaggggagaggcttgacctgtgcactggggacgaggaaggcgcacaaccaccgtgactcctctctcccggcctcccgggcaccccctccccaccaggctgcacccctttttttctttgcttctgcttcggctcctagggatctggggatcatgtgacccaggtttgaacccaactttcctgtctcattaccagccccccgcggctttgtgctggtccaccctctctctgctttccagtcggccagtaaactcccagcaggtggattcctccaccgtttacttgttgcttgactgtgttgaagctatggtgcctctctgagcctcaaa

SEQ ID NO: 22029 - DNA, 932 bp, Artificial sequence
  DNA replication origin
gaggctggatttcggcaaaggtcgtcatggtcgtgggcaactggatctctttggggatcaggtaggacgagcagagcggggcgccgacgccggggctgggggccgcggtggacagcatcatggagttgagctcgctgatgttggccgtgaagcgggtgaccacactgctgatctgctccatgagggagccctgcgaggagctgctgcgcgccacaggctccgagtgcagcgacggcacatcgtcgtccgtgcggctggccgagcccgcgcggtggctcagcgtgctgatgggcgacggtgagcgcggccgcgcgggcgccgggaagtgctcctcagcctcggccacatcatacagcgccttggggccggcgtctggggactcgggcccgcctgggccggcgcctgcgcagcccgcaccgcccgtggcccccacgcccccagcgctcccgcctgcgccagcgccagcgcccaggccacggctctccgtgctcttggggaagggcttgatgacggccgtttggttggggttttctttcttgttgatgtggatggacaggcgctgccacaggtgctgcccccggctgctcttctcattctgggcccacgtgacggattttccattggaactgaggagagaagggagaggaaaggtgactcagcgaggtgcccagggggcttggatgccgcttccccaatggtggttgctcatgggccccggactggggaggacttttctcattctttcaggaaacacagcatcaaaaggacatcatggaaagagaccttggaagtggctttcctttgcttgttttgagttaaagactgctttctatatcagggcttcagtttatcataatcgtgaaaatgtgtcaaaggggatgcttgtcaggatgaaggagtgtttattaggattctgcgggagttctgagccc

SEQ ID NO: 22030 - DNA, 1184 bp, Artificial sequence
  DNA replication origin
agtggccagatttctggcacttgaagcaagatcctgagggaggaggtccttaaggaatcccagaccgctgtggcttaggcgttttgaagttcttgtgtgctgcaaatgtggctggggtttctcttacagcacaggcaagtaattgcaactcctctgttattgaacatcttgaaggcgaggttgattaattcctgttgtggggtttcagggcccgattctaatttttgaagcttttttttaatgttaggagctgactgggtgataaaatgcatattgagaataagatgaccttctggcccctctgggtctagggcggtaaagggtctaagaattgtggccaaatgggccatgaactgggctgggtttttatatttgatgaaaaagagcctaaatgctaactgatttgggagaggttggataaagaaaaaggagcattaaccttgactatgcctttagctccagccacctttttaagaggaaattattgggcaggtgggggagggctagtcacagaacaaaactgtaagccagactgggtgtgaacaggggaggtgacagaagaattatagggtgggggagtggagtctgaggaagatttggagcctgattcagcctggcagggagtgacctgaggaggagcagtcttgggaggaggggagaagtcagatgggtcggtagaaaaggaagattgaaaagactcagcaacacttggggttgggactgaggggacaggtgggagggaaggaaggatttgggatgagtcgcattgggaacagagactagggagggaccaatgtgtaaaagaatgcctggatgtcaggcacctcagaccatttgcccattttacgacaaaaattatctagatcttgtacaatggagaaattgagagtgttttctggctatttggaactattgtcgagtttgtattggggtcaagtggcattgcagaagaaaataaggcatttaggttttaggtcaggtgtgagttgaagaggctttaagttcttggaacacaggccaagggagaagaaggaggaatgaagggtggaaggttgcccatagtgaagaaggcaagcccagagaaaagaaagggtagggacacggagagaaggggtggggggtacctgccctcccccctcaggaaagtggtacttgccactaaggtgaaggatcaaggcaggagt

SEQ ID NO: 22031 - DNA, 1209 bp, Artificial sequence
  DNA replication origin
acagcacatgtttcagagagcacagggtggggggtaaggtcacagatcaacaggatcccaaggcagaataatttttcttagtacagaacaaaacgaaaagtctcccatgtctacttctttctacacagacacagcaaccatccgatttctcaatcttttccccaccttcccccctctctattccacaaaaccgccattgtcatcatggcccgttctcaatgagctgttgggtacacctcccagacggggtggtggccgggcagaggggctcctcacttcccagtaggggcggccgggcagaggcgcccctcacctccgggacggggcggctggccgggcggggggctgacccccccacctccctcccgggcggggcggctggcctggcgggggctgacccccacctccctcccggatggggtggctgccgggcggagacgctcctcacttcccagacagggtggctgccggacggcggggctcctcacttctcagacggggcggctgccgggcggagggactcctgacttctcagacggggcggttgccaggcagagggtctcctcacttctcagatggggcggccgggcagagacgctcctcacctcccagactgggtcgcggctgggcagagacgctcctcacatcccagacggggcggcggggcagaggcgctccccacatctcagaggatgggcggccgggcagagacgctcctcacttcctagatgggatggcggcggggaagaggcgctcctcacttcctagatgggatggcggccgggcagagacgctcctcactttccagactgggcagccaggcagaggggctcctcacatcccagatgatgggcggccaggcagagacactcctcacttcccagatggggtggcggcctggcagagactgcaatctcggctctttgggaggccaaggcaggcggctgggaggtggttgtagcgagccgagatcacgccactgcactccagcctgggcaccattgagcactgagtgaacgaggctccttctgcaatcccggcacctcgggaggccgaggctggcggatcactcgcggttaggagctggagaccagcccggccaacacagcgaaaccccgtctccaccaaaaaaatacgaaaaccagtcaggcgtggcggcgcgcgcctgcaatcgcaggcactcggcaggctgaggcaggaaaatcaggc

SEQ ID NO: 22032 - DNA, 863 bp, Artificial sequence
  DNA replication origin
gcgcctctgccccgccgccccgtctgggatgtgaggagcgtctctgcccagccgcgacccagtctgggaggtgaggagcgtctctgcccggccgccccatctgagaagtgaggagaccctctgcctggcaaccgccccgtctgagaagtcaggagtccctccgcccggcagccgccccgtctgagaagtgaggagccccgccgtccggcagccaccctgtctgggaagtgaggagcgtctccgcccggcagccaccccatccgggagggaggtgggggtcagcccccgccaggccagccgccccgcccgggagggaggtgggggggtcagccccccgcccggccagccgccccgtcccggaggtgaggggcgcctctgcccggccgcccctactgggaagtgaggagcccctctgcccggccaccaccccgtctgggaggtgtacccaacagctcattgagaacgggccatgatgacaatggcggttttgtggaatagagaggggggaaggtggggaaaagattgagaaatcggatggttgctgtgtctgtgtagaaagaagtagacatgggagacttttcgttttgttctgtactaagaaaaattattctgccttgggatcctgttgatctgtgaccttaccccccaccctgtgctctctgaaacatgtgctgtgtccactcagggttaaatggattaagggcggtgcaagatgtgctttgttaaacagatgcttgaaggcagcatgctcgttaagagtcatcaccactccctaatcttaagtacccagggacacaaacactgcggaaggtcgcagggtcctctgcctaggaaaaccagagacctttgttcacttgtttatc

SEQ ID NO: 22033 - DNA, 1181 bp, Artificial sequence
  DNA replication origin
aaaattatttaatttttaatctcaaaaatctgaaagtgattttatcaatgtcctaaaaaattgaaataaaaacaaacttaataatgtaaaagaagggaggtttccaccgggctgggggcgggagctagggcttccctggggacgcagaagcaagaagcagggaccttggcgcgcaccaggctttccgggacagagcctcggcctcccgcccacgcctccggccgccggcgtggtgctgctggctgggacccagccgcagggtggcggggcgcgctgcatgaccccgccaccgccgtccccactcctaggcacacaggtcgaggaggaccgcgctgactacaaagagttccaggacttctccagtctgcccgacacccgcagcatcgcctgggacgactctttgtaccctttccaggaggaggaggagcacggcgtcgagggcgtggagagcgtcctggaggagggcgtcctggaggagggcgtcctggaggcgtggggctgctgcagacgttggtgcggcggggggtgagcgttgagaaggctcaggagactgaccacaatggccagagcggccttaatgtcgcctgctaccacggctttgtggatataccgtggtggccttagctgagtgcccccacattgaagtcaactggcaggacagggaggggaacgcaaccctaatcatagctgcacaggcaggagctgcccctggccccatgggcacagttgccttagacgctggctctcagccttgcgcttcctgcgtcagcatcacctgggctggttcatttgagctttaacacagatctggtggaaacacaggctgccaagccctgccctggagtctttctttgaataggcctggggtggggcccaagaatgagcagaagaacaggtttcctggtgaggctgatgccgctggcccagggatcccacgttgaggaaggagggctttgaggttttcatgcctgatgatggccaggaacccttctcagtaggcattgaagaccagcagagtcccagaccccaggagagatgtcgtcagacggacacagaggcatcacggaattaaagtgaaaatgaagaaaggagctgagcatctgtttcatgactttcctgcgctgttttactaaagaggctgttctggcccagtcagggcacgctatcatcaccaactactt

SEQ ID NO: 22034 - DNA, 806 bp, Artificial sequence
  DNA replication origin
ccgccccgtctgggatgtgaggagcgtctctgcccagccgcgacccagtctgggaggtgaggagcgtctctgcccggccgccccatctgagaagtgaggagaccctctgcctggcaaccgccccgtctgagaagtcaggagtccctccgcccggcagccgccccgtctgagaagtgaggagccccgccgtccggcagccaccctgtctgggaagtgaggagcgtctccgcccggcagccaccccgtccgggagggaggtgggggtcagcccccgccaggccagccgccccgcccgggagggaggtgggggggtcagccccccgcccggccagccgccccgtcccggaggtgaggggcgcctctgcccggccgcccctactgggaagtgaggagcccctctgcccggccaccaccccgtctgggaggtgtacccaacagctcattgagaacgggccatgatgacaatggcggttttgtggaatagagaggggggaaggtggggaaaagattgagaaatcggatggttgctgtgtctgtgtagaaagaagtagacatgggagacttttcgttttgttctgtactaagaaaaattattctgccttgggatcctgttgatctgtgaccttaccccccaccctgtgctctctgaaacatgtgctgtgtccactcagggttaaatggattaagggcggtgcaagatgtgctttgttaaacagatgcttgaaggcagcatgctcgttaagagtcatcaccactccctaatcttaagtacccagggacacaaacactgcggaaggtcgcagggt

SEQ ID NO: 22035 - DNA, 1213 bp, Artificial sequence
  DNA replication origin
gtaaggtcacagatcaacaggatcccaaggcagaataatttttcttagtacagaacaaaacgaaaagtctcccatgtctacttctttctacacagacacagcaaccatccgatttctcaatcttttccccaccttcccccctctctattccacaaaaccgccattgtcatcatggcccgttctcaatgagctgttgggtacacctcccagacggggtggtggccgggcagaggggctcctcacttcccagtaggggcggccgggcagaggcgcccctcacctccgggacggggcggctggccgggcggggggctgacccccccacctccctcccgggcggggcggctggcctggcgggggctgacccccacctccctcccggacggggtggctgccgggcggagacgctcctcacttcccagacagggtggctgccggacggcggggctcctcacttctcagacggggcggctgccgggcggagggactcctgacttctcagacggggcggttgccaggcagagggtctcctcacttctcagatggggcggccgggcagagacgctcctcacctcccagactgggtcgcggctgggcagagacgctcctcacatcccagacggggcggcggggcagaggcgctccccacatctcagaggatgggcggccgggcagagacgctcctcacttcctagatgggatggcggcggggaagaggcgctcctcacttcctagatgggatggcggccgggcagagacgctcctcactttccagactgggcagccaggcagaggggctcctcacatcccagatgatgggcggccaggcagagacactcctcacttcccagatggggtggcggcctggcagagactgcaatctcggctctttgggaggccaaggcaggcggctgggaggtggttgtagcgagccgagatcacgccactgcactccagcctgggcaccattgagcactgagtgaacgaggctccttctgcaatcccggcacctcgggaggccgaggctggcggatcactcgcggttaggagctggagaccagcccggccaacacagcgaaaccccgtctccaccaaaaaaatacgaaaaccagtcaggcgtggcggcgcgcgcttgcaatcgcaggcactcggcaggctgaggcaggaaaatcaggcaggggggttgcagtgagccgagatggcagcagtacag

SEQ ID NO: 22036 - DNA, 1695 bp, Artificial sequence
  DNA replication origin
ctgtgacggtgggaaaagaaaatggccttgctgtgctacaaccggggctgcggtcagcgcttcgatcctgagaccaattccgacggtaagaggaacgcgccgccagccctccctcccctccacctcatcagcaggggaggccctttgggccggagggtgtccgcggatctcctgcagccgtcctcgcgcggccccaggtccatgcccctcctgggcctcccttggctgcccgcgcagcccgccggccgcccctctgttgcgccgcgttcccttggcgagcgcccggccccggcgcctgactgtcctctgccactgcggagagagacgctcccatggatccacgtgtttcccccgtcgtccccgcactccttttaagtcgcctggaatttagaacgaacacgtttctcctctggccctccagtctctggggaagcaaaaattaacgaggtactggtgagcttgctttgtagttcccgaagtagtgatggctgtgattgcctgcgcgagagggagaggtggccgggatgagcagcgggttgtcctagcatgtaagctctgccttgtagaagtttgtgttcagtcgatccgctgttacaaacctcttacaagtgttcttggtaagggacattactctgtatcttcacgctgttttgataggttcatcctggtggtacgttagttatctttttattactagcggcatttgttgcttgttcttcttgtggcctccacgttttactaccatgcctactcccgtataaaatgagtgaatgtcatctacagcacctagatgtcgagttaaggatccaaagcgaaaatgactattaggtgaaggacgggaaatgatcagtgaattgaaattttgattgacaaagaagtgagatgattccttgcgtatcgtgagaagtgacaacacgttttcagattgaactagcatttagtttatattttctgcatgccagccattattgctttatcttatttaatcttcataaccaccctgggacgcatgtaatgttaattagacccatttgatagagaagctcagttcaatgaggttgtattaataacatccttcattattgtggaggagatgaaaactgatgccttttgaactcttcacctctgagatgtttgaaatacttatttttggcacacaggtaaattgatagcgttatttaaaataagaccattgatacagagttttaaggaaaaggaaaatccaacctatgcaatactcaagttaccgccactgacatttttatgatgcaaatatgatgctactcatgaggaaaattgtgagatttcagtcgatgacaaaatcgagaaacgattttaaagccctttggtgttggcagcctatgtaaaacattaattgcacttatgtctgcagatattctactttaatatagaatacaggggaaagactgacgctttgcttatgagacaataaagttcaggggcgatagtcatttgttggaagtctgtatccatgtgtgaattggtgcagtgcctaggaaacagaaagcgaccaggaaaaccgtctcaaaacttgggtggtcagcagtactagttacagcagagaaattccaataagtatatttactttagcgaaatgacggtttttttagagacttagaatacatttttcaagtaaactgattgagtgaatggaaggagaagaaaatggagata

SEQ ID NO: 22037 - DNA, 1248 bp, Artificial sequence
  DNA replication origin
aaaagtctcccatgtctacctctttctacacagacacggcaaccatccgatttctcaaacttttccccacctttcccccctttctattccacaaaactgccattgtcatcatggcccgttctcaatgagctgttgggtaaacctcccagacggggtggtggccgggcagaggggctcctcacttcccagtaggggcggcagggcagaggctcccctcacctcccagatggggcggctggccgggcggggggctgacccccccccacctccctcccggacggggcggctggccgggcagaggggctcctcacttcccagtaggggcggccaggcagaggcgcccctcgcctcccggacggggcggctggccaggcggggggctgatccccccacctccctcccggacggggcggctggccaggtggggggctgaaccccccatctccctcccggacggggtggctgccgggcggagacgctcctcacttcccagacggggtggctgccgggcggaggggctcctcacttctcagatggggcggctgctgggcagaggggctcctcacttctcagacagggcggttgccaggcacagagggtctcctcacttctcagacggggcggccgggcagagacgctcctcacatcccggatggggcgacagggcagaggcgctccccacatctcagacgatgggcggcagggcagagacgctcctcacttcctagatgggatggcggctgggcagagacgctcctcactttccagactgggcagccaggcagaggggctcctcacatcccagacgatgggcggccaggcagagacgctcctcacttcccagacagggtggcggccgggcagaggctgcaatctcggcactttgggaggccaaggcaggctgctgggaggtggatgttgtagcgagccgagatcacgccactgcactccagcctgggcaccattgagcactgagtgaaggagactccgtctgcaatcccggcacctcgggaggccgaggctggcggatcactcgcggttaggagctggagaccagcctggccaacacagcgaaaccccgtctccacccaaaaaatacgaaaaccagtcaggcgtggcggtgcgcgcctgcaatcgcaggcactcggcaggctgaggccggagaatcaggcagggaggttgcagtgagccgagatggcagcagtacagtccagcttccgctcggcatcagagggagaccgtggaaag

SEQ ID NO: 22038 - DNA, 938 bp, Artificial sequence
  DNA replication origin
gtctctgcccggccgccccgtctgagaagtgaggagaccctctgtgcctggcaaccgccctgtctgagaagtgaggagcccctctgcccagcagccgccccatctgagaagtgaggagcccctccgcccggcagccaccccgtctgggaagtgaggagcgtctccgcccggcagccaccccgtccgggagggagatggggggttcagccccccacctggccagccgccccgtccgggagggaggtggggggatcagccccccgcctggccagccgccccgtccgggaggcgaggggcgcctctgcctggccgcccctactgggaagtgaggagcccctctgcccggccagccgccccgtccgggagggaggtgggggggggtcagccccccgcccggccagccgccccatctgggaggtgaggggagcctctgccctgccgcccctactgggaagtgaggagcccctctgcccggccaccaccccgtctgggaggtttacccaacagctcattgagaacgggccatgatgacaatggcagttttgtggaatagaaaggggggaaaggtggggaaaagtttgagaaatcggatggttgccgtgtctgtgtagaaagaggtagacatgggagacttttcattttgttctgtactaagaaaaattcttctgccttgggatcctgttgatctgtgaccttgcccccaaccctgtgctctctgaaacatgtgctgtgtccactcagggttgaatggattaagggtggtgcaagatgtgctttgttaaacagatgcttgaaggcagcatgctcgttaagagtcatcaccactccctaatctcaagtacccagggacacaaacactgcggagggctgcagggtcctctgcctaggaaaaccagagacctttgttcacttgtttatctgctgaccttccctccact

SEQ ID NO: 22039 - DNA, 1430 bp, Artificial sequence
  DNA replication origin
ttacctcccagatggggcggctggccgggcggggggctgacccccccacctccctcccggacggggcggctggctgggcagaggggctcctcacttcccagtaggggcggccgggcagaggcgcccctcaactccctgacggggcggctggccgggcggctggccgggcagggggctgacccccccacctccttcccggacggggcggctggccgggcggggggctgacccccccacctccctcccggacgggatggctggccgggtagaggggctcctcacttcccagtaggggcggccgggcagaggcgcccctcacctcccgtatggggcggctggccgggcagaggggctcctcacttcccagtaggggcggctgggcagaggcgcccctcacctcccggacggggcggctggccgggcggggggctgacccccccacctccctcccggacggggcggctgccgggcggagacgctcctcacttcccagacggggtggttgacgggcggaggggctcctcacttctcagacggggcggccgggcagagacgctcctcacctcccagacggggttgccgggccgggcagaggtgctcctcacatcccagacggggcggcggggcagagacgctccccacatctcagacgatgggcggcggggcagagacgctcctcacttcccagatgggatggtggccgggaagaggcgctcctcacttcctagatgggatggcggcagggcagagacgctcctcactttccagactgggcagccaggcagaggggctcctcaactcccagatgatgggcggccaggcagagatgctcctcacttcccagacggggtggcggtcgggcagaggctgcaatctcagcactttgggaggccaaggcaggcggctgggaggtggaggttgtggcaagccgagatcacgccactgcactccagcctgggcaccattgagcactgagtgaaccagactccgtctgcaatcccggcacctcgggaggccgaggctggcggatcactcgcggttaggagctggagaccagcccggccaacacagcgaaaccccgtctccaccaaaaaaatacgaaaaccagtgcgcctgcaatcgcaggcactcggcaggctgaggcaggagaatcaggcagggaggttgcagtgagccgagatggcagcagtacagtccagcttcggctcggcatcagaaggagactgtggaaagagagagagagggagaccgtggggagagggagagggagccgtggaaagagagggagagggagaccgtggggagagggagagggagggcgagggggtcaactctttctttactgcaatgacatgatcttggtaagataatttttatatgtgcagtgggcaggaagaacctgtcaggcagttagtgtaccaagtgcttgt

SEQ ID NO: 22040 - DNA, 925 bp, Artificial sequence
  DNA replication origin
agggaggtgggggggtcagccccccgcccggccagccgccccgtccgggaaggaggtgggggggtcagccccctgcccggccagccgcccggccagccgccccgtcagggagttgaggggcgcctctgcccggccgcccctactgggaagtgaggagcccctctgcccagccagccgccccgtccgggagggaggtgggggggtcagccccccgcccggccagccgccccatctgggaggtaaggggcgactctgcccagccgcccctactgggaagtgaggagcccctctgcccggccagccgccccgtccgggagcgaggtggggcgtcagtcccccgcccggccagccgccccatccaggagggaggtgggggggtcagccccccgcccggccagccgccccgtctgggaggtgaggggcacctctgcccggccgcccctactgggaagtgaggagcccctctgcccagccaccaccccgtctgggaggtttacccaacagctcattgagaacgggccatgatgacaatggcggttttgtggaatagaaaggggggaaaggtggggaaaagattcagaaatcggatggttgcctgtctgtgtagaaagaagtagacatgggagtcttttcattttgttctgtactaagaaaaattcttctgccgtgggatcctgtggatctgtgaccttacccccaaccctgtgctctctgaaacatgtgctgtgtccactcagggttaaatggattaagggcggtgcaagatgtgctttgttaaacagatgcttgaaggtagcatgctccttaagagtcatcaccactccctaatctcatgtacccagggacacaaacactgcggaaggccgcagggtcctctgcctaggaaaaccagagacctttgttcacttatctgctgaccctccct

SEQ ID NO: 22041 - DNA, 1400 bp, Artificial sequence
  DNA replication origin
ccggtcccccggctgctgccgccgcagcgcccaccgcgcgctagccgggactgaggccgcgagcagaagcgctctgcgctcgggacgccgccgccgccgccgccgggggttcgcaagcggaggaggggagccgagatgaagagaacagcagcgggaggagagggacgggaggcgcgagatcccaatccgcaggccagttcacagcgcagcctgcggggaggagcgccggctctcctgtctgctccgagctgcagccgccgccgctactgctcgccgcctggctgctccgggctccccatcacagccgacgccgacgcacggccaagcccctctccagtctccccctcgcgcttgtctctcgcagtctcctcctcccaaaccgcgagcgaaaagggcgagggggagaggagcctcggcggcggggatgactagcgatctaggagcgtggcgcaggggagagggggcgcgcgggagggggcggcggaggaggcgcggcgaactggagggcattcccggcgccgggcctggaagcggctaattttagagctcgagtcttccctcagccctctggggctctaggatgacaccaacgtactttcctgccgcggggagagcgtggtgcttgctggcttgggagagctttcgcacagtgcattgagtctcacccgcaccacatccctgtgaagacagagaacgcgttactctcctgggacaaagaggaaactgaggcacatcgaggttaacatggtttatataacgtcccaaggctagtttgtagtgtgaagattaaaccatcaaatgtcgtgcctctggactaaaaatgtgcctcccagtgagggctcctacgactttcctaaacattgagatcctggggtcatccgattgccttgtggaggagggaactagactaagcagctaacgtggtccaatctcttcactcttcctctgcccccaatatgttttaaacatttttttgtcttaatggaggacagggactctgaaggggtggatgattgatttggagcttgatgattgcatctccaccctgtcagccctcctggtcacttctgcagcacccacccaagtcctaggaccccctgactgcacgccctccgttctcacactgccccggtggagaggggactccactcgttccctgctctgtgtatcctcacacttttgcctttcttttccccccagcaaagaagcagccttaaccctctccactcgccacctacacacacacacacacacacacacacacacacacacacacacagagagagagagagagagagagaggagagagagagctcaactcacatatgtctctaaggcaagcacagctggcgcatttcctcctatgctctctatcgggaactttctccccaactctacca

SEQ ID NO: 22042 - DNA, 1361 bp, Artificial sequence
  DNA replication origin
cgccgccgaggctcctctccccctcgcccttttcgctcgcggtttgggaggaggagactgcgagagacaagcgcgagggggagactggagaggggcttggccgtgcgtcggcgtcggctgtgatggggagcccggagcagccaggcggcgagcagtagcggcggcggctgcagctcggagcagacaggagagccggcgctcctccccgcaggctgcgctgtgaactggcctgcggattgggatctcgcgcctcccgtccctctcctcccgctgctgttctcttcatctcggctcccctcctccgcttgcgaacccccggcggcggcggcggcggcgtcccgagcgcagagcgcttctgctcgcggcctcagtcccggctagcgcgcggtgggcgctgcggcggcagcagccgggggaccggctcgcccggagcaagagcgccgagcaccgggtgaagaagaccacgggggaggcgcctcgtagagccgtggatcgccagcggaggcaagggtgcgtggggatttgtagcgtgatgatttggctgcctggtgcaccgactggagcgcgcctgccggagcacagcctcagctgctgggtgcaaatgggctgcgaggtgggctggggaggcgagagccgacgaagcgcgtgggggaaacttttcaccttgtaaagttccaacctccgcgcagccccgagccgccgttgctaccgctgcaaacaggagaagagggtggcttggccccgcggcgggagccgggaggtttacacggagagttggccaagtttggggctgaggatctggggaggggttgcgaggggggttgcggatcagtgcacccatccccggctcccagccgcccctgcaggtggatgagaaggttcaggtggcgagcctgcttggcagccggtgcctctcgggcgcagtgggggatgttcagatgccgatggatgatgcacttaggggaccccgaggtgcaagttgggtcatcgctaggcgaggcgcggcgcagagagggagcccagcctccactttcgctaggaaagggaaagggttaccagtctgcgggtccgttccccacgcctgactcgggcttgcggggcttgtggtcagggtgagatgtagtgaacggcggcggcggctcttcgactggggacgacatcctttacggagtggttggggacagagactgtccctgctatcttgacaaggagagggaaccggaatgctttgcgagagtgcatgatttttggcgggcgtgtgggaaggctgcttgtctttgaaaagaaagcagcgcgggtctgaccatccccaggagtgcggaggagctgtctccggattgggggcgagaacgccaggggca

SEQ ID NO: 22043 - DNA, 1079 bp, Artificial sequence
  DNA replication origin
gggatgttcagatgccgatggatgatgcacttaggggaccccgaggtgcaagttgggtcatcgctaggcgaggcgcggcgcagagagggagcccagcctccactttcgctaggaaagggaaagggttaccagtctgcgggtccgttccccacgcctgactcgggcttgcggggcttgtggtcagggtgagatgtagtgaacggcggcggcggctcttcgactggggacgacatcctttacggagtggttggggacagagactgtccctgctatcttgacaaggagagggaaccggaatgctttgcgagagtgcatgatttttggcgggcgtgtgggaaggctgcttgtctttgaaaagaaagcagcgcgggtctgaccatccccaggagtgcggaggagctgtctccggattgggggcgagaacgccaggggcaccagctccgagctcaggccccactcccgggcggttcgggacgaatcccctctacaggccagtgtgtgtgcagggcaagtgtagggggctgaggggcgctggcggggaggcagtagaggtggcctggaccatcttggcgcggcgcgcggtgagcgcgaggattccgccagtgggagtcgctgagctaaagtgcatctggccccccggcttgcatgatggcgagcccggatatttttagctgtgctgtgatctgaattccctcctctcctctctcgttgacttttgtcacatgtgctttccgagatggtttaacattgaacatgattgggctttgcggaaagcaacttttattcactttccaccgttctcctcttgtgggcggggggtggcgggggcgtgcttggggcaaggatgcaggggtggccggagtttggctgcgagctaagagagccgcttgggttgctcgggatgagaggaacaggggtgctcccggggtgtgggtgtgctggcggtgacatcctgaggctgcagctcgctggaataatgggctcaaaccaggcggtggagaggggtccccggaatggacgtcgggggcggggaggctgcggagaccctgcgaggtctccgtgaaggactaggaggggct

SEQ ID NO: 22044 - DNA, 909 bp, Artificial sequence
  DNA replication origin
ctcctagcgcctcggccgggagctccagctccatcccgccgccgccgcgcgcccaatgggactcagcttcgggtttgggcgaacctgcagcagccgcggcgggagggagggacgctgggaccgcggtaatgattgaagtctttttcccccctctcccctcctcccgctcctctccgcccccagactctggcgcgtttgttttccaagttggatcccacttccatttacaagtgtcagacaaacccgcgagaacctcccccaacccgccccggccccagccagactagggagggcgcccagggggagggggcgagctgtctgggcagtgcctggggaggtgcgacgcgcccacccggggcttgagcggctggggttcctgtgcgtgggtccttaatgtttaaaagatacacatgaacagcaacaaaacccaaaccactcgtggccacttgttttctgccgcttttctcccacttgcctcggacatattaattttctggccccgacgctagtcttttcaaaggcgagtccggggtagtgggaggaaggggcgggggagcaggcctaccagttcatcacggtggatttgtgctcctggctttgttgctaggattagattctctgattgtgcccaggctaagttaaaataaaagcagagagacagagaagcggccagaaagactgcagacgactttgcctggatccaggcggcaaactcaggtggtggaaaggggaagcccgccatctaggaattgaggaccgaggtgcccacatctcagtatcgatcaaacagagcccagatttcttctccaccagcagacactgaacttctcttcacatttactgaatgcttgaatgatgttctggtgtgacgtggagatttgaatctgagaaggaaaggaagggaggagg

SEQ ID NO: 22045 - DNA, 1321 bp, Artificial sequence
  DNA replication origin
cgccagagtcgcccgcgcgggcgccgagaggagaggcgaggcggggagcgcaagcggcggcggccactgccacgtattcccggcagtggtggcggcggcggcggcggcgcccgcgggcaggtgggctgggagcggcgcggcggcggcggcggcggggcgggcgagccggcgggcgggcgcggggcacggggcaccgggcaccgggcgggggtgcggcgccgggacagtacggttcccgccacgccggctccgcctccgcgcagtgctgctgacccaggcctgggcgcccggcgggtcccgagcgcaactcgtgcgggcggggttgggggcccgagggactcgagctcgcctgcccgtcgcggctcgagacgctgcatcccggttgctgcggggcgggggctgggaaaagttggggcggaccgcgagcccgcggggccgggcgggaagtgcgggtgcggggcggactcaggggccgggggacgcagtgcaaagggcttgggccggggcggccgggagggccccgtatgggaaggtgggaaacgcgggtcctttgaggacgccgagaaaggggtgcgctcagggtctctgggagtggacaagagtccggcggcggaccttgcgggtgagaagggtcggcgcctgggggtcggggagtagaggtgaggcgggggcgggatagagccttcctcctcccccgttctttcgggaccgaccctgagacccggggcaggctccgagctgggtacgcctctggcatctgaagacccagtggggagttcctgtacggggtgggtggaggagggagctgagcgttgcttcctctgctgctggggccgactaccgcccctccccagcggccagattcacctcagactgcagtgcttttgccctgaggaagttgaggagggacagctgagcggatgagatgtttggggtgttccaagatgagtgggattaggctgcatgatatcataactatctccgggagctgtcagaaaacactcccatgtcctcatacacccacccatccactcatccagtcagtactgccaagctccaggctcccttgctctttaagtgacacctctagatccccagagcccaacagcgcatctgctcacagcctcgagggtggcaagggtggaagacatggcctgctagtgtctgcgtaggttggtgctttcagaaacaagtggttctggaggtgctggatgctttattagaacaacctgtgtggagcccgttgacaatgcagatgactcatgttggctttttttttttcccctttacaaataaactttgtattcaagacaccagtatg

SEQ ID NO: 22046 - DNA, 1070 bp, Artificial sequence
  DNA replication origin
caaccccgcccgcacgagttgcgctcgggacccgccgggcgcccaggcctgggtcagcagcactgcgcggaggcggagccggcgtggcgggaaccgtactgtcccggcgccgcacccccgcccggtgcccggtgccccgtgccccgcgcccgcccgccggctcgcccgccccgccgccgccgccgccgcgccgctcccagcccacctgcccgcgggcgccgccgccgccgccgccaccactgccgggaatacgtggcagtggccgccgccgcttgcgctccccgcctcgcctctcctctcggcgcccgcgcgggcgactctggcgcgccagaccgcagcgccaggcgccctctgccgccgggaagccgaatcctcccgtcctaaccctaactcgctggctgcccccgcccgggcctcggctcccgccccctcttccccgttcccggctcagactgtcgcttccgagcgacctgggttctcgcccggcctgctgctgccgctgcctccaggaagttcgccctgaccacctctgcaggctcagcgcgcttcctccggctcccgcgcagcgggtgcttaagtcacccccttgttgatatatttcctgcttctttgaacgcctcgcccgtgagatagcagaatcggaaaggggatagttggaggcaaacgccatgtctgttgtgttcaccattctctcctccagggcaaggttagcgccctgtctggaatactgaagtgcgcaataaatacttgtgaagagagcaaacgagtagatgaatgagttgagacttttaccgctgtctacccaagtaggctttgaaacctcaagcggacagagatcctgacctggatttgttttttgtaacttacacgtgcatatgtgtgcgcagctcagcataaataaatgagattcacaattccccacctcggaccagcgccaaatccgcaagaggcccacggctaaatgttattcagggcttttggtcaaacacgtttaggtttgagatctacctcttaaaagctgggcaatcgcgggaaagctcatctccctggcccacagtgaacacgtctat

SEQ ID NO: 22047 - DNA, 1371 bp, Artificial sequence
  DNA replication origin
ccctcccgctacggtcggcgccgggtctccaggcctcgcccagccccacgaggaagcggcgcggtgcctgccagccgagctcaccgcgcgccctcagccggacaaggtgggcgagggccaggggggccgctgctagaccccggggccccgcccgtgcccccctacccattcccgctcccccagcacccggggcgtcccccggagcttactctgcagacagcgggctgcggccaggcagagggcgaagagtcctagggagatgcctcgggtcttcctcctcccgctgggcagaggcctcatgggcgagcccggggcctcgcgggccggggtgtgtgctggccgcaccgcgctgcagctcctatgcagccttctctcttcctccgcctctggctgccgcaggttctttagggccagatgcagatgagctggttgtactctggttgaaccagttcccaaggatgggggggcgggggggggggggtgttgcgcgggagagaattaatatgggaaggaatgggaatgcacagactcagaggtaaataatggcaaataatgagcagcctccttccgttcacacccattttactggtattgattcaaggttcggctggatgctaggtggcaggaaggagggaaagtactagctattgcttcaggacagagctagtcattggcatcatgggcaaagggaaggcttttaggaaagtgaaatgacagcctggagtgagagggatgaggggagggggtggggagactcaggctgccctgatgggaaccactgcacagtgatgatatccatccatctatccacccatcagtccatccatccatccctccatccatccaggaaatgttcaccaatcgcctgctttatttgcacagagcctcgcacatggcagtcactcaaataaaccggtggaatgaagctaggcactgtgttaagtgctggggatacaaggatgtgggcacctgtttagaaatcctagcaaggggtgggggctgcaaaaaatgagcaaccgctaggccgaggcgggcggatcacgagttcaggagatcgagaccatcttggctaacacagtgaaaccccgtctctactaaaaatacaaaaaaaaaaattagccgggcgtggtggtgggtgcgtgtagtcctagctgctcgggaggctgaggcaggagaatggcgtgaacccgggaggcagagcttgcagtgagccgagatagcgccactgcactgcagcctgggcgacagagggggactccgtctcaaaaaaaaaaaaaaaaaaaaaagcaaccgctgtacagtgcatatgtcgctaggatcagagaggcccagcatgctctgggggctcagagcaagtgtaattagtctcca

SEQ ID NO: 22048 - DNA, 1084 bp, Artificial sequence
  DNA replication origin
cgggtttgcagggtaagggctaggcctaggtaggtgactgagggggtgcatatttttgctttttaaggggagatctgatgcctctgctctgtcaggaagtttaaaagagagatagtatgggcattccagtctttttgagaggggctacacaggagcagatcatcaacatagcgaaggagaatggatggttttagggataaggtacagaggtcacaagcaagggcatgtccaaaaaggtggggttgtctctaaaaccttgaggtattacacaccaggtgagctgatgtgaaaggtgagtgttggggtcttcccatgtaaaggcaaagaggtcttgagaatcagggtgcaaaggaatagtgaaaaaagcatcctttaggtctaggacagaaaaatgggtggtattggagggaattgcagaaagtaaagtgtatgggttaggaactactggacatactgggagtacagcttggttaatgagcctgaggtcctagactaagcaacaagttccatctggcttaacaggtagaaatggtgtgttaaaagaggagtttgttggatggagtaggtgactggtgaggaggcaagaaatgataggctttaggcctataagagttgcttgggggattggatactgcttctgtgataggaactgggtggggtttttaagggtaatgtggacaggggtgtggtgtttcatgactgagggtgtggaagtatccaaaacagcagggttaactatggatgggggattaggaaaggctgcatgttttagggtgggaggttggaggagtagaagaaagctagaagcactggaggggtctgggtggaggtgttggtaccatggggaacatggacatggagagtagtgtggagttttgaaaggatgtctctgcctaggagcagagttgggcatgagagcaggactaagaaagaatgagtgaaggaaaaggtgtaaagggagcagaagagtggaggggtggctcagggtttggagacttgtctatcaattcccacaacagagacttgggaggactaggtgggtcctgaaaattaggtaaagcagagtagcttgcctcggtatcaa

SEQ ID NO: 22049 - DNA, 1079 bp, Artificial sequence
  DNA replication origin
gaaagtttttcatagtttaccgctttatgggcaccctttttgagtcctgcaaggagacacacagtcatgttgtctcgatggtggtgcccaggggccccatcttgataatcccaatgggggtcctggttgcagactgcctctatgccagtaggctgggtaggagcctggtgatgaattttatcagcatgcacctgagctagggtccagatacagtcctggtcttctggggtgagggtggaagagaggataatgtagaggtcatgccaaattagttcataagagtgggtgaggtactgaaactctaatataagaggtagggtcttctggaaatgaactgagtcttttgttaatttgagagagatcagtgagggagaatggaacatgaactctaataataccttcagttcctgctacttcctgaagggggcactctagcacatgtgctgaagtaagggtggggcatgggccaaagatggcacctgagcgagtgtgggtgggagaaaaggaagaacctggaagtggttcctgttgagggtttgaaggggaaggggggttgagttaataggcagtggaggatagataggggcataaggtggtgggatgcgtttataggcctcaggagagggtggtgggggaggagaatgggtacaggcagtgctagaattgttctgaggagaggatggtgtaggaagagaagtgcatactcctggagggggtgctggctgggaagatgatggctgggaaggtggtgactgataagatggcagctgggaagatggcggctgggaagatgtcagctgggaagacaaagagaaggcttggggggttaaagaagatggttgagagggagaggtaggggctgggaggggtggacagcagtctgctggatcgaacaaggaaaaaggggtagggtcaggaggagaaggcaatcagggtggtgagaatggaggagcaggatttgaacaggtgagcaagaattgcagaggtttggttgtgatctgagtgcgaaaaaggcctggacataaggaatttctccccatttttccagtcgttggcaataattgcttaagtcagttaaa

SEQ ID NO: 22050 - DNA, 955 bp, Artificial sequence
  DNA replication origin
ccccgtccgggagggaggtgggggggtcagccctccgcccggccagccgccccgtctgggaggtgaggggcgcctctgcccggccgcccctactgggaagtgaggagcccctctgcccggccagccgcccggtccgggagggaggttggggggtcagccccccgcccagccagccgccctgtccgggagggaggtgggggggtcagccccccgcccggccagccgccccgtccgggaggtgaggggcgcctctgcccggccgcccctactgggaagtgaggagcccctctgcccggccagccaccccgtccgggagggaggtgggggggtcagccccctgcccggccagccgccccgtccgggagggaggtgggggggtcagcccccccgcccggccagccgccccgtccgggaggtgaggggcgcctctgccccgccgcccctactgggaagtgaggagcccctctgcccggccaccaccccgtctgggaggtgtgcccaacagctcattgagaacgggccaggatgacaatggcggctttgtggaatagaaaggcgggaaaggtggggaaaagattgagaaatcggatggttgccgtgtctgtgtggaaagaagtagacatgggagacttttcattttgttctgcactaagaaacattcttctgccttgggatcctgttgatctgtgaccttacccccaaccctgtgctctctgaaacatgtgctgtgtccactcagggttaaatggattaagggcggtgcaagatgtgctttgttaaacagatgcttgaaggcagcatgctcgttaagagtcatcaccaatccctaatctcaagtaatcagggacacagacactgcggaaggccgcagggtcctctgcctaggaaaaccagagacctttgttgacttgtttatctgctgaccttccctccactgttgtcccatgaccctgcc

SEQ ID NO: 22051 - DNA, 1324 bp, Artificial sequence
  DNA replication origin
gctgacccccccacctccctcccggacagggcggctggctgggcggggggctgaccccccaacctccctcccggaccgggcggctggccgggcagaggggctcctcacttcccagtaggggcggccgggcagaggcgcccctcacctcccagacggggcggctggccgggcggagggctgacccccccacctccctcccggacggggcggctggccaggcggggggctgacccccccacctccctcccggacggggcggctggccgggtgggggggctgacccccccatctccctcccggacggggtggctggccaggctgaggggctcctcacttcccagtaggggcggccgggcagaggcgcccctcacctcccggacggggcggctggccgggcggggggctgacccccccacctccctcccggacggcacggctggccgggcgggggggctgaccccccacctccctcccggatggggtggctgccgggcggagacgctcctcacttcccagattgggtggctgccgggcggagaggctcctcacttctcagacggggcagctgccgggcggaggggctcctcacttctcagacggggtggttgccaggcagagggtctcctcacttctcagacgtggcggccgggcagagacgctcctcacctcccagacggggtctcggccgggcagaggcgctcctcacatcccagatggggcggcggggcagaggcgctccccacatctcagacgatgggcggccgggcagagacgctcctcacttcctagatgtgatggcggctgggaagaggcgctcctcacttcctagatgggatggcggccgggcgcagacgctcctcactttccagactgggcagccaggcagaggggctcctcacatcccagacgatgggcggccaggcagagacactcctcacttcccagacggggtggcggccgggcagaggctgcaatctcggcaccctgggaggccaaggcaggcggctgggaggtgtaggttgtagcgagccgagatcacgccactgcactccagcctgggcaccattgaacactgagtgaacgagactccgtctgcaatcccggcacctcgggaggccaaggctggcagatcactcgcggttaggggctggagaccggcccggccaacacagcgaaaccccgtctccaccaagaccagtcaggcgtggcggcgcgtgcctgcaattgcaggcactcggcaggctgaggcaggagaatcaggcagggaggttgcagtgagccgagatggcagcagtacagtccagcttcggctccgcatgagagg

SEQ ID NO: 22052 - DNA, 1138 bp, Artificial sequence
  DNA replication origin
cctcaggctcccagcgactccgctgggctctcgcgctcgctgcctccgccgccggcggggcggggcggggcgggaacccgagagctccgcttcctgcggttccaccccgcacgcccgtgcaagtccccgggccgcgcgcggcactcggattcgcgcctctcccgcgcacccccaggcgcgggaaccacgcgcggaacaaagcgcttccctctggccctgcccctccgcgccgccctggctgccgaagcggccgccgggatagccctgcgctcacagccagctgcgccgcgctcttccggaaccatgcggggaaaccaagtacccaggggcgtggagcttccggaagacgcggtgacgcggggcggggtgggcgcggctgcattccgcgcccctcgggccactctctgacaaagggattttcccactgagcggcacctttggaaattctcccgtccctccctgccggattctcctcacgtcctggcacccgggagttttaaaatcatttctgcaagcgactctttctgtggatgggatggccccctttacgccccacccccaacatttccaacacggtgaaatcgggttagaaggagctgcaaaagcttcaaagaacagtcagtgccataaaaggccaatcgagcggtgtagaccgacggtgccttgcagagggagcgctggacccttccaggagctccgcgtgagagggtggcgcggaaacggtagtgagtgtggagtttcgaggcctgagtagcgctgctggtcccgtttctctttcctctgccatcccaatcagagccttgttccgggagccagcagagagaggggggcctgcaggtaggtgggtgttggggctgcagagagctgcttctgaacagctcataggaagtggatgatggaaagacaggaggaaatactctgaccagtgtccacggaaattaaggctgttgaagtagaaataatttgatttattggaagctaaatgtgaggatccacccaagaagacttaccagcaaagttgggcatgtttcaaaatttgttacacgttggaagggttttagaagaaagtttaggaaaagggaggaggaccccttatatcagaggtgggatttttttcatcggagggtatggtacacag

SEQ ID NO: 22053 - DNA, 1406 bp, Artificial sequence
  DNA replication origin
gaagctccacgcccctgggtacttggtttccccgcatggttccggaagagcgcggcgcagctggctgtgagcgcagggctatcccggcggccgcttcggcagccagggcggcgcggaggggcagggccagagggaagcgctttgttccgcgcgtggttcccgcgcctgggggtgcgcgggagaggcgcgaatccgagtgccgcgcgcggcccggggacttgcacgggcgtgcggggtggaaccgcaggaagcggagctctcgggttcccgccccgccccgccccgccggcggcggaggcagcgagcgcgagagcccagcggagtcgctgggagcctgaggcaccgagacacaaaggcaggcgggatgcgggagcaggcaaagggaaagcgaaagccgcgcgcccggccggtgactgggtgaaggcgccgcgcagctttcccgacgccggctgtacccggacctcctggtcgagcctggcgcgccgcagccatggccatcgctcaactggccacggagtacgtgttctcggatttcttgctgaaggagcccacggagcccaagttcaaggggctgcgactggagctggctgtggacaagatggtcacgtgcattgcggtggggctgcccctgctgctcatctcgctggccttcgcgcaggagatctcgattggtaagcctcgcccaggacggaggggagtggccgccccggtctggcccggtgagctgcgattttacggctcacaggcccgagtctgggtacgcccagctgtgatggtcgtgagcgtcaggaagggcagtggccccagttttatggtccaaagcgttctttgcccaggtgtttcattggtaccctggtctactctgctcgcatccctactcctcagttcttttgttcctcatgcccctctgatcggactgtggcttatagtttatgttccacccttagaactggcaccttgccaccagatttgccaagaatagctgtgtccccgtttttcacccctgtctcctacatatttgtccagccgcctaaaattttacaccagagaagttcctgagtggctacatggaggatgtgaagaccggtgctccatgagaagtgtgttctttcagtgtcttacatataattggtatttgctgagatcttagctctctagggttgtgaatgataggaaatatctgcacttggcaggcattagagggatcctcaacttggacggtcttacaaatgtgagatgaacaagtccccttcctgtaaattatcatttgagcttcataacagttgtgtgagattggaaagtctggtggtttgggcaggatcacgtggctacgtgccttaccttcctcatcagctgttctgactctccacacaggagagagtgtttatgaaccaacaggaaggtag

SEQ ID NO: 22054 - DNA, 913 bp, Artificial sequence
  DNA replication origin
tctctgatatacccagcagcagcctggtttgaatgtgacaatgtgacataagtgtaatggtgagcaagggagccatcagcccgagaaggaaaatatggagagtaaagacatttgttctttctcccctgtctgtaattttcagttaattccttgtccatagaacactggtgttttgctctctgttctccccttccttggactctcttcaacagttgatgagcttcacattcatttcccttgtggtgattagacctaaaaagtggccttcttcaagtggcaatgagaggccccagcattaacgctctgaaatatcacggaaattatcagaaaatgaagaggctctggttggaaaatctgggagtgaggaagaaaactgagagaggaaaggcagggaggggaggggtgggagaaaaggctgagaggagaggtcactataaactaaaaggaggaagaatagaggagggaaggaaaagaaagaggggataggaaggaagagaggagaggggagggagggagaggagagagagaagggaagagatgggaagaaggatggggagagggagaaaggagaggtcaccttaagttggagagaaaaggataggtgagcacatgataaaggagaagagagagaggaaaggaaggaaggcaggagaaagggagagatgggataggtcaggttaaactagggaggtgtctgaattagtattccaggaagagatgctgggtggattgaaaatgtatcaagaacaattgcatattgtaaaactgcatacaaacctcagttatgagctattacactcagcagcaggaaagaagagaggcagaaaagagagatgggatacgtcaggttaaactagagaagggtctgagttaaaactatgtttttaagaaatgcagtttgggccaggcatgg

SEQ ID NO: 22055 - DNA, 1056 bp, Artificial sequence
  DNA replication origin
gtggtctgggaaaatgcacttaatgttccattaacaattagcaattgtttgatatttcagttgtagcacaaagcagtatcccatgggtacggctgggcactgaacaggctgcaattcagagggagggggacctgatcatctctgctgacatttcaggggcattgatttactgctcaattatcaagcaagcccagacccagtgagattaaacaggaaatggtcattcatttccagctggctgcagacactcaaaccattgacccaatgccaccgccgcagaagctctggctgataaggcgatgagacagaaaaaagtggggagaaatcagagagtgaggcaggggagagaggaagagaggagaggtggggagaggagaggagaggagagagaatagaaaaataaaatcacagagagactgacaagaagaaaaagagataacaggtgaggagacagagacagatgaatagggaggctgaaagacaaaaaaaaaaaaaaagatgaggacactgagagatagagaagagagacagaaagacttcagagagagagacagagactgaaagaaagactaagaaaaacaggagagatacaagaaccgagatgacagaggagggagaaaagagactaggacaggaagacagaggcagaggagaggagaaatgaggaggaagagagatgtggagagagaagtggggacccacagggagacgcagaacggcagagggaggccagagaactgagagaggaaagggagacgaagacagaaggtggggcggcaggcagcgggccccttaccaaagtgaagggggtgttgagcagcgtgatcattatgtcggcaactgccaggttgacgatgaagaggctggtggccgagtgcattcgctggttcttgaagatgacatgacagaccaggacgttgccaaagagtgagaagacaatgatgaaggagtaagccacaatgagcagggctttcaccgtggggttctgggactcagcgccgtagcgcctcctgcccacaaagttctgccagtcggagaaggtgtagttgttccaag

SEQ ID NO: 22056 - DNA, 1932 bp, Artificial sequence
  DNA replication origin
gccgcagctacagcatgagagccggtgccgctcctccacgcctgcggacgcgtggcgagcggaggcagcgctgcctgttcgcgccatgggggcaccgtggggctcgccgacggcggcggcgggcgggcggcgcgggtggcgccgaggccgggggctgccatggaccgtctgtgtgctggcggccgccggcttgacgtgtacggcgctgatcacctacgcttgctgggggcagctgccgccgctgccctgggcgtcgccaaccccgtcgcgaccggtgggcgtgctgctgtggtgggagcccttcggggggcgcgatagcgccccgaggccgccccctgactgccggctgcgcttcaacatcagcggctgccgcctgctcaccgaccgcgcgtcctacggagaggctcaggccgtgcttttccaccaccgcgacctcgtgaaggggccccccgactggcccccgccctggggcatccaggcgcacactgccgaggaggtggatctgcgcgtgttggactacgaggaggcagcggcggcggcagaagccctggcgacctccagccccaggcccccgggccagcgctgggtttggatgaacttcgagtcgccctcgcactccccggggctgcgaagcctggcaagtaacctcttcaactggacgctctcctaccgggcggactcggacgtctttgtgccttatggctacctctaccccagaagccaccccggcgacccgccctcaggcctggccccgccactgtccaggaaacaggggctggtggcatgggtggtgagccactgggacgagcgccaggcccgggtccgctactaccaccaactgagccaacatgtgaccgtggacgtgttcggccggggcgggccggggcagccggtgcccgaaattgggctcctgcacacagtggcccgctacaagttctacctggctttcgagaactcgcagcacctggattatatcaccgagaagctctggcgcaacgcgttgctcgctggggcggtgccggtggtgctgggcccagaccgtgccaactacgagcgctttgtgccccgcggcgccttcatccacgtggacgacttcccaagtgcctcctccctggcctcgtacctgcttttcctcgaccgcaaccccgcggtctatcgccgctacttccactggcgccggagctacgctgtccacatcacctccttctgggacgagccttggtgccgggtgtgccaggctgtacagagggctggggaccggcccaagagcatacggaacttggccagctggttcgagcggtgaagccgcgctcccctggaagcgacccaggggaggccaagttgtcagctttttgatcctctactgtgcatctccttgactgccgcatcatgggagtaagttcttcaaacacccatttttgctctatgggaaaaaaacgatttaccaattaatattactcagcacagagatgggggcccggtttccatattttttgcacagctagcaattgggctccctttgctgctgatgggcatcattgtttaggggtgaaggagggggttcttcctcaccttgtaaccagtgcagaaatgaaatagcttagcggcaagaagccgttgaggcggtttcctgaatttccccatctgccacaggccatatttgtggcccgtgcagcttccaaatctcatacacaactgttcccgattcacgtttttctggaccaaggtgaagcaaatttgtggttgtagaaggagccttgttggtggagagtggaaggactgtggctgcaggtgggactttgttgtttggattcctcacagccttggctcctgagaaaggtgaggagggcagtccaagaggggccgctgacttctttcacaagtactatctgttcccctgtcctgtgaatggaagcaaagtgctggattgtc

SEQ ID NO: 22057 - DNA, 902 bp, Artificial sequence
  DNA replication origin
tagattttaggtcaggtgagagttgaagaggttttaagttcttaagaacacaggctaagggagaagaaggaggaatggaaggtggaagcttgcccatagtaaaggaggcaagcccagagaaaacagtagagacacggagaaggggtggggagttcttgccctccagaaaagcagagaaggggttggggcacaaaggtgcagagatataagaggttggggcgcggaaataagggattggggtgcagagatataagaggttggggcatggaaataagggatcggggcacagagatataaggggttggggtggggaaataagggatggggcgcagagatataaggggttggggtatttgcctctcccctagaaaagcgggacttgccgctaagggtgaaggagaaggggttgggggtttcttgccccccagaaaggtgaagaaggggtagagacatggagagaaggggttggggtattgccccttccccagaaaagcgggacttgctgctaagggtgaaggaccaagacaggcgtccctgcatggtctgacacctctgaaacttgggtgaataatcaggcatccctgcaatgattaaacaccaagggaaggctgccttccctagtccgtgaccgacaccggagttttgggtccacagataaaacgtgtctccttcgtctctaccagaaaatgaaaggaattgaaattaagagaagggaaagattgaagagtggaaaggagaaagtggttgagggacagtgagagagcttggagaagagagtaagaagaggccgcttacccgatttaaaattggtgagatgttccttgggctggtcggtctgaggacctgaggtcgtaggtggatctttcccatggagcaaagaacaggaggacaggggattgatc

SEQ ID NO: 22058 - DNA, 1972 bp, Artificial sequence
  DNA replication origin
cctgcaactatcctagatagtctcttgaaataataatagcaaatgtatattgaatactacatgcattgtgctgagtattttacatttgttattttattcagtcttcacaaccactctgtgagatgctattttcttcatcttgccaaaaaggatactgaggtttagagaagttaggcaacttgctcagcgtcacacagatactgaatggtggagctgcaactcagctcatgcctgttttgttctaaacttgatggttgtaacttggaaattttgctgcttcctagactataggatggtatctaggagtgggcaattagtaaagattagtttcctttcttctttttctatccatcacttcttccccaatttgtattaaattcgcgcaaatgttaggtgaatcagtggtcccttcactgtccataagataaccacttcagctcctaatttgcgattcagggttcacaatgtgtaatacaaggcacattgaggcagaggttgtttctatacctggctttgctactaaacttgttctgtaacattggacaagtcattcaacagctatgcctgagcttcttcatccggcaagtgaaaggtttagttgacactttcttagattctttccaggcctacatttttgtgacgttgttattctgccttcccttgttttctcctcgtttctggtaaaaacgctttcctctatgccttcttcccaagcacccagaccttgtcatctccctcttggcttttgcctctgcttgcccagtgctgccttttcctctttctgctgtgtctgaactccaccaccctcccaggcttttccttctgtgtagtcagtgcctctctccgcccttcccaggcatctgcagtacttggatctcctgctttgttgcttgcctgttttctgttcacacatcttgtcttcttagacagataacagatccttgaagggctggtcagctgctctaagtttcttttgtgtgctaagtttcttttgtgtgtaccagggtagatgactttaaatggagtaggcatttcataaataattgttaaatgattacatttgggctttatcttgagagcagagtttactcagtaggagggcccatcaggggaatcagaatcaggacatgcaacccaccagaactgatgagaggtaaaactgctggcagtctagttagggaactgccacaatccagggaggagtccctgaaggccggacctagatagcaggtaaacagaggcagggagcaccagataagagaggcttggtgtgcgctaactctcccactaacatcctgggcagcaactgtacagttacctagctttctcttctccaagcagtagagctgcccggaaaaagccaggcagaagtgctatggggcaggctcgggcaccccagattagggctccagagagccgccagtataaaccaatataatgaggtggatgagtagttctcagcacagcctgattttaagaggtggggcaacattttcccagagtcgcttactttctttacctctactcaggcagataacagcctggggatttatggccagaggatgtacggttctgcgaacacatttaatatccgaggctgtcaggtctgttttggcccttctgtttgtcaacggagcacatagtagcagcttatcgcccaatctcaagtgcgtgatggaagcactggggcctggggaatgctgagaaaagtgtggccactttctacctggaaattccacttaagaagaaaaaaaaccaacctaagcaaatctagacttttgggcagatccggaaacagaattttggccggcattgggctggtggggaaggaagacaaagtggagggagaactggtgagtctgaaattaatcaaaacccggcaggggacaaaggaagggatgctgtcgccctcctaagtctcagggagacacgtcagcttgagctctgggcaatttcagcctggcagtctcgc

SEQ ID NO: 22059 - DNA, 815 bp, Artificial sequence
  DNA replication origin
tttggcccttctgtttgtcaacggagcacatagtagcagcttatcgcccaatctcaagtgcgtgatggaagcactggggcctggggaatgctgagaaaagtgtggccactttctacctggaaattccacttaagaagaaaaaaaaccaacctaagcaaatctagacttttgggcagatccggaaacagaattttggccggcattgggctggtggggaaggaagacaaagtggagggagaactggtgagtctgaaattaatcaaaacccggcaggggacaaaggaagggatgctgtcgccctcctaagtctcagggagacacgtcagcttgagctctgggcaatttcagcctggcagtctcgcggcccggggaggggcggcgggtgtctgcagacgggctctagggcccagcggccgggcgccacggcgggggtggagtgtagggttctagtgacgagcccgggcgaccctccccggcccgcgcgcggggagcggggagcgcggacggcggcgggagcgcgcgagaagctctaggacccagcagcggttgtcgggtttggggctggaggtgaagccctgtgtgaatggggttgattgtccggcgccacttccccgcgctgcccggcagccgtcttccccagccgagggactgaactagccatgatcgcctcatgtggagggcaaagttgcgccggggaacttgtgagcctgcggtgaaaggtaaccagcccccactcgaggtgccgggagggcgtctccgagtctcccacgcgaagaacccagtcgccccgggctccccgggcccctgctgctcac

SEQ ID NO: 22060 - DNA, 1041 bp, Artificial sequence
  DNA replication origin
tccccggcgcgagacaaaggcgcgcgcaccggcccgcccgacgggctctggcgctgtggactggaccctttctgcccgccggccagacccggctctggcgggtgggggcgacgaaagggtcgcaccccagccccagacgctcggatcgcgttagctgctgctccttctttgttctctccccagacaagtttctttgacaaactggagagttacatccagctcccgcttgcctgttagggctgcctttacaataatctgctttcgcggggagaaaatttaaactttccaaatggaactgttttttcttggaatgtgacatttgtggcaggagggagagtggtacgttggccgatgacagccgagcggaacggtggcctagtgccgggacagggaccgagcgtgccccataggcggccgggctggaggacgcggcggcagagcagacgagccctggcgcgcacctctagggcctccgctacctggactgcgctcgcggcgacgtgtccaagtttcccccctcagagccccaggccgagaatcccgggtatctgcgcaaagctcccgcgcctcgcccaccctactcttcctatctttactgatgactaggaagactttccttttccatttttgttcgaagatttttgcctttttggcttcggtgttggtttcctgtctccgcgtggcaaataccttttggccgggctagcgtgtggatcacctggactggggtttcagaggtgggccctgagcgtgcggcctcctgagacgatgcggtttggacccaacattttgtccccatggtccctcagctccctttctctgtgaggccttggtttcccattttcttctcctgaggcatgttatgagaactgagtttttgtactgcttatagaaggccttggtggtggtggggtacgtggtctcgagagccagttgtgatacctcgaagatgctttcggctaaccaaagcagtaacgtgctaacctgctcaccataaacgaattaaaccagaatagagggctattaatagctacagttcca

SEQ ID NO: 22061 - DNA, 1053 bp, Artificial sequence
  DNA replication origin
gcgcgctgacagatcttcacgtgggaatcggccgccagccccgcaggcggggtcccggcgtagaagaacttgtcacattcgccaaagccggcttcctcctcgcccacgagccggccttccagcagcccagccagggcgaagaggctgcccagcgcgagccagcgcgcggtgcccatggcggcctctgcgagcgcggcggggccgagcggctgggctgccgcggcgcgagctctgcaggctgggcggggagcgcactacgcagccgagcagggtagggaagggaagtcgcaacctaggcgcggcgctctgcggagccgggcggggcggcccgggcggcgggggcgggtccgcgtcgggaggccgcgcctccctccctgaagatggctgcagaggcccagggccgcgctccgcgatgctgacaacgtaccctgggctgcgcccgggactggagacgcgggtcacctgcctccgcgccgcctggtctcagcagtccgggggacgcgcgctaccaagagtggagaatccgagtggggcgggcctagtcccggggctgggaagagatagtcgcatggactgggcgccaagaagcctgctgatcgcgcgcgccccacggccgccctggtgatgcagaggggtggcgtgagatgctcgtggagctgcggctggttcggagtggatgggcagagttcccctctgaaatttcatgaagatgcgtctcccactctccaccgaagtactcaacgaccagcacacgcatacaattttgatggagttttttgttttttgttatgtttttttagctcaccagaaactcagagagtaaagaaatactgttaaaggaagttcctaaactaggcagacagtataaccctgtgtggttttcttggtgcaagtgttagaaacaaaaccgataccaagcaaggaaggaggccagccaacgtcattggtcaacaggttggccaattctttccttcatttatccctctgaatgcctaggtgccagcctgagataggcactggattaccacaggggtaaacaagagcagggctcct

SEQ ID NO: 22062 - DNA, 1070 bp, Artificial sequence
  DNA replication origin
tgaggcgctgcggcggcggtggtggcggtggcagcggtggcggctgctcgtcctagcctggcgggggcgggggtctggaagatgggggcgggtggaacaacgggccggtgaggagcagccgccgccgtctccgccgtcgctggggcagctgccgcggtggtcgcctctggcagtgccgctagctttcaggcagtcgcctctcctcccgacatcccgccttgaggaggctgaggcggaatcgcggctggcggcggggggacggaccggccctgcagtggccgcagtgacagcccggacccggccctccgcccgctctcgcctcggcgcccgcagccacgatgaaccggggcggcggcagcccgtcggccgccgccaactacctgctctgtaccaactgccggaaagtgctgcggaaggtacgggttcggcccggggtcctgccggcgagggtcgcttcctgccggccggggctcgggcggctcgtccccgggcgcgcactgggggaggctgagagggatccccgggcaccgtccctccgcagggactgagaaagggggcgtgggttgagggcaggagggtttggactactgcggctttttatttccgccgggacagacccaagtctggaggggttgggatattttttcttcccttgttccttttatttggtgcctttgctctcctttacggctcatttccctaccttgctaccccgggtcggctccttgggcggagggcgggagggatccgttcgatcctcctccctgtgcagtttagctgttgatggaggtcggtgtgaaatcagagcagctgggtcggatcccgaggaacctggcccctctttgctgtggctaactcttgcgagtgttgtttttgtttattcggttgcttctgccttgcgcgccttgctcaacaacccccgttttcaaattgtttggatggtagtcctgtgtctgtagttcagtctcgaaaggaaccagtaaagcatcttgaactttatgcccatgggaaatgcaattcgacctggccagttcctgaggctggggttgggggaggagaagactgaggtg

SEQ ID NO: 22063 - DNA, 845 bp, Artificial sequence
  DNA replication origin
ggggggggtcagccccccgcccggccagccgccccatccgggagggaggtggggggtcagacccccgcccggccagccgtgccgtccgggaggtgaggggcgcctctgcccggccgcccctactgggaagtgaggagcccctcagcccggccagccgccccgtccgggagggaggtgggggtgtcagccccctgcccggccagccgccccgtccgggagggaggtggggggggtcagcccccccgtccggccagccgccccgtccgggaggtgaggggtgcctctgcccggccgcccctactgggaagtgaggagcccctctgcccggccagccgccccgtccgggagggaggtgggggggtcagccccccgcccggccagccgccccgtccgggaggtgaggggcgcctctgcctggccgcccctactgggaagtgaggagcccctctgcccggccaccaccccgtctgggaggtgtgcccaacagcttattgagaacgggccaggatgacaatggcggctttgtggaatagaaaggcgggaaaggtggggaaaagattgagaaatcggatggttgccgtgtctgtgtagaaagaagtagacatgggagacttttcattttgttctgcactaagaaaaattcctctgccttgggatcctgttgatctgtgaccttacccccaaccctgtgctctctgaaacatgtgctgtgtccactcagggttaaatggattaagggcggtgcaagatgtgctttgttaaacagatgcttgaaggcagcatgctcgttaagagtcatcaccaatccctaatctcaagtaatcagggacacaaacactgcggaa

SEQ ID NO: 22064 - DNA, 1002 bp, Artificial sequence
  DNA replication origin
cacctccctcccggacggggcggctggccgggcagggggctgacacccccacctccctcccggacggggcggctggccgggctgaggggctcctcacttcccagtaggggcggccgggcagaggcgcccctcacctcccggacggcacggctggccgggcgggggtctgaccccccacctccctcccggatggggcggctggccgggcggggggctgacccccccccacctccctcccggacggggtggctgctgggcggagacgctcctcacttcccagatggggtggctgccgggcggaggggctcctcacttctcagacggggtggttgccagcagagggtctcctcacttctcagacggggcggccgggcagagacgctcctcacctcccagacggggtctcggccgggcagaggcgctcctcacatcccagatggggctggcggggcagaggcgctccccacatctcagacgatgggctggccgggcagagacgctcctcacttcctagatgtgatggcggctgggaagaggcgctcctcacttcctagatgggatggcggccgggcggagacgctcctcactttccagactgggcagccaggcagaggggctcctcacatcccaaacgatgggcggccaggcagagaaactcctcacttcccagacggggtggcggccgggcagaggctgtaatctcggcactttgggaggccaaggcaggcggctgggaggtgtaggttgtagtgagctgagatcacgccactgcactccagcctgggcaccattgagcactgagtgaacgagactccgtctgcaatcccggcacctcgggaggccgaggttggcggatcactcgcggttaggggctggagaccggcccggccaacacagcgaaaccccgtctccaccaaaaccagtcaggcgtggcggcgcgtgcctgcaatcgcaggcattcggcagactgaggcaggagaatcaggcagggaggttgcagtg

SEQ ID NO: 22065 - DNA, 1469 bp, Artificial sequence
  DNA replication origin
atgaaaattcaggtgagaaatatgatattaattcagtgcataatgaacaagctttgaagatctttgatggattggaggagaaaataaccagaagcaggaaaatcagtaaggaatctttaattgtctcagtaagaaccagtgagcctgaggtgatgggaagaatggaaagaagtgacaaacttaagagcgttttttttcctcaagaacaatatggaaaatagactccattggacatgatagataatgggatataatggagaggttggaatgaggtaagcaaaatgccaaagataatatgggagttttcagtgtgaatactgagaaaagagcattcttattattaagggaaatagaaatgcaatgaagagggtatgtctgggcttgggggtgttatacctaaagcgctttcatttgaagccccacttacattaacttaagtagaacggaataatttattataaaaatataggattatttcccaaaacttaagtgcagaaagtatagctgaacctcacaagggaccagaatcaggaattggcagaaccaggaaggaaccacatccctccttggtgatgctgttatcccaagtttcacagtctcacatcctgacctctatttgctgcattcatgcttcttttcatgaacaagctttctctgcatcgccatgcccatgattgaagatggccatcccacagtggcagcttcacctctgagtttgtatcacttcccagttaaaccacaatgaactagtgcttgctactattccatacccttaggagatcatatctagccagctacagccaagggtgcaggattatgtagttcacacccactctggggtggagaaagttctcagaggaggtccatgtgctgaggggaaatgcctaagaggtgaggaaaagatgagctcagttttggacattgtgagtgggaggtgcatgtgaaatatcttagttggatatctatcaagctacaatttcaatccaaaatgagagagcaaattggcaggaggggaatcaaggctagagaaacagaggtgacaattaaaggcaaatcttgaaagagggggtgtacaatgaaagaaaggggccaaggactgaaccttggtgaatgcttctatttccaggacaaaataaggggtattagtaaaggatgccagtaaagaatacagaaaaagatttgtctaaggatattagaaaagaaagaggagaatacagagtcagggcatcaggaagagaggggaagagctgatccacatgaccacctgattattttatcctccaatccatggaagaccttcaaatcctgttctttgactacagagactgtgatctcctggaggacagggattgagtctgtctttctgtgggcttggtgcccagaggggagcaaggagctcaatatatgtctgttgaattgaataaagatggtgaagaaagagaaggttgtaagatttagctagaatgaga

SEQ ID NO: 22066 - DNA, 1234 bp, Artificial sequence
  DNA replication origin
cttagtacagaacaaaatgaaaagtctcccatgtctacttctttctacacagacatggcaactatccgatttctcagtcttttccccacctttccccccctctctattccacaaaaccgccattgtcatcctggcctgttctcaatgagctgttgggtacacctcccagacggggtggcggccgggcagaggggctcctcacttcccagtaggggcggccgggcagaggcgcccctcacctcccggacggggcggctggccgggcggggggctgaccccctcacctccctcccggatggggcagctggccgggtggggggctgacccccccacctccctcccggacggggcagctggcctggcgggggctgacccccatctccctcccggacggggtggctaccgggcagagacgctcctcacttccctgatggggtggctgccgggcggaggggctcctcacttctcagacagggcggttgccaggcggagggtctcctcacttctcagacggggcggctgggcagagatgctcctcacctcccagacagggtcgcggctgggcagaggcgctcctcacatcccagacggggcgggggggcagaggcgctccccacatctcagacgatgggcggccaggcaaagacgctcctcacttcctagatgggatggtggccgggaagaggcgctcctcacttcctagatgggatggcggccgggcagaaacgctcctcactttccagactgggcagccaggcagaggggctcctcacgtcccagacgatgggcggccaggcagagacgctcctcacttcccagacggggtggcggcagggcagaggctgcaatctcggcactttgagaggccaaggcaggcggctgggatgtggaggttgtagcgagccgagatcatgccactgcactccagcctgggcaccattgagcactgagtgaaccagactccgtctgcaatcccagcacctcgggaggccgaggctggcggatcactcgcggttaggagctggagaccagcccggccaacacagcgaaaccccatctccaccaaaaaagtacgaaaaccagtcaggcgtggcggtgcgcggctgcaatcgcaggcacgcggcgggctgaggcaggagaatcaggcagggaggttgcagtgagccgagatggcagcagtacagtccagcttcggctaggcatgagagggagactgtggaaagagagggagagg

SEQ ID NO: 22067 - DNA, 916 bp, Artificial sequence
  DNA replication origin
cccatcgtctgagatgtggggagcgcctctgcccccccgccccgtctgggatgtgaggagcgcctctgcccagccgcgaccctgtctgggaggtgaggagcatctctgcccagccgccccgtctgagaagtgaggagaccctccgcctggcaaccgccctgtctgagaagtgaggagcccctccgcccggcagccaccccatcagggaagtgaggagcgtctctgcccggtagccaccccgtccgggagggagatgggggtcagcccccgccaggccagctgccccgtccgggagggaggtgggggggtcagccccccacccggccagctgccccatccgggagggaggtgagggggtcagccccccgcccggccagccgccccgtccgggaggtgaggggcgcctctgcccggccgcccctactgggaagtgaggagcccctctgcccggccgccaccccgtctgggaggtgtacccaacagctcattgagaacaggccaggatgacaatggcggttttgtggaatagagagggggggaaaggtggggaaaagactgagaaatcggatagttgccatgtctgtgtagaaagaagtagacatgggagacttttcattttgttctgtactaagaaaaattcttctgccttgggatcctgttgatctgtgaccttacccccaaccctgtgctctctgaaacatgtgctgtgtccactcagggttaaatggattaagggcggtgcaagatgtgctttgttaaacagatgcttgaaggcagcatgctcgttaagagtcatcaccactccctaatcgcaagtaccgagggacacaaacactgcggaaggccgcagggtcctctgcctaggaaaaccagagacctttgttcacttgtttatctgctgaccttcccgccacta

SEQ ID NO: 22068 - DNA, 1798 bp, Artificial sequence
  DNA replication origin
tacttcctatcaaagctttccaatgccgcggttttcaaaaacctaagcattcgacactccaatttgagaaataccagtgaataccagtaactaaactggatggtgacatttgatgaggcgaaaacaatatttaaaatcaattccccctgtcgcctctccaaaagggcatttccacattgaagttccagtaattctaggtgacaggaagcgcgcgttctggctacgagcatcacacaacgaagttaatgtggatgggagtgggaggcactgcagggataggaaacagcataagcaacgactagtaagcgctcgagagacggcggactactattctgcaacgtctcttaaacacactggcgcgcctcacctgatctggcgagtttcctagaggggccgctgaacccacgtgaccaaaagagctacatttttgcaggccagggagtgggcagttatcccagccggcccttgggaatgttaggcaaccggggttggttgctacgccaaaaggtgaataagggctggggaacaggggcggccagcccagtttcactgggagccagagggtgcagcttcgacacagccacagtgaatggaagcttggggagcgcggggcaatctaggcattcccgccgacctccagaattgcgtcagaagctggactgacagcgccctgaaacgtgaggaaactcaaagaggcgcttagggccgacgtggggcccactcgcgccaactgcttcttaccgacaagtgagaaccagaagccgcagagacagacgccgccgccatctttcagcctgcccagggggtctccgcacttcgggggcggtctaggttctcgtgctcttctccaagactcgggagccgcccaccagcggggaccctaggctgaacccctgatggaaaagggcaagggtgctggtgctgggcttggaaacccctgcaacacaccccctcagggccgcctacgctcacagcttacacagaaagggcaacacgtcctaacggacgtctttcctagccaatcaaaacagcagacgtctttctgtagtaggagagaatccgcctcttccctggtgacgtcacaaggtagcgcgtaacggggcccgctggggcagacaacgccggggttacaggccggctctgcggggattctacggagggtcgggcctcctccagtaagaagcgtgggcgagtagtggtgtcgccagtggcaactgaagggagtaatggagataaaacaaaagcgaaggcgaagttaaagcactccacgagttccctcggattaaacgccggagagagcgtgaatttgcctcggggacgcctctccaggtgaagtatttaccttttggccaataacaaataggattaggagggacttaacgatttagtccaatagaaagcaagggaaaaaaagttgcggcagagaacgagcctttcgcgaacatttgctcaattggattggggcgctctcagccaaacctgggactggctgttagaaatagccgcgaccgcagacctttgggcggggcaggttcaaagcggatttcgcgcgctgagagctccgggatgtcattggccggcgacatcctccctttgtgggcgcttcctgcgtcgcggaagttgggagttgggaggagccatcgaatgacgcgatagccttcgcagccaatcagggatgggaaagggaggccgagaaggaagcggatccacggccgcacagctaaacagcaaccccctacccgcttcgtctccctccgccgctatcggggcctaagcgggagcggctggcacggcgtca

SEQ ID NO: 22069 - DNA, 1293 bp, Artificial sequence
  DNA replication origin
aactcagatgtaattttttttcaggaagccttctctgaccacttagaactgagttaggtggccctctcctgtgcttttgtgagacccagtactggcccattaggcagcctttgtcactctatatcacaattgctcatttgcttatacctctttcccattttaagtgctttgaaggctgggacatgttcattgtgaaattcccagggtatagcagactctccatagatgttttctgaattaaaaatatatgaatgattgaagaagcaatgtgaaggaaaaaatgaggacagaacttcctgctgtgaggcacatggtgtgaaaatgttggctctttccaaaggcaactggaaaaccaaagtgggggagaaaggcaaaggttgagcaacatttttgaagccaatgttgtttttatgggtgtgccaccttagaaggacctttggcaaatagaatgtcttaggaaagaaaagttagtggtgaatgatgatggagatcatgatgacaatgacgatgatgatggggctgatgaagatgatgatggggatgatgaagatgatggggatgatgaagatgatgacagggatgatgaggatgatggggatgaggaggatggagatgatgatgatgatggggatgatgaggatgatgatggggatgatgaagaataatgatggggatggtggggagcatgatggggatgataaggaggacgatgggggatgataagaaagatgatcgggatgatgaggaggatgatgaggatgatgaggatgatgaggatgatggggatgatgaagatgatgatggggatgatgaggaggatgatggggatgatgaggaggatgatggggatgatgaaatgatgatggggatgatgaggaggatgatggggatgatgagaaagatgatggggataaggaagatgatggggatgataagaaggatgatggcgatgatgaagatggtgaggatgatgatggtgatgatgaggatgatgatggggatgatgaagatgatgatggggatgaggaggatgatggggatgatgaacatgatgatggggatgatgaggaggatgatggggatgatgaggatgatggggatgatgaagatgattatggggatgaggaggatgatggggatgaggaggatgatggggatgatgataaggatgatggggatgatgataaggatgatggggatgatgaggaagatgatgtgcatgtgttggaaggcagggagaaggcacactgatggaataagagttctactagtattaatacttctcattttttg

SEQ ID NO: 22070 - DNA, 908 bp, Artificial sequence
  DNA replication origin
agtatgtggcatttagtaggtgcttaataatacttgtcaaatgaatgaatgaataaataaatgaatgaaaataattctaggccaggcggaattactggtggcacacatctgtaatcccagcactttggcaggccaagttcacttgagcccaggagtttgagaccagcttaggcaacatagtgagaccctgtctacacaaaaatgtttttaaagaattagtcaggcatgatgatgtatgcctgtagtcccagctacttgggaggctgaagcagaaggatcacttgagcctaggaggttgaggtttcagggagccatgattgcaccactgaactccagcctcagtgacagagcaagaccaactcagaaaaagaggagaggaggggagaggaggagacagaggtgagagaagagagaagagaggggagagaggaggagaggaggggaggggagaggagagaggagacaggagaggggagggggataagggagaggggaggagaggagacaggagaggggagaggggaggagggaagaggagaggagggaacagaaaagaattccataaaagtaacataggaggagctagaggaatttgggttgaggctgctaagaaaggctttatggagaagatgacatttgagctttgcattgaatatgggaaggtttctgacatggcgcaaatagaataaatagtttaggataagaaagaaagcttaaaggcccagaagtagccttgaaaaagtaacctttagacaggcaggaaaagagatcatcggccgggcgcggtggctcacgcctgtaatcccagcactttgggaggccaaggcaggcggatcacgaggtcaggagatcgagaccatcctggctaacatggtgaaaccctaacacggtgaaaccctgtctctcaa

SEQ ID NO: 22071 - DNA, 681 bp, Artificial sequence
  DNA replication origin
agcctcttcttttataagatgtggaccccagagagcctctggaaaactcaggcttcttatcagttaaggaatatcctataagcgaaggaaaacccaggagtgagcaccaacagaacatgatgagtaggcgcatgaaaccacccgaacacacccaatggcctttaaggtagtcaggtgacatcttggcctttttcattgccatccactctaccttaggccaaagcaaactctaccctcacaaaaggtcacaggaccacagccagaaccatgagaaagccaggtgcttaccgcaatcagggctgagttcctctggtcccctggggttgaagcgggcggctgctgctctccgtttatcccaccactgccaccattattgctactgttcagcaggtgctgctggtggtgatggtgatagtctggtgggggcggtggggctgctgttgctgctgcttgggaggccgcaggaggggcagcagggggcggtggaggggctgtagtggtggcagcagtggcggtggccttggtgtgtttgccagctttccttgccccctggccatgctgtacaaggctcaggagctgcaaggtgctttctctttcccggtctgagctctcggccctacctcgttcatatcgtccttcacagctcaggtggtgttggcggcagacagcgatccgagcccg

SEQ ID NO: 22072 - DNA, 1106 bp, Artificial sequence
  DNA replication origin
agccacctttttaagagtaaattgctgggcaggtgggggagggctagtcacggaactaaactgtaagccggaccaggtgtcaggagggcaggtgataaaaagattatagggtggagtagcagaggctgaggaagaattgggacctagcttggcctggcgaggagcagcctggggaggaggggagaggtcagatgggtctgtagaaaagaagattagaaagactcagccacgcttggggttggtactgaggggacaggcgggagggaaagaaagaagatttgggatgaggtgcactgggcacagagactaggaagggactgatgtgtaaaagaatgcctggatgtcaggcatctcagaccatttgcctatttttcaacaaaaattatttaggttttccaggatggaaaaattcaaagtgccattttctggctatttggaactactgtcgagtttgtattggggtcaagcagcattgcagaagaaaataatgcatttaggttttaggtcaggtgtgagttgaagaggttttaagtttttaagaacacaggccaagggagtagaaggaggaatggagggtggaaggttgcccatagtgaaggaagcaagcctagagaaaagagagtagagaaacggagggaagggtcgggggttcttatcttccagaaaagtgggaaaaggggttggggcgcagagataagaggtccaggcatggaaataagggattggggcacagagatataagaggttggggtgtggaaataagggattggggcacagagataagaggttggggcacagaagtaagggattggggcacagagataagaggttggggcgtggaaatggattggggtgcagagataagaggttggggtgcagaaataagggattggggcacagagataggttggggcatggaaataagggattggggcacagagatatgaggttggggtacttgcccctcctctagaaaagcggaacttgccactaagagtgaaggagaaggggttgaggggtacttgccccttccccagaaaagcaggacttgccgctaagggtgaaggagaaggggttgaggggtacttgcccctctcccacaaaag

SEQ ID NO: 22073 - DNA, 999 bp, Artificial sequence
  DNA replication origin
aggtctctggttttcctaggcagagggccctgccgccttctgcagtgtttgtgtccctgggtacttgagattagggagtggtgatgactcttaaagagcatgctgccttcaagcatctgtttaacaaagcacatcttgcactgcccttaatccatttaaccctgagtggacacagcacatgtttcagagagcacggggttgggggtaaggttatagattaacaacatcccaaggcagaagaatttttcttagtacagaacaaaatggagtctcctacgtctacttccctctacacagacacagcaacaatctgatttctctgtcttttccccacatttcccctttttctagtcaacaaaaccgccatcgtcatcatggcccgttctaaatgagctgttgggtacacctcccggacggggcggctgccgggcggaggggctcctcacttcacagacggggtggccgggcagaggcgctcctcacatcccagatggggcagtggggcagaggcgctccccacatctcagacgatgggcggccgggcagagacgctcctcacttcctagacgggatgcggccgggaagaggcgctcctcacttcccagactgggcagccaggcagagacgctcctcacttcccagacggggtggcggccgggcagaggctgcaatctcggcactttgggaggccaaggcaggcggctgggaggtggaggttgtagcgagccgagatcacgccactgcactccagcctgggcaacattgagcactgagtgagtgagactccgtttgcaatcccggcacctcaggaggctgaggctggcagatcactcccagttaggagctggagaccagcccggccaacacagcgaaaccctgtctccaccaaaaaaatacgaaaaccagtcaggcgtggcggcgcgcgcctgcaatcccaggcactcggcaggctgaggcaggagaatcaggcagggaggttgcagtgagccaagatggtgg

SEQ ID NO: 22074 - DNA, 976 bp, Artificial sequence
  DNA replication origin
gccgggcagaggctgcaatctcggcactttgggaggccaaggcaggcggctgggaggtggaggttgtagcgagccgagatcacgccactgcactccagcctgggcaacattgagcactgagtgagtgagactccgtttgcaatcccggcacctcaggaggctgaggctggcagatcactcccagttaggagctggagaccagcccggccaacacagcgaaaccctgtctccaccaaaaaaatacgaaaaccagtcaggcgtggcggcgcgcgcctgcaatcccaggcactcggcaggctgaggcaggagaatcaggcagggaggttgcagtgagccaagatggtggcagcacagtccagcctcggctcggcatcagagggagaccgtggagggagagggagagggcaagggagaccatggggaagagggaggggaagggggagggggagggagagggagagggagagcttgggtcagtttcaaagggaaaaataatattcttaacttctgggagcttgaattctactggacaaacaaccgtaaaacatcagcaatgatgtaagataattgctgtgatagaagatgatgtacaagcacagacacttcaaacaggggaagtaagcaatattttaggaagagatccattcagagcagagattcaagtgacaaagtgttttcagatttccagaaattctagtgaggggaaagcatttcaaatggaggaggcagtgtgtaaccaggtatacaaatacatacaaatagacaaccgcaaagtatatatgtagttttgtcatgtgtgacaaagtggaggatgaactggggtagtgaagtaggggtcagactatgaagggaaaacagattgaaagtgtctcaacagattccactggcttctctgatattgcctaagtacaagaaaacctgacaagactctataatcaaagtcactgagctgttagaagtgtttttttttcacatg

SEQ ID NO: 22075 - DNA, 1777 bp, Artificial sequence
  DNA replication origin
gcagctgccgagtgcgggctgccaataaggcgtgattgagaggcaggataggcacgtggatgaaatccatcaccgtggtggccagcggggagcgcccgggcgccatcggcgcgtcctgctccaccagggcgaccctgggcgctgagaagcgggaatcttccttggggaccagggcgacgcctcctgctgccgcccccggcgggacagccgcggctcctcctccagccgccgcgccacccagagcccgaggtttgcccttcagaagcggacccgcagactcctcggactcagagccatcctcctcctcaacctccaccgcagcggcctgcggagacggcttcactggggccccggaccagtgagggctctcagaggccgggagcagcagctgccgggctggtgacaggccccggggcagcactttatgggcagctgccgtcccggagctgtctccaaccttgcacccggaccggctcatgagcggggacaacacccgctgggtggcgggggcagccggtggatcttcgggaagttcggggccaaacaggcaccaagagctggtgacctcgcaggcgggagggctgggttggctctgcccgggacctgagggcgccaacagagtgtccaagacactgtccagcagtccgctgtccttttctgggggactagaactgctgcctccagcaccccttgtagcttcagctctggaatatgcgccctccacgtccgacagcgactgctggtcctgcgtcttttcgtcggaggggtcctgtccctggcagggccgagggaagagtagcccgtccagggagataggtatggccgaaacttcaggcaaggtgtccgaggtctggctccccgggaacggacctgcggctgggcgacacagcagtggggatccgacctcgggggagggcgggccgcccgccacgtggggagcccggggaccctttgccttcagctcagtcatgacgactggactccccttttctcctcccccgtctccaggaggagggaaaagggaaggaggagggggtttcgggaatataggggcagagggaggagaaagtgggtgttgaatgtggctggaccggagggatctccacctcctgggtcgggggcgggggagggcggcgctggtcagctcctgcccttggcctccatcctgtcgtcaggggaactgtggctgtcgtttgtcccagcgagcggcaagtggggagcgcaagaaaaagtagtaattgttaggagatctcgtctcctaactcggggagttctccaagagagttctccaacttctgtccgaggactggagacgcagagtactcacaagtccggcacttgagtggctgcggctgcgacggcaatttagtgacacgcggctcctttatctcccgactttttctctggcatcaaactcgtgcatgctgtgaagctctcagtccctcgctgagttccactgccccctcactaaaaccctggggctagtcggacctctcggtacagcccattcccaggaagggtcggacttctgctggctccgtactgcgggcgacagtcatctccgaagatctcagatcccagtagtgcgggagcactagccgcctcgggttgtagatttcactcaaatgacaagtgaagctagttctcattgagaatgccacccacacgcacaaatacaacaaggcttaccccgattagtgacagctgtggactggccagacagctttctaacaacgcctcctcctctagggaggccccgcccaaagcccctccctac

SEQ ID NO: 22076 - DNA, 1404 bp, Artificial sequence
  DNA replication origin
ccccgggccagtgggcgagccacttgcggcgggcgtctgcaccccctgcttcaccgtcgtcccctgggcaccggtctgcccaggtccagttcggccgctgacgcgaaccctccgcaccgggtccccgctggaactgcccactcggctcccccgggagcggggcccaggccagtcgggcgttcccgccatgagccagagcccggcgttcgggccccggaggggcagttctccccggggcgctgccggagccgctgcgcggcgcaacgagagccaggactatctgctcatggactcggagctgggagaagacggctgcccgcaagccccgctgccttgctacggctactacccctgcttgtgagtgccggcgacgcggggcggatcgggcgcgggctgcgcggagggaggttgtgcgctcgcaggagtggccgagtccgtccgcgcgcgtcctgaacccgcgtgtgtacctcctaggacggtgctgggaggtccgcgagagccagggctgggacctgagtgagtggaggggcgcgcggggagtgggggaggcggggttgtctaggtttgctcctcgtaggtacgcatggatatgtttgcccacgagagtgagaccgcatagtaacaccaccattgcaggtgattagatgggtggtcgatttctccagaccccttcatcctgcgctctacaagagacaggatcgctacgtaacaggcgggatctgaacagggggctgattcagatgtgcgcccgggtgactcttagcctatgtgggggagagatgactagaactccaagggttggagctgcctgggtgctgggtgcgcccggcggtctccacgcttggcttagcgtttcgggctgagcgctgaggtccttggaccgtgggacagccaaagttagaccaggacctctccccggtcctggggccttggagtgaagacagaaatagaaccaataggactctccaccggcggcgcgaaccttttcacccggggcgtctggggagacgagcctgttaggggctgggagactcacgggctatagaagtgagggcgtcgggtcgtttgtattgggctgtgggtaactgcaagcttttgtttatgaatctagggtatttttttttttagctgggtgggtggcgggaggggaggtagggagtaagcagagtggactccagaagaaaagactccgcttccccgacaccgctgtgaccacatgtgcagcgggcagatagcatttctgtcccattgcccctttgggtgattgggtagtcaagtttcctgacttgtcacatccacccgcaagcggtttcccgaggttctcagctctataaacagctttagttggagggaggattccaccccataggcgcctggcagaccctcctgatagatgggtgctgt

SEQ ID NO: 22077 - DNA, 1180 bp, Artificial sequence
  DNA replication origin
aacggggctgacgacccccgcagccacttacccgccatggctgcgctttcatgggcggcccccagcagcgctagcacctgcagcgtccccaggagcagcgcggcccaagcacctcgcgcgccgagtcccattgttccgagggcaggatgcggcagcctcgtgggctcccagccgaggtggcggcggcgagagcggctcctctgcgcagccggcgccggctccgcttccccttcggccgcgcacgtttcccctcccgccgcttgccccccgaatgaccaaatagggcgcaggagcggggcctggagggggcgtcgcgtgcgcagccggggcggcggggccgggctgggtggcgcgggggcgggctcggggttctgggcgtggcgactcggctcgcggcctccctcgcaggcgcgcgcttgggaaccccagaaaccgcgagccgtttcctttctcttcggaaatggcagttttgttgtcctggatgaaggcgagcgccgctgcctccctgaatgctgagcacgctggcttcgcggtgcccggaaggaagcctttgaagagtagttttgcgggcagggaggggacaggggtgcgtgcgactcagagtgagagggaggagttgcagggcaaaggcgggaggagggggagattctggagaggaacttgaggggatgggattcactctaaggagtcctgggcggtcggagctttcccctcgcgtgacccagcctaagggggaagtggagaaaaacagctcgacagatttgttgcttaaattcaaacgtaaaacacctacgatcttcttatcccagttgtacttcatcttctccacgggttccctgtatctctgattaagacacgagattagtggagtgggcgggtgggggcgcgcgcaggagttggtagcaactctcagtgaaatacagtagagccatggaaagcgggggctgcattaatccaaccagccttttctctccttgtgccctgctgtcccagttcagatgaaatggccagttttgaacagtttttggctgagttccttttaaacccttggagccaatgctaatcacttgtcttgacttgaagtgcttgtaaagtctgcattttcatcgtgctcagaactctgaagtgacatagctacctgtggctaatgcatgagaataacaaaggctgagtcctggct

SEQ ID NO: 22078 - DNA, 885 bp, Artificial sequence
  DNA replication origin
aagatggaataagggttagagagaagtgatattgctggttttgaagatggcagaggtggaaatacaggccaagggatgcaatagcctctagaagctggaaacaacacagaaactgattctcctctatagctcccagaaggaacacagcactgctaacatattgattttagcccagtgagacccataccagacttctgacctgcagaatcgtaaggcaatgaatttatcttgttttgagccattggacgtgtggttatatgttacagcagctgcggaaaactaatccactgcccctgacaagccaatgtcaccaaagggcatatgtggtgtctttctgatattttaggttaaaaaataaattcaggttgagaaccattgatcaagaggagtgagaacagaatctagtggggactatatagatgtgagacagtttattgagatgaattctcacagactccaacaggcgtatgtgggtgacagctggttgggctccaagggggatgggagccagatgtgtggtgtgaggagcaggtgtgtgatgtgaggaggagcaggtgtgtggtgtgaggattgggtgtgtggtgtgaggaggagcaggtgtgtggtgtgaggagtgggtgtgtggtgtgaggaggagcaggtgtgtggtgtgaggagtgggtgcgtggtgtgaagaggagcaggtgtgcggtgtgaggagtgggtgcgtggtgtgaggagcgggtgtgtggtgtgaggagtgggtgtgtggtgtgaggaggagcaggtgtgtggtgtgaggagtgggtgtgtggtgtgaggagaagcaggtgtgtggtgtgagaaagagccggtgtgtggtgtgagaaggagcgggtttgtggtgtgaggagcggttgtgtggtg

SEQ ID NO: 22079 - DNA, 1218 bp, Artificial sequence
  DNA replication origin
gtattcctgtagctcaatgatctttattttgaattctattatcttctttatccatattatgaattctatttctgtcatttcagccatctcaatgtggttgcttgctggaaaggtgatgaagttgtttggaggaaagaaggcactctggccttttgagctttcaggtttcttgggctggttctttctcatctttttgggcctacctatcttcagtctttgaggttgctcacctttcgatggtttttttgtttttccttttattctatttaatgacattgaatgtttgattgaggtttaagctggatttagttagctgcttttgtttctggaagattttagtgggccagcgctcatctcccatttcctggactgtgtgccctaactctgggggactcatattgggccccaactttgatctctggctccttggggttaggaatccactgtggttgggaatccacatgtagggcagtcagggtgggtggggtgggaggggcaaggcgctctgtgaccgctggtcactacactgcgataggtggtgttacctaagtgtttcatagtgcggttacagtgggattcatccctgtttgcaagtgccagcagcagtggtagcagcagctgtgtcagggtactaaatggtcccagagtgcctacctttctgcttgcattaaccaggtgggggaggcagcacagctgcggggagggcatgtggggcccctgcagatgactgtgtgcatgatcacactgcaggtggtgttggctcaagggcagggcccctgtgggtgcaggtgggtgccttctctgtgaccctgcaagcaggagcggtcactcaggtctggggagcatcttctcttctctgcacttagttccattccagtggcagtcttagcacaaaagtcagccactagcgggggtggggccagctggttctctgcctgccaaggctctttttgcgatggtggtgggtggtgggaggttgggcagactgcactttcacatgctggtatggcaaggaaagcaaaagctggctatgcatacatgcaccgcaaagatgtgtggagttgctgtggatcgtggggaagctggagtgtggggagggagcgcatgggctggtgcacagctatggagacagctctgctggagctgtctgccagtcaggcacagtctgctaatgcaggtcccctgggcacctgaggctgccctgcaagcaggcgtggc

SEQ ID NO: 22080 - DNA, 1183 bp, Artificial sequence
  DNA replication origin
gggctcctcacttcccagtaggggcggccgggcagaggcgcccctcacctcccggacggggcggctggccaggcgggggggctgaccccccccacctccctcccggacggggcggctggccgggcagaggggctcctcacttcccagtaggggcggccgggcagaggcgcccctcacctcccggacggggcggctggccgggcggggggctgacccccccacctccctcccggaccgggcggctggccgggtgggggggctgacccccccatctccctcccggacggggtggctggccgggctgaggggctcctcacttcccagtaggggcggccgggcagaggcgcccctcacctcccggacggggcggctggccgggcggggggctgacccccccacctccctcccggaccgggcggctggccgggtgcgggggctgacccccccatctccctcccggacggggtggctgccgggcggagacgctcctcacttcccagatggggtggctgccgggcggagaggctcctcacttctcagacggggcagctgccgggcggaggggctcctcacttctcagacggggtggttgccaggcagagggtctcctcacttctcagatagggcggccgggcagagacgctcctcacctcccagacggggtctcggccgggcagaggcgctcctcacatcccagatggggcggcggggcagaggtgctccccacatctcagacgatgggcggccgggcagagacgctcctcacttcctagatgtgatggcggctgggaagaggcgctcctcacttcctagatgggatggcggccgggcggagacgctcctcactttccagtctgggcagccaggcagaggggctcctcacatcccagacgatgggtggccaggcagagacactcctcacttcccagacggggtggcggccgggcagaggctgcaatctcggcactttgggaggccaaggcaggcggctgggaggtgtaggttgtagtgagctgagatcacgccactgcactccagcctgggcaccattgagcactgagtgaacgagactccgtctgcaatcccggcacctcgggaggccaaggctggcggatcactcgcggttaggggctggagaccgcctggccaacacagcgaaaccccgggagatctgttttatcat

SEQ ID NO: 22081 - DNA, 944 bp, Artificial sequence
  DNA replication origin
gggaagtgaggagcccctcagcccggccagccaccccgtccgggagggagatgggggggtcagcccccccacccggccagccgcccggtccgggagggaggtgggggggtcagccccccgcccggccagccgccccgtccgggaggtgaggggcgcctctgcccggccgcccctactgggaagtgaggagcccctctgcccggccagccgccccgtccgggagggaggtggggggggtcagcccccccgcctggccagccgccccgtccgggaggtgaggggcgcctctgcccggccgcccctactgggaagtgaggagcccctctgcccggccagccgccccgaccgggagggaggtgggggggtcagccccctgcccggccagccgccccgtccgggaggtgaggggcgcctctgcccggccgcccctactgggaagtgaggagcccctctgcccggccaccacccggtctgggaggtgtgcccaacagctcattgagaacgggccaggatgacaatggcggctttgtggaatagaaaggcgggaaaggtggggaaaagattgagaaatcggatggttgccgtgtctgtgtagaaagaagtagacatgggagacttttcattttgttctgcactaagaaaaattcttctgccttgggatcctgttgatctgtgaccttacccccaaccctgtgctctctgaaacatgtgctgtgtccactcagggttaaatggattaagggcggtgcaagatgtgctttgttaaacagatgcttgaaggcagcatgctccttaagagtcatcaccaatccctaatctcaagtaatcagggacacaaacactgcggaaggccgcagggtcctctgcctaggaaaaccagagacctttgttcacttgtttatctgctgaccttccctccactattgtcccatgaccctgccaaa

SEQ ID NO: 22082 - DNA, 869 bp, Artificial sequence
  DNA replication origin
cccggccgcgaccccgtctgggaggtggggagcgtctctgcccagccaccccatctgagaagtgaggagaccctccgcccagcagccaccctgtctaagaagtgaggagcccctctgcccggcagccgccccgtctgagaagtgaggagcccctccgcccggcagccaccccgtctgggaagtgaggagcatctccgcctggcagccaccccgtccgggagggaggtgggggtcagcccccacccggcaggccgccccctccgggagggaggtagaggtgagcccccgccaggcaggccaccctgtccgggagggaggtggggggtcagcccccgcccggccagccgccccgtccgggaggtgaggggcgcctctgcccggctgcccctactgggaagtgaggagcccctctgtccggccaccaccccgtctgggaggtgtacccaacagctcattgagaacgggccatgatgacaatggcggttttgtggaatagaaaaaggggaaaggtggggaaaagattgagaaatcggatggttgctgtgtctgtgtagaaagaagtagacatgggagacttttcattttgttctgtactaagaaaaattcttttgccttgggatcctgttgatctatgaccttgcccccagccctgtgctctctgaaacatgtgctgtgtccactcacggttaaatggattaagggtggtgcaagatgtgctttgttaaacatatgcttgaaggcagcatgctcattaagaatcatcaccactccctaatctcaagtacccagggacacaaacactgcggaaggctgcagggtcctctgcctaggaaggccagagacctttgttcacttgtttgtctgctgac

SEQ ID NO: 22083 - DNA, 1312 bp, Artificial sequence
  DNA replication origin
cacagggctgggggcaaggtcatagatcaacaggatcccaaggcaaaagaatttttcttagtacagaacaaaatgaaaagtctcccatgtctacttctttctacacagacacagcaaccatccgatttctcaatcttttccccacctttcccctttttctattccacaaaaccgccattgtcatcatggcccgttctcaatgagctgttgggtacacctcccagacggggtggtggccggacagaggggctcctcacttcccagtaggggcagccgggcagaggcgcccctcacctcccggacggggcggctggccgggcgggggctgaccccccacctccctcccggacagggtggcctgcctggcgggggctcacctctacctccctcccggagggggcggcctgccgggtgggggctgacccccacctccctcccggacggggtggctgccaggcggagatgctcctcacttcccagacggggtggctgccgggcggaggggctcctcacttctcagacggggcggctgccgggcagaggggctcctcacttcttagacagggtggctgctgggcggagggtctcctcacttctcagatggggtggctgggcagagacgctccccacctcccagacggggtcgcggccgggcagaggagctccccacatcccagacaatgggcggccgggcagagacgctcctcacttcctagatgggatggcggctgggaagaggcgctcctcacttcctaggtgggatgacggccgggcagagatgctcctcactttccaaactgggcagccaggcagaggggctcctcacatcccagacgatgggtggccaggcagagatgctcctcacttcccagacggggtggcagccgggcagaggctgcaatctgggcactttgggaggccaaggcaggcagctgggaggtggaggttgtagcgagccgagatcacgccactgcactccagcctgggcaccattgagcactgagtgaacgagactccgtctgcaatcccagcaccttgggaggccgaggctggcggatcactcgcggttaggagctggagaccagcccggccaacacagtgaaaccccgtctccaccaaaaaaacacgaaaaccagtcaggcgtggcggcgtgcgcctgcaatcgcaggcactcggcaggctgaggcaggagaatcaggcagggaggttgcagtgagcagagatggcggcagtacagtccagctgcggcttggcatcagagggagaccgtggaaagagagggagagggacaccgtggggagaggggagaggg

SEQ ID NO: 22084 - DNA, 821 bp, Artificial sequence
  DNA replication origin
cagaggctgcaatctgggcactttgggaggccaaggcaggcagctgggaggtggaggttgtagcgagccgagatcacgccactgcactccagcctgggcaccattgagcactgagtgaacgagactccgtctgcaatcccagcaccttgggaggccgaggctggcggatcactcgcggttaggagctggagaccagcccggccaacacagtgaaaccccgtctccaccaaaaaaacacgaaaaccagtcaggcgtggcggcgtgcgcctgcaatcgcaggcactcggcaggctgaggcaggagaatcaggcagggaggttgcagtgagcagagatggcggcagtacagtccagctgcggcttggcatcagagggagaccgtggaaagagagggagagggacaccgtggggagaggggagaggggagaggggagagggagagcctgagcctttttgctccattttaaataaactacagttgatggcctagtaaaaggcacaggtgtgaggatggtatatccttgtggaaaagctttgggatgcctggtcttcttgctgggtaagaagcactgtgtgcttcttacatccccaaagcagatccctaactctggtcccagatgaaggctttcctgctaaatgcagcagtcaggaatggttacaagggacacagtacaaccagtcactaacttattacttgagacatgcaaaacaactagtcccagtgttctctggcaaatttcatccacagtatattgtcttgctttcacttttaaggttcagtcttaaaactacaggagcacacactacagaatgttcttgctg

SEQ ID NO: 22085 - DNA, 999 bp, Artificial sequence
  DNA replication origin
cccgccaccgccgcctccgccgccgctcgcgtcctcgccgccaccgcctcggccgctgcagctccgccggcagcatgtctcgaaggaagatttcgtccgagtccttcagctccctgggctccgactacctggagaccagcccggaggaggagggggagtgccccctgtctaggctctgctggaatggcagccggagcccgcccgggccgctggagcccagcccggccgcagctgccgctgccgccgccccggccccgaccccggctgcttctgccgccgccgccgctgccactgccggggccaggagggtgcagcgccggaggcgggtcaacctggactcgctgggcgagagcatcagccgcctgacggcgccctcggtgagcggggggcggaaggggggaccgccttcgggggagagaacgcggatctgtaaagttggcgctgggcgagccggggcgcgagcgcagagcccgaccgctggggggcggcccggccttaccctgcacggcctagggttccagtggctccggcgacagaggatcccctaggctagggcggaagaggggactacagcactgggaaggaataagattccactcctttggggtatcctgattcgggggcctgtctgcccacctctagccttgaaccctacttcaccactgttccccctggacagccccagtgctgcttcacacccacctgttttctttcccctaaactttcccaggcactgtgttctgcagttcagcttccctgtctttcatcctgttctccagcatcccaaaggagccccaaccccttccaggaaacccttcctctccttatttcccacactctcttggtcttagcgtgaccttctctgacatctttgaattccacaggctatctgcattctatgttgcatcctttttctcacatcttcagatactttttgccagatacttttctgagttgccttctgttcaagtaatctctaatctcgagttgtcctcaccc

SEQ ID NO: 22086 - DNA, 1654 bp, Artificial sequence
  DNA replication origin
ccgggcgggctccggctgccattccagcagagcctagacagggggcactccccctcctcctccgggctggtctccaggtagtcggagcccagggagctgaaggactcggacgaaatcttccttcgagacatgctgccggcggagctgcagcggccgaggcggtggcggcgaggacgcgagcggcggcggaggcggcggtggcgggaccggcaagcgacaacgttaagcgcgtcggggccgcggggcgctgcggtcgcgcccggcggggcgggagtccccggggccgcggagccccccgagccggctgctcatggcgggaacttggggcgccgccgcaccttggggcccgggctcggcggcggcgccgggctgggctgggggccgccgccgcctctgctgctgctcgcgcggcgccgcctcagcgcccgcctcggcgcatcgccgtgcgccgcgctcccgctcacggggaggctccgagagtgtgtgaccgcggtcggcggggcggggagggctgcggcccaagcagaaggggaggcagaggcagaggcttctgccgcctgcgcgcctatctcgccccctttccctctctgctcccgcctctctccacttgctgccctgcctccctccttctccctttatccccccgcccccccccatgctctccctccgcgggaatcacgtgtcgccatcatactcattgggagtctctgcctcgcctgtcgccacgtttcaggagcaacgaggacacttcgttgctgtcctctgcgcgccctccctgctccgaggaggtgcgcacaggagctcgggtcggactgagggccccaaccccaaacgccttatcctcggccctcgggagcagatgggtcccggcggcgctggtggggagaagggctcggggctggggggcgagaggcctccccctggagccaccttggggaaacctgacagtgtgaagtgggggttagggtccatgttgtcctttctccgagtttatttaggaagttccgaggcaaaagggaaaggccaagcgtccagccagcccactccagaggagacgctttcaggggaagggaaggacaggggcaacattttggcgcccatcctgctggagcagctcctggggacttgtgttccccgcctcgtgcgaggccgtgtgggcgcggagcgagcccagaaaggggcggcagtgaggacagcgtctgctctgacaagacagcactgttgctgagcctcagccgggcggggtgcgcggggctcccggctccgctggctcctcactagtgctggacagctccgcttgccacctatagccgcctttgcaggcgttgagaactggagaacagttcctcctcaaacgacctagcacctggcccgggggaaaccggggaatgatcccacgtccctcatcctcagggctctttgcgccaaatatgcgatctgtttgcacctgactgcaaatgctgctcagaaagctaaggggagtagggataaatgcttctcgaactgactcgccacagcgcgagcatgtcttgccgcgagttttcagctgtgcggcttcattccaaagcttatctctttgcaaaccagtccttccagcgcctgaccccactgccccttgccttagccccagaaaactctcatactggttctgagg

SEQ ID NO: 22087 - DNA, 952 bp, Artificial sequence
  DNA replication origin
attcccgttccctctctgcccccgatgcttagcatttctgctgcctcccaggcacagcgcagcttgcgtgatgcctcgcgtcctcgccgcacctctctcctccccaagggcattcgcccctactccctaggctcctctggggtcgccaatcacctggactctggcggcggtaggctcagcagctcccggcgcgcggcggcgtggtcttcatctccgccttccccaggcgctccggctacgcgctccgcggcggcgagcgacgcgctcggtcccgggcgccgaggctggacaggggcggccgcggctgccgcactggctgcgggcgcggaaggggcgggggcggggcaggaatctgggtcgcgtggagcggagcaagccgggatgcacccggggcggctggcggcgaggaggcgaccgagagcagcgggggagggcgtgcagaggcttccctgggagcacgaagcgggcggctactgagcatgcccagtccgggagccgggggcgcgggcgcggtgctgggggagagagcgcggcacccagtgccggaatctggggggaaagggttaaatctgcggaccccgctgctgtgggaggtggctggtgtggcccagtttaattgctcccgggtggcctccctggaggagcccacgacaggaagatggtgaacctgagatgacctgtcaatgggattcccagacagtccgggcaaggtgtgttccccgccctctccctggataattgtccagaagtcaaactttgttttagttcagctccaacctccctcgtctcaccgagcacccagtgactcttccaatcctgatccccacccttcacctgccttcccgggactgcagaaccctatccctcaccccaaccggcagcccccgcctttcccactcctggcccagtcgggtcagattctcaaagagccagctctttaattaggtgtaat

SEQ ID NO: 22088 - DNA, 961 bp, Artificial sequence
  DNA replication origin
cgaccccagaggagcctagggagtaggggcgaatgcccttggggaggagagaggtgcggcgaggacgcgaggcatcacgcaagctgcgctgtgcctgggaggcagcagaaatgctaagcatcgggggcagagagggaacgggaatgaaagtgcactctgccttggtgcaggggctccggggtcacccaggacagtgatttccccttctatcctgtcctcccaattaacacccgagaggctgcaggtcggcgcgagaggctgtttgcatctcggcccgggcgtaggtcgcctagcgacctaacgccgagggctcggggaagggatcccagacagagccaaaatggaaggcgggacaagggcggcctggctggggcgaggggctggtctgggtccctgggaaccccttgccttgtgggcttcggtctccagggaggagctaggcagccgggctgcggggccgccggactgtggggtcctccgcgcagcgagctgggaggagcggtcggctgggctgttgagctgcgcctcctccaactgctgggaaactccgcacttcaatattggagcatctctttcccgggcaggtagaattggacagccgagtggggagtgacagctgacagctgacggggctgttaaaagcagagcagtggagtgtggtggtggggtgagctgttgtgggtgcttttttttgttttccaagtgtgggtacgggctgttctgactcagtgtttatgctcaacctctaagcggcgagttcggtaacacatcttatgaatatttcaggaacgacctcacgggctcacttgcttcagatcaagtttaatgaatatgttgtcagcctttctgctctgcacagtgccctgagctttccacatttcatccctttcccccaccacctaggaaaatacgctgctaacccccagtgggccgtagattggtactatcaattgagtctgtc

SEQ ID NO: 22089 - DNA, 1613 bp, Artificial sequence
  DNA replication origin
gcgcggtggctcacgcctgtaatcccactactttgggaggcggaggtgggtgcatcacttgaggtcaggagttcaagaccagcctggtcaacatggggaaaccccatctctactaaaagcatgaaaaaattagcctggcgtggtggtatacatctgtaatcccagctacttcggaggctgaggcaggataatcgcttgaacccgaaaggttgaggttgcagttagctgagatagagcctctgcactcaggcctgggtgacagaatgagactctgtcaggaaggaaggtgacagaatgagactccgtcaggagggagggagggagggagagaaaagagggagggagactggagcacagagaagttaagtgacttgtccaagaagggagggagggagggagagagggagaccggagcacagagaagtgacttgtccaggaaggaaggaaggaaggcaggaaggaaggaagggagggagggaaggaaggaagggagggagggagggagggaaaagagggaaggagactggagcacagagaagttaagtgacttgtccaagaaggaagggagggagggagactgaagcacagagaagtgacttgtccaggaaggaaggaaggcaggaaggaagggaggggcggagggagggaactggagcacagagaactgatttgtccaaggtcacccagcagaaggaagggaggaaggaagggaggaaggaagggagggagggagactggagcacagagaagttaagtgacttgtccaagacggacggacacggacggaaggaaggaacaaagaaggagggagggagggagggagggaactggagtacagataactgacttgtggaaggaaggacggaaggaaggagagagggaacgaaggaaggagagagggaaggaaggaaggaaggagagagagggaaggaaggaaggagagagggagagagggagggaagggagggaactggagcacagagaactgacttgtccaaggtcacccagccaggatttgagtccagaatgtgagtgcccttagccattacactgaattgcctcccagctgagaacttttaacaaatgtatcaggacatacacaactggatgctacaaggtggttttcggccaactttcccctttaaacacatgcatcaatttcaaactatttatatgataaaaaatgcttacacctttatcgatctcgtttttaaaatggtatggcttttcaggactatctttcacaatcgttaaagggaaattcgctttgttaatatgaaaaaaaaatcaaatatctgtttcatgagttgtcagtggccaacgctgtttagactacggcttgaacgcatcaccccttaaagatcatcttgtggccttgggcaaattgcttagccttctttgtttctccagcggcaaagtggatataacaatagtaccatctcctaaagtggtgaggattagctgatattatccatataaattgttatgcacagtacctgacacagagcgagtgcccaataaatgtctttcactatttaggtcctgggttctctcatttccagagtgcaagtcctccagcaaccacagaaacgctttctagagtcgctgcccac

SEQ ID NO: 22090 - DNA, 912 bp, Artificial sequence
  DNA replication origin
gcagcagtacagtccagcttcggctcggtatcagagggagaccttgcaaagagagggagagggagaccgtggggagagggagagggagggggagggggaggaggaggggcaggggcaaaagggaatctcttttgtggttgggtctagggttgtgaggctaatgaatgcaacctccttggcatggtgggaagaaagcctgcctgagaatggaaccaacctagaggaagcagtgctttttgcttttttttttttttttgacacagagtcttgctctgtcgcccaggctggagtgcagtggcgtgatctcggctcactgcaagctccgcctcccaggttcacgccattctcctgcctcagcctcccgagtagctgggactacaggcgcctgccaccacacccagctaatttttttgtatttttagtagagacagggtttcaccgtgttagccaggatggtcttgatctcctgacctcgtgatccgcccgtctcggccacccaaggtgctgggattacaggcgtgagccacggtgcccagcccaatgctcttaaacccaggaaaaaaactgggttcttgtgacatcatttcatcccctgcatcaaactatagccaaagcaagaggtactgttggattttttaaattacatgagtgattataaattgaagccttaacacagaaaggcaaatatcacatgttctcgcttatttgcgggatctaaaaatcaaaacaattgaagtcatggagatagagaatagaaggatgtttaccagaggctggaagggtagcaagggggcagcaatggtggggaggtggaggtggttaatggaaaccaaaaaaaaaggttagtggcctggtgtggtgactcacacctgtaatcccaggactttgggaggctgaggtggacagatcact

SEQ ID NO: 22091 - DNA, 1038 bp, Artificial sequence
  DNA replication origin
ctcacctcccagtaggggtggccgggcagaggcgcccctcacctcccggacggggcggctggccgggcggggggctgacaccccacctccctcccggactgggcggctggccgggcagaggggctcctcacctcccagtaggggcggccgggcagaggcgcccctcacctcccggacggggcggctggccgggcggggggctgacaccccacctccctcccggactgggcggccggccggcggggggggctgacccccccacctccctcccgaacggggtggctgcagggcggagacgctcctcacctcccaaacggggtggctgccgggcggaggggctcttcacttctcagacggggcggctgccgggcggaggggctcctcacttctcagacggggcggttgccgggcggagggtctcctcacctcccagacggggtcgcggccgggcagaggcgctcctcacatcccagacggggcggcggggcagaggcgctccccacatctcagacaatgggcggcgggcagagacgctcctcacttcctagatgggatggtggccgggaagaggcactcctcacttcctagatgggatggcggccgggaagaagcgctcctcactttccagactgggcagccaggcagaggggctcctcacgtcccagacgatgggtggccaggcagagacgctcctcacttcccagacggggtggcggccgggcagaggctgcactcccggcacttagggaggccaaggcaggcggctgggaggtggaggttgtagcgagccgagatcacgccaacgcactccagcctgggcgccattgagcactgagtgaaccagactccgtctgcaatcccggcacctcgggaggccgaggctggtggatcactcgcggttaggagctggagaccagcccggccaacacagcaaaaccccatctccaccaaaaaaatacgaaaaccagtcaggcgtggcggcgcgcgcctgcaatcgcaggcactcggcaggctgaggcaggagaatcaggcagggag

SEQ ID NO: 22092 - DNA, 962 bp, Artificial sequence
  DNA replication origin
ccccgccgccccgtctgggatgtgaggagcgcctctgcccggccgcgaccccgtctgggaggtgaggagaccctccgcccggcaaccgccccgtctgagaagtgaggagcccctccgcccggcagccgccccgtctgagaagtgaagagcccctccgcccggcagccaccccgtttgggaggtgaggagcgtctccgccctgcagccaccccgttcgggagggaggtgggggggtcagccccccccgccggccggccgcccagtccgggagggaggtggggtgtcagccccccgcccggccagccgccccgtccgggaggtgaggggcgcctctgcccggccgcccctactgggaggtgaggagcccctctgcccggccagccgcccagtccgggagggaggtggggtgtcagccccccgcccggccagccgccccgtccgggaggtgaggggcgcctctgcccggccacccctactgggaggtgagaagcccctctgcccggccaccaccccgtcggggaggtgtgaccagcagctcattgagagcgggccatgatgacaatggcggttttgtggaatagaaggaggggaaaggtggggaaaagattgagaaatcagatggttgccctgtctgtgtggaaagaagtagacatgggagacttttcattttgttctgtactaagaaaaattcttctgccttgggatcctgttgatctgtgaccttacccccaaccctgtgctctctgaaacatgtgctgtgtccactcagggttaaatggattaagggcggtgcaagatgtgctttgttaaacagatgcttgaaggcagcatgctcgttaagagtcatcaccactccctaatctcaagtacccagggacacaaacactgcggaaggccgcagggtcctctgcctaggaaaaccagagacctttgttcacttgtctatctgctgaccttccctc

SEQ ID NO: 22093 - DNA, 889 bp, Artificial sequence
  DNA replication origin
tccgggcgggctgagggggcggcgcggtgcccaaggtccccggggtccctacctgaaccgctcctgtcccgccgtgtcccagagctgtagcttgatcctcttgcccggctcgatctccagcaggcgggagaagaagtccacgccgacggtggggtcgcaggcgggggagcgcagcccggggaagcggccctgggtgaagcggtgcaggaggcaggacttgcccacggtggagtccccgatcacgatgaggcggaactggtagatccagatggtctccatcgctcacgtgccccgctggctcccgggccgccccacccgcgggctaagttcggcggcgggaactgtcctttcagcacctcgcgggcgcccgcccgccgccttccagcatattcctgcggctgcggccgccgcctggtgcccgccctctcgggagagagaggcggggccaggcccggctaggggcggggcctctggacgggggcggggcgggggcggtggcgcgtgggagggggaagcaggtttgctgccgcgaactcccgcccctgaccggctgcaaatcactctccctcaacgctcactgggcgccggcaggaaagtgggcgtggcgggaagacgtgacagcagcaacaaccaaggaaaatgaagcaaggtctcaactccgggagggtcagccaatgaaaagtgagagtcgttttcttacaggcgtcagggcgggttggtcagattagggctctgattttggaagtccctgaggccataacttgggtcattgctttgattcctcttttttttttgtcccccaggctggattgatgtggtgagatctcggctcattgcagcctcaagcgatctgcccacctcagcctcccaagcagcggggaccacgggt

SEQ ID NO: 22094 - DNA, 1347 bp, Artificial sequence
  DNA replication origin
tccaatcaataatcttttaacacctctctgaagcgctggccttaccatctttccacttcacacacacgaaaactaaggtataagcaagctaagcagttcactcattatctctatgaatcagcatcattgctaggaacggaagccaaaactttgaatgttggaccattctcacagatgtaggctgatctcattcgcagtgatgctggctgggggcgaggggaagccatgtttgggaagtcccctcatggaacactgcatttcacaagcagagtacttgctgactaacgcaaaatgcttccttaaatgagttccaatggataatgcagtctttaagaaacagaacagtacaatacatcagtttcaccatcttcctctaaaacgaagtgcctttgaatcctagacatttaaaatttgctttaaacctgcttccatctcaaatattcaggaaatgcatataatttcatttactttttatttacacaagtcgcctttgtgaaacccttcatgtccccagcggatatttaggaggagactattcatttggatccctccttctgtctttagaaatattatcaccctggaacgttaagtactgatcataagcaaaattaaagttcctggcgaatctcaatatatgtctttttcccaccaaacatgacaaacttctaaagacaactcaacccttcacatacacacacacacacacacacaccctcagctgtgccagtgtccctgatgttgcatctagttaacctacaagacccattcccacgggtcatgacccagtatttctgatgaccacattcagtgctgtgaggtgcccaaaccattaccgcatccacctctctgtgaaccatgcccagtgagctcatgcaggaacctgggttggagcgctccttgctgtgaagctaaaggatccatcacgaatctgggaaccctccctcgcggttctccccggccacacagcgtgggagccgctgggttagggtaggaaaaggggcgcctgcttggaggagggtggtcgggtcatgctgtgcgcagccagggaagccgagtttgggaagaaggcagccggggagccggaggggataaaaatacccacaggggctgaaagagttggggaagagggggcggcgaggacgaccccggttcaggcgggaaaggaaagatggaaagggggcgcaggaaatgggcgccaaagaaagaagtgagaaattgcggaggaggaagtcgtccctggaagaggaggggcaaaggggaagcgagaatggagtgtttgcactttcgagagggaagggccagagcctctcccgaccagggccggcggggcggacgcctggggaaggg

SEQ ID NO: 22095 - DNA, 1222 bp, Artificial sequence
  DNA replication origin
agggagacgaggcgggacagcgggcgggaaagggagcctgcgccgcaatctttcccgcccgaaagacccgccccgcggtgggccccagtccccgcccggtccgcggcgctgccggcccctcctcgccgccgcggagctggaccgcagttgtgccccgccgaccatgcgccgcctcccgcgggccctgctgctgcagctgcgcctcgccctgctggtggccgcgggggccccggaggtgctggtcagcgcgccgcggagcctggtgtgggggcccgggctgcaggcggccgtcgtcctgccggtccgctatttctacctgcaggcggtcaactcggagggccagaacctcactcgctctcccgcaggtagtgtccagccgccggcctccctcgtcccgcggccgggtccccgcgcgtccccgccgcccgggagtccgcccgcggcctgcgtggcgtccctccccggcgtgtgtcgcccctttttgggtctggtcagctcctcttccctcctcccgcccatactcaaagcgggcaaaaatcaccacgaaagtttgtggaatgaatgaatgaatgaacttgaagggcccttccgcatttaatgtgcagggactgatgttgcgaatggacggcgcccgggcgttacaaggagtgtgccgtgagtcacacgttgccttccatctcggacttagttgtctgaactgtgagggattgcagggagcgctttccagtggtgagtcatcaagccgacggatcgcgtcggattacatggcttaggcctggtgggtttggagcaacgaaatcctacgcagaggaaatgtcagagccgtaggaaggaggaggggtttacgtgttagttttttgtttcctttttagttctgagtttttgaaagcagattacaggaactagggaaactcagtagaaatcattcggttttccctccacggagggtgagatggatctcgtcctgaatccctttctgcccggtcctcctcccacgttgtccttcacgtcttaacctttgcaacttcttaaaacttgtcctgctggtttcacgctgttgtcagtcaggatttgctaatgtataatttggggctctggccaactagcaccttgttgtatcagcgaagagacaattagaataaaccagtgcctctgcccctgctagtccagctgggaacatagctgccagaagtgtgtcccaacttgggaaaggggtaagggg

SEQ ID NO: 22096 - DNA, 1056 bp, Artificial sequence
  DNA replication origin
agacatccccacaaaataaaatttatcagtgaaagtaataccaagtaatgttacactttagccctaaaatttaccggcaactgactaccagttcctgaaacctttccaaagtacaaagaatactgtccataaccactgcttagcattactaaaataggtcaagagaagtgtgaaaatgtgggaaagattttgccctggtaaaacttggtcacagcaagaatgctgagtagcacggttaaagccgtgaggcggacaaaggcttgtccagtgcctggctctgatgttttgggcattaagttcccccaagagggtgcagaaatcctgtgtccattctggggtgtgagttccttctggatcattcagccagaggagaatctttattggctttaaataaattcagatctattaacaatccattaacaaatttgtatccattaacaaattggataaaatgatcaaaaaagagaggcagatagtaaccttgacaatctcttcctggatccagcgttcatcttctgaggagtggtggaggtggctgagaccaaccacgcaccaccaccccttctcccacttcgattacagaggctttgaggtaaagctcgcacaagggctcaaggcaaggcctggtcttctgccaccccagtgcccagctcctcactctgggcttggcccaaactccgtggatgttctgtaaacacctgctggaagaagaggagtgcgggaggaagcggggaaagggatgtgtggggtggggggatcacggttctgtgagggaggctgctaagcagaaaagcaacaaaaccggccacaagagaacggtgctgctgtgaacagagggctgtgagggagggcggggggcgtgaccttggcgctcatcttgtaaactcggagacattccttgggaaaagatatttccctaaactacatcgatcttggggccggaccctttcatcgtcccacaacaatcaccaccgggtctacgtcctttaaaaacacctgagcggcggacccggtggctcatgcctgtaatcccggcactttgggaagccgaggcgg

SEQ ID NO: 22097 - DNA, 1467 bp, Artificial sequence
  DNA replication origin
ttgtaaagcttgttccattgctgtgcagttcaggtgagctatttttgtatcatggaggtagtgggtaatattcaccattgaagtgtctgttatgaagtgatgtttacccttgaagcagtgtgaagtttggattggaagatgatttgaagctatgagactatccaagagaatgttgccataatctgggaatgaggagatgaggagcttgattaggatacaacctcagaaccttaatggcaagtgaatcttgaaaatgtagtttccagtcttccagtcctttcatacagatagagagcatactccctgtctcaaggagacctctttaaactgttgtcctaataatcctgtacttactactcacctagaattgatcccactcttcatgcatctgtttctcccctggagtgtgaacttcttgggagtggaaattaccccatttctctttgtctcttcagcaccaaacagagagcctgattcatagtgttcagtaatgactcctgaatacacagatggccctgccagaatcactgatttagtatggggagatcacattgtttatgaacttagagcaaggagccagaggaaggaaagacagcaggatagatcggagatagaggaaacagatgggagataggagagatgggaattagaaggggagaagggatgtagaggggagagatgggagatggtggggagagtgggagatagagggagagatacgagatagagggggaggtgggagatagagggataggtgggaaatagatggggaggtgggagataggggtagagacaggagatagagggggaggtggaagataggggtagagataggagatagaggggagagatgggagatgggggaaggtgggagatagagggagaggtgggagataggggtagaaataggagatagagggggaggtgggaaatagaggaggacgtgggagataggggtaaagataggagatagaggggagagatgggagatgggaggaggtgggagatagagggagaggttggagataggggtagaaatatgagatagacggggaggtgggagatagaggggagaggagatgggactgggcataaaaatgagatgctggaggagataagagtgaatgggatcaagagcagttagaagtattagtcttggcagaaaagcaggacacttctcagatatgacagtgaaagaagttctggagatattttaatgagagctaggaaagctgagggaatttgcattaaattgtgtaagcttcatagtgaaagtaaaattacctatagaaagtgaggtggcacattggaattaagtgataaggaaacaggagtggctgctatgggcagtgccattcacagacactgccaagagagctgaatgaaagagttctagcgagagggagggccctgctaggattagtatttgatcttaatagtttgtgtttgatcttacattgaaaggag

SEQ ID NO: 22098 - DNA, 1049 bp, Artificial sequence
  DNA replication origin
acggggaggtgggagatagaggggagaggagatgggactgggcataaaaatgagatgctggaggagataagagtgaatgggatcaagagcagttagaagtattagtcttggcagaaaagcaggacacttctcagatatgacagtgaaagaagttctggagatattttaatgagagctaggaaagctgagggaatttgcattaaattgtgtaagcttcatagtgaaagtaaaattacctatagaaagtgaggtggcacattggaattaagtgataaggaaacaggagtggctgctatgggcagtgccattcacagacactgccaagagagctgaatgaaagagttctagcgagagggagggccctgctaggattagtatttgatcttaatagtttgtgtttgatcttacattgaaaggagctcagggttattttatcattctatttccatattttaggatacttagattttctggagaaagtcttgggaaagagatagcattgcttagctgtggaagggtcacatttgggtggcaaatgaggttctaggatggcaatgagtgcattattaaagtgagatgtgggcaaatggtccctgagagggggtgatggactgggaagttaactcagatgaggaaatggagatcacaagaggctagagaggtggagtaaaagtccgggaatggagacactgacagtttatagacatggtgtgatgctttgcagctatttggatccatgaagacacctgtggaattcctgttactctgcagttacctgtggttgagtagagattggggtcaccagctttgcagagaaactcagaggctaaggaatgaaaagcattttaaggagggatgttggaaaccttgggtatgatgatagagggcaccatagagaaagggccatgatgaagaccagagggaagctgtggcccgatgccctgcacatcatctgttgagggaaagtgattgaagattggctcagaatgaagaatgggcatgaggagaagtcactttcactgatcagggttaggaggaacgttgagtca

SEQ ID NO: 22099 - DNA, 1813 bp, Artificial sequence
  DNA replication origin
atgcccggcttttatttatttatttatttatttatttatttatttatttatttattttgttatttttagtagagacagggtttcaccatgttggccaggctgacctctaactcctgacctcaggtgatccacctgcctcagcctcccaaagtgctgacattacaggcatgagccaccgtgcctggccaagagttaattctaattgcataaaaattctttgctttacaaaataacattttttaaaaaattttttattttttgctaaagagtctcttgaaatagccagatctctttttggagaatccaaaattggatttgctttacaaaatgtttattagactcaacttttcaggagcaaagcgagtgtgaaaaaatgggacattgcctgtcaggcatcaatggtaaagtgtcacttagtcacagcgtaaaaaataaataaataaataaaaaggctcaccattccatcccctaagcccaccaaagtcaaattgtccaaatgtggcaggtggctattgcaggcatctggtgctctcattccagtcaggaaggtgaggctagcattggggtgggggcggggggcagacatcagtaactgtatgaccctaaacacagagtccgaagaagggacccccagattacagacagcctttcctccacatatcagaccctctttctttacaaatacagcaaatacaagcagataactgggcatcagtcatttctgatgcattgcaggaaagagcaacaacatacactgtatcattcaatttatcaagtaaactacaggcactgtgctagactcaaagatagaaaagaagacagggagcaaagaagaaaacgcacgtttagtaagacacctgagtgccttcaaagaccatgcaatgtctttaggtactgttcccagctagcttctccaacagaaaaatgagcatactccatttcaaagctggattctgtaaccaaatgcactattcatatttttccaaggctcctaaaccaatagttaactagtctcttccaagatttagggaggctgttgaattcttttctggaagttctatgtattttgctaaaagttgtgctccaaacactttaccaagaattagggtcaatgaaggggtactttgtgcaagctacaaatacttggaattttcataaggcagttcatttctgccttcctgtgaataatttcatatttcttccttgtaagactagggtttgtgtgctcatgagtgtctagattgtcagaatagaaggagtgtttaatacattgagtgggtctggggcctggagatgaagatgtgagggatgcaagaaggaggatcttgaatcagatggagcgaaagataacttggaaactccagtggagaaaaatggctaatttggattgtttaatttgttcaggtttgtgttttgggttctgtcacacttatgttgagaaacgtccctgccatctctctaatgcacgcagtttatgttcagaaacgggcagcacagagaggaattagcggtgggggaaattttcatcaccaccggtgatgtgtgcaccgatggtagatggctatccagagtgtaaaaatgtgattctgggaccaaagggtcagctctagaacgaaatcagacagctggagaactgaagattcaactcttcctaggcaagagagtgagaaaggtgggttgcttgcagggtggaggtaggggttgctcctcctagttcctgggctggagaagggcagggaactgggaagtgtgtgtcagaggctcgctatgctaggacaaggtgttggggtactagggtgggtgggggcctgag

SEQ ID NO: 22100 - DNA, 1080 bp, Artificial sequence
  DNA replication origin
agctgggcgcgagcggaggcgcgccaagccctggcggcggcgccacggccgggcagcacgggccccgcaacttcgcgccgccaccttagcgtctccggaggaaccgggagcggggagtgggggaagggagggcgccgcgccttacccggagagcgggcggcttctgcccgccggcgtgtggctggggcgctgcgcggcggcgcggctgcgacagggagggagaagcggtggtgcgagcgctggcccgcgggagacgagaggcgccgccgccaccgcagacagctccgcaatatggccgctcggcgcctccgcgggaaaaggcggggctgcccggcgcccccccgcctccccctgccggccggccgtcctcgcgccgcggactgagcgccaacgccgccgctgggggccgcccccgccccgcccctcccgcaggctcgcagccgcaggcctggctccgggcgtggccgggggtcgcggtctggggccggccaacgcgaggtgggtggctgcgggctcgggagcgcccagggaaatagggcgaatgcgccggagggtcgagcccttccagagagcgctgggctccagctaaacctgcggtcgagggaagcggagccgcccagcccaaagctcggagtgtgcccgccgcctccccaacgagtggaaacttgaaactcccgctggtgccagcaaactcactgagggcgttgccgtcgcccccagaggaggaattcttcccagagggagccggggaccaaatgaagcgtgagacttggctgttaggtttgaagatcctggactgggaaggagaaaagggcctacctgagcggaatttagatttgcaacaaagaacgtttacattattttggcaggttttagccaactagaaaaacttaatttttcagcgacaattttcaaacttcaccaaaacctcaatggataagaccccaaatcaggagtgcaaattttaatccaagcaaggatgtgtgataattttttattaccaacgacatgctttggcagttggaaggagttggttagcaagaaaaagttggaagtagggccccaaagagccgccaaacc

SEQ ID NO: 22101 - DNA, 1323 bp, Artificial sequence
  DNA replication origin
cgcccgcttctccgtttctagagccttagtctctcctcgagcgacctcgcagcctccctcccgtctccatccgccgccggttctgcagcccggctcctccctcagtctaggcgcgcgggctgtagtgggcgatcgcctttccccgacccctcgccgtgcccctgggcctcccgaagtggcctgggcgagcactgactgccctttggcggtgtcagccccaaagtcagggccggcgatgtctgcccgggagcggcagccggcgctgaagaaggtaggcagcggggctgcggcgctggtgggctcggccccctcacctgcccgccgaggcgcggctgctccatagcagttttcggggggcagatatggggagtactgccccccacaccagggtcctggatgattccgggtctcccaggtgggggtcacagtttgaggggcgactgtggatgataacgctcgacactacggggacatgtaggttcggctgggcctagaaccgagcagggtgggggcgggtgggctgtggttgggggtcctgagggctgaggtgggggaccttctccctgcactggtccctggcccctgggactctggccgggctggatagggatccgggtgtcggtgtgggcgtgggggcagcgcgtgttccctgtcaaagctgggagagggatgcaggtgacaacttgtagcgttccattccgataaacacggccgctgtgctgcgggaggattccgatccgggtcaggtttcgctggaacggttccctgagcaagtgcacgtgggccgcgggctgccggcctctgccgtttcgctccctgaggaattgatttgggtgtttctagccctgtctgcctgtcccccgcctccccacccccgcttccagcataagactttccgatattttgcctttttttttttttttgccttgtcttagtggtgcccttccagcttttctggaaacaagttgcgattagaggcatcttctagcttttccttaagaaatatcttaagggattgcatttgtttcattagagacttaaaggggttacgcaggttccctgcttgtcttgattttactgcctttcataaatcttcccaccaggatcttaggttggctagaggtcagttgaagagaggtgatcggtgtgccgagtatagaaatgtgtgggagttcccaaggaccttgaccgtgtcacggagccatctaggggtgtccgtgaacttgatgatgtatgggctgtagtgccagctcagcctttgatgtattgaggctgcggtttgtccttgtcgcttttccccttcggagatggagggagtgtgtg

SEQ ID NO: 22102 - DNA, 1245 bp, Artificial sequence
  DNA replication origin
gagctccgggtgctcgccgcgcgcctcccgtcggggccatgtacctccgcctgcgctcgacaccgcgggctggaggcgagtgcagcggcgacagcccgtcagcgccgcggcccgccccgcctcgggcccgccccctccgctccgggcgccctgcgccggggcccgcccccgcagccctcctcagccctcctccagcctgggccctcctagcctcgtcccagcctgcggcgcgcctggcgggcgtctctctatatatgttagcacaccggccaccggctgaccttttcggtctgtgactccgcgtgggtgcagcccgcaggagctcatcggcctgtgtcacgcacgggggcctctagtgcacggacacgcgcctctcccgccacctgcccactcccaccagaccccatcccttcccgcgccgtgcccgcggcggaaggcgcccctgcagcgcgtgcatccgcggagcggtggcgacctcagcctgagcagaggagttgcagtgattcctgcctcgctttcagcggactgcggagggaatcccccaccccaccccactggggatagggtggcacgtcgcagagtgtcgcagctgtacaaatttggaagcccacagcatcgcctgacctcttgtgcaatcccgaacgctagcctgttcgggtaaccctgagtgggcttctgcagccggtcatgtcagcggcccctgcacatttgcacccgcggtttccgctgtctgcaggctgcagagacgggggcattccaaacgtgaaagagcaatgaaggaaaatgcagacagagcgaggacgccgaaatttggctaagctattgagaaggctacaatatgtggaagtgtttatcagatatctgcgccgagagcataacttcctgtcagcccaaatagaggcaaaaatattttaaaggccaaagaataatcagagggagaggatttggagctgacccgcgttgagctgagtgttgctgcactttgcggggctggttgactggtacggatgattcggtagatggcattcttcccttggagtcaggactagagaagcagtggcggattagtgaggaaggacaccacgctatgatattaggttgtggaaggggtttggtttgcttttgtggtaagaagaaaaaaatcgaggttcctgccaggttaggctgttattaggacaggttgtagaagaatagggctctggccggctctgttccaaggaagggatgctgtccaacacacactcg

SEQ ID NO: 22103 - DNA, 1650 bp, Artificial sequence
  DNA replication origin
cgccgggaagtgcgctgggtgcggcggccgagggtgaccgcgcgttcagcctggacgcctggagatagtgccaggatgccagcgcctcgcctggtcactgcggggaccgcagctggacagcagggatccccctcaagccgggttccaggagttagggtctccccaggaaaggagattgcgctcttcctagcccggacccagggaatcccgtgccccgcccgcagggcccaggcgccgcgccctctccgcgctccagcctaccgcagccccaccaccccgttccccgatcggctccggactccgcgggcagcgggcgcccctcggggtccgcgcagggaccgccacagctcggctcagtgcagtcggtgcgctctgcccccgtcccaggctcactgtgagcctctagctccccccgtagcagcttctgggcgcgcagggtccgcaccgcgtgtctcaggacacaacagtggatacgtgggagggcgggcgggggcctggggtacgcggacgtccggagcggccaactcggcctctgggcctctgccctccgggacaggcgctgagtgggagcggccacagcgtggctcgcgtcctctccggatccccggcccttactcgcatgccttgactttgtgcctctctgttctatgcaggaaaagccgtggaaacacacccggattgaaatgcccctggcccgcctgacccgaccctaggagaagcagccgagttacccgacatcgtggtcagcaggagctgggtcggtggctggatgctgcagcagcagggactcagcgcctgggagggctcctggggcagggagagaagcagagatgcaacatttttaaaatttcacaaagcatccggctgcacccaggtccctggaacaggagacaaacagaattaatgttttataccttcgggtataggtttgagttttttccccctcatgccaagtatttaaaacctctagaaacccatgatttgacaatcaatgattgcgcgatactttcaatttgaatattcaaaggcttaacaaaatggactatcttctgcagaaatcctgcacacaggcaccccacagagagtccagagaaacagggagtgagacccctttgggtcctggcccttgcttttattatagtttgagcattttgtcctccttcccacagatagagcagatgtcctcaaagatgctctgtatttcagccttcagggcagctaagaagccatgagtgacttaggctgccctggccatgaacaccggagccagactggctggccagactgattcccgcatcccccatctgtgttttgaggggaaatctcaggttttgaggaatgaacatggcagctagtgggtgtggcacagcaagaagtcgctctgggcccaggtggcaggccagcggcctagcagaggccttcgctctgcacctcctatttttctggctccgcctggctaccagcgggcttccctccccctttcatcccgctcttcctgggcccgacactggggtttctgctcagaatgactgcccattaagaccctttcctcctccccacagagctggggatgccaggagcctcatcctctggagactttctgactctgggtttcaccaccgcactgcgaagtgccctctttgctttttc

SEQ ID NO: 22104 - DNA, 1593 bp, Artificial sequence
  DNA replication origin
gcagtacttaccgtaggaaggtgtataaagtgtcagggtatacccttatgactgctcagttcaattttgtaataacctgaaactgcttaaggtgttgatacattttagggaagtggtcctgtactccagctgtctcttctgcagagacagggcccttttctgctagatactttaggtaactgatgatttacagataaatgatctcagagggtgagttccagaagaatgaggagggaagggaggatgttccacacagatgctatcctggaaggggcccctaaaatgaggtgaatttctgggagagattttctatgggtctgcaagggctgtacatatatccactgtcttcctaacaaaacgatgtatacttacctgctggccgctcctccccctgcagaggaccaacgcactttttatactttactttcacccatgggggatggatgggctcccccaaatcctgagccccacaacatgccccagctgtcctctgtagcttcccgattgggatgcagctgggtacagaagtcataggaacagcagaggaaggccaggtctgggaatggtgagtgcgtggggccttgagtggcctccacaccttgcagacacagctttgaaagaggcctggcatgggctggggaatgagggaagggcttatgcttacggttcccccggaggccgcctggtgtgcccgtctttgctgcagcagctccttcactgtgatcttcactcggacaccttgatacaccttcggtttttctggagaaaggcaactgagtcagtggtcgagtccaaggtctgggtgccagggtgcagagtgggggccccttttataggctatggcacccaaagccaagtttctaagttcggagaacacacacaaaaaatgtcaaaggatggtaaaaacccaaacatttcaaacttgaaagaatgaagagtagctgagcaggtttcagagccccagtaggaaaagaatccgtggaaatttgtggggccatccacccctggctgggcctcagtcctaggccaatagcaaacgggtttttctgctctggaatatggagaccagtgcagcggagcccaccactctgattaggtcgggggaaccttggctttcagacccagacagccgagagagagggtattatggacctggggaggggccaggcctggggcagggggctttctctgattatggcggctgacgtagcccaccccactgtgatgttcccactagcatggaagtcccgagtcccttccttctccgcctggccaggtgtggcttctgggcaggctccgacctctgcgtgcccttggtctggaagccagcccgggagcaagcggtgaggtttggccagccccgtcctgggccggcgaggtacctgccagactgacctagtaaaggggccaggcccgaggaactccctccctcgctcccttctgtctttgccttctgcccgctctccctcgtcccttttctccgccttttccgcgctccatcttgccctcctccctccttcgcccccgctcctactctccccttcttcccctctctccctaccccctccctttctggggcaggcgtttctccga

SEQ ID NO: 22105 - DNA, 1370 bp, Artificial sequence
  DNA replication origin
ggagccaagtcattcctcagccttcctcctccctgcatcaaactcaagcttcctcccacacccctctctccaactaagatgcacagcctgttcccatccctcctctgtccctctcttcgtcactggcctgtccccacccaccctgatgttcttttctccctgccacccacttcccaccccttactactctgagccccaggccttgagattttgctgcctggactgtaaatctggccgaggctgagaagagcaaacaaaggagcaactgtgggaactgacagctcaaggactctggcatcagggtaggcccttggctgactttctcaggaggtgctgtcggggctggtcttcccgccggccaccacatacatcttaaaattacagagggtgtgagtgaccctaagatggttcagcaggcactggaggaaggaggccttttccaagaaatgaaatgtgacagaaatgaaagcccatggaccacagacttggcaacatttgacataaaatgttattgctaaaatccctataattacctcccaaaatggaacagaattgaaaaaagaagtaagaaagagagaagaagcgagggagggagggaggtaaagaaggaaagggagaagggaaggagggaaggaagggagggaggaaaaggaaggaaggggttggaaagggagaagggaaggagggaaggaagggagggaggaaaaggaaggaaggggttggaaaggaagaagggagggaggggaagaatggaaggatgggggagagggaggaagtgagggagggaggggaaggaagaagggaaggaaggtttacaggtctacaattctagctgtgcgtagaaagtgtagtcatgaaatgactactccaaacaagcatgaacctggggctcaattccaggctcattttaaaatcccagtttcagggaacaggactcaggtgggagccacgcctaaaagccttccacagagagagtgtggttaagcgcataggcgtcgctatcctcttcctccaaaagcagcttgtcgatggtcaacgagctggcggctcttctggggtcttccatgtcctgaaggactggctctgggatagagatggggagctggacaaactggggcccaggtagggctggggccggaggctggtactgcagggtggaggtgggtagtgtggaaaggggctgaggccacgggaaataggtgaggggtgcctggtgctctgggccctccagcgggggccccactgcgggcgtggcggagcttcttgtctgtgacaggaaaacacgtgacagagggttagcagccccaggagacccatccacccatccttgcccttagaggggtctccatctcccccttcaattctgccct

SEQ ID NO: 22106 - DNA, 1505 bp, Artificial sequence
  DNA replication origin
cgcccccatatttcagcatgattaagccttgccattttgggggtggctgggggcgaggggaggggctactgtgtttcaaaatggaataaacagaaaagcaatattgaaagaatgaggaggttgtttactgaggcttgaagagatgacaggtgtttcctcccagttgagaaccagtgacccctgggaatcgcatttcccgctgagcaggcgcccatggcgggctgagtcctgcccatgccctggtggcctggaagcctgcatgggcgccgtgcaaagatcaacgttttccagaggagcttttgggctcatcactggcctggggagggcttgacacggggttcccacagcttgccccacaccaccttcacacccacacacagcaggtccccgcggggccggtgcaggctgtggctgcccgcgctgcgctgttgctctgtcccagctggctagctccgagtgtggagcgctctgggccggggccgctggggcgcgcacagtggggtgacaggcggcctggctgcagaaacgttgcaccggtgcctgaggtgggaggatgtgatgacgcggcccacgcagcgggaacccaggcctttaaaaagcccaggaaacagcctcagctcaagcggtggctccactggaggaaaacacaccccggtctcacattaaagaagccaaactgtcggcttcaaagagaaaaggcaacatcctgtcacaggccatgctctggcaaaaacgtaagtggtttggctgtggctgtcagacccaagcgagtgccagcggggcagggcgatcacagcttggtctggaattggggagctggtggtggaggtgatggggccacggggggagggggtctgggttccaagccccggagcagggaggggggaggtgggcgggatggagcctggtggagaaaccagcctgtcagaggtgatgctgattttccaggctggaggggaacgaactagtgttccaaggtgggacggctcagggtacctccgcttctgtgcatgaatcactgtggtgaagaaagggcagtttatgattcacacaacaaaagccagatgtgggatgggtttggggttgggagggaaaagccatgcagttctttacaggaggggctttatttccataagcagtggctcttcagccttctgttgaattccctgggcctgtttctagctgagtgacttagctttctgccaggtgtgacttgtccctgtggataccctgggaggagtggagatctggctcggtgaagcgtgtcctcacttgctccactgtcttgcctttcgtcattctttttccccttctgtgacaaggcttgtccatcccactgcaaaggatgcagtgggtttatctttggccttgatttttatccccggagttggatgaaacaattgtgaactttattttcctttatgtggaccaaacagcgacttaccttactaataactgaaataatacagattatttacaacattcttttcacgaggtaaacagcg

SEQ ID NO: 22107 - DNA, 657 bp, Artificial sequence
  DNA replication origin
gttgaaaagtgtccattaactttatagaagtaccttgcttctcttcccctccccaggggcactggagtagagatggggaaggggagagggaaggttgggggtaagaggctgagaggatgaagggtggaaagagggtcgtgggtggagtttgtggctcagatcagaacatggagggtgtagggggctgagaggaaggggactgggaggccaggccaggcatggaggagggcgagggaggacaatgctgagggctgccgggagacctgtgttttcatccaacccgactcccaggatgggcgagatgcctcctgtgactggatcctccatgggccccccatctccagaggggccaaggtcttggtgagaggattgcagtatgtcctcccaagagtgagccactgccttgtttgggggtgcagattcacagccagcacgggcaccttgatgcctgtgacggggtctgtcatgagagcccccagcggggacgtccttcttggctgcaggatgggcaggtgcgtggctggaggggaacctgtggtgggactggttgggtagggcacatagggcaggatggcagcttctgatgttcggacaccacctggacagggatacagggagctgttggtaccctttaatgcaccagcctccttcagccct

SEQ ID NO: 22108 - DNA, 625 bp, Artificial sequence
  DNA replication origin
tcacttgcctctgggccactagcacattggtgtccagcagggcctgtggccctcccatatggggcaatgtctggccctctcgtcaggaagccccctggagccggactgtcttcctgctcagtggctccacaaagctgtcaccaggcagcaagaggttccccgaagcatctcgcagccctcccagtacaagtagctgagctggaagaaagaaaccaagggggcaaggtgggagagggaaccagcagggatgtaggcaggtgtggcataaggggaactagggcacaagggtggaagtgagctgtgggagggaaggaggagggggagagggagggggcagggggtagagcatggtggtgacaggtggagaaatggtcctttttggttgaaaagtgtccattaactttatagaagtaccttgcttctcttcccctccccaggggcactggagtagagatggggaaggggagagggaaggttgggggtaagaggctgagaggatgaagggtggaaagagggtcgtgggtggagtttgtggctcagatcagaacatggagggtgtagggggctgagaggaaggggactgggaggccaggccaggcatggaggagggcgagggaggacaatg

SEQ ID NO: 22109 - DNA, 1358 bp, Artificial sequence
  DNA replication origin
cgggaactggcgtgggtctcagacgccgtgcgactgcccccagaacgcaagagactccgaagggctgcgtctgggagtggggcatgggacggccttctagtcccatacgtggcgacccagaagagggtcagcagcagctggggtgcagtgagcccaccccggcaccagcccccgccccagcgcgcgcactcaccactcagcaggcgacccgtcgcggcccgcagccccaccagcagcacggccagcagcacggcctgtagcgcggttcccggcctcatggcccgactcgggtgcgccccccgacactcgggcgctacggcggtggagcgggctggcgggcagaggcgtgcgcgacaactgcaaccgcggcagcagcatctctaggccaccgacggaccgcacgggaggcgggggggagggcgcggagtcagtcggtcgcccctccgccccctgggacgtcactgcgaggagggcagccccgctggctggcccgcccccgacagcctcctccagcgaggttggcgccagacactcggccagccagagaggggcgagtcgcagaggggaaccagctccctgtccccctccgagcttccctgggagatcccgcgtttgcccgaggcgctgggcggaggaatacttcagtcgggcccctaggcaatctgataacgagcacagtgtgcctaaaactagcaccacatctcacccctcctctcccgctgaccttagccaagttcgccagctgtgcgggtgcacctggagagagaggcgatgcgtggactcctacctggggctcagcaggccgcagtcccagcacgaagggcgacgcctgagcagggaatggtcgatgcagagaacaaacactcacgcaggcagtgtgcccaccggccaggaaagttatgggacaccgcgcggatggcatccaaagaacttggctgagttggagccctcccgactgaaaggaaagcggcttctaccagaagccaaaagatgtcccagatccctggaaggaaatgattctgttttttgcagggaacaggttgggaggtgggggtcatagttagggagttcagctttggcccctcgccccgcaggaaagaatgaaactattatctcaggaaaagctttcctaacctagccctcaatgtgtgcttcctcttgtaaactcccaaagtaggtgtgtttcactttggtttcgtaaacaaaatgcttttaaatatagtcaagcaatagagtgagccatctgtccaaagattaaggcactaagtagcagaaggtgaatctgactttctgccttttctgccacaccatgctgctgtgaagcatagcagaagccccatctgggccacgacctctgg

SEQ ID NO: 22110 - DNA, 829 bp, Artificial sequence
  DNA replication origin
tgggaccggggagacccgagaggccgcctcactggcggaggcgagcgggcctgggactgtgaggacccaggaggtgcagggggtcggtgagcagcgaagggatcgggcccgggcacccggacccgagtgtcgtccgactggaaacgcaaccagccggggctttgctttcccctacgccacccccggtggccacccggaatttcgcccagagccccccacccgggccgtgacctggtctgtggcctccgctccggagcccaagttccgcgtcttccctgctttcggctgggggtggggtgggaggggaagtctcggtgttcccaggctgcgccgtgagagacgtcgccggcccgaggaggggaccgcctgcgcttgggctccgcggatgggggatcgtgcggcccccgtgaccccggcgcccctcccctgcccgacgaggaagggccccatggctgggaatacccccacggccactgtccatctcctctccttccttttggcccagggtgtctctgatttggtgtctggctagcttgatctcttgcctggggcatttccatttaatgccccagacaatagaactggttaaaatggtcatctctgcatttgcacggtgggtggattggtcttctacttgtctagggttgtcactgtaccaggtgtgcattctggctgtaatacgcattctttaaaccatatcagattctgcctctactcataaagccctcaactgcttcctgacggtgaatcctgcaccctcttcattgcacattctaatgcaccgcacatactctctcacaagtctctgttcttacctaacccgcccccc

SEQ ID NO: 22111 - DNA, 875 bp, Artificial sequence
  DNA replication origin
ttgaggtcagcaggaatgggaaagatctctgcttggaggggatgaggggtagtctggggtggggggtggctggtcccaggagatcagttaagcccagagtggggtggaggccagcaacgttgggaggtcagcccagaatttcagggggtgggggtggggggcaagggggtggtgtctgtgccataccttctccgaagcgctgctcacccaggcggctcgggttggcaaattcgtactcggcggtggccgggtgggcatgtggcactgagcggcccgacatggctgcagatgcagcagaagccctggtccgaggtgcagccccaacaggcgcagcgcgacccctccagctgcccggagagccagggctcgataggaggtgggggcggggtcgacaccacccaaaatagtgccgagcctcttggggggggaggggctgggagtgggggccctgagtgagagcaacgagggtgtgaccagcgccgcccggacccctagtcccctcccccgcacactcttcagctgtcgcagggggcctgagaggacagctgagggtcctggctgggaacgagctggggagggggagctggtggtgcctggggcatgaagaggcctcgctgagaccctcacaaacggtttgcacgtttccacacctcattttctcctcttcggtggcaggcactgtgcacccaattcctaaagcactcctggatttaatgttctgagagccacatagaacgaaagatgcaagaaatctgtttgctcttttttcagggggtggggtctttctgcccagatgtgggatcctctcctaaacccaggtcaacccagggcacgaggcagatggctggtgctgacatgttgaccatcactgctct

SEQ ID NO: 22112 - DNA, 754 bp, Artificial sequence
  DNA replication origin
aggatgctgctacctctggagtggtgggcagctgcccatatcaccttgggaggtagagagggatttgctgggtgctgggtctgtggcaatcagggctcaactatggctgcctcctcctcttcctctggatcaggaggcgcagggagcagggagatgtagacctcattgacctctgtgtccaaatgtcggccaccccgaggtgcttccaggtttaagatgccatcatgggagagagcagctcggactcgccaggggtcgacatcagcaggcaggacataggtgcggcagaactctcgggacacgaagccgtggcggtccaggcgctgggggtgccgggcagacacctccagcaggttatccacagtcctcacagtcacctcgtctggggtaaagtggctcacatccagaaatgcctggaacttgccctcactgagcctaagctcggaggcccctgccctgctgccctccccagctggggcggcccgaggccggacatagtagccatggtagagtgtgggggtcaggatctcttctggcaggaggcctaaagggcagagagaaggcaagaggcaggatgagggaggatgaggctggcacaggggcgaaatgggaaatctggagaggagggattgggaagagcaagaggggagtcaggaggagtagggaacgggagggaggccacactgtagctaggaggagaaggcagctcggaagaggggaaagagaacggaaaggaaagggaggaggaggagga

SEQ ID NO: 22113 - DNA, 1751 bp, Artificial sequence
  DNA replication origin
cgcaggtgcggggccgctaggatcaataaacggcctgagaaacatgcctggcgcgttttctggggcggggccccgaagctccttgcgaggacagcggatcccgcccagttttaagggcggttcgaaagtccagccagtagacaggccttccggccccacccccaggccgcggctggaggcggagctggaggggggtggggtttaggagaaagggggcgggctaccattggcagagggcgcagttcctggggcggtgtgtccatgccgtgattggttgtttgtcggatgctcctggtgaggcggatccggaacggcagttgggggggatctgggtccagggggcgcggtctgggcctgcaggaggcgggatccggcgggccagaggcgggaccaaggccggcaggggctggctctggctggctggagtcgggcggggcttgtggccggcccccgcatcaccatggcagcgggaaaccgcggcaaagccagagcactggcaggccgagctcaggagggctggggacagagatgctgaaccagacggacccatcatttaagaggtaggtgctgaaaggtggcgagtaacaaaaatattacccaagttgatcatccacatcgaaactggggacacgcggaggtggcgaggatgaagtgggttagaggaggctaaaatttcaaagaccaaaccgccctcagccttgtacattcttagtgtgcagttttctgcttcagactttcagagcttagagaggaggggtaacgcactcccctttctcgatctgttctccgttctccccagataccgctgcctctctgctggtccctaagagggatgattaaagactggtagagtactgaaaatgaaattgtagcacacgcacacacaaaagttggcaataatagtattggccgggcgcggtggctcacgcctgtaatcccagcactttgggaggctgaggcgggcggatcactgaggtctggagttcgagaccagcctggcgaacatggtgaaaccccgtctctactaaaaatacaaaaattagccaggcatggtggcacgggcctgtaatcccagctactcaggagactgaggcaggagaatcgattgaacccgggaggcggaggttgcagtgagccgagatctcgccaaagcactccagcctgggggacacagcaagactccatctcaaaaaaaaaaaaaaaaaaaaaaatagtattagccccataaagtgtgagaatttaaagcacttgcgacaagtacatattttgtagtcaaatgttggctgctattatatcattaccattatcactttttcccggcccgttgtctggcaaagactcaatgcaggcagattcagaaaaggtgggttggaggactgacccccaccactaattggtggagaaactctgtagcctattttctatatattaaatgaaggtggccgggcgtggtggctcacgcctgtaatcccagcactttgggaggctgagtcgggcagatcacctgaggtcaggagttcgagaccaccctggccaacaatgcgaaaccctgtctctactaaaaatacaaaaattaatggccataccaccctgaacacgcccgatctcgtttgatcttggaagctaagcagggtcaggccgggataatactggcgaggcgcggtggctcatgcctataatcacagcactttgggaggccgaggtgggtggatcacctgaggtcaggagctcgagaccagcatgcccaacat

SEQ ID NO: 22114 - DNA, 872 bp, Artificial sequence
  DNA replication origin
ggctctcggctcagctcattgggatccctccggagtcccgcatgccacttactggaaacctagactggagccaaactagcggcttgcactgggcatgctcgcacgggggcctccgctggaggggcccggcgcggtcgcggttcctatggaaacaactgggcgcgcactaggttgagcggcgctgccgggctgcccccagccccgctttcctgcgggaaagccgcacggccaggcgggctggcgagggcgcgcgctgcacgcccgcacgcacgcgcacaccccccccccgcccgggccgcagcacgggcgtgtgtgcgtgcgctacacacacacacactcacacggcttttaggcaaacgtgctgctgtatgtgcgcgctgtgtgcatacacacacacacacacatacacacatacacacatacacacacacacgttgacaaacaggcggcccggctggcgtatgcatgcgcttgcagccgcgcgcgcgcacacacacaccaggcttgcaggcgggtgtgcccgtggggagggtgcgcaacacacacacacacacacacacacacacacacacactgctaacttaaggccacaaacggcccaccagaaggtgggtgggaaagggagtgaatcataggattttcccccagactaaccgaaaacagcaacctttttccacatgggccctggacagtgaggtcaagctaaagaagaggaagcagaagggaaagaaataagaaagagaaagagcagaggaagaaagggggaaaagaggataaaaagaactttagttattgatggtatcagaacacattcaatagaacagtgctaaacatcacgcaggatcgcaacagaaacatcaaggatgaccaag

SEQ ID NO: 22115 - DNA, 1080 bp, Artificial sequence
  DNA replication origin
ccgtttgtggccttaagttagcagtgtgtgtgtgtgtgtgtgtgtgtgtgtgtgtgtgttgcgcaccctccccacgggcacacccgcctgcaagcctggtgtgtgtgtgcgcgcgcgcggctgcaagcgcatgcatacgccagccgggccgcctgtttgtcaacgtgtgtgtgtgtatgtgtgtatgtgtgtatgtgtgtgtgtgtgtgtatgcacacagcgcgcacatacagcagcacgtttgcctaaaagccgtgtgagtgtgtgtgtgtgtagcgcacgcacacacgcccgtgctgcggcccgggcggggggggggtgtgcgcgtgcgtgcgggcgtgcagcgcgcgccctcgccagcccgcctggccgtgcggctttcccgcaggaaagcggggctgggggcagcccggcagcgccgctcaacctagtgcgcgcccagttgtttccataggaaccgcgaccgcgccgggcccctccagcggaggcccccgtgcgagcatgcccagtgcaagccgctagtttggctccagtctaggtttccagtaagtggcatgcgggactccggagggatcccaatgagctgagccgagagcctttgtgtgcagagggaggaggaggaggcggcggcggccgccgggctggagaccccgcccggggagcccccagcaggaacaatgctagcctgcctgacccgagggaacttactggacgtcctgcaggagggcttcaatgaggtaactgtcctgctcctcccactcctcagctcccctcccccagcgtctcccgcccagtctccggaaggggtcctcctcctcctccatcctttggggaccccagagcaaatcgcccccagaaccccaaaggggctaaggtggtacttacggtgcagatgggtgaaccaggagaaatcagaagggctgcctgcccacagctaagctgggccatgaccttccctggtagcttacctgagcccaagaggacaggaccacaaattcagaaatcacctccttccagaagagggggtctccatcctccctagagcttctctctccaaggaaatcctcagggaatccctgg

SEQ ID NO: 22116 - DNA, 1457 bp, Artificial sequence
  DNA replication origin
tccacgggaaggccagctagcaaagctactggcccggctcgcgggagaaagcgggaacggcggcggcggcggcgtctcggccccagcgactgggatgctccaggctctgaagcgcgcagtcccggccgctcagactgtgcagcagcccggccccggcggaagctgcctcccctcgcaggctgccggcccctggccgctgcatcttggcctccgcggacgcacggtgccgggcatcccccctggcgggggcatctcaacccatctcccactgggagggaggctcccggcggcgcaggctgcgcctcgagtccccagcggcgatcccactccgtgccaccttccggatccctccccgccccaccctctgctccctccctgggctgtcacacgcggcgaggcagccgggctccgacccaagccagctccgctggccaaccgaccgctctggacggaggttgagggtgcgggccaggggcggggctgggcggggtggaggtgggggtggggacgtcgacgaggggttgggggatgcgaggagaggagattgggagcctcaggataggcaggggaagagccgcgtatcggcagaatcacgaggagggctctagtggtctgagtgctggggagccccgcaccaaaaaccttgccttctccactctgagccctcccttggtggacgaggggtcggtcggacaggtcaggcccgcatggggctctggccgctcctcggggtggagactctgacgctccccaggaaaattcgccgagcacctatcccctcccaccttcccctctggcgtttcgtgtgttctttttaaccaactaaggatcattttgcttggctacaatgtgaggctggtatgcggttttcggagcaacaggctggcagggcttccccagggcgtctccggaggagcagtggcagggaatgagacacccaggggctatccttccttctgagccactcccgtcctgagcaagccacatctgggggctcctgggctcttcatgggtcacagagccactaagtgggctccctgggggcgagggctcagaatgtgcgggaacctgctgggttccagatagccacaagaagccctctccttccccagggactcactgaggaaaaggcagctactaacccagcatgccaaagagctggatgaggggtcagcattagaagaaaatgtcaaaatccagtagtgaaaaacagggtaaagcaaacaattctcctctggcccctctcctagaaaactgtcaccattagctcactgcagcctgatagccggtgggcccctcattcacacattcacagtctcacagccctcccctcagtcctcctgccttggaggagaaagcaggtgccctcaggaagaaatccactcttcctcctaccaccaactctagcaggcactatcaggctcagaagagtgaaaggcctgcagaagtgcaggaag

SEQ ID NO: 22117 - DNA, 1105 bp, Artificial sequence
  DNA replication origin
ctccgtccagagcggtcggttggccagcggagctggcttgggtcggagcccggctgcctcgccgcgtgtgacagcccagggagggagcagagggtggggcggggagggatccggaaggtggcacggagtgggatcgccgctggggactcgaggcgcagcctgcgccgccgggagcctccctcccagtgggagatgggttgagatgcccccgccaggggggatgcccggcaccgtgcgtccgcggaggccaagatgcagcggccaggggccggcagcctgcgaggggaggcagcttccgccggggccgggctgctgcacagtctgagcggccgggactgcgcgcttcagagcctggagcatcccagtcgctggggccgagacgccgccgccgccgccgttcccgctttctcccgcgagccgggccagtagctttgctagctggccttcccgtggaggcgttttccagccccagcgcggggagacatgcctgaatttgggagcgatgtgactctcagcctcccacttcacccggggacgcaggcttgctgaagcccgagacaggagggggaccatgggagggacgcaagtcaaatggtgagctgaagccactctggctttggaagtggggggcctgggtgggaacaggggcagggctggaggatgctgttggccggagacaggcggggtggtgggagcattatgttgggaggaccggctgctgaccaggggttatcactataaaatacggtgggcgtaggaagtggagccagcatggggggaggatgagtagcccttgcgcctgccagggtctttggtgggggagggcacttcatgaggatatagaactcttccttattgcctattacccgtttaaaaaaattaatttgagtgggatttggaagtatctttgctgcaggattgcttgtctgataaattaagatagaagagctattagacctgtgggaattaagaaatgtatcagccagacctgatcagtcattctctgacctcagagaggattatgatgctaagtaggggattgtttataaaataggacttttaagctaatcagggaggagcctgtcatatacataattaattagca

SEQ ID NO: 22118 - DNA, 962 bp, Artificial sequence
  DNA replication origin
tgagatgtggggagcgcctctgccccgccgccccgtctgggatgtgaggagcgcctctacccggccgcgaccccgtccgggaggtgaggagcgtctcttcccggccgccccgtctgagaagtgaagagaccctccgcctggcaaccgccccgtctgagaagtgaggagcccctccgcccggcagccaccccgtctgagaagtgaggagcccctccgcccggcagccaccccgtctgggaagtgaggagcgtctccgcccggcagccaccccgtccgggagggaggtgggggtcagcccccgccaggccagccgccccgtctgggagggaggtggtggggccagccccccgcccagccagccgccccgtccgggagggaagtgggggggtcagcccccgcctggccagctgccccgcccgggaggtgaggggcgcctctgcccagccgcccctactgggaagtgaggagcccctctgcccggccaccaccctgtctgggaggtgtacccaacagctcattgagaacgggccatgatgacaatggcggttttgtggaatagaaaggggggaaaggtggggaaaagattgagaaatcggatggttgccgtgtctgtgtagaaagaggtagacatgggagacttttcattttgctcggtactaagaaaaattcttatcctgttgatctgtgaccttacccccaaccctgtgctctctgaaacatgtgctgtgtccactcagggttaaatggattaagggcagtgcaagatgtgctttgttaaacagatgcttgaaggcagcatgctccttaagagtcatcaccactccctaatctcaagtacccagggacacaaacactgcggaaggccgcaggatcctctgcctaggaaaaccagagacctttgttcacttgtttatctgctgaccttccctccactattgtcctatgaccctgccaaatccccc

SEQ ID NO: 22119 - DNA, 1146 bp, Artificial sequence
  DNA replication origin
acacagacacggcaaccatccgatttctcaatcttttccccacctttcccccctttctattccacaaaaccgccattgtcatcatggcccgttctcaatgagctgttgggtacacctcccagacagggtggtggccgggcagaggggctcctcacttcccagtaggggcggctgggcagaggcgcccctcacctcccgggcggggcagctggccaggcgggggctgacccccccacttccctcccggacggggcggctggctgggcggggggctggccccaccacctccctcccagacggggcggctggcctggcgggggctgacccccacctccctcccggacggggtggctgccgggcggagacgctcctcacttcccagacggggtggctgccgggcggaggggctcctcacttctcagacggggtggctgccgggcggaggggctcctcacttctcagacggggcggttgccaggcggagggtctcttcacttctcagacggggcggccgggaagagacgctcctcacctcccggacggggtcgcggccgggtagaggcgctcctcacatcccagacggggcggcggggcagaggcgctccccacatctcagacgatgggcggccgggcagaggcgctcctcacttcctagatgggatggcagccgggcagagacgctcctcactttccagactgggcagccaggcagtggggctcctcacgtcccagacgatgggcggccaggcagagacgctcctcacttcccagacggggtggcagccgggcagaggctgcaatctcggcactttgggaggccaaggcaggcggctgggaggtggaggttgtagcgagccgagatcacgccactgcactccagcctgggcaccattgagcactgagtgaaccagactccgtctgcaatcccggcacctcgggaggccaaggctggcggatcactcgcggttaggagctggagaccagcccggccaacacagcgaaaccccgtctccaccaaaaaaatacgaaaaccagtcaggcgtggcggcgcgtgcctgcaatcgcaggcactcagcaggctgaggcaggagaatcaggcagggaggttgcagtgagccgagaaggcagcagtacagtccagcttcg

SEQ ID NO: 22120 - DNA, 984 bp, Artificial sequence
  DNA replication origin
tcctttgcaaggtcaatatctggggtcttgaagttcccttcgtccattttaaagtcctcgccctgggaagggtttgtggtgctgacggaggcagcctcgctcttcgggctagcaagggctgtggctgcctcggccgggctcttcgcggctccgggctgggtgggctccgggtccgggcctttggtgctgggagcctcctgcttggcctgaggggcttctgtggcaggggcagccgctgctgctagaggactggctgccccagtcggggtggggactggtgcaggggtgggcttgctggccggaggagccttagaggcctccccgacaccagcaggggcgcttgggctgaggacagccccttggttagccaggacactagaagacaaattgctagcggcaggggttgaggtcggggtgtcgctcaggtcaacgaggggggcgaccttgggggctgaagctggggccggggagggggcagaggcgctgggccccttggaaggggtggcctggccagccggtacagagtttgagtcaggcgtggccgtggccggcggggcaatactggaggtcagggtggtggtctcactggtggggctgttctgagcagtggcaaaggtttcggtgatagtgtcagagttagtggtgacggtggtgacagaaggcagcatgtcctcgacagtggccgtagtgtcggcaggcagcctgtgggaggacaggaagtagaagagaatagacaatgaagctgagacgtgacagagaagcgaggaggagggctgaagcccaggacagggaccatgggggtgggggcatgcagttaggcacaggcacggacacaggcccacagagagagaaggatgctgagaggaagcacacgcccaggtgggcagaagaggacacaggagacgacagagaacgtggcggtctcaaaagggacctgctagcccttccctgctgatgtctctccagctctctgcatagagctcc

SEQ ID NO: 22121 - DNA, 1711 bp, Artificial sequence
  DNA replication origin
gctgccggaggggcggccgcgcgtggatgcggcgggagctggaagcctcaagcagccggcgccgtctctgcccccgggcgccctatggcttgaaggtaagcaccggccggatggagcggcgggcgactcagtgtcacggggagaggaggagggacctccaaggggagcgaggccaggaccagaagtttgtgcggccactcctggccgcctgctcgggagcgcccgcctgggatccggctctgcatgggctccccgtcgggcgggggcagagggcgtctggagcccgcggctgctatcccctctccctccttctcagtagcctcctcgccacttagaagggaatcctctccccgagcacgagcgggcgcagctggggcagcctccccgcggggcgcccagggcagcacggcggagccgcggcatcggagggcgggagggaggccgctccccacaatctcgggagggcacttcccccagcacccaagcgcgagacccggggctcgcggccagagtttccgacttcttccggaggaagaagggctgtttttggcaactctgtgttggtgcgacctgacccttttcagtttctaaggcagaagctaaggatgggggagaggcagattctggctggattctcccgctcccacggttgccgctgtccttggtcctgaactttcgttctccttcgccttctcttgggttgacacctagtcggggagggaggcttgggtgccagacccgtttctacccggcagtgcaggcgacggtggcggcagtagcggagggtgaccgcccggctctcggcccggctctatgatggaccgagagcccctctagggtggtatgcggagacaagagacacctctaagcaccagacagagcgcttccctatccctgtctgaggcgggcagcccttgagtgcttcctcttgaagagcagaggtaagagggtgcgtgtgcgtctacataacaggcttcaccatggacacaagtcacagcagtgcagctccgtggggacaggcgcttgctctcagccacaaggaagctgtctgagcaagtcactgttgccccacctgacaccccactacttttttttcggtggctcttgaggttgggtgagggggtgagggagtgaggtgcaaggcactttgtggatcccactccagatccttctgcagatccaagcctttctgtattttgaccaggctacaaaccttttaggccaatccttgctcctccttagggagctagatgttcaacgattctccccactcccaccctgcttcaaatgcaaatatgcatgcttatctctgattcatcctgcagcattaggaccacttgaaaaagaaatcatgcttatcgtctttccctcatgcagctgtttgatgagggtggccagatagagagactgtggtcagcatgaccagtttcaagaaaatcagcaagctgctttcctgggtttcagtccctgccttggacttccctccttagtgttcaaaattcctggattatttgttgcagggggttttgatgccatctctgaatgcagacatctgacaaggaagtggtttgggagggttagacctagaaccaaatgagggccagggtagtcccagctcttaaagatcattgagttccttctaccttccctgcacagcctgaggtgcccagaaagtggagaggttctgatttgttgtagaagtccgggcagc

SEQ ID NO: 22122 - DNA, 1070 bp, Artificial sequence
  DNA replication origin
gccgcacaaacttctggtcctggcctcgctccccttggaggtccctcctcctctccccgtgacactgagtcgcccgccgctccatccggccggtgcttaccttcaagccatagggcgcccgggggcagagacggcgccggctgcttgaggcttccagctcccgccgcatccacgcgcggccgcccctccggcagccgtccggggccgccactctcctcggccggtccctggctcccggccccgccgcgccgttcagagccccggcgggcagcagctcggccggctctggcccgcggggagcagtggacgggccgcggcggggcggggcggggcggggccgggcgcggggcgggcgggcaggagggagcgcggggacggggcggaggcggcgcggtgcgcgcgtgaggctgccggttcggcactgaagctggacagctctgcggcgcccgagcgcggggagcgcgggagggaggtgccccggtccccgcccctgagacaggccccgcccccgccccccaccaaaggagctgtacctcctcggcgatccccggcctgaacgggtaggaggggttgggggattccgccatcccttgttttgaggcgggaacgcaaccctcgaccgcccactgcgctcccacccacacccagagtaataagctgtgattgcaggctgggtcctcaccgtctgctcgccagtcttctcctttgaggactcagaagccaagggttgcgggaggcaccacccatccagcaagtcaggcaaggagaggaggtgttggaagaggtccgcatccgttttctgacttcaggtcttggaatctatgtagtcagttctattgctggactcatccaaaggaaaaagcctgtttggagttgacctgacatggaaatgcaaaaggaggcctcaggggttccagctcacccttgactccaaactgaggtgtgtgaggcagggagtggggagagggagaaagagatagagtggtgaagggtgttccgctgctaccctgcccactgtcatttgggctgcagaggaacctcgttcttctccccttttcttcctctctcct

SEQ ID NO: 22123 - DNA, 1182 bp, Artificial sequence
  DNA replication origin
ggaacacatgtgctattaaggatacagcacttacatggcttggtcaccaggggtatgtggaggatgagaggaatagagtagatggacatgaccaggtagatggtggtgccattcacaaacagagggaatttgggaggagggtttggggtggggagagacaaagattccatttgtaggcttacagacatgaggcatctgcaggacattcaggtagagctatatagtaggaagttggaaatataactaggacttgggagagagagctgagcaagaggtagaagtttaacagccatgaatggagatggtaaacaatgcaatggaaatggatacaatcacccaaatagaaaatgtggagtgagaaaaggccatggacagggcctagggagcaccagcatttcaggagggggcattgtaaacacgtctgcaaaggagactaaaaatgaatagtcaggaaggcaggataaatagggaaggcccactggaatctcggggaaaagagacttcaagcaatgtataagcagcaatataaaagcacaagcaatcctttcaagatgtttggctatgaatggagaaagaaaatcaaagtgctaccaaagtcctggctctggaggagagaagaggcgatggaattaaagacgtgggtacagggattgcatttgatgagagacttcagggagggaggagggtattaataacagatgtagggaaaggaagttatgggttggggggtcatagaagtaccttgctgagattgaaagccatacatttgcagtagatccatcatacacgggtctgtgattttctacgacgtttaagtataggaatgataatggtaaagggttagaggtctgtgggatgagagaaagggttaaggtgggtcaggtggagaggcttagggtaggatggggagagggttagggtaagacaggtggggagagttaggacagttcaggtggagagggttagggtgagacgaggagagggttagggtgggtcaagtggagagagttagggtgagtcaagtggagagagttagggtgcatcagtggagagggttaaggttggtcagtggagagggttagagtgggtcaggtggagagggttaggtgggtcaggtggagagagttagggtggatcagtgaatagggttaaggtggttcaggtggagaggatcaggtgagt

SEQ ID NO: 22124 - DNA, 895 bp, Artificial sequence
  DNA replication origin
tagaaaggttcagttagacctggttattaaaaacgtttaatttcctccagtgaaaaacgggcgggaagcaacgaactttgaaaacaactaaggaagaaaacgcgtctgcttacagtttgccaactacgggacaccgtggaaatcccatctcgggattggcgcggtgcctgctgggagttgtagtgcgcccctcgccttccgggcggcggtctgaggcccgcgagactccgtttcccggcaggcctcgcgtcaagacggccggcgggacgggagctgcggcgctggctacgagagtgacccagtcagcgttggttcccgtcttggccatggcctcgttcgtgacagaagttttggcacactccgggaggctggaaaaggaggatctggggacccggatcagccgcctgacccggcgggtggaggagatcaaggtgagagcggggcagctgtctgctgactggaaggggactccgggtccttgtgtgaagggactggagagaggagtcaggggctaagggcagacagagtggggaccagcagagtggggcctgttggggagatctagttgtgggggctgaatgaggagtggaggggcccagaatgtgtggattgaggagggatcttggaggggagcccacacaggggttgggaactgaggaggcgaggagacctgggactgtggggacgaacaggcggtggctggagagcactggagagtggagttatgttggggaggggtgtgccgcgggaagagggagactgaagagaccagcagagcgggaggagcaactggaagctccgaggaagctagggagcgagcgcaggagaggaatagaaaagacaggatcccccttccccttcttccatcgatgagtgtttatttcctccacccact

SEQ ID NO: 22125 - DNA, 1138 bp, Artificial sequence
  DNA replication origin
gctgaccaacagcgacaggcggggccgggatcacgtgaccgacgtctggtcagccgggcgtgcgcgggagcacgcagaactgttcggccccgggccgcgcgccttgcgtgcgcgcgcatgccgggggcggggcatgtgggccaagcctccggcgcgcgctgcgggcgggggcgggacggagcggggtggagggcgggggcggggcctagtcctgagaggctgggccggcggcggctgcggcgggagaccggtgacccgcggctgggcgcctcggccatgactgcggagctgcagcaggacgacgcggccggcgcggcagacggccacggctcggtgggctccgcggcggcgagcgggagctgggggcgggctccaggccctgaggggagcgtgcggggcctgcagggctgcgggttgcgggctgcggagggcgccccggccgggcgggacagggggtgcgcccgccagcgtgggtgagaaggccaagggctctgcggggctcgggccgcggagattgaggactgcatcttcgcgtccgtgggcgagctgaagttgtagggggatttccagattttggaaaaccaaatataaagggctggacgtggggttctccgccgcagggatcagtaaggtgagccctcctgggccccgtccggggtgagaaacttccgaaagcggcagcgttggttggttttgttttgctttgacttttaaatcagttttatggcggcgtttttaaaaggttaaagcagaccgaagttatctcacttaaagtccggaattaatcaccgtcttctataagaccaggggtcccagttaccaccacttccctccctcccaacccggctttaaaaacaaaacagcgcagcctccccaattattgccttcatcgctctagatttttaaggagggggaggagctgcgtgatgaatagaaagtctactgatgatgatctcctgttcccaatgtctaagaagattgaaatcaatataaggacttctgatctaagaatctggtgagagtgaaagaaccctggtttgagagaaaagctaatgtctgtatgaagaaacttgggaagagggcaatttgagcatgtcttctagtgttacttcggaatgttataacttaacaccacctc

SEQ ID NO: 22126 - DNA, 1187 bp, Artificial sequence
  DNA replication origin
ggcgggcgcaccccctgtcccgcccggccggggcgccctccgcagcccgcaacccgcagccctgcaggccccgcacgctcccctcagggcctggagcccgcccccagctcccgctcgccgccgcggagcccaccgagccgtggccgtctgccgcgccggccgcgtcgtcctgctgcagctccgcagtcatggccgaggcgcccagccgcgggtcaccggtctcccgccgcagccgccgccggcccagcctctcaggactaggccccgcccccgccctccaccccgctccgtcccgcccccgcccgcagcgcgcgccggaggcttggcccacatgccccgcccccggcatgcgcgcgcacgcaaggcgcgcggcccggggccgaacagttctgcgtgctcccgcgcacgcccggctgaccagacgtcggtcacgtgatcccggccccgcctgtcgctgttggtcagcttcacagccggtggaggctgcgggccgcgctgccagtgtccgggaactgggtttgcgaatcctgggagccgcgttcctgagtcttctccgctctctgccctcaaaacctcatttgtaggactgacctccggctccaccctccccacgggcgagttaaaactgttcccccgccgtgggaaactgccgaatgaccgtggaataaaggatttcccatcaggctttgtagccatttccaactccaatgacatgaagaagtgttcaccatctttaaggagagaaggaggatgaatgcagtcgcttgtctaaagctaaccaaacggaccaaagcctccgttcatgggtgtcccgcttggtgcccttaaccctgatgctcttaacctgggcatgataaggaaaattgcagtttttccattttcgattttcagaagttcaaactaaaattttgtgttactttgttacgtttgagccagatatttacgatttcatgttaaaagaccaggtgctcctattgaattgttttttgtttggttggtttcggtttgtttttttttttttctttttttttgagacggagtctcactctgtcccctcaagctggagtgcagccgcacggtctcggctcactgcaacttccgcctcctgggttcaagcgattctcctgagtagctgggattacaggcacgctgtaccacacccagggtttcaccatgttgcccaggct

SEQ ID NO: 22127 - DNA, 954 bp, Artificial sequence
  DNA replication origin
ggacagaacatgcagactcaggccttggtgacataagctccgcattgctaaaaccgcgtgacctcgagggctgactggcctgagaaccctggatggcgctctcggccacccccacctcccaccccaacctcctgggcttcggtcagaatccacagcccgtgcccgaagagcgcttcccgcctctggcaccctaccttcgctcagctccagggaaaaggggagagggcagctttctgcagtcagaggaagagtacattttctttggctgctctaccctctgaagtagggcggccagctgaaggaggacacacttttgaggggcccagaggttgtccaagcttccccctgccccctgaagactgtgcactgagctgggcgcagttctcgggaactgtttccacccagattgctggggggcgggggggtaggatgagggcagagccgagaggctgtccaaggtttgggagagagaaaagtttctcccaggactcgaccttggcctccagcaatcgcgacagctaaaaacgggtgtctcgcttcgacaatagatccccgcggaccttctggcacctggttcactagcgcccgcgaactctgcctcgggagacttattgaaatccggatgctcaagccgggaggcgcgcagtaaccaggaggatgagagggccgggtttgggctaggaaagcggccttttaaaacagatgtcagggggactgcagccccgagccatgagaaaaaagttaaaggcgagatgacacgcactgaattggggcaaacattggaagaggagacaaaactgcgtgcttgagcaccggggtgcggggagggggggacaaaacccgtatccagtgcaaattaaaatcttgggagtaggtgggggctgctgcgcgcccttcaccctcagttcccctattaaggattctgagtccccatgcactcctgtcctctggctc

SEQ ID NO: 22128 - DNA, 794 bp, Artificial sequence
  DNA replication origin
tgtcagggggactgcagccccgagccatgagaaaaaagttaaaggcgagatgacacgcactgaattggggcaaacattggaagaggagacaaaactgcgtgcttgagcaccggggtgcggggagggggggacaaaacccgtatccagtgcaaattaaaatcttgggagtaggtgggggctgctgcgcgcccttcaccctcagttcccctattaaggattctgagtccccatgcactcctgtcctctggctccttccttcctctccgctcggccggtgagaggcggccgccggcgccccagcagcagctagatgtcaggcgaagcccggagcgcggagcgcggggaagggaggggaagggaggggaggggaaaggaggggtggggcggggagcgcgcgcgggctcggccagtgcggggtggtgggcgggctgagcccggggacggcgcgggaggggggagggaaggggggcagctgtgggcagggagccgggctcggccgccagcactaaagatggagaggcgccggggccttgcaggggagggggctcggcgttgacgtgggacgcggcggaggcgcagcagccggtggtgatttgctaacctcgcagcagagaggagttgagggcgatgagagcgggtactgcgaactgccgggcgatgctgtcgctgccgccgtgatacggagagcaacagttccccagcaacacccctccccgacacaggcacacaccccccgacaggcacgcacacccaccccacagtgcccggctcggctgcggtgagtgaggggccgg

SEQ ID NO: 22129 - DNA, 988 bp, Artificial sequence
  DNA replication origin
gctgagcccggggacggcgcgggaggggggagggaaggggggcagctgtgggcagggagccgggctcggccgccagcactaaagatggagaggcgccggggccttgcaggggagggggctcggcgttgacgtgggacgcggcggaggcgcagcagccggtggtgatttgctaacctcgcagcagagaggagttgagggcgatgagagcgggtactgcgaactgccgggcgatgctgtcgctgccgccgtgatacggagagcaacagttccccagcaacacccctccccgacacaggcacacaccccccgacaggcacgcacacccaccccacagtgcccggctcggctgcggtgagtgaggggccgggaagaggcgcaccgcccagcgagcgccgcgcgccggggcttcccggggctggagaggtctggggggcgcgcgctcgcttcggccactcggccgctgggcttgtgccttttttatttggcgtgttcccttcctgccgctgcagccgtcgccgccaccggttgggggtcggctagaagggggagccccggctgtcagcctgggcgcagctgcctccccagcccttcctcttcagggcacggtcggggtgagaggtggggggcgtagcggtgtgcgggggctgagggcgtgagcagaggggtcggggatccggaggctttgtaccgccaggggctggcggagcaacagagcccgtgggtgctcttatgtatgcggaccggtgcgcgggcgcaagataaggttgtggtttatttatttgtgtgtttattcgccggccggctgggaagctagaatcggaggagctgacgagtagatctgggggcggaggggagcaggactgggactgcttacgttttgtttctctttgagaaaacgtggtgggctttttcttgattggacttgatccccaccccccttttgcaggggagggagggaagctccagagggtctgcagcgctgcgggcc

SEQ ID NO: 22130 - DNA, 987 bp, Artificial sequence
  DNA replication origin
gagaacaccctgcagccccacggcggcatcctcccagcccctgcctcggtgcctgtcccctcttctgaccccagcaatgtgccctcctggtgagtgtgttctggaggaggctgcccacaattgccagggttggggcagagggcagtggcagccggggctggcagggggcggcagtggggccgcctgccccaggcagggaggagaggggttgagtcaggccacggagggagcattctcaggctggcctggccagggcccctttctctccatgagatcatatctgggtcaaagagcatgtaaagctggcagagctggcggtcacacaaagcccattcagcccagcccctattcactcacctcctctcccccagcgcccgcgccgccgcgaccccagcacagcgcctaagccccagctttgatgtccaagaacagaaaacggcgattaaatgttgttttaaagagggagtgctcactgccctcccatctgtcaagagaaagctgaggcctgagggaggggaggggagctgggggaggggcgaggaggctgtgtgtgtgtgtctgtgtgtgtgtgtcggggagttggagtagagtgtgggggtgaggaaataggcaggggcccaagaaaagccaggatcaggacggcttgggggaatggtggcaactgctcaaaatcaaaacacagaatttggttaaggactggtttcccagatgagaaatatgtggagagggaaaataaggtgggacagagaaacaaaagcaaaaagaaaggagaaaagaccacagatgaggaagagaggggaggagtggaaaggagagaaaaaagattgggagagaggaaaaagatgaggggcaggaggggtcaagaaagcacagcagacggcaaagagggagaggagaaagcaaagacagagaagcaacttctaggggctggaggcccccaggctgcacctgttcctcctcctgggaagattgtccggtggtaggggt

SEQ ID NO: 22131 - DNA, 2592 bp, Artificial sequence
  DNA replication origin
ctaatttttgtatttttagtagagacagggtttcaccatgttggccaggctggcctcaaactcctgacctcaggtgatccacccacctcagcctcccaaagtgctgggactgcaggtgtgagccaccacgcccagccccaaatctcatctcaaattgtaattcccacatgttgagtgagggacctggtgggaggtgaccagattatgggggaagtttcccccatgctgttctcatgatagtgagggaattctcacgaaatgatggtttgaaagtgtggcacttcccctttgctagctcgctctctcttgtagcagtgtaagacgtgcctcacttcccctttgccttctgccatgattgtaagcttcctgaggtctccccagccatgtggaactgtcagtcaattatacctcttttcttcataaattcgtctcaggtagtatctttacagcattgtgcacacagatgaccacaggtgttacgtgtgtttatgtgcatgtctctgtggtgtgtatgtaatctatgtgcatgtgtggtgaatgtgaacgtctgtgtagtgtgcgtgtgtgtgtggtctgtgtggggtgtggagtgtatgtgtgaagtgcgtggtgtggtgtgtggagtacatgggtatgtgtgtggagtgtgtggtgtgtgcgaagggtggagagtgtgtgtgagtgtgtgtgtgatgtgtctgtgtggtatgtgggggatgtgtgggagggtggagtatgcgtggggagggtggtgggtagagtctgcatgtctgagatgtggtgtgtgttgggtgtggagtatgggtggaagggtggagactctgtgtgtgtgtgggggggtggtatgttgtgtgatgtgtggagcatgtgtgtgagcatgtgtatggagtatggagtgtgtgtgcagtgtgtgtgtttgtctatgagacagagagagatagtgagagatgtggtgtgtgggggatgtggagtgtgtatgggacagtggagtgtgtaggggtgtggagtgtgtgtgagacagtggagcatgtgtggggtgtggactgtgtgtggggagtggagagtatgggggagagtggagtgtgtgtggggcgtggtgcgtgtgggcgggtggagtgtgtggggggtgtgcaatgtatgtgggagtgtggagggtgtgggagggtggagtgtgtgtgaggtgtagtgtgtctgcggggtgtggtgtaggggggtgtggagtgtgtgtgggagggtggagtgggggggtgtggagtgtgtgtgtgaggtgcggagtgtgtgtaggagggtggagtgtgtgtgggaaggtgaggtgtgtgtgggggggttggggagtgggaaaggtgtgcagtgtgtgtgggagggtagagtatggggggttaggagtgtgtgcgggatgtgaagcgtgtgtggggtgtggtgtgtatgtggggtgtgaagtgtgtgtggggtgtggaatgtatgtggggtgtggagtatgtgtgagaaggtggagtgtgtgtgggggtgtggagggtgtggagtgtgtgtggggtgtagagagtgtgtgtgaggtgtgaagttgtggggtgtggagtgtgtgtggggtgtggtgtgtgtgtggggtgtgaaagtgtgtgggatgtggagtgtgtgtggggtgtggagtatgtgtgggagggtgatgtgtgtgtggggtgtggagtgtgtgggggggtgtggagtctgtggggtgtggagtgtgtcaggggtgtagagtgtgtgtgaggtgtggggtgtggagtgtgtcaggggtgtagagtgtgtgtgtgaggtgtgaggtgtgtgtggggtgtggagtgtatgtgggagggtgattgtgtggggtgtggagtgtgtgtgggagggtagagtgtgtgtggggtgtggagcgtgtatagggtgtagagtgtgtgtgggaggatggagtgtgtgaggtgttagtgtgtgtgggatgtgtagtgtgtgtgggagggtggtgtgtgtgtgtgggtgtggagtgtgtgtggtgctgtggagtgtgtggggtgtggagtgtgtgtgggagggtagagtgtgtgtggggtgtggagcgtgtgtagggcgtggactgtgtgtgggatgctgcagtgtgtgaggtgtgtagtgtgtgtgaggtgtagagtgtgtcgggggagggtgaagtgtgtgtggggtgtggagcgtgtgtggggtgtggagtgtgtgtggggtgtagtgtgtgtgtgggtggagtgtgtgaggtttggagtgtgtgtgggagggtgtagtgtgtgggacagtgtggagtatgtgtgggaaggtggagtgtgtgtgaggtgtggagtgtgtgtgtgagggatggagtgtggggtgtggagtgtgtgtgggagggtggagtatgtgtgggatgtggagtgtgtgtgggagggtggagtgtgtgtgaggtgtggagtgtgtgtgggagggtggagtgtgtgggacagtgtggaatatgtgtgggagggtagagtgtgtggggggtgtggagtatgtgtgtcagaggttgaagtgtttgtaaagtgtggagtgtgtgtgggagggtggagtgtgtgggacggtgtagagtatgtggggagg

SEQ ID NO: 22132 - DNA, 2309 bp, Artificial sequence
  DNA replication origin
ttcggcggcccgagggtggcggagggggcgtcgcggcctctgcggccaggcgggcaccctgcgggcctccgcgcgctccctgcgtgaagagcagtcttgggaatttgcccaggggcggctctgcacgcccggtgccttccctgaagacaccgagcactcggctggagcccgatgtgtggctgcccgtgtgccgggcgcgttggcgcggtcgggaaagaagagggcagtgtttgcttttgctaacaaaagggagccggagctcttcctcagcggagaggccggctgtgctgcacccagcctcccttcccgccacctcgccgcgcttggcagccgcgcggcgtcctctggcccctgctgcaggctccaggcgggcgccgggaccgagtggcacggggccgcggggtgcgagcggcgatgcaggaggggatgcagcagggctctgagcctgcaaagcccctccttgcagctccagagctgcaggacccgggagcaacaagtggcggaggacgccgagagctcagcccccacctgcggagccccaggcccgggcgggcacagcgttggggccacggtgctgcttcaggggcgcctctccgcttgggctgtgccttttgtttacacgctagaggacacacagttatgtaaacaccgcaggagacacgctgtaggagacgggggatgtgtgggggtgctagcttgagatttgggggacgccgggttggctgcttgcccccaaaataggcttgcaaaggagctcggcttgggaaacctattggggggcgtctggcagcagcgtcaattccagcgctgagggtttttttcctccatgccactgtctccggatgttgtttatgtgtttttcctctgtgaattcttaatttatgagttacgagataattgggttcagccgatgccggtgtggttacaacttcatttcaggtgatgcctctgactggatgggttcaataaaatgttcctgaaagagatccctcgtgctgctgcattgtaaaaagcgccagtgtcagttaaacgtgagcgtgagtaaaggctcggtaactggcgcataatagaggcaacaatagacttgtattggctgcaaaaaaaaaaaaaaaaaaaaaaaaaaaagccggggggcggtggaaagctgtggtcggggatattgctttttgactaaaaatgggagtcgtgcaatgacgcttggcagcagaagtaggattagattatgcctcccctgtcaagactgctcattgaaggcaccgggtagtagcaacggtactatatttgtaactatctcgcggtgagaagttgccttccctgcgagggatatatgctgacttaggagcggtctggaactcaaccgtgcatgtcaaagctacatgaaaattctgttgccagttaccatggaagcagcttcttgctcttgtgtacatccctgtttgtatgctggttatcagattgtgttcaaattagaaagtaattgggtatgatttgtagtgaggagatgagatgactttcttaatttttttctcttaatgcatatatatatatttcgtggtgagtttgagaggaggtcttggctcattccggggtcccataccccaggggtaaatttcaggtgggcaccaagggacttttcctcctcagttctgtttaagctttctcagaggcctccagttcccactcccagggttaaagaaacctgttggtgcatctgacttcattaggcttgtttcgtttacatccttgctgggaaagcgaattaggaccatcgtgcgtgggtcctggttctgttttctcctgtaactgaagccatccatcccccgcagaaaatctcctctcatttctcctgtgatgtttggatgaaatggatgttaatgaaatgcagtaaaaatgggtttgcttaagctcactccacagtgttaatcacgcctgttatacgttcaaggtgcatgcatgatgttgtttacgatcccgagtgaaccagtagctgatcacccccctcttatcattttcaggattagagaagatggctggtggatgggggatttatggtggtgatgggaaggaggggggctgacttttgcttgctttggcctgttggggcttgcaaaccggggatagagactttacaaaagtgccgccctgttattgttgcctttccctgcatcagattgaatagccgcagtagggacttgcacttgtctgtgatagatttgataaaatatccctcattaatgccactttatatttacagtgtgtcactggagacgcacaaggcttcatttagtgacttgtgtgacgagacaagc

SEQ ID NO: 22133 - DNA, 1098 bp, Artificial sequence
  DNA replication origin
ggacgccgcgcggctgccaagcgcggcgaggtggcgggaagggaggctgggtgcagcacagccggcctctccgctgaggaagagctccggctcccttttgttagcaaaagcaaacactgccctcttctttcccgaccgcgccaacgcgcccggcacacgggcagccacacatcgggctccagccgagtgctcggtgtcttcagggaaggcaccgggcgtgcagagccgcccctgggcaaattcccaagactgctcttcacgcagggagcgcgcggaggcccgcagggtgcccgcctggccgcagaggccgcgacgccccctccgccaccctcgggccgccgaaagaacgggcagccgggaaatcccgtgtccccactcgtggcagaggacgctgtggggcgggcgggctgcgggctcccggcgccttcccgcagaggcggcgacagcggccgccccccccgcggggccgggccggggaactttccccgcctggagccgggccaaaaagacccgcagcagagccgagggggcggagggctgcgaacggccggagggaaacacgagaggcgtgcagtttggggacaggggagaaaggcagagcgcgttgggggaaggggcaggggagatcagacaagtctggggatgtcctggggaccggggagaaatcacgccgcgggcggctgggagtcagccaccaggaggcttcggggatggagaactgggggggccctctggagaggtgggggcgaatggacagccctgggaggtgggaggacctgcaagttacggggagaacggcgagtttagaagggtccggaagggttgaggttgtctttgaaccatccccttcccccatgctttacagcccccgggccccccattctcactccactctgcaccccgcgccaagccggggagagaaggtgtgggtgcagccatccctggggactctcattcacacttagccgggcaggggagaaggggctcacagatgccctcagccccttccctctcagccctgagtttcctctccacactccctccgcttcggatgtaggaagtggggggaggttgtcatggaaacgtttcccccctctg

SEQ ID NO: 22134 - DNA, 1315 bp, Artificial sequence
  DNA replication origin
gaagtggggggaggttgtcatggaaacgtttcccccctctgtggccaaggctactggggtgccttcggagatttaggggccaaccggtcggtgcccacacctacctgtggggatcagtgccgcggcggagaagagcaacagcagaagccggagccggagcccgggaggcgccgccgccgccgctgccgccgcacactgggatccgctcggcagcactacactcgccatgtcgggcacctgcctcagactggcggcgttggctgcctccggagcccgagcggacagctaatgagatgctaatgacatgcgctggaggcggagtccgggcagaccaatcacagcgccgcgagcccaacccggctctcggagggcctcgctccctcccccaccccgccccctggcgctggcgttcggcggcgcgcccgcgccacctaggggcggggccaaggggaggggcgtatgcaaatatgtttatgttaaaattcgggttttgctttccccggatcaaggaaaaagtgttctcccgggcgcctggcgtgcaaggactcgggctccagggggcgggtctagcttcttgtacacctttattaggaatgtttatagcaatcgctgtatcagaccgacgactggagaatctcccttaagagggtcctctgtcccgcacaccgagtgcatctggcctagcgaaccagacgttgcaaatttccgtcactcaccttgcaccgaaggaatagatctttgggaacgggggctgtgcgggagtggagagtaagaaggcaggtccccggattgacaaaacaatctgggagaagtgcatgcgtgctttgcacgtccggcggagcgggagagcccgctcaacagcctagcggtagactcggggatagttggagaaggcagccgtagagtcgggttctgagattttccagtcggtctttttgcggcagaatctcgggaaaggtagatcgaggagggtatgctcaggctcctccgcttgtcgagggtctcctccctggttttaatatataggtgtgtgttgaatatatgtgtgaaatatttgtaatattagatatttaagattacacaacaacggaaaaaattagtcaaggcttcaggtgaagagcgggggtggtgggagttggggagagggagtgtggtgaaggcagggtctgccgtgttcctccttcggggctcaaaccctctcactcctcctctgcgcccccagcccttcctaaggaagctggggaccaacaggtgctccgagcttcccctgtctctgggagagcctctcctgctaaagcgacttgcatctccggac

SEQ ID NO: 22135 - DNA, 909 bp, Artificial sequence
  DNA replication origin
aagtccatccattagccaagtccatgggcatttattgagcacttatgccacatcaatctatgctcggctctgtgggaatcaaaacaagcaaagcagtagttactgcttgtgatgaccttatctctgtgggggtggcggggggagtcaaacaggcatttgaaactattggagaacaaagccagactcaagcaagtatgggattgtgtgcagcagattttaagtgcacagttctggtggataggagagtcggtgtggactgcagtggtcaagttaagtctggagcagaggagttgctgggtggatatgctaatctcaagcataaggcaggggagttaaggatggggcgcccagggtcctttgtgcggagcagggcagcttggctacggtcatctttatttcctcgaaggccagacaatctgcggggaacgtggggagggctcatctgtttagaagctgtgctttaggcaagcttgagaaaacatctgtccatccttgtccaaagtgggtagctaaggacccctggcagagaatcacccatcttgggagctctgagcaccaaggaggaaagccctccgaatttgagcggtggttctcaatgggaaagagaaaaggagtttgcccatagccaaggggagaagctggagcagggttaacctgcggcttggggttcagttgagcaggctgggcgcccggcatgggaggtagaggtagggaagctgggccttcccttcgtcttttctgcgaccagggacgggtggcacctcgtggtccgcaggaatacctgtgtggagggctggggtttggctcctgccggctcctggagtatgctgggggtccaccccccgcctccctgcgtccccttctccagcctcgcctccccaatgcgcttcccgcctctgcatcgccgcc

SEQ ID NO: 22136 - DNA, 1216 bp, Artificial sequence
  DNA replication origin
ggcagggcaggggtggacagagggctctccccacccttccctcctccagtgaaagtaccagaagagatggcggccgctccgccgagtgtcattaccgcggaagcagcagaagccggcggcaggagcgggcccgagagcccgcggccagtggcctgcgcaccccgcgcccagcgcccccgccgcgggtcatcagtgtcagcgttgaggggtcccggggagcggttgcagggcggcggcggcggccgggtcatcagaagcacagtggagccgccccctgctttgggaggagcaaaagagcctctcgcttgcctcccgctcgagctccttctcctcttccttttcctagcgcttctctccctccctcggcggggtccgcagagacagctgggcaggcggaggctgcgcgcctctcgcacctccacgcccaccctcccgccgcccccccctcggcctgaaagatctgcgtccacaccaccctgcacccagggcccgtcaggttttgcagaagtttgctgagggtcctcacagggggtctcccaggggaaggggtggagggctggaggggccgcggtgggaagaggtggcagacgccgcctggcaacggagaccctaccctttctagaaattcagaacgcagagaaaccagtgcccagccctgctcttcagcaaacggtgtatttcagcccgagtttccttccgggggtttggctgtgagtgtgtgtgacctcccagatggcggcacggttcagatcccatgctccctctgtttcacagctgccagagacagactcagggattccgggctttggaagaaggtcagaccatgacctcctatctcctgttctcttctcccctcactcatcacccgctggccaccccactctctgcaccccaccatgcatgcttactgtagacctaatcactaattagcccaagggttgactgagcgtgctggtgagagtaacaggaggcaggtggatggggaggtgtgatgctgcgcgcatagtaggtgctgaaaacatgcaagggcacgatgcacataagctagacagagcccttggtcctgctgggtgctgggggagtgagattcagagcagcagaccatcagccgggtagacagaggtcatggccccagcagctcagccccattagctaggctggtgggaggcagccagtgcttttgagggctcagacaatccctgcgattcaagggctg

SEQ ID NO: 22137 - DNA, 923 bp, Artificial sequence
  DNA replication origin
tggggcggctgccgggtgggggggctgaccccccacctccctcccggacggggcggctggccgggcgggggctgctcccccacctcccagacggggtggctgccgggcagagacgctcctcacttcccagatggggcggctgctgggcggaggggctcctcacttcccagacggggcggctgccgggcggaggggctcctcacttcccagacggggcggctgccgggcggaggggctcctcacttctcagacggggcggctgccgggcggaggggctcctcacttctcagacggggcggctgcccgggcggagacgctcctcacctcccagacagggtcgcggatgggcagaggcgctcctcacatcccagacggggcggcggggcagaggcgctccccacatctcagacgatgggcggcaggacagagacgctcctcacttcccagacgggatggcggccgggaagaggtgcgggatggcggccgggaagaggtgctcctcacttcccagactgggcagccgggcagaggggctcctcacatcccagacgatgggcggccaggcagagacgctcctcacttcccagacggggtggcggctgggcagaggctgcaatctcggccctttgggaggccaaggcaggcggctgggaggtggaggttgtagtgagccgagatcacgccactgcactccagcctgggcaacattgagcactgagtgaacgagactccatctgcaatccccgcaccttgggaggccgaggctggcagatcactcgcggttaggagctggagaccagcccggccaacacagcgaaaccccgtctccaccaaaaaaatacgaaaaccagtcaggcatggcggcgcgcgcctgcaatcgcaggcactcggcaggttgaggcaggagaatcaggcagtgaggt

SEQ ID NO: 22138 - DNA, 1333 bp, Artificial sequence
  DNA replication origin
atggaattggatgagatcacttagaaaagatgtccaaggattaggctcaggggcattccaccattaagagaacagggagttaaaagcagttggtgaggaaagaaggaaactaggagaggtcaagttctgcaaggtgagtgaggaaaatgttttgagaagtaaacagtcatcagctctgtccaatgtcaaccatgagtcaagttggatgaagacaaaaaattcaccactagattaagcaatttggagctcttggcaatggcagtttcagaggtgggagggaagtgtaattagaatgggttgaagacagaatgggaggagaggaattggaggcacaaatgtggacgactcttttgacgagttttgctaaagggagatgtggggtcgagagaacttttttaaaggtaggggaaataacagtatgtttgatgctgagagaaatgatgcagcagagagggggaaactgatgatacaggagagagcagggagaatggcagagggatgcccttggaaatctggcaggggtgggatcaggtacactcatggaggggccaaccttgcccagaagcatgagtagtttacccttggtgacaagagagaggccagaaaacaggcaccgatgcatgggagggagggggtagatgttgtggtggtgacacaggaggtgaagtcactgagagtgaggagagggaggaggcattgaagctttggggagggcaaaaggaatgaaacagccatggagaaaaaagggagagtgaaaggagtgggaaagtatgggagggtggatgtagcacacagagcctgcctgagctgaagtgaaagcagacagattaggatgtacttttccccagccattcagctgcacaaatgtaagctccaagtcaacagacagtcgggctttatcagaattggggttttgttccatgaatataaagacatgaggagcaaaggaactgaggggtatgcaaaagagtggttacaacgatggactttaagctggataaggataaaaggtgggactggagaagggcggaaagcaccaaagggtatttggatggaaggattgtacgtgtcaatgggggaaggattgttagagtcagggtaccagagcttgtgagccagaaggataaaagtaggggtcagagagtgggccccttaatatgcatctcttggaagagggaagttactgacaatgacaaggtccagggtatgaccatgaggtgagtggctggggcaggatggagaacaggcacattggagaagaaggtcaaagaactgagacgtcagggtcctggcagcatcatcgatactgaaatcaccaagaaatatgagagag

SEQ ID NO: 22139 - DNA, 1251 bp, Artificial sequence
  DNA replication origin
ttgcgagcgcaaagctcccctctacacctgagcgggggacagatgtgcatcaatatttattcggaactcccaggaaacctggatgaagtgtaattatctcagctcaatcagcttggattagcataacatcaagtcacccatcagacggagggtttgatttcggggatcaaagcgacggctgtagccgctgattaatcggggagaaggaagcggcgagaagaaagcggcgccggctctgctagccacagctgcaccgctttgaagcgccggtggtgccaagttaactttgccggccgcccccgccgctcctcggacccgctgcgcccgccgggtccgcgggttttagcgccgctccctgggctgcgagtcgccggctctaaaataaaccgtgccccctgcccacccggggctgtgttgggggactgtttttcctcggtctaggatctgctccgaggtggaggggcgctgcggggcttgcccggcccgggacctgggctggaagctcacgagaaaggacgctcctcggaggtgtgcactgaaggctgcctaaggctggagcggaggagtgaaatgatggagcgcaaggccttccccaagctggtctcagctggcgtttcctgcctcacctgccccatcccctcacaccacacacaaattacttattttcttaactcatcaggctttattggttctgtacctttgtacaatccgttttccccaattggggtgcacttctgtctccttctgttcccaaaccactctgacatccgtaataatcaaccctggtaaattttaccattttacccagtggcattttacccagggtccccggaaccctggttgggccctggagaaaagcactttctgggggttgggagtggtgaggaagggcagctggttaagtttgcattgtaatcagtgtggctgtcccgctgacttccagctctccctcctaatttgtgctggctgggccgagggcgggaacccctcttgcttatgattgagtcaccttggatacagtccttggcacgaggtgcatgtggattccaactcttggcctctgctaactctgttcaccaggccaaggcactggacctcccaggaactcaggctgatgctttgcaaaggtctttgtggctgctcagttaagctgctcccaggggagagtgccccatcgatgtcagagattcctagaaccttagggtaaaagggaagctcacagaccccttccgcattcacctgataacccat

SEQ ID NO: 22140 - DNA, 1353 bp, Artificial sequence
  DNA replication origin
gtctcgctctgtcgcccaggctggagtgcagtggcgcgatctcggctcactgcaacctccgcctcccgggttcaagctattctccagtgcgacaaagatttaatgggatgcgtaagaatgggccgaactgcaaggcgagtctcaaccccgcggagccttcctcaagcgcctcctccccgccagccctcacgcgcccggccgcccgctccagacggtacggaattgaataataaagacagcgtttcagtggcgccgctcctccccgcaggctaattaggtcgtgtttgtaaagcacttggaagacaaaacgcgccccaagtgttaattatcattagccccgtcccaacacgcttcccgagcggtgcggagagccaggagtgtcccctagccaacaggcggccgggtggaacgcggggaccgcagccagaccgcgccccccacccctgctggctcagatccctttcccaggccctccgaaaattgggacaccagggcagaaaggggtagggagagcagcggggcacgagacacagctaactgcaggtgtatccgtccccctccgggtaagagagaggggacgcccgggaaggcctcactcaggagggcctccagtgttggggaaggagtcggagtccacgcagcgacctggggcgagtcttccggggcgtggacttccctaagcaccgtgtcttcctaaatctctcagggttttccccaggcagactccagaagctcgcccccatcgactaaagacactattgcccaatccagatctcttataaggcccgggccagggctgaaggactttggagacagacacccgagctcagagtttgttctggctgtgccaggctgtacttctggcagatcttggccttgccctcagagtaagactgccctagaagttgtaaaaccaagctagtattcccttctcccgcctttattagggatgatgaatacacagcccagaccccgaggggcccccacaccactgccagtgggaagcagaacccaattggtatccagctcctccttcagtgctggggggacatacgcttcgaataactccagcaacacttagaacacatcccagtgaaaaacaaccatgaatgatatggaattgacagtctacaaagtgcatttatatgcatcatccgattaggtcctaatgagcaactgaggctcagaaatgttagcaggactagggctagagcctgggtttgctgtccccagactccttgtgatgtctccaagcccacttttctgagagaggctgaagctgtaattctttgcacacatgtaatcctcccatactctgttgctcaccaccgctttcctgaaattgggcattta

SEQ ID NO: 22141 - DNA, 1390 bp, Artificial sequence
  DNA replication origin
acagaaaagacgtgcagttctgagtgcaggtgaaagtatcaagagcccagctgtggatgtagacccaagctatgcttgccaacccagccttctgggtaacaaagccgatgatggctcctgttcccatgaaagggacagatatttcagccaagcagcaaagaattgctcacttgggttaggggagagaaagcgttgaaggagaggaaggtggcatgagtgaagtggtggaggttcccagagaagggaactagcaaacaaggcagaaggagaaggcaggaggctggccaccatgggccttgagtgccacgctgagaagttcaagcttattggacagacatatgagagctacggaagtttgtttatgacaaaaatcagaatctaagattctgataacttggccactgaatagaaggaaggagtaagagaggtcatggggggggtgaggggtcatggggaagtctggggtttcgagtgtggtggtgtgaaagctgcagatggcatctgagaagctagggggtgaggaggaggagggtggggaaaagacaatgaccttggtggcagacattttgggactgagctggtgtaggacagccagagaggaatgtccagcagaagccttgggagggaggctggagccctctcaggaggtggggaggcctggagtttagataggagagccatcattatgtgagaatggagccgtggagggagagagggcatggtgggagggggcatctggagatacggcgatgagaacacactcacatggggctcaaaggcagaaagaggtggtgaaaggggcagacagggatggccagaggggcagaaagtggtaaagcagccatggagtactgcccagatcaaggcctgggagggctccagactctgagttgaacttaagaagaagaatgctgtccaaagtgagaaatgccactcagaagtcagagaggatggggtctcagatggctcttagaggtggtcactggggggtcattagtgtcctcagctgtatcaatagccagactgcaggggcttgagggaccaacaggtggggaggaagtagaggggccaggtcagaccccacttggaagttggtaagggtaggggagagggaaccagagctcagtagttcaagggagaggcaggtgtatgtgtagaagagtctgggaatggaaggatgtgtatgtcatggtttcctcactggacttcctcttgggaactggatgtttcccttcctcctggcaggggatgagacaacagccaccttaacagggctggatggttggccaggctgctgattgcacagtgagtgtggggacgacgagattcaccaggaagcggttgggactgctccaggcctgcttctctttatgcccatggctggtggctt

SEQ ID NO: 22142 - DNA, 824 bp, Artificial sequence
  DNA replication origin
gggctgatgggcctgtccccctgctctttcaggcgggaccttccaccagagagacttcagctgctgtgccctgagaggctgctcccgcagcaggagttttcgtgccgtcacagcgactgctgatgggtcatttctaccagccctgttagctctcccctgtctccagctcaggctgtgcattcctgggaaccttcccttccctcccttgggccacctgcctggaccctcacggtgccttggatcaaacagcagtgctgggagaagagaggcagccttgctgggccggcgttgctctggcctccaaggctgagtcctcaggtggacttgctgcagccagttgagcaggttctggtgtcctggcctgggcgacactctgagggggtgggcaccagagatatttatggtgcaatccctgccttcagaggctccggttcactggggggacggctggggaggggagaaccgatggtcttgaaaggtgtgctgggcgctgagaggtgaccttggtactcctggcaggagatcagggaagggagagactgtggactgagcaccatggtgtggagggagggctcagtgaaggcttcctggagaggcagagtgctggggcgtgcaggatggagaggagtgggggagagccttggagggaggccacaggccaagtgtggggaagtgttctggacattcattcagagttctggttattgtcccagggccagaatcctgcttcttggggtcagcttcctcctgacttctaatgctcccttcagctggggggatggatgggaggcagatgaggtgaaaaggatgagatggagtcaggt

SEQ ID NO: 22143 - DNA, 1393 bp, Artificial sequence
  DNA replication origin
tgtgtgggggcgtggagggtgagggcggatcttgggcagtgggcagtcaggatggaatccaggctggctgcagggcggggatggtgcggggcctgctgctgccttcctgactcgtcctcccccagcccatctcatctgggtctcccaccccttctctctgaccttgtttctcgttggctcagccctgtcctgttaatgagctgagccagcttggcgaccgcctctctgatgtgctgactcagtcctgtggctcccgcttcctctgcccttgtttgaaaatgccaagttaattgctctccagctttaggctacactggcagggggcacaccccctttttcctctccccttcctcataccctgggaggggctaggccagcgccctgcagcctcctccagccctggggcctgccctccatggacagggcagccaaccaagagtgttgggaagagggacagaggaggcagagaggggaatgggctatcagtgtccattagggagcagtggagagggcggggaggtgggggataagttggcactcttggagcctgctctccatatttcctggccctcaggatccgggagatggctctgtgtgggagggagggagactgtgggcactgacaggtggtctctcagatctgtgcccagagctgaaggtctggagagggtaaggtagctaagagggagaccctgggcctcaaacaagaaggaaggagggaagggaggaagggaaataaagaaggagggagataaggagggaggggaggaagaggatggaagggaggaagggaggaagggaagcagggaaagaaggagggaaggagagagagaaagaagggaggaagggaaggagagagaaagaaggaagggaggaagggaagaaaggagagaaggaggaagggaggaagggaagaatggagagaaggaggaagagaaggagggaaggagggagagaaagaaggaagggaagaaggcaaggaaagaaggagagaaggagggaagggaggaggggaaggagggaaggaggaagagaagggggaaagaatgaaggtagaagggaaagaaggagagagggaaagcagaaagaaaagaaagagggaaagaaggaaagaaggagagaaagaggtagagaaagagggagggaaggaagcaaagaagaaaggaatggaaaagacaaggatggaaggagagaaggaaggaggggaagagggagtgaaggaaggagagaaagaaggaggaaaggaagggaggaggggaagagggcaggaaggaggaaaggaagggaggaagccaatgctgactgttgcacagagaagctctcatttaattcctgcaggatgggctaccgatatgccatccaggggtgagagtcaaaatctttaacagcactg

SEQ ID NO: 22144 - DNA, 834 bp, Artificial sequence
  DNA replication origin
tagtggagatgaggtttcactacattggccaggctggtttcgaactcctgacctcaagtgatctgcctgcctcggcctcccaaagtgttagcattataggcgtgagccactgcgcccagccaaggagctggttattgagggtagatgatgcatttgttgcagacaggatgacttagggataacaggagagttcctgccaacctggaactatcttaggagcagttgaggacaccagaaatgtcacacctggtgatacaaatgtgtgagacattcacatggcagcaatgttttggggcttggggagagagggtagaaagaaaattgggcaagagccataggggatgaccaaagaaaaggtagaaagaggaagaagagtaaagagagagagagcaggcccaggaaggagaggagccaggcgaggtcccatctgtgaggccagggagagctgaagagcagaggcccggcaggagggtgtacaaaggccatgagctggtgatgggatggttggtagtgatgggaatgtgcatttctgagtgcaggggccaaggaaggagggagagaaggactaagaacacataaaaggctcaacagggcccacaggaactgtgtgtcagcatgtagggagagaaggggcgggcgtggggcattggaaagcagggtagaggaagagactggcacagctggaagaagagagaggcgatacaatttcagggacgaggctctcacaggggaatgggctgatgaggctgagaatggaactggaagcttcagggggaagagaccaagggtggatccatgatcattgctgggtagtgctgagcccatggaggacct

SEQ ID NO: 22145 - DNA, 1508 bp, Artificial sequence
  DNA replication origin
gctcccacaggacccggtgggcatgcggcggcagctgcaggaggagttggaggaggtgaaggctcgcctccagccctacatggcagaggcgcacgagctggtgggctggaatttggagggcttgcggcagcaactgaagccctacacgatggatctgatggagcaggtggccctgcgcgtgcaggagctgcaggagcagttgcgcgtggtgggggaagacaccaaggcccagttgctggggggcgtggacgaggcttgggctttgctgcagggactgcagagccgcgtggtgcaccacaccggccgcttcaaagagctcttccacccatacgccgagagcctggtgagcggcatcgggcgccacgtgcaggagctgcaccgcagtgtggctccgcacgcccccgccagccccgcgcgcctcagtcgctgcgtgcaggtgctctcccggaagctcacgctcaaggccaaggccctgcacgcacgcatccagcagaacctggaccagctgcgcgaagagctcagcagagcctttgcaggcactgggactgaggaaggggccggcccggacccccagatgctctccgaggaggtgcgccagcgacttcaggctttccgccaggacacctacctgcagatagctgccttcactcgcgccatcgaccaggagactgaggaggtccagcagcagctggcgccacctccaccaggccacagtgccttcgccccagagtttcaacaaacagacagtggcaaggttctgagcaagctgcaggcccgtctggatgacctgtgggaagacatcactcacagccttcatgaccagggccacagccatctgggggacccctgaggatctacctgcccaggcccattcccagctccttgtctggggagccttggctctgagcctctagcatggttcagtccttgaaagtggcctgttgggtggagggtggaaggtcctgtgcaggacagggaggccaccaaaggggctgctgtctcctgcacatccagcctcctgcgactccccaatctggatgcattacattcaccaggctttgcaaacccagcctcccagtgctcatttgggaatgctcatgagttactccattcaagggtgagggagtagggagggagaggcaccatgcatgtgggtgattatctgcaagcctgtttgccgtgatgctggaagcctgtgccactacatcctggagtttggctctagtcacttctggctgcctggtggccactgctacagctggtccacagagaggagcacttgtctccccagggctgccatggcagctatcaggggaatagaagggagaaagagaatatcatggggagaacatgtgatggtgtgtgaatatccctgctggctctgatgctggtgggtacgaaaggtgtgggctgtgataggagagggcagagcccatgtttcctgacatagctctacacctaaataagggactgaaccctcccaactgtgggagctccttaaaccctct

SEQ ID NO: 22146 - DNA, 1385 bp, Artificial sequence
  DNA replication origin
agcacgccctcttcccatgtctgaggaagacaccctagcctccttgactcacctaggtcagtcctcttgagccccaacagctctgtgctccccagcccaaggaaggggtaacaggatttcgggcagttgcccctgcagaggccccctgggcaagtcccctgcgccatgtcccttcgtctccttcttcccctaaccaggcctccctccacctgtcttctcagagcaggtaatggcaagcatggctgccgtgctcacctgggctctggctcttctttcaggtgggtctccgaccctgacttcaacgtgggggtgtgggtggaggctggccagagggccctgtccaccctgggggaggagagcccaggccctgattacctagtccctctccacagcgttttcggccacccaggcacggaaaggcttctgggactacttcagccagaccagcggggacaaaggcagggtggagcagatccatcagcagaagatggctcgcgagcccgcgtgagtgcccaggggaaggggtgtaggcgaagggaggagacagctgggccatgccatgatgacctgcctctgctgcctcaacctctgtggccgctgctgggacagaggaaaggagcggtgctagctctgtctgcagatcccggccatcctgggctctttagcgccctctgcctgcagcccccgccttgacaactccgtagctgttgcccccttgctcactgaggcgcgggacctgggatcaatcgggaggacgcccgctgcagtccccagaatcaaaggatgatgtggcgcatctatgtttctttggagagtgttgtaggtctggatttgtatgggcaatgtgtttgtgcttcgtgcgtgagttgttactggccagggctaggacaagagccctcgaccctggggccaacgccctgcgtccttggttcccccagaggatcagtgcgcgatgacttggggacaaaggagatgatggaggctagcagtctgacggcctggatatctgtccccttctccaggaccctgaaagacagccttgagcaagacctcaacaatatgaacaagttcctggaaaagctgaggcctctgagtgggagcgaggctcctcggctcccacaggacccggtgggcatgcggcggcagctgcaggaggagttggaggaggtgaaggctcgcctccagccctacatggcagaggcgcacgagctggtgggctggaatttggagggcttgcggcagcaactgaagccctacacgatggatctgatggagcaggtggccctgcgcgtgcaggagctgcaggagcagttgcgcgtggtgggggaagacaccaaggcccagttgctggggggcgtggacgaggcttgggctttgctgcaggg

SEQ ID NO: 22147 - DNA, 1096 bp, Artificial sequence
  DNA replication origin
tggggctcagagtccctggcccagatgcctcttgccatctcatcttcaccctgcctggcttcccttgcttgttccaggattgtttcataaagagggatgtggttggtctttaaccctatgaatgctggctgaggatgcctgcggaacctgtagtgaagctttcaggggctgctcgggttctggctggtaggtgaacactgtccatcttgccggctgggacacagtgactctgggtagttgtgtaagagaggggcccttggcagacaaacaggttcttctctgttggtgggccagccagcaggtcagtgggaaggttaaaggtcatggggtttgggagaaactgggtgaggagttcagccccatcccccgtaaagctcctgggaagcacttctctactggggcagcccctgataccagggcactcattaaccctctgggtgccagggaaagggcaggaggtgagtgctgggaggcagctgaggtcaacttcttttgaacttccacgtggtatttactcagagcaattggtgccagaggctcagggccctggagtataaagcagaatgtctgctctctgtgcccagacgtgagcaggtgagcagctggggcagagggatgggggtcacagtcctaagggagggcattgcaggtggcctcaggggagagcctggggtggcccctaagacgtcctcttggaacattttggcagagttgcctcttcgccctcattatggctcagtttttccaccatgaaatgggagggagggagacaggtgggcaggggagaggtggtagaagtggcctagagaactgttcctggggtctgggacctttgcgaaggggttagagcaccacgctccctgctatgtgactgaggtagcaagagcacgccctcttcccatgtctgaggaagacaccctagcctccttgactcacctaggtcagtcctcttgagccccaacagctctgtgctccccagcccaaggaaggggtaacaggatttcgggcagttgcccctgcagaggccccctgggcaagtcccctgcgccatgtcccttcgtctccttcttcccctaaccaggcctccctccacctg

SEQ ID NO: 22148 - DNA, 983 bp, Artificial sequence
  DNA replication origin
ctgcagaagtcactggcagagctgggtgggcacctggaccagcaggtggaggagttccgacgccgggtggagccctacggggaaaacttcaacaaagccctggtgcagcagatggaacagctcaggcagaaactgggcccccatgcgggggacgtggaaggccacttgagcttcctggagaaggacctgagggacaaggtcaactccttcttcagcaccttcaaggagaaagagagccaggacaagactctctccctccctgagctggagcaacagcaggaacagcagcaggagcagcagcaggagcaggtgcagatgctggcccctttggagagctgagctgcccctggtgcactggccccaccctcgtggacacctgccctgccctgccacctgtctgtctgtctgtcccaaagaagttctggtatgaacttgaggacacatgtccagtgggaggtgagaccacctctcaatattcaataaagctgctgagaatctagcctcaactggttgccggatgaatcctccttgcagctggggaggtggggaggtaaccatgactgggcagagcttagcagcggcctggcaggagacacccaggattggggagatgagactgcaggagaggtaagggcctggtggactggaggcgagtacatggggagtcctctaaggggaggcagaaaaagatgtcacacattatcccaagacaaaatatgcaacctacttatattcatttagccaacaaatatgcattgaatgcctccgatgcgccagtcattattctaggcaccggacaaccagcaaacagcttttgtgcagccatgtgcccgactctgcctcacactgagggggacacctggaggcgagcagaacagggtccctggccctggggggctcacagtacactgggggagatggttcctccttgcacgagatcttcagtgcctttaacttattcatgtagtgtcatttaacccacc

SEQ ID NO: 22149 - DNA, 1022 bp, Artificial sequence
  DNA replication origin
ggcatcatttaagcctaagatgtcctggctccaaggtgtcagcatctggaagacaggcgccctcatcctgccatccctgctgcggcttcactgtgggcccaggggacatctcagccccgagaagggtcagcggcccctcctggaccaccgactccccgcagaactcctctgtgccctctcctcaccagaccttgttcctcccagttgctcccacagccagggggcagtgagggctgctcttcccccagccccactgaggaacccaggaaggtgaacgagagaatcagtcctggtgggggctggggagggccccagacatgagaccagctcctcccccaggggatgttatcagtgggtccagagggcaaaatagggagcctggtggagggaggggcaaaggcctcgggctctgagcggccttggcccttctccaccaacccctgccctacactaagggggaggcagcggggggcacacagggtgggggcgggtggggggctgctgggtgagcagcactcgcctgcctggattgaaacccagagatggaggtgctgggaggggctgtgagagctcagccctgtaaccaggccttgccggagccactgatgcctggtcttctgtgcctttactccaaacaccccccagcccaagccacccacttgttctcaagtctgaagaagcccctcacccctctactccaggctgtgttcagggcttggggctggtggagggaggggcctgaaattccagtgtgaaaggctgagatgggcccgaggcccctggcctatgtccaagccatttcccctctcaccagcctctccctggggagccagtcagctaggaaggaatgagggctccccaggcccacccccagttcctgagctcatctgggctgcagggctggcgggacagcagcgtggactcagtctcctagggatttcccaactctcccgcccgcttgctgcatctggacaccctgcctcaggccctcatctccactggtcagcaggtgacctttgccc

SEQ ID NO: 22150 - DNA, 1431 bp, Artificial sequence
  DNA replication origin
gtggcaggaggagatggagctctaccgccagaaggtggagccgctgcgcgcagagctccaagagggcgcgcgccagaagctgcacgagctgcaagagaagctgagcccactgggcgaggagatgcgcgaccgcgcgcgcgcccatgtggacgcgctgcgcacgcatctggccccctacagcgacgagctgcgccagcgcttggccgcgcgccttgaggctctcaaggagaacggcggcgccagactggccgagtaccacgccaaggccaccgagcatctgagcacgctcagcgagaaggccaagcccgcgctcgaggacctccgccaaggcctgctgcccgtgctggagagcttcaaggtcagcttcctgagcgctctcgaggagtacactaagaagctcaacacccagtgaggcgcccgccgccgccccccttcccggtgctcagaataaacgtttccaaagtgggaagcagcttctttcttttgggagaatagaggggggtgcggggacatccgggggagcccgggtggggcctttggccctggagcagggacttcctgccggatctcaacaactccgtgcccagactggacgtcttagggccaagatcgacgttggaggacctgctggacgcctggctgcttacgagtgagggagtagagtctgccttagcaaggctcaagtagaaaggaagtcacagcggaccaggcaaagccacagacaatccaaggccaggtgccctgaaaggggctcaaacaaggcctgcagccctgtctgaggcgggccaggaaacagggttgctttagctgggagcagtgggttccccgtccccagaggtgtgtccgtatagagccttctccagcccagccgctgtcagcggggcgggacggagcggggcggcctcagggagccagccactgggattggggtttggtcccgggtgcaagtgaagcgcttggagtttgcgcctgtcctcctttactaattcaaaaacctctcaaacagacacttcccttttcttctcacaaggccagtatccccctcccactactcccatcccgcccagaaacagccgcggcttcctcaggcacagcagtggaagccagtcctccaccccctgcggctccatgccatgccaccccctctttctgccagccctggcagaagctggcctgagtaagaaaattcaccaccacctcttgcaggtacatttttatttccaagatgctctcatatctgtgctctcactgcatcctcccttccccacatcctggctagattgccatcagacgcagagcatggatgaggacactgaagcctggacctgtgacgtcgcttgcccagtgaacagcaggatgggctaggccgcgctttttagaccctgcacccctggccatccatgattattgaaaagagtgcgcgggtcgggt

SEQ ID NO: 22151 - DNA, 1730 bp, Artificial sequence
  DNA replication origin
gcggcggcgggcgcctcactgggtgttgagcttcttagtgtactcctcgagagcgctcaggaagctgaccttgaagctctccagcacgggcagcaggccttggcggaggtcctcgagcgcgggcttggccttctcgctgagcgtgctcagatgctcggtggccttggcgtggtactcggccagtctggcgccgccgttctccttgagagcctcaaggcgcgcggccaagcgctggcgcagctcgtcgctgtagggggccagatgcgtgcgcagcgcgtccacatgggcgcgcgcgcggtcgcgcatctcctcgcccagtgggctcagcttctcttgcagctcgtgcagcttctggcgcgcgccctcttggagctctgcgcgcagcggctccaccttctggcggtagagctccatctcctcctgccacttcttctggaagtcgtccaggtagggctgcaccttggccttcacctcctccagatccttgctcatctcctgcctcaggccctctgtctccttttccaggttatcccagaactcctgggtcacagggccgagctgttcgcgcagcttgctgaaggtggaggtcacgctgtcccagttgtcaaggagctttaggctggagggtgagacagaagggttgagggctggcctcccagcgccccagcctatcaggggtgagccctgggtgacacctgtccgcggaggtgcagtggcctagcatttccagtacactctcaaccaacacccctgccccgccaggccatgccccgttgtgcagctggaccgaggcacagagaggagctaaaaaggagacagagctgggactagtgcccagttacgttggtctccaaagtgggcccttgaaggacctcgcttctatgcctccagcgcattctcctctccgaagacagcccacagtcttgctgggcaggagcagaggaggtggtgaagaagggaaaggggcttgctacacttgcaggcacaatgtggctctgtgatcacgcatcgggcagccctggtctgtcctttgcaggggacatgggctgtgaccctgcctggagatcccattccagtttctccatccagaccatctgtggggcccagctcatcagatattaggtgaggactcggccagtctggcttcaacatcatcccacaggcctctgccccctacccctgccctcaaccccaggctgggtccttactttagctgttttcccaaggcggagccttcaaactgggacacatagtctctgccgctgtctttgagcacatccacgtacacagtggccaggtccttcactcgatcccaggggctctgggggggttcatcttgctgccagaaatgccgagcctggctccctgagggtgggaggggagacccagatcaggccagctgtgggctgagatctgagccgaaaggccaagcttggaggtgggggagagggggccagtgagaaacctgctgcctctgcccaggagggtgggccacggggatttagggagaaagccccccgatggttggctccctaggttaggggacacctacccgtcaggaagagcacggccaaggtcagcaccgcagctttcatcctgaagggccgtgggggacctggaggagaagaagggcctggctgagtggggtgccttcagcatgcagaagccccgtgctcccccactcattgcagccaggtgaggagaagggcacagagcgggagaagacctca

SEQ ID NO: 22152 - DNA, 1339 bp, Artificial sequence
  DNA replication origin
gcggccccggaggtttcactgcacaacaagatggcggcggcggcggcgagcggagctggcggggctgccggggccgggactgggggagccgggcccgcgggccgcctgctgcctccgcccgcgccggggtccccagccgcccccgctgccgtgtcccctgcggccggccagccgcgtcccccagccccggcctcccgcggacccatgcccgcccgtatcggctactacgagatcgaccgcaccatcggcaagggcaacttcgcggtggtcaagcgggccacgcacctcgtcaccaaggccaaggtaccggcgcaggggccaggcggcagtcggagcgtggcggggccgggagaggtccgcgccccccagccggggggtcggggcggcgagcgcggcgcgtggtgggagcgttgggggccgggaggcgggagggagccagccgcggcggggcgggcgcggagctagggacacctgggactcgagacggcggaactccaagcagggggccgagggcacagagcaccggcgcccaggagccgggcgcggggaggggtcctcggggctgagggcaggcgggtaaaggggatgattggaaagaaggggtcggaactccccgagggccgggagactgtaagcccagaagactctggaaccagcagctagggaatcataagggaatgagggcaggggcatatgaaatgtggacccggaggatggggaaaaacaagggtgaagtggcagacccgggcttgtaaggggacccaggacggctggggcacggactgggaatgtgcacgtctgcagggcgctgggaggtcccaggatcctggtgccttaagacagagacaggaatccgcatttgatcatctaagactgatagatggtgcgaaggggatcccgaggagacacgattagtggaggaggcaatgaggaaaatggggaaataagggggaaattgctttgcttgtccacaggaaggggcccagggaatgggggagtgaggtgggggtgggggctgtcccaggtttatgatggcactaggtagtcaggggttaaacaatttgggagagctgattgctggttatttttagttgttggagggtcgggaattgtgggctttgtagaacccagggtgggcttttactggttggggggaagcttgtgattgaagaacccagacaccgggagattacactcatcgagcccttagttctcaaagggatttgaggcgctataggagtgaaattggccaaggtcaattaggaagctatatatgtatgcatgtaaaattctttgaggaaatatggtagcactttcatgtagccttcgttgggaggac

SEQ ID NO: 22153 - DNA, 1666 bp, Artificial sequence
  DNA replication origin
ccgatacgggcgggcatgggtccgcgggaggccggggctgggggacgcggctggccggccgcaggggacacggcagcgggggcggctggggaccccggcgcgggcggaggcagcaggcggcccgcgggcccggctcccccagtcccggccccggcagccccgccagctccgctcgccgccgccgccgccatcttgttgtgcagtgaaacctccggggccgcggggagccggctcgggggagggggcaagggggggcgggaaagggggggccgcggacgtcactcggggaggcggggcgctttcgccgaccggcgcccggctccatggcaaccgcgggtcacgtgccgacgcgcgtcactgcccggagccatggcaaccgtgacctcaccggcgggctcgaccttcccgcgtgggccccggttcctgaggcgctggctcccgggtgcccccctccgggagctggcggtgggaaccttcgatgggcccccaacctcgaagtctccgccacctttcccgagtggggggcgcaggatgcccgacccaaagccaaccccccaccgccgctcgaatcgccaatgtgacctctgctgtgacctctgtcccagttcaacgatcacccaacctcccttaacaaaaaaaaagtgtttcctcatcaccaaaaataccagcgttgtcccactttagcccttgaggccacaaatgcaggaatagctacactcttgaagcaactgtaaccaagttggtaacaacgcaggggaattcttcggtaaaattccttcctcttacaaaatccagctcaccctgcacagtcaacctaattgtcaccgaatataggagaatggggaaactaggatttgcgtgttcaagggcggacaagccagtccaaacaggcattccagtcattgggtgggtgacagccaaagaaggtacgtcattttccttcctaccacccccatctctgaacaattctacagggatgtctgtcagagtgcctacatactatttctgttgcttgtataaccctgatgaagcagtggtgcgcattgtccaatgaaccacgtcgtgtttaaacaacagtcggttaagcaaaataaataagtaaataataaaaattccatccttcctagtgactctccgaggacattgagggtcatcaagttaataactccagcaatttcatatctctttttcttcccttgcctattacctgcatccttcatagctcccaggcttcctcctcctctctccccttccctttattaaatagattaacttagctgctttaggtgagggttgcaggtaggaaatcagactgtcaacaaaatagtctttggcaggctgggtggaaaggagggaagattgtgaatattccaatgttaaaatgtattcctttggactagtcctgatccatccatatctatgtctctctcaatggtagaactgtattgtgaggtcactgcatgcacagtattaaaaactgacacccagggcactgtaaatgtgtggaaggataactcgtgtttactcgctgaccaaagaacacctcctggtgctccaattccctatccaaccatgagtaatggctgggacttaagatgggacagaggggtcatcccacaatggtcttggatctattccctggtagctgttccaaactgccaacaca

SEQ ID NO: 22154 - DNA, 1264 bp, Artificial sequence
  DNA replication origin
gccggagctggctccctcagcttgcagggaggtgtggatggagaggtactagcgggaaccggggctgcctgccgtacttgtgggccagcttgagttctggtgggcgtgggcttggtgggcccgcactcagagcagccggccggcgcctcccgccccgggcagtgaggggcttagcactcgggccagcagcggaggagggtgcgccaggtcccccagcagtgccggcccgccggcgctgcacttcaattctccccgggcctcagctgcctccctgtggggcaaggctcggtctgcagctgcagctgcagtctgcgatgcctgagcctccccgtcgccgccgtgtgctcctgggcagccccagcctcccccgacgagtgccgccccctgctccgcagcgcctggtcccatggaccgcccaagggctgaggagtgggggcacagggcgcaggactggtgggcagctccccctgcggatgcagtggagtatccactaggtgaagccagctgggttcctgcgtctattggggacttggagaacctttatgtctagccaagggattgtaaatacaccaatcgggactctgtatttagctcaaggtttgtaagtgcaccaatcagcaccctgtgtctagctcaaggtttgtaaatgcaccaatctgcactctgtgtctagctgatctggtggggacttggagaacctttatgtctagctaagggattgtgaatacacaaatcggcacctgtcaaaacggaccaatcagctctctgtaaaacagaccaatcggctctctgtaaaatggaccaatcagggtagggggggtgcggtggggcagataagagaataaaagcaggctgccggaataggcagtggcaatccgtttgggtagtcttccttgctgtggaggttttgttttttcactctctgtagtaaatcttgttgctgatcactttttgggtgcatgctggctttatgagctgtaacgctcactgcgaaggtctgcagcttcactcctgaagccagcgagaccaggaatccaccgggaggaacgaataagtccaggcgtgctgccttaagagctgtaacactcatggcaaaggcctgcagcttcactcctgaagccagcgagaccgtcaacccaccagaaggaagaaactctggacacgccgcctttaagaactgtgacactcaccgcgagggtctgcggcttcattcttgaagtcagtgagaccaagaatccaccaattccgaacacattattaccct

SEQ ID NO: 22155 - DNA, 1361 bp, Artificial sequence
  DNA replication origin
gcgccgccggggcacggggatgctgcgggagacccctgagatacaagtggactctcccggggcgcggggaagaagggagagccgactgcgagaaggaaggcgacctgggtgggcaggatcccctctgggaagattacagggacagtcggggccatggcggtcagaaggagaagagcaacgagtggcttttaaaggtcggaaccgaaatgccctttacagaggacgccatgaaggagagccttctgaagagggaccatgtggaagatgccccgaggactcggggaggcggagcccgcgggttcagcccccagcgcccgcacggcccctgcctgcgtaggccgcccgcgggagccggaccccgggcgccggttgctgtggcccgcgggggtcgccgggccgcaggcgccgcgctgattggctgcgccgcgggcggaagtgatgctgctgtcactgctcctccggctcccgggaagccgcgagtttccgcagggaggcggcggcagctgcggcggggccggtgagttgggaactaggtgtggggctggacctgggtggtcagggggccccagaagtgggggaagccggcgtctgaggatgagggagctgcacagagggtgcctgaggtcctggcgtgggggaccaaggagatggggccccagggcccagaattcctggataatgtgggtgctaatgaggagaggggcacattgcacggagcgatcgaggccgacggagggagaatcgggaaactgacccggtacccaagctggcttctaggagccgggtgtggaacagcgaggacagtagcttgggagcaggatcttggactccaggctgcccattctcttcttccttgtcaattaagagctgtaaagggaggcctagccgttgggagaggttgagacctgctttcagaaggcatttaaggttcctttcccagaagcctgggggataaaaatgctgctttgccactagtagacagaaggagctcctgcttctctttcttcctgacatctgtggtgggatctactgagtctgaaggagtctgcctagcggggccactgtctggctaacaagggttttgtttgttagtttgtttacttagtagagtatgcagactggggaagacacctaaatatcttgggagaattgaggctcccgggggcagggagggattgagagggaatatgcctggaaacctaagagaaaacgagaggaagaaatgtagtatgaagatttttagaggtaaaggagaggtggcataagttctcctttccaggaagcctttcagtaaaattcccatttttctggaatgctttgaggtagagccgcttgggtgtgtatctgagtactaagccctg

SEQ ID NO: 22156 - DNA, 744 bp, Artificial sequence
  DNA replication origin
ctgggtggccttggccaccccccacaggggactgctaggctggccgctggctcggaccagacccccctccaccccttcccctcggtccccccaccccgctgccagccacccccccgtcccacttctaggccgggacccccgcctcggttctcacagcaccctccacgccccccacccgacccccatgcccggccctcgccccgcaacccccacccacgctcgccccgcacacacctcccgcgccgcgcccccgggaggaaagtgggggagggacgggacgcacctgagcgggcggagcggggggagggggcggccgagccacggggggaggggtcgagcgccggcccgcgcgcggcacctcccacttccggcggcacgagcggagggggcgaggctccggccgcgagaggagaggccgcggtggcgccgcgccgcccccgacggcgccctctggcggcgacagctggcgccgccggggcacggggatgctgcgggagacccctgagatacaagtggactctcccggggcgcggggaagaagggagagccgactgcgagaaggaaggcgacctgggtgggcaggatcccctctgggaagattacagggacagtcggggccatggcggtcagaaggagaagagcaacgagtggcttttaaaggtcggaaccgaaatgccctttacagaggacgccatgaaggagagccttctgaagagggaccatgtggaagatgccccgaggact

SEQ ID NO: 22157 - DNA, 1286 bp, Artificial sequence
  DNA replication origin
gcgccagctgtcgccgccagagggcgccgtcgggggcggcgcggcgccaccgcggcctctcctctcgcggccggagcctcgccccctccgctcgtgccgccggaagtgggaggtgccgcgcgcgggccggcgctcgacccctccccccgtggctcggccgccccctccccccgctccgcccgctcaggtgcgtcccgtccctcccccactttcctcccgggggcgcggcgcgggaggtgtgtgcggggcgagcgtgggtgggggttgcggggcgagggccgggcatgggggtcgggtggggggcgtggagggtgctgtgagaaccgaggcgggggtcccggcctagaagtgggacgggggggtggctggcagcggggtggggggaccgaggggaaggggtggaggggggtctggtccgagccagcggccagcctagcagtcccctgtggggggtggccaaggccacccagcgccgcttccccccattgtccccttcccgtctgtcccctgttctcgcccgaggacccgtggctccggcgcccctgcttcgctggtggtcgccccgggttgcggagttctttttggtacactcgaccctccagccagctgttcctacccgcgccacgggctctctagccacggagttgcatgcatggcccttgtcctggggtttcgttcaccgggcgcagaggaccccccagccctgggctatgttggagacgggatgtttgcacctgagggagcagcaatggcggtttgggcccattttctcccaggagctttgtataatgagggaaactgaggcacagagggtctgtgggctgtgactgaggtgttgacacagccccatctacctatctgccctatgcgctcttcagtgttccgggggggaatacgtgtgatgctgttaaaataaaagcaagaatgcaaactaacccgatgttcatccccacctcccaagtattttgattttcttttctcctcataaggtcataagtttgctctgcggcataaaagatgaccttttgatttttaaaaaaggcgtccgtcccagttcccttacttgtgttaccatgttttttaccttgactttttcacgctagagaacccaggattcttttttgcaccactagtcactctgaagagtctgttctttgctcagttagtgggtatcaggcctttcccatctgtggggagcacgctgacagtaaaatatgcaccctggattgcccagtattgcattacttgttgacttacaggcagacacctccaaaaacttcccttaa

SEQ ID NO: 22158 - DNA, 920 bp, Artificial sequence
  DNA replication origin
ctttttcttcgaaaatttcaaaccaagaaaaagttaataaaataataaaatgacccggccagccgccccgtccgggagggaggtgggggggtcagccccccgcccggccagccgccccgtccgggagggaggtgggggggtcagccccccgcccggccagccgccccgtccgggagggaggtgggggggtcagccccccgccaggccagccgccccgtccgggagggaggtgggggggtcagccccccgcccggccagccgccccgtccgggaggtgaggggcgcctctgcccggccgcccctactgggaagtgaggagcccctctgcccggccagccgccccgtcccggagggaggtgggggggtcagcggggtcagccccccgcccggccagccgccccgtccgggaggtgcggggcgcctctgcccggccgcccctactgggaagtgaggagcccctctgccaggccaccaccccgtctgggaggtgtacccaacagctcgttgagaacgggccatgatgacaatggcggttttgtggaatagaaaggggggaaaggtggggaaaagattgagaaattggatggttgccgtgtctgtgtagaaagaggtagacatgggagacttttcattttgttctgtactaagaaaaattcttctgccttgggatcctgttgatctgtgaccttacccccaaccctgtgctctctgaaacatgtgctgtatccactcagggttgaatggattaagggcggtgcaagatgtgctttgttaaacagatgcttgaaggcagcatgctcgttaagagtcatcaccactccctaatctcaagtacccagggacacaaacactgcggaaggccgcagggtcctctgcctaggaaaaccagagacctttgttcacttgtttatctgctgacc

SEQ ID NO: 22159 - DNA, 1005 bp, Artificial sequence
  DNA replication origin
gttccttcctgggctcggcctggccccctttggggtggcagggggaaaggctggggctggaaggacagcaagagcgcccagggcctcagggctggggtgggagtaccctgcagagagctccctcctgcctcgcaggagaggaagggggaggcagggaggggcagggacagcaggagcccccaggtcaaagctccactccagtgtaaagcagtagccatatttgcttagaacttgccggatgttccctcccttgcacaggccacagagacttgttgtggaggagatcctctttctttggggtccagtgatagcagggagccctgtaatatgaggccagccccccatgctgggagctgagtcctgagaatggggaagagggttcgtggggagagggtgggtgaagaagccttcttaatcattaacctggttgatttcatctgaactgctgagcctcccagctctattgattttctctgaaagcacagcatctggagctggtggctgcccagagaccggggagagagaccacgggtagaggtaggggaagaggggcagggaggggaatggaaaccaggccaggagtggggggctgggaaggagggaggagacaaggtctgagggccgggagattgtcagaggagtctttggggatgtgaggaggccaggaggtctaagcaggcactgggggagggcacagtcagcacagccacagaggcaccacggagagcaggaaggagccagagaggatctggcagagaggacgaaactgaagtccagagaagcacagtgatctgctcaaggtgacagggtcagggcctgcaccaaaactgaggtcagttgatttcactggactgaggagagaagatacagaaatgaaggcccctggggcagaggagaacctgaggtgatggaaagtcggcaagaggcgagatgcaacttacaaattaccatttttctgagggtggggcctttcctttttttgcctgtgaggatatagtagacttt

SEQ ID NO: 22160 - DNA, 1208 bp, Artificial sequence
  DNA replication origin
agctgtctgagaagttcaggaaagtgtggctgtcccctccgcccaccccaaacacactcccaccttcacagaccctcccaaggacagacttcccagacacagatccggaggtggctcacagatgtgcaggatcagattcaaggtgacacgcaccagcatacacagaaccacagggctgcccgggcccggactgccccacagaggcggcagatgcacacagaggtcagccacagcaccccacatggagggctgctcacccacagaggtgcagagggtgccacctccaccagccaccttgaaggtaccttggagattgtcaggaaggatggggagggcataacagtgttttctctgtaactcccctctcccccgccatggaaggagtcccactcttaaaagggagctctggctcctttcctaccatttgttctttcaccaggctcagttcagttcccctctggcctggggaggtgtggggtgggggaggggccggagtgtagaccgcgagagggagaaggggaggaggaggggacggcaggagcctgtccagggcttccgggcggagtgcagtcaggggggcctcgacaacctcactttgccgtaccagtggcagcccagatggtgggagcaaggtgcttattcaactgctgccaggattccttggtcctggaggtactgggaacaatggtgggaatcagaggaggggacaaggttgggtggccaacctctagagtggtgggatttgggagactcggactgggccactgtcagagggggctgacacctgttatagtgcccctgtggcggacccttcctccaggtcagggtccccagctgatgtgtctgtcttgcctcaaatccttccagacggcgtatgtgtcagatgaggagcaaggggaactaggcagccaggggagacgaggagggaatggggagcttgggaacacttctgccaacaaccacgtgacccccggggaatggctggggaggggtccctcctgctgtccccaccagcccatttgagcaggggctagcttgaggcatccccatcctgtctcccctctgctcatgcaggcggagggctaagggctggcctgaccaccttaccgtctgcggggggctgcccacggtcatctccacgtagtagccctgccccgacttgcccctcaggttgtccaccatctccacaaagctgcccctccggccgg

SEQ ID NO: 22161 - DNA, 1186 bp, Artificial sequence
  DNA replication origin
tgggcaggcagcactcccgcgcccatccacagcaggagccagggcagggcttgggccatggtgggccccggccttcgggccctctgggctcgcactggcccacgtccgtccctggcgcctgcccccaagtctgggtggtgctggtggcttctcaggagagggagcttgggggcatcaggacgccagggcctgcagggccctgggccagcccccgggtccgggctgtggagagcggtcaggggagatccgcagagcacgggagcaggggagaggctgggatccggagcccgctacatcggcacggcggcggccagcctgggcagcgggcgcgggctcccggcggggctgggaggggcgggcatggcgggccggtggcggcttccctggtccccccggcgggcggcggcgcgggcaggggcaagggctccgggctcctgcggctgcgttggctgctcaggccaccataatccagctcgcggctcgcagctcccgggcgggctggggaggcggaaagacttgtggcggcggctgtcaaagccaaaaggttttcgcttttccctgggatcgctgggaagtgtagtcttcccatggcaggcaatccggcttccggggctggagaggggtctgggatgccctctgccgaggtggagtccgccctgcaaggccctggcgggaagggccagacggatggagaggggcacacctcccgtctgtcagtctttctttcagcatggaaggagcacccactgtatgccaggcacactgccaggcgctggagatacagagagaaataaacggtgattctacacgggacagttaagtgattcctgccgcggtggggtttcacactatacgatgtggcattaaggagtagggatttggagggacatctaggggatctgggaagactcagtgggagaaggtggtatttaatttgagcgtttaaaaatgggtaggattttcacgagcagagattgagggagcaggatgaaaggggaggaagagtttttccaggctgcaaaccagcggagcagggtccaaaaggggaaagtgcagttgtcttattttctcctgcgcctgcgatctgcgggcaggtaagagccagtgggtcttctcccatctgaacctgtttgtgcccttgaggctctacttgaatccttatggctcctctgattttctgcaccat

SEQ ID NO: 22162 - DNA, 715 bp, Artificial sequence
  DNA replication origin
acaaaagagttctatgtacaggcgttcatgattgggggtttttgttttgtcgttggttggtttttgtctgtcagttgaatataaataatgcagaaaaacagccgagctggcgtgtggggctgcggcgcggcgcggtccaggcgtggctgctcttcctgcgggccctacaccagggtgtaggatttggagtaggccccggccccctgcttctgagacctccctacccccgatgtgctcatctcgagaagcgagtccctggagccccccattttggtgtgtgggcccccggctcgtggaggctcggtgctgggggccggaggggcagcgctgggggcggtgggtggctcagcaggggtggggccgggggctgggggggctgtgccggctgggggggctggcatggccagagtcctctgaggtaaggtggctgtggaggcggcagcgggggcccctgggtggggaaggcccaaggacttgctggcagggtccagggtcaggtggcgagcctgggtgtggtaggttcgagccaggttccggatggaggcctcacggggtgggaccacggggcagggctcacgtccatctgcctttcgaaagaaggcctctgacttggcatacaggggcaggttgcagtagtcacctggaatcacagaggcagaggatgttacagagagtcatagccctctggaagcagctcgttcagcccccaccccat

SEQ ID NO: 22163 - DNA, 729 bp, Artificial sequence
  DNA replication origin
ccacgctgggtgacagagcaagactctgtctcaaaaaaaaaaaaaaaaaaaaaaaaaaaggagtggtgtcctcagccgatttcagatgcatcctggctgcttgcagaggatagtttggtggagggggtcctggaggacacagaacgtgacaggatggtggccagaatgcaggctggaggtgatgcgtagcagtggggagatgaggggctcagagcaagagctgacaaaacttagggtctggctggtttgggggaagagagcggggagggaaggatggctcccaggattctggctgggccaccaaggtgagtgatggcaccctcatgggaacagggcacactgaaggaggggcaggcttggcaggaaggaccggatggcttcatctcatactgagtccacagtgcagccacagctgtagctagaccacaggtgggtgcgtgttctggagcaccagagagatgcctggaccaaagacgctgatctgagagtcagcaggcatgatgaggccacaggaggggatgcagactgacagggaagtgaccaactctaggatcagcatgcacaggcacagaagagaggacgggagtgtcccaagggtggtggcggaggactgggtcagcagcatcacagaaggtgcggggccacaggtgcccagagtgtggtgggtgggtaaatgcatctagtgcctgggagatcgccaggcccagatttaaaggaaccaagtgccca

SEQ ID NO: 22164 - DNA, 738 bp, Artificial sequence
  DNA replication origin
gtgggcccctgggccctggggaggtgggatgggaagggtggggcaggtgaaggtaccttgcacagtgagttggatcaagccccggtcctccccatacgagttgatggcatggcagctgaagaacacagagtccccacggtcagcgggcttgagctgggagaccaccagcaggggcaggagagggagtaaacagggagagtcttttagagctggtcagctgaaggggtcactccagggctctcagcaaggccctcttgttctgggagggggacccacaggggctttgtcaagggcttctcttcccagggacttccaaagatggaagtatggagggcttcatacagggaggggctgggggacaccagagggagagaggggctgaggagtcctaggggagtgggaggggctgagggggtcccaggggagtgggaggggctgagggggtcccaggggagtaggaggggctgaggggggggtccaggagagtgggaggggctgaggggggagtccaggagagtgggaagggctgagggatccaggagagagggaggggctgaggggtcccaaaagggagaatggagccctgggggttccagaaaagaaggtgggactgaagaaaccacatttgattgctgtggggttgtcagaaaggagatacagtgaagttctgagacacagattcctggatggagaggggaaataggtgggaaaggggaggtacatttttggggtgtgggg

SEQ ID NO: 22165 - DNA, 1304 bp, Artificial sequence
  DNA replication origin
gagggagagaggggctgaggagtcctaggggagtgggaggggctgagggggtcccaggggagtgggaggggctgagggggtcccaggggagtaggaggggctgaggggggggtccaggagagtgggaggggctgaggggggagtccaggagagtgggaagggctgagggatccaggagagagggaggggctgaggggtcccaaaagggagaatggagccctgggggttccagaaaagaaggtgggactgaagaaaccacatttgattgctgtggggttgtcagaaaggagatacagtgaagttctgagacacagattcctggatggagaggggaaataggtgggaaaggggaggtacatttttggggtgtggggaggggctcccaggctccccatttgcctcctggatgcagatgtgatagctgcgggctccccactctctgagagttggggtcccccagcactgaggtgggggtgctcaccttcagtgtggagacgacctcgtcgccgttgtccttggtggcgatggcataccgcatgacgcggtcagggtcgatgactgtgtcccccttctcccagcggatgatgatgggccgctcaccccgtgccgtgcagtttagctccttcgcatggcccttgatggcgatggtggtgttggggtgggaagtgatcatggccgggactggggggcggaggcagagaaggcccagtgaaggtcgggagaccagcctggaggaggcacgcgtgccctgcgcagaagcccccgccccagccctcctcccccaggagaggctccaataaaggagtacagggaaccccactggcctgtcccttctcccacatccatccatgactggggcagcctccctcttcaccgggggtcccacattcctcttctggggagggagtggcctgtgctcagaatgcttttacaggtatgccatacatagaactataaaggaaaccacttgtattgaaatatggttatgcaaatattaaaaacatgaacaagcaaaccttcgatatcgtatatcacctatcagtatgtgttctttactactctttacaaaataagatccagtggtagctcgtataattgctgtcttatattaccatgatcctgtaatagtgctgcgtataagtgatattttgagatatttgcaatcactgtgatgtgatgggagcatatccgaggatttctgctggtgacagtcacggggctgctattgctgcattctgtcgcttatgttcaaaatggaaggaatactaaatttcagttagaagttagtgaaaaaatgtgatttt

SEQ ID NO: 22166 - DNA, 869 bp, Artificial sequence
  DNA replication origin
acccaaaggccaccgaggagccgccacaactggcatctccagcccgcctacaggtccaaggccactggcaacttccatctcgagttggacaagattttgccccttggctgtcctgttgccttctgggcctttctccacccccaaccccatctgctcccgccctatcaaatagctcggcttcatttattaatgccaggctcctggaagggggaggggagtgtccttcaggtatttgctgaggggcctcctgcactccccgggaatgggctgtcctggaagatgtctccagagagtgttgtggaggcatgggggagttggggacaaagccgggctagagtgtggcagcggcttcggcctgtgctttctcgcctgacaaattgcgaaaggggatgggggttggagagagaactatcgagagagaaagccgctcctcaccttatgtatttttaatattaatgtaattaaagctgcgagccgagccagcctgcgggggcggagggaggcaggaagaacctggggagagggagactggggttcgggggtggggcttgaacaggaggcaggcttcttgctctgctaaggtaggatgaaggagtgcgatgcggggggcaaggggttaaacagcagagaccagccttggtgtgtaacccgggggaccccactgggcctgagaaactcaactactttgtcgacgatttttgaggccacccttccttgtcccgcaatccgatcgcctagtaaatgccagcagtatctgggccttgagtctggctttgacccggcagtatctacaaataagggttatcctctttcccccaacccacgatgtatcgcagtgggctccggcaggctgcagactccagacccct

SEQ ID NO: 22167 - DNA, 1068 bp, Artificial sequence
  DNA replication origin
cggggccttgcaccccggtcggttcccccacgcacctggagcccgccgggcaccccgcctcgccgccagccgcgccaccctggccccgccgcctccgccgcccagccgcccgcgcaggtctcacctttgtgtaaagagtccaggagcaggaggaaagttaccagccacatgccataaagaggccctattctccggggaggtggtcctgtggccggccgtgcggcagcgcctctcccccgctcagcgcgctcccagccgcccgcactcggcgccccgctctctctgctcctcagcccagcgctcggctgcggcggcggctcctccctcctcggctccccggctcctgtcatccgcggggctgggctaggcggccgctctccccgcccccccgcggcaccccgggtggtgagcgccgcgcgagcccggagcccagacggaccccagccccacaagcccaggaacaggagcggcggcccgggccagaccgccccgacccggctccgctgtctgagaggcgaggggtccctgtcacccaccggcttggagcctgtggtcgcagacaggcatgtgtcatccatgtgccaacagcctgccatgcttcagccaaggacgcccggtttctactggcctaagtcacctgggacacgagcttcctgcctctttcggactcagcttacccggcccccccaccctccccaggaggagcatggacgctctgggtagaatcccaggcttttcagtgctgtctggtgctactccccaccccaaagttcatagctgcccttccaacccctcgtgacttccgcaagcctgccctccggagaaccccagatgagtccagccaccccctggcacgctgttcgaattttcctcagcacttggcacattgtgactatttaaacggttattcacaatgagcagtttaatgtctacgctacctgtgttatcttcctcctttgtcttcacctacccacccctatagctttcctgcctgacagaaattggcttattccttacactcatctttatgaagttggcatagaataggactggagtgagggcgtcttc

SEQ ID NO: 22168 - DNA, 778 bp, Artificial sequence
  DNA replication origin
gcgagcacagagcgggaggacggacagggagaggaggagagggggtctgcgcgcggccgctacccagaagccagcggacggcagcacggagtgggctgtccccgagcccagccccgagcgagccccccccccgcccccgcaggacgcgcctcccagccagcccgactcctaggaggaggggaggcgggaaagcagctcaagcctcacccaccgccctgcccccagccccgccactcccaggctcctcgggactcggcgggtcctcctgggagtctcggaggggaccggctgtgcaggtaggcggctggggaggtgggcaaagttggctcctttttccgaggaggggcgaggctcggtggggaccgatctctggagcgccgggagcgccgggttttgtgtgttcagtgggtgtgtgcggtcctccgcggtcagctgcgccgcggtccccgcctgggcagcgggaaaccgggctggggatgtaaacaaggagatcggcgtcggaagagagaggagcctctaggggaggcaggctgtggcgctgggggtgacgctggtggctgggaattgctctcggtgctgccttgagcttggggtcagggttttcaggagaaggggaaagggctgcgcccaccctttatccatgaggagttttccctttgttacttggaagctgtggacacttggtggagcgtggggaattacggacgagggcgtgtggctgggtgtgagtgtggacttatgagcgacacaaaatggaacttgctggtttggtgcttgg

SEQ ID NO: 22169 - DNA, 905 bp, Artificial sequence
  DNA replication origin
cctcagcccttgggtggtcgatgggactgggcgccttggagcagggggtggtgctccacggggaggctcgggcctcagaggagcccatggagtgggtgggtggctcaggcatggcgggctgcaggtcccgagccctgccccgcgggaaggcagctaaggcccggcaagaaatcgagcacagcgccggtgggccggcactgctgggggacccagtacaccctccgcagccactggcccgggtgctaagtccctcattgcccggggccagcagggctggctggctgttccgagtgcggggcccgccaagcccacgcccacccggaactccagctggcccgcaagcgccgcacgcagccccggttgccgctggagcctctccctccacacctccctgcaagctgagggagtgggctccagccttggccaacccagaaaggggctcccacagtgcagtgggggggctgaagggctcctcaaatgccgccaaagtgggagcccaggcaggggaggtgccgagagcaagcgagggctctgaggactgccagcaggctgtcacctctcactctcacttgagaagccattatcagttaccagaacactttgtgtctggctttacaacagcccagattccaatcttgccaacagctaatagagccaaagggaccggttccagggtgcacgactggtagtgaccaagctggggctagaagtaggtctgttggttttgaggtaaccaggctcctcccacctaaggcaatgaccaagaacagtgtcccaggcagattataggaatgagaaggctcttagccccagctctgctgatttaaagtaattagcatgggcattccttcacctgggagatcagtacttcttccccttccccctaaactgatgggcatgacaac

SEQ ID NO: 22170 - DNA, 1034 bp, Artificial sequence
  DNA replication origin
accaattcctagctctactctccctttacccccagtacacaccattcaccatgggaaacactgctgaaggcattgtcttctttgtaagaatgcaacaaacatttctactttaagagtcttgttgatcaagcagactgaagtatgtgcaaggccaacggctggttggttccctttctctcctccttgatcctctaagttctctccatttgacagcgactctgctcccgctccctagtgttctaacttctctacatctctctaatcatgcacctgttttttatttattttttgggggggaggactctgtcatctgtctcttgctttctttcttataccgtctttgatcttcacgtcagtgccttgatttcgaaacattagacggaaagtgaaaaatgcagcgagtcgttgtggtatttgggctgcacatctccgactcagctctcgatcacgtgaatggctgactgcatgttttactttgtattttggtgtcatgaagaagcagtttcggtccttgctctctgtctctgctcttggtccttccaactcccggctctttcattctgtctctggggtttacttttcttagttgcagaaaccttgccggagaactgtctgggttaggagcctgaactgggttagaagcctgaactggctgggttaggaggagagaggcagggggcagtgggagtgagttgggggctacaggtggagcaagggggatcagatcggggtgatcagtgagggatgaaggtgagatgggagaaggacagacagaggttagttgaagagtcgactaagagaagggagagtcaggagatcaaaattattccccaaggggacaagaagtcccatcatttgaacctaaacagcaaaaaacctagagctaaacttacggctcatctagaagtgggtggatgatgaggtttgcgggttgggggtttggccttgcgcatacttctctatccttcccaatccgtcagttcctgtcaatttcagcctcttccacttccacaacaggtgagcctgagatccag

SEQ ID NO: 22171 - DNA, 1171 bp, Artificial sequence
  DNA replication origin
cctctactccccccgaactatgctcctaattggcagctcagcgcatgggatgatgcgggtggctgcaggccggccctgcagtgccagccgcagcagcccagccccactggagagggagttgggggcacggcgtggtcccggggctccgggaccgcgaggcggggtgcggcaggcagggtgcgcagcgggcgggggctccccggcctacgcggcggccaccgcccctcctgcggctggagcgcttccagagcagaggcgcagcctcgctcgccgctgcgctcgctccgtcttcctcccgctcctgctccggctcctcctactccttccctcccgccgttgctccagcagccggctcccagcagcgggcgagcgcgcctccccctccgctccctccctccccctcctctcgctctctgcccgctaactttcccgagccccgaccggcggcgcagagctccggggtagctttgtggccgaacgccgacctcgggcggagagcgcggctgtgcccagtatcccatccccgcgacccccgcgcgctccggagagaacaggactatgcccggggctggggacggaggcaaagccccggcgagatggctgggcactgggcttttgggtaaggcagccccagcttggtctcttctcttgcctccccccacccccaaagaaggggacactcgagaaggaagatgccttggatggggtgggctttggagtgcggcacggaatgaggatggtggccgccggcttcctgcctggttcctgcctggttcataggctgtgctccctggggaccgtgtgcgtccctctctaccccatcagcccgccagtctcaggattagtttttttgctgtccttggcaccttcggctccaggtatttggagctggatcttggggctgcagcgcgggtctccagagttcagaggttcaggatgctggaggaggggggtccgtgccttgagtgcaggggataccaggtgggttgcacgtgtgactgttggaatggtggtttccatcccggcccagagccgtttgcttgtttcccaggcaccaggcatgcaccagttgggggtgggggagtccccttcttcctgggcccttttcctgctttgctcctctgccctgtacctccctcaggagccactgccttccctacagcagcacctg

SEQ ID NO: 22172 - DNA, 1312 bp, Artificial sequence
  DNA replication origin
gatgttgcaagtcctggagcaaaggtacaaatggaaattatacatatgtctaaatattaatcaggataacaaagtgttaagattgatgttttatcctctgcctttaattacttttccttcatgataacctggaaaaccatgtccaaaatgaaattttcaggccattctctggtacacactcttctctggtcctgtagtgagaggggctcttgtgcatgcctagggtgtgtgtcaagttacatgcactccccatcacctgcatacagctgtcccttgcccactgctctagcccttgagtgcacacctgatatggccagcccttgaaaggacagatctggggaatagggaattccagagttcctgatacctggagtacagtctagaaggggaggaggtgcatgcccccacctgccctgcccccttggtcccatggactcattctccagtgaggggcatggccagaggagggccagaatgagggcctttaaaaccagaaatcagggctgaggcttctgttgcccaggtccaggggtaacatcgctcttaataagcctaggaggcaaatatcattgcattcaccattttataggtgaggagcagaggctcccccagaagaccatgtaacttgctcaaagccatacagtcataaatggtggcgctgccagagcctctgtgccactatagggaaggcagcgaccctctctcctgaaaaagcaaacagacattcagcactttgcctgcaacctcaaggggtccgtgatcacgccgaagtccacccagagacccctcgttaagaaggcggtgcgttggtgtgcctgcagcagaagtcagaccatgaagtgggagcgggcttcccagtccggaccagtcctagacagtaaagagggcctgtgatgcagggagggtcttggatggttggaaaggtgctgaggaggagatcgactcatttacagaaccaccagcccaagtagcaccgctcaggtgaaactctttcacttgggcctgtctgggaaaaggcttactcgttcacagcctcgcctcagccctctgacctggttgtcaccctggactcctccacccctaccccaaaagggaggccgagggagtctgccgttccgaagaaaacaggagagttggaggagggcgaaaaggcagcatctgagggggacggcctaggtaggaaaaatgagaagcaggggtgcagcgggagggtgaaatggggcgcaggacacagaccaggcgcggaccaacctgctccctaacctggagcgtggtgatttccaaggggtccatggagaaatgtggggcgggg

SEQ ID NO: 22173 - DNA, 1450 bp, Artificial sequence
  DNA replication origin
tccttttatttttctttctctctctctttttcttttctttcccctcccttcactctctctctctcttttttttcttattcccttatgccctctctaaagagagcttcaggtaacggccctaccagctgtggaaacagagagtgctcgcatctggggtcatagctgagaatttagtcaaagatagtgagaacctgaatggtcttgggagttaaggcagcctctgagggtctctcagaaaacagggacagcaactcttgcagccaaatacagtttatttttttctctctcagctgaggagcagagcacatttacggagatgcaaatgaccatccagtggcctacagtggagggggggtggagggagtaggggattagggggttggtagggagtgttgggggagggaggagcacagggctggctcagggccaggatctgtgaacggggcagggcctctgtcaacatttacccagtccatccccagagagggctgcaaaaggggacggcgatagaaaagtagatggaatactttgggatgggggacaacttacatgcaagaaaaggagggaactgaacggagaagttacatccaaagggaagggagtgaatagcacaaataaatatcctggcaagagggcaggccagctgtgagggtgtgactactgatgatgcttcaaaggaagaggaagcagcaatattttaggactgggtaccagcagagaaggcagggaggagggagcgggggatcaggctggagggcgcgagttcaccatgaggctgaggaacgattctctctcgtggggtccaagactagcccaggaaacagggagtcgcagggggactggagaggagacctgggccagcgggaggcagtgttctccagagggtcagatgcgtctctgattcaggccagaatacaggtcccgctggcctttccggatgggctgggggtgaaatagagagggggcggtcagtggtgcgggaggaagtacctcctaagaaaggacactgaagagctagctttagtgcgtgggaagaactttggacttgaagtcaggaggcaggctggaattctaatttggcatggacggtaggagacttgagctggtcacctccttccgtgagcctcagctttcccatctcaaaaataggaacttaaagacccacattccagggcttctgtcagggctaaataattcgcttaagctaaagtaaatactacgtgtttggctggtgttgagtatttggctcaacaaatatttgttgagtatatccaggtgtgatagtgaaaatatttaacaactaggagtgcacacataccaatcaactagaacaatcctggtgatcctctgccatgccaggcattaactctttgttaccccaactcaagaggcagcccggtaggggagggactgggatgtctggtcacgtgtgtgtgtgtgtgtgtgtgtg

SEQ ID NO: 22174 - DNA, 924 bp, Artificial sequence
  DNA replication origin
gtgagggaagcctctgcccggccgcccctactgggaagtgaggagcccctctgcccggccagccgccctgtccgggagggaggtgggggggtcagccccccgcccggccagccgccccgtccgggagggaggtgggggggtcagccctccgcccggccagccgccccgtccgggaggtgaggggcgcctctgcccggccgcccctactgggaagtgaggagcccctctgcccggccagccgccccgtccgggagggaggtgggggggtcagccccccgcccggccagccgccctgtccgggagggaggtgggggggtcagccccccacccggccagccgccccgtcggggagggaggtggggggtcagccccccgcccggccagccgccccgtccgggaggtgaggggcgcctctgcccggccgcccctactgggaagtgaggagcccctctgcccggccaccaccccgtctgggaggtgtacccaacagctcattgagaacgggccaggatgacaatggcggctttgtggaatagaagggcgggaaaggtggggaaaagattgagaaatcggatggttgccgtgtctgtgtagaaagaagtagacatgggagacttttcattttgttctgcactaagaaaaattcttctgccttgggatcctgttgatctgtgaccttacccccaaccctgtgctctctgaaacatgtgctgtgtccactcagggttaaatggattaagggcggtgcaagatgtgctttgttaaacagatgcttgaaggcagcatgctcgttaagagtcatcaccaatccctaatctcaagtaatcagggacacaaacactgcggaaggccgcagggtcctctgcctaggaaaaccagagacctttgttcacttgtttatctgctgaccttccctccactatt

SEQ ID NO: 22175 - DNA, 1314 bp, Artificial sequence
  DNA replication origin
cggggggctgacccccccacctccctcccggacagggcggctggccgggcagaggggctcctcacttcccagtaagggcggccgggcagaggcgcccctcacctcccggacggggcggctggccgggcggagggctgacccccccacctccctcccggacggggcggctggccgggcgggggctgacccccccacctccctcccggacagggcggctggccgggcagaggggctcctcacttcccagtaggggcggccgggcagaggcgcccctcacctcccggacggggcggctggccgggcgggggctgacccccccacctccctcccggacggcgcggctggccgggcggggggctgaccctcccacctccctcccggacggggcggctggccgggcggggggctgaccccccacctccctcccggatggggcggctggccgggtggggggctgaccccccccacctccctcccggacggggtggctgctgggcggagacgctcctcacttcccagctggggtggctgccgggcggagaggctcctcacttctcagacggggcagctgccaggcggaggggctcctcacttctcagacggggtggttgccaggcagagggtctcctcacttctcagatggggcggccgggcagagacgctcctcacctcccagacggggtcgtggccgggcagaggtgctccccacatctcagacgatgggcggccgggcagagacgctcctcacttcctagatgtgatggcggctgggaagaggcgctcctcacttcctagatgggatggcggccgggcagagatgctcctcactttccagactgggcagccaggcagaggggctcctcacatcccagacgatgggcggccaggcagagacactcctcacttcccagacggggtggcggccgggcagaggctgcaatctcggcactttgggaggccaaggcagacggctgggaggtggaggttgtagcgagccgagatcacgccactgcactccagcctgggcaccattgagcactgagtgaacgagactccgtctgcaatcccggcacctcaggaggccgaggctggcggatcacttgtggttaggggctggagactggcctggccaacacagcgaaaccccgtctccaccaaaaaaatacgaaaaccagtcaggcgtggcggcgcacgcctgcaattgcaggcactccgcaggctgaggcaggagaatcaggcagggaggttgcagtgagccgagatggcagcagtacagtccagcttcggctccgcatgagagggagaccgtggaaa

SEQ ID NO: 22176 - DNA, 962 bp, Artificial sequence
  DNA replication origin
cacgccactgcactccagcctgggcaccattgagcactgagtgaacgagactccgtctgcaatcccggcacctcaggaggccgaggctggcggatcacttgtggttaggggctggagactggcctggccaacacagcgaaaccccgtctccaccaaaaaaatacgaaaaccagtcaggcgtggcggcgcacgcctgcaattgcaggcactccgcaggctgaggcaggagaatcaggcagggaggttgcagtgagccgagatggcagcagtacagtccagcttcggctccgcatgagagggagaccgtggaaagagagggagaccgtggggagagggagagggagagggagagggggaggggtgtttgtttgtttttaagacaaggtcttgctctgttgcctgtgttgaagtgcagtgacttgatcatagctcactgcagcttctaactcctgggcgcaagtctttttttttttttttttttgagactctctctgtcacccaggctggagtgcagtggtacgatctcggctcactacaatccctgcctcctgagttcaagagattctcctgtctcagcatcctgaatagctgggattacaagtgcacaccaccacactcagctaatttttgtatttttagtagagatggggtttcaccctgttgcccaggatagtctcaaattcctgacctcaagtgatctgcccacctcggcctcccaaagtgctggggttacaggcgtgagccaccacaccccaccttctcccaaagtccccaccttctaataccatcacattcaaggttaggaattcaacacaggaatttcgggggaacacaaacattcagcccataacagttatgaacaatcgtgccaataaatttcacaactcgggtaaaatggacacagtccttgaaaaagcccactgatgatgaaatagatagcccaaatagccctttatctatta

SEQ ID NO: 22177 - DNA, 1331 bp, Artificial sequence
  DNA replication origin
agcagcttccagtataacgcggcggctgggtcggggagcagtgagccttctcctccgccccagggcacggatacaagatgggttagcccgaattgaacgcttctagaataaaagagcccttattgtactacatgcaaaacagaagcgctgcccagtttactatatgcaaaacagaaaggccctcaatgaacgcactttaaaaaataaaaaaggagcccctcccattttcatgctggagctctttccaaaaagcacacaccgagtggcaggtctcctgccacctcctcgctctactgtgcactcgtctggctttcgtgcccttctgcagggagttgggttgtgtttctccagcccgggcactgaggccacggcgtgctccgctaacgacgcggtgttacaacgaagctgaagctgggtggctaacggggcctggagggaagaggcgggcaaaagcgcccccgccccttcttcctccggtctctgcctgccgctgcatgcaaagcagaccctaatgtatgcacgcagagggaggggggctcgcgagcacgtttctgattaagagagggggaggaggagagcgttgggcattatgatacactgggtggaaggggcccgccggcggcgagctctgtgcgcggggttagtaagctgaggggggagggggaaagaaggaggcgagttagggaggggaatgaatatccaccgggtttactttattgcgggaaagaggggagggcgcctcgagcatagcgttagacgcctgcaaggctgggaaagccgagagggtagggaggggtttgtgtcgggagaacttgcgttggctgaggctgggggatcgatacacagcctgcaggccccggggcagcctccatcccccaagccgagggggagttcgctggaaggtcatgcagccttcctggactcccgcaccggtacagcgcactgcatgtaatattacagcctggggcggcgaatttgggaaggagggagagggtcgttgtgagcaggttgcactcagctctggccctccggagggtgcacttcacgcctccagagaaggtccacagcctcctggtgctgaaaacctacgtccctccactggcgaaacatttgtgcagagcggacgatgggatgggggctggagaggagcaatgaaagggaggagacacaggcaagcctcaactcccccaactcgtcccgaatcgatcttcgttccaaccgcgcaggatggggcccagatggtttgcaaagcgcacactcgcacaacgcaatacacagaacaagattccgttgttacagcgcgtggtttactagatgctaaaagggtggga

SEQ ID NO: 22178 - DNA, 972 bp, Artificial sequence
  DNA replication origin
gccccggggccgccaccgccgaccgggggcccggggggaagcagcagggccgggacgcgttgccgcggggcgccccctaggccccggcgccccccgccgccgccgcccccggtggtcccgggtcgggcggggaagcgccaccgacagctgtgcgccatgttcgccccgtgaagtgaagcagcgagagggagaggcgacaacacaggggggcggggaggcggaggggggggcacggggccccggaacctgcctaaccagctctgcgccgcccggccgcctgcaccctgccggccgctatgcagagcgccgggccgcgcccgccagccccgcaatctgtatagcggcctcgggcctccgcctctgacgcctgggcgctgcaactccatcccgaggcccgggccgccgcctcctgcccgcccgccggccccgcaacctggataactgcatgccccgccctccgggagaggcattgctcgggaaaaggaggggggaaggaagcccgggagcccggagcagagcgcgggttccggagagagggggagggggcgaggactacgcggaggatggaggcgtagggagccgggccgcctgcagccttgagcgccgagaggccgattacacacgttcccgggacgcgctgggaatcgaacagcccgggagagcagcttccagtataacgcggcggctgggtcggggagcagtgagccttctcctccgccccagggcacggatacaagatgggttagcccgaattgaacgcttctagaataaaagagcccttattgtactacatgcaaaacagaagcgctgcccagtttactatatgcaaaacagaaaggccctcaatgaacgcactttaaaaaataaaaaaggagcccctcccattttcatgctggagctctttccaaaaagcacacaccgagtggcaggtctcctgccacctcctcgctctactgtgcactcgtctggctt

SEQ ID NO: 22179 - DNA, 1061 bp, Artificial sequence
  DNA replication origin
aagaatcagagacaaccccaagtcctttctaaggaataactttgcttgataatcctttttctcccatcccaaagcaaccaccgccaccacactaaagtataactgtcccttatctactctcctcaccccaacctggcttcccccaccccttccaagccccaggattggcctaggaaaaggtggatcaataatgaaatgacgagaagagaagggcgggagggagctcgggttggagactgcgtgctctcaggcgcagtgggtggggtaggagagcagctgcttcccctgggaggatgctgcctcagtcccccaacaaacacctcccctcacaggggcccccttccccagagctggagggaaagcctgcctcctctccaaggggagtggtggaaagctgctcttctctaagcctaggggacagtggactattttcccctccaagatgccactaatccttcattctaaaggagggaaagggtggagtgaaggtagagtaattcccggctaccaataggctagaaactgtagccctgtaagacggggcgggggggggaagagactgctgtatgaggaatcaccgttatcttcagagggaaaggaggtgagaccaggcaaggtgcagaggagagattttccccggtggggtagggcgggatgggggaggatcggtctgcttggggtgggggtagagggtggaggtgaaggaagggggagtggctggcagtatagggacctggcccggggatggcgcgagggttcatcgggttttcgaaagcaaggtgctggaagggacacgatccccaagggccaggagaacgtggccctggatgaggccatcacccgagagacgcccgagaggaaaactgccctaggagtaacacatctgcccagagagggaggcggggatgtggcgggatcaggtctctaggagggagggagggaggaatcttgctcggatgaggtaatctgtgaaagggaggaggggttcagtcccgggatgggaaaccccggcgagggggtctgtgccaagggatttggggaagggtcagggggaggagagc

SEQ ID NO: 22180 - DNA, 942 bp, Artificial sequence
  DNA replication origin
gctgggcagccccttcgcgcggcgccagctggtgctgctcaacccctacgccgcgctgtgcaaccgcatgctggccgacatgatggggcagctgcgccgcccccgtgacagccgctgagcgccgcggacccgggcgtccgcgggcgaggggacgggactgggccctgaaccaataaagccgtcgggcctcaccgactccgcctgctcctgcgtcctgcccgcgcccggagagaagggcactcgggggtactcggcgcgggctggggaccagccggggggtggtgagccgcggccgcccacctgccgggtaagggcccctcgggcccgtggtcgggcatcgattggccccgcctggcgcagcccccgcccctgcagcggactgcggtgctcatcagacctgagcagttgctccggcggcgctcggggagggagccaggtgagccgccccggtggcggggggcgggggcgggatgctcggcgaccccaccctccgaccctctcctcttccgccgacatccaccggagccaccaacatcaggaaagggggcgtagggcgagggatgggagagagaacagggcaggagagaggatgggaacagggcaggagagagaataggattaggagaaaggcgatccctttgggggaggggcgcgtggagtatgtgtgtgagtgtgcgtgtgtgcaaggtgtggttgcacggatgctcgttgcttctgcgtatctgcgggtgtgtgcctctttgtattgtagcctggagtcagtgctcgcttctgcgcctgcaggatgtccatgtgtctgctgggtgggtctgtgcctttgggctttgccgttcgtgtccgtgccttcgccactgggggctggtctacatttgcgtttccgtacatggttctttttgtttctggagagtaaattcctggagcaattgctaggcctgcctgctg

SEQ ID NO: 22181 - DNA, 1110 bp, Artificial sequence
  DNA replication origin
ggcctgggccctgagcttcctggtacttggcgccgacttgggcaatctctggcttgactggtacaaagcagaggccaatatgctctcaccacagcccctcatacttctagccctttcttcccaaacccagatgggagccaggggcctgggcctctcctcagaggggatgctgaggaacaggatggctgggtctgccagagaggcagcatttcggagtgattatgagtgtaaatactagagccaaatgcccagatgtgaatcctggctctgcttcttaccagcgggatcatcaccctgggcagattgcttacctctttctgcctcagttttcttatttgtaaaatggtgacgacaatagtaatgacctcatggggttactcagaggatcaaatgagttcatatttgcaaagtgcttaagtgtctgctaaatgtcctgcggaccacctgcctggtgggtgctgggggtccctgggcaaagaacctatctccctgcccacctcagggccactcacattgcacattaaggatgacagaggcgttggctgatcggccacttctggggtcctgcagagagcagttgagctcatgctgggcccgatgggcagtgacagtgaaggtgctggtgcctccagagaaggcctcccctcccacgctcagcagtcttgaggtgctggcctcctgcagctgtccatccagataccaggccaatctgggggtgccaggcccccctgccacccggcaggtgaaggcgtggcgttcattctcccgaagtgcccgctcagcccaggtctgaccatctatttgtggctccaactccccccaacctggaacacagcaggaggcctctgggaagggctcaggcacggttggtactgtgctgtgaccaggaattggcccagtgagaagagcagcaggccaaaggaaagggcacctgagtcctctcaccagggactggctggttggacctagggtaggtgggtgaaggggacagggactccagggcttggggcctggagtgggtacccaaacagaagtgcagacaggggagagagggggctttggaacccagaaggacttggtcaacgactgaacaggggtgtacctgagctc

SEQ ID NO: 22182 - DNA, 1195 bp, Artificial sequence
  DNA replication origin
agcaggtggcagcaaagggcggcctctcccctccccctccttgtctgctgcttggccccggtcagcttcagtctccagccgtggggggtcccctgctaaggccagccctgtcaatgagtgaccagagattcctgtagttcagcctcctgctgttcctgggttagggagagacggcacaaactaaactcattgaattagaacagcacttgtccatctcaaagaggataaattattttttgctatccaccccagctggaatttagaccagacttacaggctttctgctccttccttcagtgaagaagagtctccagggtccctctagtgcaggtcaaagaagtccagtccagctgagttcagctccctagggcctccccagccagtctcctggaccaagagctggctttgcaaggtaaggatccactgtcagcgttggatttcggagtggaggttgagatggagaatgacttcaacctagctcaatttgggggctgcttttaggtgtttagtgcctccttctcttccttattaactcccactcctactacaggttggtgtgctcaattgtatgtctatagcctgcctccatctcccaatctgtaatccagcaagtctgtcggggtggaggggtgtggagctccatgggggcaagatgataattccattcggttttcctgtgctttggagtttgcatgacactttaacgagtcttcttgtgcctatccttaagaaagtctgtgaagcctgatgtgcgtggctatcaatgtcatttacagctcttcatggtggggcttggaatagggcgaggggaggaggtgacagggagaagacctgggtaccctcagtagatgttctggagatgttgagagcatgttgtaggggcttcgatttgggaggttcagtgggagcccgtggaggtttcaggcatctaaggcaaaaagaaagaggggagagtttgggggagggagaacggattgtcaaaaacaccctctcaaaagcgtgttaaagcctgggagtggagggtggtctaggagagtcgggagggcagggtgggaggagagggggatgtgtggtggtggtggtggtggtggtggtggtggtggtggtggtggtggtggtggtggtgatggtggagagcccagctgcaaagatgaacaaagcgggcgctgtgcaggctgggggaggtgctgctgtg

SEQ ID NO: 22183 - DNA, 949 bp, Artificial sequence
  DNA replication origin
ggcgaggggaggaggtgacagggagaagacctgggtaccctcagtagatgttctggagatgttgagagcatgttgtaggggcttcgatttgggaggttcagtgggagcccgtggaggtttcaggcatctaaggcaaaaagaaagaggggagagtttgggggagggagaacggattgtcaaaaacaccctctcaaaagcgtgttaaagcctgggagtggagggtggtctaggagagtcgggagggcagggtgggaggagagggggatgtgtggtggtggtggtggtggtggtggtggtggtggtggtggtggtggtggtggtggtgatggtggagagcccagctgcaaagatgaacaaagcgggcgctgtgcaggctgggggaggtgctgctgtgggaaagggtgggtggggggaccttgggctccagccccacaagggcgtcttctttggctggccaggcggacgggacgggggacgggggcggggactggcgggaggggggcgggacaggctcgctctcctcctacttagcgagctcccggggaaaagcaacggtgtcctcctaagcctgaggccaccgcgaccgagccgagccaggctaagggaccagtgtctccctgccccccccccacctctaggtaagagcgccccgtcccactacacttgcgggtcccattcgctgcggtgctaggactggataaggggaagtccccggggcctggcgagagccctgagatcagctctaggctagggagctcggcagaaacccgtgggggagagagggcaccccaggtgagtgcgtgggggcgaaaggagcgttatggggagttttcctgtgagcctcttgcttttgccttcctcggccgctgccaacgccaccgccagagggggccgtgacgctctcccccccttggagaaactctgatcctggccctatccagactctccc

SEQ ID NO: 22184 - DNA, 1525 bp, Artificial sequence
  DNA replication origin
cagaggatgcggggagactgaagaacacagaggtggaggggtcgggggaagaaaggacaggcgggtcctcaagtggaggcgacgacagacgggaacactggggatgcgcgagggcagcggaggggaggctgacgggcggggagatggggcgaaggagagggaggctggggcccaccgggaccccaaaggcggaagagaggagagatgggcggcccgaggagagggggagccgggagagcgcggatggagcgagggctgttgcttgggtgtccggtggtggaaaggtgcctctccgcggtccgcagggccgagggagggaggtttccgcaaggtagcggccccttgcacccctcggcctgctcctgcccaggctgcccgcgtgggacaaggccgcagtgttgggcgcctgccgctgccgcctgcccgcccgcccctgacaagcggcctttctttggcggggcagagagaaggagccgcttgtttgcgcggccgggaaacggggcggcccccacagacaccgcccgttccgagcctggcagctgcgggaagggcggctgaatgtgtgtgaggggccgcgtgtgtgagctggggctgcggtgtgagctgggctgtgtgtgtgactggggctgcatgtgtgagggggctgcatgtgtgagctgggctgcgtgtgtgagctgggctgtgtgtgtggctggggctgtgtgacgggctgcgtgtgtgagctggagtgtatgtgtgagctgggctgcgtgtgtcagctgggctgtgtattgagctgagctgtgtgtgtgataggctgtgtgtgtgatgggctgtgtgtgtgagctgggctgtgtgtgtaagctgggctgtgtgtgtaactggggctgtgtgtgtgagctgggctgtgtattgagctgagctgtgtgtgtgacgggctgcgtgtgtgagctgggctgtgtgtgtataactggggctgtgtgtgtgagctgggctgtgtgtgtgacgggctgcttgtgtgagctgggctgtgtgtgtgagctgggctgtgtgtgtgacgggctgcttgcatgagctgggctgtgtaactggggcagtgtgtgtgagctgggcttcgtgtgtgagctggggcctcgtgtttgactggggtgtgtgtgtgagagctggggctgcgtgtgtgagctgggcttcgtgtgtgagctggggcctcatgtgtgacgggtacgtgtgtgagctgggttgtgtgtgtgactggggtgcgtgtgtgaggtaggctgtgtgactggggtgcatgtgtgagctggggcgcgtgtaagcggggctgcgggtgtgaggggctgcgtgagcgcggggcgctttcctgtgaggcgtaaggcatggagtgcgtgggaaggcctcggcgtgtgggcgggtccgggtgtgtctgggtggcgtgacgcagggacgtaggtgtgcgaagtgtcgcggaggcgtgcgtgtgtgccgcgtgggagcccggcgtggtggggcgcctgcgtttgcgtttgacggctggggggtgagcccg

SEQ ID NO: 22185 - DNA, 1086 bp, Artificial sequence
  DNA replication origin
gcaaggccctctgtgcgcaaggccggggcgccggcaggtgaccccggcccgggccctcggcctcctcccccgcgggaatgcgccgacaccccagccacgcgggacaccagtctgaagccctctccgccgagtggagcacccagagtgaactctcgggggtcttggcccccgcctgaaggaggccaaggaagggccgactggctccagcaccaacgggcactgacacagctcccgggctcccacggagtcccaggacgagaggtccaaagccagccccagagcaccagacccggcccttcgcggggccactgctcgggcgctccccggagccccgcgggtcgcccggcctcacctgtgtccctgggggtcggcctcggcctcggcccaagcggtgcatggctgtggccagaggcccgccaggccgagctggggtcctctcggccgccgccttcgccctccaggcgcacatccgccctcgagaaagggccgccgtcagaggaaggagtcaggaagggaaggaaactgaggcggggagcccagcgggggacgcccgagtggggagggggacgagagaacttaaggatgagaaaaacctgacagagatgaatgggggtgtgcagagggacggggcggggaaggggagccaccgggatgtgaaggggaaaatgaaaggcagactaagagatgggaaaaaatgcaagctggggaggggaagaccgagggcagaggatgcggggagactgaagaacacagaggtggaggggtcgggggaagaaaggacaggcgggtcctcaagtggaggcgacgacagacgggaacactggggatgcgcgagggcagcggaggggaggctgacgggcggggagatggggcgaaggagagggaggctggggcccaccgggaccccaaaggcggaagagaggagagatgggcggcccgaggagagggggagccgggagagcgcggatggagcgagggctgttgcttgggtgtccggtggtggaaaggtgcctctccgcggtccgcagggccgagggagggaggtttccgcaaggtagcggccccttgcacccctcggcctgctcc

SEQ ID NO: 22186 - DNA, 875 bp, Artificial sequence
  DNA replication origin
tccttcaggcgggggccaagacccccgagagttcactctgggtgctccactcggcggagagggcttcagactggtgtcccgcgtggctggggtgtcggcgcattcccgcgggggaggaggccgagggcccgggccggggtcacctgccggcgccccggccttgcgcacagagggccttgcctgtcgctcgtcaaatccagacacctgggcctccgccactcggctgccggggcggcactggggcgtctgtacccagcgtgcgggagggcacccagggccggacgcgcaccgcaggggtctttttttggccgcggggccgggcgggcgggtaatgacagccgggttgctggggagccgcgggccagatggaagcggggccgcaggtgagggacgtccctcgcgtagcgccactcagccgccggggccagagcgggagtcaaggtgagggcgcccccaggtggccgctctcggccgcggcgatcgccctttgggaaagcaccgcctgagtgcagggcaggttggcctggtgtctctttccacttctcttggatcaggttactgtgctggggccacagcctcgcacctcccaatctctccatcttttcttatcttctccccacacctctctccttatctctccctttactttcgcctccttattctcttctctcctctaatcactcttgttctccatcggccttactcctttacaatctttatctccacttgaagttcttgggtgtaaataaatgagcacaccacagctgccccacacggcgatagtgaccaatactccaatatgacagataaataaactaacgcccagacaggtgaactgccttgctccaggtcacacagctcataataataaacgg

SEQ ID NO: 22187 - DNA, 1072 bp, Artificial sequence
  DNA replication origin
acagagatggacttaaggggggtagttctcgcatactgtccaggccccgccggcccaggcggggactctcaggaggctgcagggtacgggtggctaacccatctgaaaatgttcggcccaccagttggcgtgaggggctggttgttagcacccgctcactgcctggaggctcacggaaagggctgggagggcggtcctggagtgtgccaatcttgtttcggggagcagggactggaggctgaaacttggggctgccaggaatgctggtgggttgactgagagcaccagaagctgggtattcactcaggctgatggccaccacaggcagctgcccacccagccgggggctctcagtggctctccgggcctccgccaagacagtagctgcagggctgtctgtcagcagaccccggaggccagggctgggaggcctctcatggccccctttcctgctcagccgaggactctcggagcgagcaccacttgggcgggactgtgggggctgtagggccagatggtagctggaggaacgggcaggtaccagcgggggcacagaaggtcctggctcttgcccactgggtgagtgactggcacagcttccactgctggctggtgaagagagtggagagaaggctggagaggtgttctcatagctggagcccacagacatggcgccggggctggttgggggagacagcaggtagcgcccaccattagccatcggtgacagtggagaggttgcggcaggcttcttgccagcagctccaggctcctctagcaccagtgagtccatgatctcttgcaggtccttctcaatagagctcaccagggaactgtggctggcacaggcagagggtccccgtgttgcagtctgtggggtgtggttcccatttaccagactttctgattctgctggagggaaatgcaaaggtctttgactttagggagctgcatatgcataaaagccagagcactagcccccctcctcctagcacagtgaggctaacaaggctctggagaagaagccaggagatgtggttctggtaccagctagctctgccactgacctgct

SEQ ID NO: 22188 - DNA, 916 bp, Artificial sequence
  DNA replication origin
tgaagagggagagggcccaaggccaggagctgaaggtaacacggcagtcagaggtgcaggggatgaggtaacacaggcagaggtgtgggggcagggcacagattttggtctcctgaagtcccttgaactgaaattgttgggtaggtctcgagaaaaggccctctgttttctctccaaaccagtcaaggctggttctgcatcacagagcctccagctctcatccctccccttctactacagcccagagaccaaaatttaacccagggaaaaagggtagtgatggtgagggttaaatccagggttgggcgtcaatcaggagctgaggatgttaaagcagtgtggcagaggggaccccaacccaacacccttggcctccctcccctcctgcccagggtcggggtggggtgttggccctgcaggctgaacttcagggatgagggttgcaattagttcgggctgtttccatggtaatgagtcccaggagtgggtacagagggggtggacggttctttctggggtgagatgacacctctgagggtgggaagggggacgaggggagggtttggtgagtcacccctcaaaggacaggcagaggagaaactgtggttactgattccaaagccagagtggagccatgggctgagggcaggggagggaagccaagtgaaccctccacaccattgccatcactaccaccatcaccaccaccaccatcactaccacagcctcgaataacctctcttccccacagagaaagcgaagtctaggcctccaaaaaactccaggtcagtgggaaatgaggttaggcaggttccttctgaaatgctgagctttatccctgggagtgaggccctatgctgaacccagtcactcccatccctctacccaactcatctacccatccccagagaggagg

SEQ ID NO: 22189 - DNA, 878 bp, Artificial sequence
  DNA replication origin
gccacaggggcatgcgttgtatggggctggacccggggaaattgggtaagaaacctgcctccccccagctcccgctgtacttggccttgcccttttgcgggcatcatggcctggagcgctgattccccaaccttcccggttccctccaaaccgcagcaccgaccctggtgtccggcaggtactgcagaggccaggtggtcccgtcccaccgctctcctctcttccttctggggcgtggcccgcggggccgggggagggggggcggtggaactgacccttctcagctgctcctgtaactgttcccgcactgactcggggcagttatcgagctgcgtctggagctcggcgtagagcgcctggcgggcctccaggtgcctccgtcccgcggccagctccgccctctcctggtcggcgggagggcgagggagagggcggggcacaggggagaaacagaacacacactcctcaactccggcccggcagcggcgggaggggagcgcgggagggcggccagggcgggacagaatgggggtcggcaatgggggttgagagaggagaaaaaaaggctagaatcaaagaggagaataaccaggcgaggagaaagaaaagggcagaaagggaaagtgaggagggaaagaggtgaagagggagagggcccaaggccaggagctgaaggtaacacggcagtcagaggtgcaggggatgaggtaacacaggcagaggtgtgggggcagggcacagattttggtctcctgaagtcccttgaactgaaattgttgggtaggtctcgagaaaaggccctctgttttctctccaaaccagtcaaggctggttctgcatcacagagcctccagctctcatccctccccttctactac

SEQ ID NO: 22190 - DNA, 801 bp, Artificial sequence
  DNA replication origin
ccgagagccctctgcaatcctgggctgtggggcccaagggcagctggatcaagatggctcagcctcttcttgaccacagaggggcttagtagctactagtgccaggctgcccacctctcctctttgccaggcctgagtcctacagcaaagatgtggagttggctgacaccttgccagaaggtgagcagcaggagggtgagggagggctgggggcagggcagctgcacacctgctgtgtcaggctctggtctcctgtcaatggctgcctatcctgcagccgggactggctggttccctgctctgtcctcacaggagaccgggaggctctgtgggctgagctcaaggctggggctgagtctggctgggacttctcttcacgctggctcattggaggcccaaaccccaactcgcttagcggcatccgaacaagcaaactggtgcctgttgacctgaatgccttcctatgccaagcagaggagctgatgagcaacttctattccaggctgggtgagcaccccagtagggaagggaaagcagggagcttggtttcctgctcaggcttggcaatagaactggaagtaggacccttgtgtgacaggccttcagcaacttagcctgtcgagccccgccctagtggaagcctgcactcacatttgcgtaccagacaagagaacaaacggagccaaccctaatcctctcttcctccctttcttactgtgagggtctctagggtctgtgaggggaaccctagtccacgcatccaaaatccttccactccctctccctcagacagctgccctt

SEQ ID NO: 22191 - DNA, 1218 bp, Artificial sequence
  DNA replication origin
ccttcagactaaggaagtgagtggaaggctggaggtgtggggcttggcgctggggcacttggggtaggagggataggtcttccccccagagcaggatttccaccctattgaaggttccaggagggagctaggcccctacccatgccctccaggtcatgaccctgccccccacctcactctgatcagaggacaggctgggaggtaggagggcatgaagaggcaggggaagacaggaactggtgcagaggtttaatgggacaggagctggggccaggtgaggaggggagggctgtcactgtggcagaaggctgagcaggaggctgggaaaaagggtggccgccagacagtggggctccaagaaagccagctgggcccctaaggtcagccggtcaccacagcagtccagtagcatcaggaccacgccattcatccagccaaagccctcctgggagaggcagggcagtggggccaggtttctggggaagccccaaacccttggtggtgtgtccggaattggtgggttcttggtctcactgacttcaagaatgaagccacggaccctcacggtgagtgttacagttcttaaagcagcacgtctggagttgttcgttcctcccggtgggctcgtggtttcgctggcttcaggagtgaagctgcagatcttcgtggtgagtgttacagctcataaaagcagtgtggacacaaaaagtgagcagtagcaagatttattgcaaagagcaaaagaacaaagcttccacagtgtggaagaggacgtcagcagattgccgctggtggttcgggcagcctgcttttattctcttatctggccccacccacatcctgctgattggtagagcccagtggtctgttttgacagggcgctgattggtgcatttataatccctgcgctagatacaaaggttctccacttccccatcagattagttagatacagagtatggacaggaaggttctcaaaggccccaccagagcagctagatacagagtgtcgattggtgcactcacaaaccctgagctaaacacagggtgctgattggtgtgtttacaaaccttgagctagatacagagtgccgattggtgtatttacaatccctgagctagacataaaggttccccacgtctccaccagacccaggagtccagctggcttcacccagtggattccgcaccccggctgcaggtagagttgcctgccag

SEQ ID NO: 22192 - DNA, 946 bp, Artificial sequence
  DNA replication origin
tgcaggcagcactgccccctcccgaccctgagcaggacctgcaggggaggccgcttcctccggctgtgccccttgtcccagccggcaggtcccgcggagccaccggggggcagctgtgagccgagaagagaagggccaggaaagggacatctggcttcccgccgggcccagcgtcctggctcccagtccagccccacccacagtcacgggaatgtctggaaccttctagggcagccagatcctgatctaccaatatgccccagaattggatccgaaccaactttgatgtctaccagcaagtcagccatgtatgagaagatgagctggcctgagccctccccgtacccccagggcgtccccgtggtgaggcgggagggtcaggcttggcagggctcagggcaagcgcagctgggatggtggcggcgcccagtgggcactcctgggcactgcaggggctgctgggaggcagagcggcttctcccgacaaggatcccgttgtttgttgtccctgtggctgggggtgggtggggtgggggcagtgcctgacctacggcccgccctcttattcccagtatgacattagcaacggtggagagcccggtggcggaggggagtatgaagttcaggtgagcaggccaggggtgggctggccatcaccctacaggaaactcctgggctctgctgcccacgatccccgccccaggcctcagtgtgctcacctgcatgtgggcctggaggaggagctgactggtgctccctgtaccgctagggttaggcagggccagtgcccctgggaagagagcccacagcccccactgagaggtgacagcgtgctggcagtcctcacagcccttgctcgcttttggcgcctcctctgcctggactcccactttggcggcacttgaggagcccttcagcccaccgctgcactgtgcgagcccctttc

SEQ ID NO: 22193 - DNA, 909 bp, Artificial sequence
  DNA replication origin
ctgagtttgacacagcacatgtttcagagagcatggggttgggggtaaggtcatagattaacagcatctcaaggcagaagaatttttcttagtacagaacaaaatggagtctcctatgtctacttctttctatacagacacagtaacaatctgatctctcttgcttttccccacaaggctgaggaagaattgggacctagctcagcctggggaggagcagcctggggaggaggggagaggttagatgggtctgtagaaaaggaggattagaaagactcagcaacgcttggggttgggactgaagggacaggcaggagggaaagaaggaagatttgggatgagttgcattgggagcagagactatggagagactgatgtataaaagaatgcctgcacgtcaggcacctcagaccatttgcctattttacgacaagaagtatttagatcttgcaggatggaaaaattgaaagagccattttctggctatttggaactactgttgagtttgtattggggtcaagcagcattgcagaagaaaataagatgcttagattttaggtcaggtgagagttgaagaggttttaagttcttaagaacacaggctaagggagaagaaggaggaattgagggtggaaggttgcccatagtgaagcctagagaaaagagagagtagagacatgaagggaaggggcttgggggttcttaccctccagaaagcgggaaaggggtcagggcacagagatatgaggtcggggcgcagaaataagggattggggtgcagagatataagaggttggggcatggaaattagggatcggggcgcagagatataaggggttggggtacttgcccctcccccagaaaagtggtacttgccgctaagggtgaaggagaaggggttgggggttt

SEQ ID NO: 22194 - DNA, 1516 bp, Artificial sequence
  DNA replication origin
ccatttctcaatcacgtcgcggctgtggaaaagcagccgtcctgtcccttcagaaaggaactcgtatttccccctcgaacttttctcgtcggtgtgagagaagggccctccattttctcctcaggaagctttcgcggcccgacttcctctcaccaccaggccaggaaggcagtgacgccgcggcgaatatagccgcggcggccgaggtttcgccatcttgagtggaggaggagccgcggtcgccgccatgcggagaggcagggaaagagggaggaggcggcgggcgggcgaacgggcgagcgagggagggggcagaggagccgagttagctcagccaggcggcgacttcggcggcgccacgagagcgggcagcggaggaggtagggctggacagccgggggagccggcggctcgggcggctggcctgcgcgcccctcggagcggggcgggggcgggggcgagaggaggccgtagcgagagggctgggtgggggcgggcggaggtttccgaggaggaaggagcgtccgccattttgggagcttcgagtcaacaataaaggaccgagggtgccgagcgggagtggcctcgttggtaggacacgggcccgagtcgcgaggcttggggtgaggtggtggggtcgaggtcagcggtgctttgggggctgtggggagccccccgggccggctctgggggactctcgggcggaggcctaaggcctggccgggcctggggaggaaggcggtcggcagctgtgtggggtgggagcgcctgagaggaggcgaatataggaatgtggtgcgcagcagggtcggcaggaggaacaggctaagtactcggagtagctttatcgaagatgagggaatatgaggccgaagggggcggcaaggacttagggggatgatggtggaggttatagggtacgaggcggccctatagggggcggcagggacatgctgtattggagggctcggtttagaagcaaaccggccgctgcttgattgcagtaggccttgcgggtcaataacaagagggtatttatggagcccccgactcttggaggaaaggagggggatttctggtttagggggtccatttggggcctccttgggggagtccctattgtttgctactaatggagcggttgctggctcatattgcgcagataagattgcagagccccaaccttttgtgtttatggtcagaagtgtgtgtgtttggggcgtggggcggggtgcggggggacaagaaatttcctttcagttacggggttccagtcattagtcaatgactctttcccgtatctctctcctttctcttcctcagcccccatttcccttcagaataaaacccagtcactccaacttgcaggcaaagctagaaaaactgcgctgcatttgcaaacaaaagctcttgttggcgatgacgatactgttttgggtgtgaaactgtcaattgctaactacgatctgtgaagtgctgtaattaactccgctaggggctcctcccaactagtcta

SEQ ID NO: 22195 - DNA, 1723 bp, Artificial sequence
  DNA replication origin
agccgcgacgtgattgagaaatggtggctggcaagggtaggcctgccttcgcccctccaaagtaaaaatcgggagttgagaccagaggaacatctctttattacatgactaaggatatgttttgaaaactggcccccgggcagctgctcggggacaggaagctgacctgacttctccagctggccggggaggctgatgccgggcctaaggggccgcgtccgagcctctcggggcgcgcctccatgcaggaaggcgcggaactagcgacccggagacgccgggcgcgcgtctgagtgtgggggcaggaaggggggccgaccgggcccggaggccgcaccaggcaggagggaggactccagagagtgcgcggggggcgctgcgcggtgggacggggcgagcctgtagggcgcgcctggcggcgggtaggctccgggcttgagggtgcgcctgggggcgctggttgtgggggaaggcaccgggcttgagggtgcacctgggcgggggaagtcttcgggcatgagggcgcgcctgcgggtggtatgggggggtacaccgagcttgagggtgcgcccggggggctctcatgtgaagggtaccaggcttgagggcgcccctgcggggggcgcagaggcaccgagcttgagggtgcgcctcgggggtctgcggggggaaggcaccggacttgagcgtgcgccgggagaggacggcgggggaccggactgtgagggcgtatcttgggggacctgtctaggaggaaccgggaggtgaaggcacaactgggggtgaggcgggggcaggggccgggctgtgagagtgcgactgaggggggattactccggagagcacggagctgggggcgttgcgcaggtggagtggggaggcctggtggagagggtagcaaaccgagagagcgcaccggggtggtggggggagaagctggactgtaaggtgaagagttagtagggcgcaaccgtcttctcctgccctcgaagggcaagactgaagaaagtaggggcggaggaggccgggccctccactaaagggagggaagctagtgaagcgtcagttataatagaaataggaattcagtaaggaaatggagaagcttaaggcaaagggtgactctccggcctgaccctcactatgaagatatttatgtatgttcccataatacttttcagatcccaatgtctgtgtttatccttgacagaaataatagaactgctgtcttcttccaagttaaacaaaactttggagctaaaagctagctaggtcaagagaaacaaaatctaatcctcacccaattgagagactgaatatacaaagaatggccaaacctaaccatgacctcctacccataacctcttcagtaatcggccagaagggtcaggacttaatctttaaccggcagcttccctatttcttgcccctgcttccagctctgggccaatcagagaaagccaaatgtgctcctcacaccaatcgcgtaagaagccctgcttctagtatagccctcctccaacttcccgatgccaacatcctccaatcagagccaacctgaagtttctcccttttttcagtatatgtaaagcttttccactcccctgcctgcctatgagtctgttaaatcaagtgatgggtcgcggctgactcttgccagctctgagtaaatagcctattctcatttggtggtcgttatttctacacagccggtgggaaggtg

SEQ ID NO: 22196 - DNA, 1103 bp, Artificial sequence
  DNA replication origin
cggctgagttcaggtgcatctggctgggctggctgttgctgatccctgtagggaatagaagacagggggtcaggcacggtgtgcccagctcggggagggtgcagggctcaggccttccccactcccaagccagggggtgccagaggtcaaagtcttcaccactggcttcccctggctgggagggaagggactggaggcattgatgctagaagccaagagaccaagttctggcccagttcgccagacacaccaccaggtgttggaaagaccactcgagtgctctgggctgggtttccctaatgactccagcgagtgggaacagcatcccggagcctccacccccacacccagggccttcagaggcacaaaaaagccagcacaaccacagctgtgctccccgctcccagtgcccacaccagctggcctccctggggccctggcctgtcctcgcacctggcccggagccctgcggtggtggtggggggggcagcaggggccggtcgggcagcagctcgtcgtctgaggtggcgatggtcttgatggcattgtggtagagcggggtggagctgggcatggcgtacttggacatctgggtcatcatcagtgacagggggttctgggaaggtgtggggtctggggaggaagtgaatggtaggctggggttcatgaggccgctgggagggttggcgggaggtgctgaggagctgctccgggggccgctaggcgggagggtacctacagaaacggggagacaaagagagcaggggtgactggggaggggcagatgagtttggctgtggatatggggaggtttaggaagcggtcagttccccaaatcacctggtccttcagacacacccacaggcccccactatctccagagcccaccagtcttcaagcaattcctgcagcctcagggccccaggcaaggggaagatcccaggccccaagtacgatcactcaaaatgcctgggagactcacgtggtaccccctgagaaagcccacaaatgtcatcatctgccccataagcagagccatccacctctgggcccgtggtacacaggcccttactcactcactgcccagccccagcatggacaca

SEQ ID NO: 22197 - DNA, 973 bp, Artificial sequence
  DNA replication origin
gtcagttccccaaatcacctggtccttcagacacacccacaggcccccactatctccagagcccaccagtcttcaagcaattcctgcagcctcagggccccaggcaaggggaagatcccaggccccaagtacgatcactcaaaatgcctgggagactcacgtggtaccccctgagaaagcccacaaatgtcatcatctgccccataagcagagccatccacctctgggcccgtggtacacaggcccttactcactcactgcccagccccagcatggacacactgctcagcgcctgcctgcctgcctgcctgcctgcctgcgcaattgactcaccctgttccatgttgctcagggtggtggaagagttcatgttgagaggcggctgcttgttctgggagacccccgggctgggcatggccgtcttaggtgaggcaacccagcctggagaaggcaccgccatggaaggagacttgagcctgctgggcgagccagtgggtgaacggacactgagggaggagccgaggacctggggcgacttgagaggtcctggcgggttggcagaaggcaagggcaccatctgtgagggagtctggggtgacttgaggttggcagagggcgaggtgaccaggggtgagtgcacctggctaagggtgggcgacttcaagtgccccatgcccggtgagcccatctgattaatactgatggtgaggtccgaaggccgcctgcctagcccccggtttggggctgaatgcacggtcccaggaggattggacgcagggggcagaggcatgtggctgagccgggtggtgcccacgttgctcatgggcattgagctctgatcagggctgaacatgtcttgggtattgcccatgtcctgggacatggcttggtagggtccctggcctccagagaatccctgctggccctggttgggaaactgtgaaggcatcagcatcttctgcgggccgcccat

SEQ ID NO: 22198 - DNA, 729 bp, Artificial sequence
  DNA replication origin
catggactgcaagggttcctcatatttcttcagcccgctgggaggggccgtgggtggctgctgggggggagggggggcttgtgctggtgggcccccctcacccgctcctcctgggggccccttgaggaagggctcagtctctccgctgcggagcagcagtcgctcaatgtctcgcagcgtctggagggaccgttcccgatgctccagctgctctttggacaagccctctgagcccaccaggctgcgctgcccatttccaggggcggctgcctcccccagcagggcagggccgggggcactgctggggtctcctccaggaggcagagggttgttggcggtggtagccgtcggggtgttagggtgggtgcccccagtcccaccacctgtgctggcagctcccaccgagttgggggccaggtcctgactgctgtcctcaggaggcccctctgggggcagagcaggcggggcactgccaggggccgggggtggcggcggcggcagtggaggtggctgggactgcggggtgcctgctgacggcgtgctcaggggtagcggttctggggtggggggcactttaggggcctgcagaaggacaaagagagcatgagacaggtaaggggacgttccacccagtcctgctgctcacagaggcgccacgctcacctggtcaagcttggcccggggcacgttctgctggtggtaggcgaggatggagtcggcccggccctg

SEQ ID NO: 22199 - DNA, 1177 bp, Artificial sequence
  DNA replication origin
ggggcctgcagaaggacaaagagagcatgagacaggtaaggggacgttccacccagtcctgctgctcacagaggcgccacgctcacctggtcaagcttggcccggggcacgttctgctggtggtaggcgaggatggagtcggcccggccctgcagcactgcctctgcagccctgcacagagtgggggcaccgacagctcagagaggtgagcaggagggagccccaccctcacccaccccaccctgcccctgcacggggctccctcggaaccccaggctgagaggtgctgggcagagagagagagagacttggcctgcccaccaggcacttacgtgttggccaggtgggtggtgaagacatatacgaactgcgagggaggctttccggggacgcccccgcccccgcccccgcccccaggggcatcaggccgaaggccaggaggagggccgtgcggggcgcctggcacgctgctctcgctgaggggcagttgggtggtttggccgggacccagctgtggggccgccatggctgggtctgctacattacaatctgcaggagagaggacagggaaaggggctaagtggtctagatacaagaaggaccagctgatgccccctcccactgatgctcacagccttacagctcgtgcccacagggacatttgatgtcagtatctggtgttctcaccaggctggtttccacgatggcaagagtggtgaccatgtggagagcagggacagagaaaatgtgtcctctccacaggctcccatgggcctggcattctgctggggacttaacaggtgtgatttcatctcatcaacacaccctgggaggaacgtgtcacacactccacttaacaaaggaggaaataagttcctcacccacagttacacagccagttagtgcagagccagaactgaacccagggccgggactctgaagctccgctctgagctgctgcccctctcactgggtaagtgtatgtgcacacagtctagtgacccagttagggagaaggcagagagggtacacaagctgatgatccaaatgatggatggtttttcactctagccccaccactaactgactttgtgattttatgaaccagacatccctctaagcctcggtttcttcatctataaaatgtaaaatactaacctcctccttgcacaggggg

SEQ ID NO: 22200 - DNA, 1339 bp, Artificial sequence
  DNA replication origin
gagtacctggctgggccctgggcacgcacaggggccgtagccccactgtgtgtgggagccatgaggatcctggctaacaagacaaggtgtgtgggtgtcgtggcgggtgggatgtgtgtgtgtggagtgcgggaagggaagggcccagtggtgatggggcccaagctgtgctggccaggagaggagccgccctgggcacctggctcccaggccaccagtgggctaaaggggggttagcatgggaaggcctggcccgaggcaggaggcgcagccagccttagtgcctgggcctgggtggggggcagaggggactggcagccagctatgcttgcggcttctggtcccttctagttcttccctccttaaaatggtttgagcagaccccctcccaccctactgtggggtccgaaggccgcctctggcctcagtctagctggaggtgggagctggagtagggggcggtgcctgcctccctcccccctccccggagaagccggcagacagggccaggcggcagcagcaggacagcagagctgaaataaatctgagctggtgtggaatgaggggggataaatatcctctcccgtgatgtgatctttccagcggctattaataggtctccggggagggggaggcggcggggggagcgggctggagcttaaagggcccgcagcctaggctgcaggaatccttggcttcaagctacactccccatctgcttgacacaccgctcccctccccctttcctcctgcttctgcctgccggcctggcctgccaagcccccctcctcaggccttcccctccagctgtctggaccagtgggtagcactccctggtgtgcgttttcccactgtccctggggaatgagacccgggcatgtgcagtgaccccaggtcctgtggcccttctctgctggtgttgggacatatgggagttgaggtttgagaccttggaaggagtctgaagacagcagatcttagaagagaggatgcttaagtctgatacagaggacagggttgccacagaagcttgcaggctgatgggtgttttggggctgaggtgggtgaattctgccaactctaggccctggtttccattcaaattgtggaggctagggggtggagggtttccccatctccactccccaaggtggatgagggcttcagcccttgtctgaggaagccatggagggaggtagagaatagctggtggtggtcttgagataccaccccttccccccaccctcccccattgttaggggaggcaggatggggtaattaagttgcaggcatgcctagcccctagcaaggttaacttttcacatttctcccacctcct

SEQ ID NO: 22201 - DNA, 731 bp, Artificial sequence
  DNA replication origin
gtccccacactgccacatactggatatgtgactcaaggtcacgccacttccttttcccagacctcagtttcctcgttgaaatggggtcgatccttttgagaatcagcgagctggtgaagggagagcctgagatgcatgccagccaggagcctgctcagagccctggtatctcagtgactccagcctctgcctctgctcttccctggttgtgatggagaagctgggggtggcgggctgcttcccaggcaggtcctggactttggaaccttcccccaggagccttcctccccagagacacggctggagtggcgaaggccaatgtgccctagggttaagttggggttagactcccgcagggtggcaggtggggccccctcacccccaggtccccgcccagcctccagcagccccgcagggagcatcaggagtgtgcaccggtgtctggccgggcctgtcaccgggacgaagctcctgggcccaagactcctcccctttgaccgggatcggctgctggagggctgctggagggcgggtaggggaggcgaggggggagccagggctgggggcggttgggtgaggcctctgtgtttgtgtaagtctgttgctgtatctatggccctgtgcgtgtttctttgtgactaccaggctcaactttcttcggctctcttgtggccggcctcagtcttttcatctgttcaatgggtccggcgctcccactcagccctcgggca

SEQ ID NO: 22202 - DNA, 1168 bp, Artificial sequence
  DNA replication origin
tcccccagctaggatcaagtccactttaacccttagcaacccttaggctgctagctcctaccctcgcgtcactcggggtgggggagcggatggatatctcaggccctttgtcaagccgcctcttccgctcctccgattcattctcctggtatgcgcctggccttccactcaggtgactcgcacctgctccctgtttgtgagcttgctacccctccccacctaaccccctaagagggaggcacggtgacgtgttcccagagccccatccctttgctttctcgtacctcaagggcccctggcctggtactagcaagcccccttcactgggtgctttaaaattgcattgggctgggatcagccctcttggcttcccatcaccaggccttccaggtgtcttcggagactgtgagtgtgtggaggaggaggggtcttcgggagctggggcagactcttgaggggcaaaggggggaggtgtgagatgggaaagtcctgactcatccacgcttgactcagctcgccctgcggcggggtgggagagagggggtggagtcccggaggggagggtgactggaagagtcttctggggaggagcctaggcctgaacggccactggagaggactgattttctaatagccccttcccaaattcttacaggttctcaatttttgaggctgtgaacataggtagtgagtggcccttgccctgcccctccccccttatgggggacctgggcactgtggctggaatgtgggaagcccaactatctgatgcaggctcagaggagcagtcatggctggcgtggggaggtggggtcactgcagtgtctggaatgagggtccgtccccacactgccacatactggatatgtgactcaaggtcacgccacttccttttcccagacctcagtttcctcgttgaaatggggtcgatccttttgagaatcagcgagctggtgaagggagagcctgagatgcatgccagccaggagcctgctcagagccctggtatctcagtgactccagcctctgcctctgctcttccctggttgtgatggagaagctgggggtggcgggctgcttcccaggcaggtcctggactttggaaccttcccccaggagccttcctccccagagacacggctggagtggcgaaggccaatgtgcccta

SEQ ID NO: 22203 - DNA, 907 bp, Artificial sequence
  DNA replication origin
ctgagcccagccaccagcctctctcccgcctgctgtgggagcttcgcccagccccctcctactgaattgctaaaccgactccctcggcccaggtcctcccaaccagaccaggtcctcaggacttggcctcttcagggaaccagggctatagccagggagaccacacagggacatagaatacacagccattcttttccctgacataggataacctggaggtggctggtgctagaatctggggtcctccaacctccccatccctctcctcccccaggtcctcaggccaggtcatgggagtcctctgcctctcctcctccccgtggggccaagctctaagggagctctaaggtcttccagtgcctcctcctctcctgcttccaggctagggaggggatggtgtggtgggcgggggttggggggtcgggggggggggggcagcggtgcagctggggtcaggcttggctcccagccaatccacagaagtcctggtgggggtggggggtggcaattgagtagctcagagacttcctggagctgcaggctgtgtggactgtgtgtacatgtttctgtggtgtgttcgtggggggtgctggggtgatgggaggagcggggacatagattgctagaagggggcttctagctttgaccctctctccacagggagcccccaacccagaccacacccttgagcctgagcccgacattattcctgaggtgagaggtctgtgtgcccctgtgtgtccctctcagcctccctgatttctgtccgcggcggccgcgtcaccctggcttagcctcctgcttggcgttttgtcttttgggctcccttctcttggctttctgcccccatctctcctttcattcccctccctccagaggagggaggtctcctctggctcctggtggg

SEQ ID NO: 22204 - DNA, 1855 bp, Artificial sequence
  DNA replication origin
agagccccgatgcttattcaggctggggagtggagccgagtggaggggcaagcgaggctccggcagcgcaggggagcccggggaggcggcggcgcgcggcggagccagtggctggacatgccccggacccggggccgctgcaccaccgccgccgcccggagccagccggccggacgcccgcacgcctgggtcccccggcgccgcgccgcccgggggctgtgacccggaccctcggagtccgaccaacaataagcgcccagacagcccctccccacccagcgcccggcattcccgcgggctttggggaaaggaaaggagaggcgaggaaggaaggaaggaagcaagcaagcaagcaagggaaggaggagcaggagcaggagccggagccctgaggttcggggccgagaccccggccccgcgccccggccccggcgggtgtgcgcgctctcccgccactgcccggcgcccgcgaccatgctccgcggttgggaggcaggaacccaggcacccagcgatccccggatagcctctcccgggccgggctggtattgagatcaaggcgtccaggatcaaaagatcaccgcctgcccgccccctctgcatctccaactggcgagcaggaggacccccatccacacaacgaccctgacctggtcatggcgtccagctccggcctggcgtgaggaccccccaatccgcgtgaggtgaggggtgggctgggggcaaggcgaaagtcatgccaggccagcagaggcgcgaggagggagatccagtttgaatcggggaggggaaacacagtctgattgtctcttgctctctggcacgtacccccaggctgtttaaggtgtgggggactcccccagggtcagtggaggctactcttaagcccccaatcaggttggcagctccagaacaccgtggggagggcttagggacagccaggggaccctgccaccctagcgcagagaacaaggccggccttgggccagctggagcagcgaaccttgccctgggggcttctgggagatgtagtccccctcccaggctcaccaaccccgtgggtctcagcaccccagccctcctcctctggctgataggagcctccagaaggaggtgggttgggactggggagagctgggggtcacccttttctcccaggcactgcctgtgagtagcgggggctgtgactgaggagtctcttcttccaaggcttctgagtgatgtgggcttggctggggggtggggcagtcatacagttccttggaagtgtccctgcgctgctaaggggaggtggcccctgtcttgatccaaaggaaccctcggggaagaatgtaggaagagaagtgagcttaggcttcttgttgcgctggggtaggtcctattccagggctgctggaatttggtttcagaagagacagagggctgctctctccttctgagaaggatagtgtcccttgaagtctaggagtctggagggtgtctctctggagcaatgaagctaggatcagctactgtctgtctgtccagcttccttccttccgggtttttctgacaccccctctctcccttctctttctgtctactgcttggggtgtgtgtctgtgtctgtgtctgtgtctgggggaacctctgctgcgaggagaaaaagtgttgctctgagagaggtgaactgggcgtgtgtttgagccctcacaaaggggttccaagcctccctggatcttctgccctcactcccagccttggtttagtgtgaaagctgactgtgccctgtatctgctccaactctgctgctgcctctgagcagctctctggatgagaccaccacagtgagtgggcttccactgtcttctccttc

SEQ ID NO: 22205 - DNA, 611 bp, Artificial sequence
  DNA replication origin
ggcatgagccaccgcgccctgctatttttttaaactttttatttgtacagatggggtgtcaatgtgcttcccaggctggtattgaactcctgagctcaagagatccttccgcctcagccttccaaagtgctgagattataggcataggctactgctctaggcagagggcaaaattgacagggtctagtgatggtttgacagggacagttgtgtgcggtttggggagcagagttaaggaggatgctcccaggtcctggtttgggcagcagggtggatgacagaaccgtcaggggctagagaacacagtggggggtgggaggggcaggctgtggcgaggggctgggtggagatatttgggtcttgaacttgccaatttacgtgcctgaaggacacccggatggaggtatgttgagggtggctggatgtgtggtctggagcacaggaaaggtcagcacaggcgcaacagctgaagccttggagaggagcaagtggatgctgagtgagaagacaaggtgaaggacagagcctggggagccccaacatttatgggcaaaggaaaagaggagactgcaaaggaaaccgagaaacttccctaaaaggaaaaagaatag

SEQ ID NO: 22206 - DNA, 886 bp, Artificial sequence
  DNA replication origin
tgtggggattgcctctgccccactgccccgtctgggatgtgaggagcgcctctgcccggccgcgaccctgtctaggaactgaggagtgtctctgcccgatcgccacccagtctgcgaggtgaggagcgtctctgcccggccgccccgtctgagaagtgaggagcccctccgcccggcagccaccccgtctgggaagtgaggagctcctccgcccggcagccgccccgtctgggaagtgaggagcccctccgcccggcagccgccccgtccgggaagtgaggagcgtctccgcccggcagccaccctgtccgggaggtggggggcagcccccgcctggccagccgccccgtccgggagggaggtggggggcgcctctgcccggccgcctcgtctgggaagtgaggagcccctctgcccggctgccaccccgtctgggaggtgtacccgacagctcattgggaacgggccatgatgatgatggcggttttgttgaatagaaaagggggaaatgtggggaaaagagagagatcagattgttactgtgtctgtgtagaaagaagtagacatgggagactccattttgttctgtactaagaaaaattcttctgccttgggatgctgttaatctataaccttacccccaaccccgtgctctctgaaacatgtgctgtatccactcagggttaaatggattaagggcggtgcaagatgtgctttgttaaacagatgcttgaaggcagcatggtcattaagagtcatcaccactccctaatttcaagtacccagggacacaaacacggtggaaggccgcagggtcctctgcctaggaaaaccagagatgcttgttcacatgtttatctgctgaccttccctccactattgtcct

SEQ ID NO: 22207 - DNA, 1258 bp, Artificial sequence
  DNA replication origin
ttaaccctgagtggatacagcacatgtttcagagagcacggggttgggggtaaggttatagattaacagcatcccaaggcagaagaatttttcttagtacagaacaaaatggagtctcccatgtctacttctttctacacagacacagtaacaatctgatctctctcttttccccacatttcccccttttctattcaacaaaaccgccatcatcatcatggcccgttcccaatgagctgtcgggtacacctcccagacggggtggcagccgggcagaggggctcctcacttcccagacgaggcggccgggcagaggcgccccccacctccctcccggacggggcggctggccaggcgggggctgccccccacctcccggacagggtggctgccgggcggagacgctcctcacttcccggacggggcggctgccgggcggaggggctcctcacttcccagacggggcggctgccgggcggaggagctcctcacttcccagacggggtggctgccgggcggaggggctcctcacttctcagacggggcggccgggcagagacgctcctcacctcgcagactgggtggcgatcgggcagagacactcctcagttcctagacagggtcgcggccgggcagaggcgctcctcacatcccagacggggcagtggggcagaggcaatccccacatctcagacaatgggcagccaggcagagacgctcctcacttcctagacgggatggcggccgggaagaggcgctcctcacttcccagactgggcagccgggcagaggggctcctcacatcccagacgatgggcggccaggcagagacgctcctcacttcccagacggggtggcggccgggcagaggttgcaatctcggcactttgggaggccaaggcaggcggctgggaggtggaggttgtagcgagccgagatcacgtcactgcactccagcctgggcaacattgagcactgagtgagcgagactccgtctgcaatcccggcatctcggggggccgaggcaggcagatcactcgcggtcaggagctggagaccagcccggtcaacacggcgaaaccctgtctccaccaaaaaatgcaaaaaccagtcaggcgtggcggcacgcgcctgcaatcccaggcactctgcaggctgaggcaggagaatcaggcagggaggttgcagtgagccgagatggcggcagtacagtccagcctcggccttcataactttggtggcatcagagggagaccgt

SEQ ID NO: 22208 - DNA, 1467 bp, Artificial sequence
  DNA replication origin
gggacgtggtccaatgagtacgcgcgccggggcggcgggggcggggccgggcgcgcagcgcagggccgggcggccgaggctccaatgagcgcgcgccgcgtccggggccggctggtgcgcgagacgccgccgagaggttggtggctaatgtaacagtttgcaaaccgagaggagttgtgaagggcgcgggtggggggcgctgccggcctcgtgggtacgttcgtgccgcgtctgtcccagagctggggccgcaggagcggaggcaagaggtagcgggggtggatggaggtgcgggccggccacccctcctaggggagacagcgtgcgagctccgggggcgggtcgggagcgcaagggagggccgcgcggacgccgggcgctcggcctcgcaccggggggcacgcagctcggcccccggtctgtccccacttgctggggcgggccgggatccgtttccgggagtgggagccgccgccttcgtcaggtggggtttaggtgaacaccgggtaacggctacccgccgggcggggaaccttaccgcccctggcactgcgtctgtgggcacagcggggccggggagtgagctgggaaaggggagggggcgggacaacccgcagggatgccgaggaggagataggcctttccttcatcctagctacccccaacgtcattacctttctcttcccgtccaggcccagctggctttccccgtcagcgggggagctccaggtgtggggaggtggttgagccctgggcggggatccctggccgcaccccaggtgtctgacaacaggcacagtgctgcggtgcgccactcactgcctgtgtggtggacaaaaggctcgggtctcctttctcttgtcctgttagcttctctgtttagggatgtggcaaagccgaggacccatgctctttcacttgggcctttgtgtgggcgctgctgggatgattagagaatggtttgtacccatcaggagggagaaggggagaagtaggctgatctgccctgggtaagaatgaagtagatatgaatcttacagcctctccgttctgggatgtgattctgtctccttcactccgggtatccagttttaagtgttttctttcttcgcctcccccaggggcactatggcagacaaagttaggaggcagaggccgaggaggcgagtctgttgggccttggtggctgtgctcttggcagacctgttggcactgagtggtatgtaccccagtagagggagcaaatggataaatgatgactgaaggatgcatgatgggaattgagcttggggctgttggccagaagtctcttgagttgttaggtccaggcctttttgtcttttgccatcttcgtttacccatggaaagtggtatgctttgattagagggagtcccaggaaggtgggcgaagggagagctaactgacaaacctcttttcccttcagatacactggcagtgatgtctgt

SEQ ID NO: 22209 - DNA, 881 bp, Artificial sequence
  DNA replication origin
gtggcgtgatctcggctagctacaacctccacctcccagccgcctgccttggcctcccaaagtgccgagattgcagcctctgcccggccgccaccccgtctgggaagtgaggagcgtctctgcctggctgcccatcgtctgggatgtgaggagcccctctgcccggctgcccagtctgggaagtgaggagcgcctcttcccggccgccatcccgtctaagaagtgaggagcgtctctgcccggccgcccatcatctgagatgtggggagcgcctctgccccgccgtagccaccccgccagccgccccgtccgggagggaggtggggggccagcccccgcacggccagccgccccgtccgggagggaggtgggggggcgcctccgcccggccgccgccccgtccgggaggtggggggcgcctctgcccggccgccccttctgggaggtgaggagcccctctgcccggccaccaccccgtctaggaggtgtacccaacagctcattgagaacgggccatgatgacaatggtggttttgtggaatagaaaagggggaaaggtggggaaaagatagagatcggattgttgctgtgtctgtgtggaaagaagtagacatgggagacttcattttgttctgtactaagaaaaattcttctgccttgggatgctgttgatctatgaccttacccccaaccctgtgctctctgaaacatgtgctgtgtccactcagggttaaatggattaagggcggtgcaagatgtgctttgttaaacagatgcttgaaggcagcatgctcgttaggagtcatcaccactccctaatctcaagtacccagggacacaaacactgcggaaggccgcagggtcctctgcctaggaaagcc

SEQ ID NO: 22210 - DNA, 1025 bp, Artificial sequence
  DNA replication origin
ggacacagcacatgtttcagagagcacagggttgggggtaaggtcatagatcaacagcatcccaaggcagaagaatttttcttagtacagaacaaaatgaagtctcccatgtctacttctttccacacagacacagcaacaatccgatctctatcttttccccacctttcccccttttctattccacaaaaccaccattgtcatcatggcccgttctcaatgagctgttgggtacacctcctagacggggtggtggccgggcagaggggctcctcacctcccagaaggggcggccgggcagaggcgccccccacctcccggacggggcggcggccgggcggaggcgcccccccacctccctcccggacggggcggctggccgtgcgggggctggccccccacctccctcccggacggggcggctggcggggtggctacggcggggcagaggcgctccccacatctcagatgatgggcggccgggcagagacgctcctcacttcttagacgggatggcggccgggaagaggcgctcctcacttcccagactgggcagccgggcagaggggctcctcacatcccagacgatgggcagccaggcagagacgctcctcacttcccagacggggtggcggccgggcagaggctgcaatctcggcactttgggaggccaaggcaggcggctgggaggtggaggttgtagctagccgagatcacgccactgcactccagcctgggcaacattgagcactgagtgaacgagactccgtctgcaatcccggcacctcgggaggccgaggctggcggatcactcgcggttaggagctggagaccagcccggccaacacagcgaaaccccgtctccaccaaaaaaacacaggcgtggcggcgcgcgcccgcaatcgcaggcactcggcaggctgaggcaggagaatcaggcagggaggttgcagtgagccgagatggcagcagtacagtctagcttcggctgggcatcagagggagaccgtggaaagagagggaga

SEQ ID NO: 22211 - DNA, 1118 bp, Artificial sequence
  DNA replication origin
aggagtctggagtctagacggctcagatagcatacaagagaccatgcaggctaccatccatgtccctgcccaggtaccaaagctggagggcgagggggtaataaacaagagtgcatataatctcttgttctcaccaaatcccacctccttccctcatacagcatgaagatggccctgaggatgacccacagttggtaggcatcactgctcgtaacattccacgagggccccagttggctgcccagaacttgggcatcagcctggccaacttgttgctgagcaaaggagccaaaaacatcctggatgttgcacggcagcttaacgatgcccattaactggtttgtggggcacagatgcctgggttgctgctgtccagtgcctacatcccgggcctcagtgccccattctcactgctatctggggagtgattaccccgggagactgaactgcagggttcaagccttccagggatttgcctcaccttggggccttgatgactgccttgcctcctcagtatgtgggggcttcatctctttagagaagtccaagcaacagcctttgaatgtaaccaatcctactaataaaccagttctgaaggtgttgtgtgtgcgcgtgtggagttggcgggaagataggaacaaacacaaagccctttcatccttacctcagaggctgggacttttgcccagagttctcctggtacgtcctttctgcttctgcctcaatagttttcatttcacacagaataaattgtctcccaggaacaccaagaaacagagccacaatcttaaattcctatggtttgccccttcagttaacagtagagcctgtttatattgcatggcccctcccacccctattatcaggaaagtatagaaagtcactaattctacaactctcttgcaaaatgaaaacaaacgctccatttaaaaaaaaaacaatcctttaataaaattagtccatctaaaactccccaatgcctaaggttctagtcgtggaagggttagctgcagaattccagttcagaagccaacggaggctcagtccagacagggattaaccgacttgtgctggtatctaggtgcttggattgccgagttgagtttgctggaagggaa

SEQ ID NO: 22212 - DNA, 2020 bp, Artificial sequence
  DNA replication origin
tcccgctgcccccagcccggatccatgctccgcgcgggctccgatcccggtcccggctggggctcacccgctgccccgggggagcatggcccgggcgggccgcggggaggaggtgggctcccccggggctgggcgcgcggggtcgggggctctccgcggctgagtgcccaggactagtgggtgccacagggcgaggagaggaggtcctcgggggtcgcgatgccggggtctctgtctccgtggtccgggtctctcctagcttggtcagcagtcggacccgttagtcgccggccagtgcccgactcctcccaccgcgcgggccccgccggaccctggaggggactggtctgcagagacgctggggctcgcgggccggcaccggctccgggagggctgcgtgcgcagagctgacactgacaacaccgccggcgccccgcccccacccgcccttaaaggagccgcacccgcgccgggcggggccaggacagcctggcgctccctcgctggaggagggcgggagggctagcagcgagcggaggaggttccggggttgaaaataggcgggatctttgatcacctcgccccatcttgcaatcgcggtgctcccacactcagctcaaggcaagagtaacttcacttacctaagatgctgcctttgctttcccctatgcttgttagatttccacaggtcggacgcctgtgaggttaagaaggaggtgacccctgtggaaatcaccgcccccttctcccaacacccccagactcagcgacttctagcttcccatttcctgggggaagctaggcccagggtaaggagacgcagagcgtccctcccagatagaagtgtctggcagaggtccagctgatgtcaacagagagaaagcagaacctgaagctgggagaggttgagagtagaacaccgaatttgaattccccccaccatcatcaccctccttcctcttggagcttggacccagaaacagccccattaacctccttgctcgtgtaggtttgttctggagattcccaagcccaggctgtgtgtctgtttttaaaaataatgtatttccatagtaacagctcctgcctatggagcacgtgtagagggggtggtaatgacaagggagctggcaatgtagcactggactatcaatagattcagccacaagaccttgccactctaagtatgtgatatcccaacaagctcccaagaaatggtgctgtaggtacactgcccaacctctggcctcagaagccatcttttcctagactcaaggagttgattcaacctctacaggactggggctcatcaatgcttgctgaggacaggggaaggaaatacctgcaaaaggattcaaaggaatcctgggggaattcacattctcccaagagccccttcttcatacatgtgggaaggtctttggcacacagtccctttcttaaagaggtaggatggaaaggtgttaagtatctttctcccaaacccaagtagttgtctgaggaatgagcacatgagaataagagaataaacaatgccttctgaagtgtgggatggcagggctagacagaaactgacaggtcagcaacaggtttgtctgagccagaggaggtggtggggtagcctgggcctccctagatttccctgtaaggaatgatggggagaggtgggggtgaatgaggtaacctcctgtggccctgcccatgcattgtcactggactgccaaatcagtggagattcctagagtctgggtttctaatctcaaagggaggagaagacatgaaatcaagggaggagagaactcagggccagaaccagggatgcaggaggaagctgtcagtgggaagagcagctagggtttaggggagcaggttatgcaggaagttgtccaggtagaagctttccctatgaagaccctcttcccccaagaatccttcaggaaccctcagaccccctagtgatctccattctctgacttctttgatttattccctcaacttctccactgagtgcttggtccta

SEQ ID NO: 22213 - DNA, 1524 bp, Artificial sequence
  DNA replication origin
cttcatattcttggagatgaagatgagcatggccttggggatccgtaccagggggactgggaagagatacaagctcagaggacccaagagtccaggggcctggctaattcctcaaggcagatagcaggacggtattagagagcagaaagctgcttagatctcaaaagagctgctccctaattcgtccacagtaatggaagcaacctaccgcagccccacctggagagcagtgcggacacagaattgaggaaggggcacagaattggctggcaactcttccttgggtcttgagatggaggaaacaaatccatagggttcatttgcttggcaaaccaggggaagccaactcctttgctctggtagctgtctcattcaaaggctaggccaaggaagatggggagatggatgcttgaaacctcaatctccccaccctctgcaagggaggccaatgtccagttgagtcagctatcctggggagttgcttctgaccgagggacaaggtacagggagagttggatgaagaggtgggttcaaggtgtaaactgacagatgccatctggcttttagccagccagctggacagagtaaatagagcaatttcttgtggacatttctgtttccggcatctggggaactagtaaggtaaagcctccaaactcatagtggctggaaatagagaaccctctgagcaaggagctgatggactgtgagagcaaggagagattgctgggtcaggatgggagggagctccagaaaagagagacttctacctcccaccttatctccatctcatgaccacgcttcctgccccacttcctgggaggccagatgcccatggtgcaatgggaggaagtaggctggactggtttgtgactgaccctcaaggggcagttccaagctcatctactggtaggggcactgtcaatctgctctccacctgaacactccccaacccccagtgaaccacaggccagcatggaggagaaggatgtgtttgactgtagcagtgaaattactgtcgggtaggggggtgattcaggctccttggggatctgcctgaccacaccagggatttggggcatgaaatgttaaatgggtgtggtggcatgagaagcaggcaaattccttctgcaggtgcacctgtctcccatgccccaacacaaccagcacccaggcaaggcggaagtgccctcaggcacagggattagcgttgctatgagaacagcaacttgtgcatgggtttggaaccagagtaccttgcccacagaaatggaagtctggggacccagttggatttctacaacctccagccttagcggcacccttttctctgatccgggaggggaagagaagccatagggttccccagtttatgcccaccctcgtctggcctcctagcacgagcagtcagtccctcccctggaaggaaaggctgaagggaccacccaagcgcttggtccaactcaccccgtttctgcaggcctgctcgttcagcgctcgcacccaagcccgctgccagttctc

SEQ ID NO: 22214 - DNA, 798 bp, Artificial sequence
  DNA replication origin
gctgctgctatgggaggtattgctggggccactgctctcactcagcacagttgtcgtcttctcggtcacctccaccttggacggggagcgggagggggagtctggtgggtgggggagggtcagtgagctgggagttgcttcagagtggcccccacccctactgtctttgttgagatgcagactttgggtgactcagagggcaagaatgattaaagggtgattaatcacaagggtgattaggaagatgccgtggggactaaaagacaccccaggagctaatgggagtgtaggaaagtgccatggggcctgctgaaggtgtggggagatgctatgaaaatatggagcggggacagagggggtactggggctccctgaagttggggcaattcagtggggcccctataatggcagaagtgccatgggggcccactgagtggggtagaaatgccacagaggcctctgggtttgttggaggaccccagggggtgctggagggctgagggtagcaggatggacaattatagtcagctggggctaaggacacctgtgaaaagccagaggggaagctggaaggtaggagtgcaacagtcctgtatgaggaggggcaggaggatccagaagggtggcagagtgagaggaattgctggggaaatggcaggaggtaagggaaagtttggaagagacaaagattgggaggaagatgtggtaggactggaatggaatgtctgaaaacagggggagttggaattaaggctctctcctctttcactgtcctgccttgggtctgcagtcccgggc

SEQ ID NO: 22215 - DNA, 1695 bp, Artificial sequence
  DNA replication origin
gggctgtccccaaagccaggcgcaccacccggactcaaaactaagcgccccacggcagctcaagcccccgccccatctcccgcatgcctagtcaccttgacgcgcccccgggccggtgcggggccgggatgctcagcgctgccacggaccggggacggagagccggggctccccttacctgcctcgggctgcggcacccgcgtcccggctcccggtcccggcggcccgggccggggcggggccggggcggggcaggcgaggcaggagggccggccctcggctcggaggagacggcaaggatggtgagaggcggttggggtcgcgccctgactctgctgggctgtgcacacccgcttcccagagcctggtcccggacgctgtgtcctccgagcccgcggggcgactgcgctctcctaccagctactgctcgccggtcccgccgttcttaaagggcccgcgccgcccggcagcccgcggggggcgaggacggcaaaggagagagcagcgcttgcggcgcgggggccggaggaggtgcaggggtgaactcaggactgggggttgatggcaaagggccgacttggaggcagtgaggaaaggagagctggagtcactccgtggggacaagtccctggaagacagattaggcaagggtgttgggggtgggggaaagtggagggattgtaaaggtgtcagtctgtcttcacacacgataccagtcccccaacaatttccctcagttccagcccatgaatgagcgcaggcctccctccaggaatccccaaacgaggtgcaaaggctttcaaaaacgcaggagccttgggacattggaacatcctcctgtctccccattcacactttctctgagttaggacactaataaagaagggaaaatggcagcagctttgggagagcctgcagtagctccagagttaaactggaacccagtgctcagcctgctccgactgtagtcacctagccagatacaggccttcaagacaggcacatgccatatcctggagggacctgtgtgccagggcatgcacagggctcgcagacatgccctgggcatctcatgcacctgcacattctctcccttgcccccaaagccttcaaatgtaggtccccagaacacacttggggctttcccctgctctgcccctttctcagccaattcctcttggcccttgcctgtcccagccactatgtcttcaaggggtaagtaggttagctagccaagacacgtgatctgagcttttaagttcccacctgtcacacagcagagacgatggggagggaaggctctgaggctgctggtgtgactgccaccgctgaggcttctccttactgcagcagttgagggttactagcagtcaaacctctcccctgctggcccccctcccaaccacctctccacagccctaaaagctggcgatccctggaggatttctctaggccccgccctgttactctgaggtttgtgtggggtttggatccagtctttcctatcttcccccaactccatgccccacatcaccaccattcctcaggaccaacctcctgttctccagatggaccctccattctccaagtcaacttctcatcagctactatagacctccccatcccccaacagttgcatttattaactactttgtaccaggcattatgttatttaatcttcacaatatccctatg

SEQ ID NO: 22216 - DNA, 1806 bp, Artificial sequence
  DNA replication origin
gccccgcgggctcggaggacacagcgtccgggaccaggctctgggaagcgggtgtgcacagcccagcagagtcagggcgcgaccccaaccgcctctcaccatccttgccgtctcctccgagccgagggccggccctcctgcctcgcctgccccgccccggccccgccccggcccgggccgccgggaccgggagccgggacgcgggtgccgcagcccgaggcaggtaaggggagccccggctctccgtccccggtccgtggcagcgctgagcatcccggccccgcaccggcccgggggcgcgtcaaggtgactaggcatgcgggagatggggcgggggcttgagctgccgtggggcgcttagttttgagtccgggtggtgcgcctggctttggggacagcccggggcacgcgggcccgggggtgccggcgggaggggccggcctgggcgtcgcgccaagggatggggagtgggacgcagccggaggcctgaagcctcctcctctccgccttcccctggtccgccctgcactcaccctgctaccccgacctcctagagcgggcagcctctgccggctgcctcttctcccccgccccctattccttcagtccccaggggctgctggcctgcggggtaaggagattagagaagccgccgggaggaaggagcgattgagggcttcaaggggacgggctggggtcaggctggagctgggctgcccgggactgagcgtctccgtgcggagagtggggggcgggggcagagtgcggggctaacagtcgcggatctgccccgagaaggaggtgggcagtgggggcgggggaagcattagaacgccagggagctttgagccgggctcggtggtctgccccaaactgagcaggccctccccttgcaggtcggcggcgtgatggcggagaaggcgctggaggccgtgggctgtggactagggccgggggctgtggccatggccgtgacgctggaggacggggcggaaccccctgtgctgaccacgcacctgaagaaggtggagaaccacatcactgaagcccagcgcttctcccacctacccaagcgctcagccgtggacatcgagttcgtggagctgtcctattccgtgcgggaggggccctgctggcgcaaaaggggtagggaacagcctggtagggggagtccgtgggccctctctgagttgcctctccagaagcatgaggcctgggtgtcccatgttcggaaagtcctgcaccagtgggctctgtggaaacactaaaatctgggccccagcccgttgctcactgtgcactcttggggtgtcaggatctacgctcccccacacctgtgagcaccatgggatactaggtgcaattggttattgaagctgtatcttctaaagagatcccgtgacctctggtccttgagtggtccttgatgagttttccttcttttgtttatggaggattcctacctgtgagggctggtatgaaaaagtagggggctgtgtctgcagggttgagcaatacccttggacctaattataaagacgttctcattcctgtcatcttattccattcttaccacagtgctcagaagcagggagggtggcggtttggcaggatagatgtcatctccatgttactaataaggaaactgaggcccagggaagttgagtaacttgaccaatgtcacacagctagtaagtggtagagctgagaccagaagcccggtttcccagctctccatgcattgttcctttctctctcttccctgtacagcagtcccatcacttccctcttcccgcccatgaggac

SEQ ID NO: 22217 - DNA, 1282 bp, Artificial sequence
  DNA replication origin
tcctactttcgggtggcctcgggaacgcagggggagacttgccagaacgcccgccattcagcgcccagctccgtccctctcgttctcggccgggatctccccgcggcccttgcacagcctcctcccccggcccgccctgccccccgctcagcgcggcctcccagccagggcgcaggggttatcaagcccgctaggcctttacccgcggctgcccagttccgggagccgtcggccgcggcccagaggggtcggctgggcggacgccggcgtctcccgctagctcccagagtccccggctcctcggcgtggcgcttcctgcccacctccgcccgcctgcgcggccctggcacctggcagcgggcgcgaaagaggacgagcccaggcactcgggcctgcggggtcctgggacgagggggtcagcgagaggggcccggtgctccggagcaggcgcagggctggaaccccggcgccacccgtcccgccatcgtcccccctccctgcctccatccccgcgggcactgccgctagtactgccctctgcaggttcccaagcgccagtgacacccagtgacctcactaaccacctcccaggctgggctgcttgttaggcccattttacagatgaagaaactgatgctcagaagggtgaaatgacttgtgcaggttgattcagttaggaagtggatgagccagaacaacatcccgggcctgagtcttcctaccttacccctgggcctccctgaggcgcggtgtccaggggattcttccctctgtccctctccgcctccccagcctaccttcaggcagagacctgagcctaaggcttccttgggttctgccttatgtatccggtcctcttcagagcccagacctatgtgtgtggctgctggtaaccttggttaagaaagaaggaagaatgggggctgaaggacaacttgcaccccaacctgctcttcgggtctgacacccattcatggcctagccctggggcttcccagttcccaaagcccccacccttatccctacacttccacacacttccacaccctgggctcacgtagcccagaaggaggagccacccaccacccacagccagggcacgccttcgtatgcaagcatgagtgtacgatgttcacacaacagagctgtgcactagggcacccacagagaggctctccagggcagggctgggaagaggacttactgaaaacaatgtggatgtttcatttagacatttgttcattcgttgtactgtggtattgggtagcactgagcacctcac

SEQ ID NO: 22218 - DNA, 869 bp, Artificial sequence
  DNA replication origin
atctgtaaaatgggcctaacaagcagcccagcctgggaggtggttagtgaggtcactgggtgtcactggcgcttgggaacctgcagagggcagtactagcggcagtgcccgcggggatggaggcagggaggggggacgatggcgggacgggtggcgccggggttccagccctgcgcctgctccggagcaccgggcccctctcgctgaccccctcgtcccaggaccccgcaggcccgagtgcctgggctcgtcctctttcgcgcccgctgccaggtgccagggccgcgcaggcgggcggaggtgggcaggaagcgccacgccgaggagccggggactctgggagctagcgggagacgccggcgtccgcccagccgacccctctgggccgcggccgacggctcccggaactgggcagccgcgggtaaaggcctagcgggcttgataacccctgcgccctggctgggaggccgcgctgagcggggggcagggcgggccgggggaggaggctgtgcaagggccgcggggagatcccggccgagaacgagagggacggagctgggcgctgaatggcgggcgttctggcaagtctccccctgcgttcccgaggccacccgaaagtaggagagctgtttgggacccagtttggtggaggagctctggacctgtaggaacaccgcccctgtacgtttcctgcagtgccccctccttttctcattgccctggagacctgggtgatcaccggagaactgccctcggccccgcaagtcccgtcttgactcagtggccctagatccgaggttaaaccggaacctaggctttctcaggcttctggagccctctcttaacccttccgcagcccctgggacggg

SEQ ID NO: 22219 - DNA, 992 bp, Artificial sequence
  DNA replication origin
ccaatcaggccacccgaacccgagcccccggagccgctgccgcccccggccccagagctcttcttcacgttgccggccatggcctgggcagggtcggagcccaggcgggtccgccggctcggctcgactgcgagcgagggagagaagcagggcgtgaaggaggggcctctcccggccgccgccgccgccgccgccgccgccgccgccggctatccgggcggagggaggagcggccgtggggaggggagtgggcggcgccgggagtgcgcgggacgcgccccttcagagcgcgcgagcccggggcgggcggggcgcgtcccggaggcggaccggcttactggtaagctcggggaagcggccggccgcggccggactgggcagcgacgatccccgggccaccggcttcgagcagctcgcgtgcccacagctcccggaaagccgcggccaggtttctgtgcccgtcttccccgcccctacgccggggcggggcggggccaggctggggcggggtcggcggaacctttgggcctgcgccctctgctggagaaacggggaaaggagcggcggggggttggggagtaggtccaaggtggagtctgcgcagtagccagaaaccaagacttccatgctccttgtgggcgggaggttggcgcttctggggtgggtcatgggaatgtttaaattaagacaggtggcgatggaatggaagagtcctgatgtcaagtctttccccacccctgacaaatgaggaaatcgagcttagagttatttgtttatttacactgtgggaggatggtgggagaaaaaggaaagttatttctccaccccttattattttcaattcttcattaagacacgaccaaggacaggaatatgaatgctgcggcccattccagccggattaggccccagaaagccttgagacactcaagccaggacctcttcttccaggccctttgacctcttgaaaagaaatcacttcctttttttat

SEQ ID NO: 22220 - DNA, 1547 bp, Artificial sequence
  DNA replication origin
cggatagccggcggcggcggcggcggcggcggcggcggcggccgggagaggcccctccttcacgccctgcttctctccctcgctcgcagtcgagccgagccggcggacccgcctgggctccgaccctgcccaggccatggccggcaacgtgaagaagagctctggggccgggggcggcagcggctccgggggctcgggttcgggtggcctgattgggctcatgaaggacgccttccagccgcaccaccaccaccaccaccacctcagcccccacccgccggggacggtggacaagaagatggtggagaagtgctggaagctcatggacaaggtgaaaggccggctgagcgcccgctgttgcagggtgggcgtgggcggagggccgcggggaggggaacgagcggacggaggaagcgggggaggggacgggtctggtgaagccggggaggcgcggagccggggtgaccggccgggggcgtgggggcagggacgaggccgggagggtggggggcggcgtgggggaggggctgccgttgggagtcggggaacgctggggtgccgcgtttggggtagccagacaaagatggagtgggggctggggcgaaggttaactgggaagtcagtggggcggaagtacaatgaggggtgcggagtttggggctctgtgcagggtgtagggatgtaggtcacggaattggcctgggaggttagcagggagggggtgaggaagagtgatgtaccggctggggctcttggctgggtgagatctgactagggaattaggttcatgggctctgactgaggaacctggctggggtcaggacagctctcagggaagctgtgctctgggtgagagtatagtcctttctcattaagatgtaacacgaagataaaagacatattgatgtttaagtgaggcaaggaaagaactttcctccccatctagcgccggctcaagttttttgttaccctcagaaacactggatgtgatccattgctggtgctgagatatgcactgattaaaccacaagttctggttagaactattatcttctgaaagatggactggctgagcctgttaagcagcagcagattctgacttcttaataacttcctccctactacatcgcttgagctgggttctttttttctggtaacggttctgactccttattacaggtcctgactttaaacttgttcgttgagcttctttgattacgcttttttgtttgtttgctttttgcaagtgcgaacaaaaataactcctttatatttagccactaagtttgtcatttgggagaattttacttccttatagttgtgtctatatgatgaaatgtagtcagtctcaagtatttaactgtttaagcagtcggacgctttgtcagaattcaatacgttttcttggtatttttcatattctttaattaattactttgacaaaattcatattgcgtatgaaaagtgattagaagtatctggcacgttttaagagaatggtgttatttcctccagggtaaaatttggttttctttggttcctccctg

SEQ ID NO: 22221 - DNA, 938 bp, Artificial sequence
  DNA replication origin
agggtttccagcttgcatttgtacctggccttctacaggggacagggggctatttagatggtcccctgccaaccccagtggacaaccctagggtggggctggaggtggggctgaggctgagtcttcctccccttcctccctgcccaggggtccacattcagtcgtcccagactgtggagtcgagtggtttgtacaccttgcagagtattctgaaggcacagctggttaaagaagacaaagatgcccagttttactgtgagctcaactaccggctgcccagtgggaaccacatgaaggagtccagggaagtcaccgtccctgttttctgtgagtactaacctgactctctgcttactggggctggggctgctggaaactcctgctggctcccccttatccagcccagggttgactcatgggccaagagctaccccctttgcctatgcagacccgacagaaaaagtgtggctggaagtggagcccgtgggaatgctgaaggaaggggaccgcgtggaaatcaggtgtttggctgatggcaaccctccaccacacttcagcatcagcaagcaggtgtgggggctttgtgctgggtgcaggtggggatgcaagcagagacccaggtggagtggcgggaggtgcactctgctcacctccccaatcctccctagaaccccagcaccagggaggcagaggaagagacaaccaacgacaacggggtcctggtgctggagcctgcccggaaggaacacagtgggcgctatgaatgtcagggcctggacttggacaccatgatatcgctgctgagtgaaccacaggaactactggtgaactgtgaggggctggggacccaggacagggggaccaggctggggcaatagggaactggccccaccctgccctgggtgacatgattgctgtacccccagatgtgtctgacg

SEQ ID NO: 22222 - DNA, 1927 bp, Artificial sequence
  DNA replication origin
gctgccacctcggccagtcagaccccgagacacctgtcactaccccctcagccttcccaagccaggagcctgggagtccggctctggcctacctccggcagcgctcctaggcgcagctcccgggctggcggcgccggggcccgccccctagggctgcggcgcgcggggcgggggctgggggctgcgcggggcggggcgggcccgggcgctccgggccccctcccccgcccccctgacgtcagcccccggcagcctcgagctgctcacttggctctcgccctccggccgggaagcatggggcttcccaggctggtctgcgccttcttgctcgccgcctgctgctgctgtcctcgcgtcgcgggtgagttcgctcgcaggggggccgcgccccggctaggggtctgcggtggagcgtgccagggagcagagccagcggcgcggcggggtcggggcgttgcgtctgggaggacgagcctcctccctgggtccccgatccccgggcgccttgcgcgcgagcaactcttctttgcagccagtttgcagccgggattctagagtatcccgggagcagcactcggaaggcggggaggaggctgcttctgggaacgagaaggggtggagctcagcctttcggggtgctggggggtgggtggtccctgaggtgctcactctgggggcccgcaattgaagccgggcaggaggcgcagctggggcgcatcctcaaagcctgaattccgcgcccgcctgttgctggaaaaggcagcttccttcgctggagggggtgcgccgacccaccccttcccccttctgcctgggcatcacgccaggctggaggtgagcgagagcgggaggttcggcggctcccgcccgagctgggcgttggcaggggttgcggggcggtgtgggtcgcctcgcgcctccccgagtgatgggatcataggggacagagatgagggatggaggattcccatactggaagcgcccgctggcttattttggggaccacattcaggtgggaagtgcgcccgggcacctcggagcgtttctccggatccgcctggtagcagggcgctctcgggtccacgctgcccttgtatggcccgcagcggtgtcgcgtgtttctcttggctcccattccgccgtcccagccgctgtccggctggggaaggggagggctaggcaatacccagctcgctggcctcatgcccagtgccaaccatgtccctggggtattccaggctactgcctcccaggctgactttatttctggggaaagggctaaatcgggctccacagttgcagccggtccagctccaccctgccctgctcttctagctctgggaggagtcaggggtctgaggctctgggttggagaccccaccttccacctgccctccttgtccgagagccaaggtaacaacccaggcatcccagagcccaggcagatggtgtcgagtgacatcacctcctcacagggctggcagcacgctggcaccactgacgtcactcctgcccactgcctggcccttgccctgacccctgggggagactctgacctctccatccttaccagctacctagggtggggtccgcgggtgtgtgcggagtgttcatggaggtgctgctgagggagcatgagaccggaacttccgccagagttagcccgctggggagtgagggcagggattttggagggcagaggatagagcagtggtgtcttcccctggcggtggtgacacaaaagggcctgtgtgccccagcctggcacatgctttgcattcccacactctgagctcacccggagaggagggggcctggaaggaaaggggccttcctcttggccccgagcctaggttgcccctttctgcccctctaccagcctcagctggagctgttcggtgctcagtctctgctcaatctctgcttg

SEQ ID NO: 22223 - DNA, 4082 bp, Artificial sequence
  DNA replication origin
cccgggatactctagaatcccggctgcaaactggctgcaaagaagagttgctcgcgcgcaaggcgcccggggatcggggacccagggaggaggctcgtcctcccagacgcaacgccccgaccccgccgcgccgctggctctgctccctggcacgctccaccgcagacccctagccggggcgcggcccccctgcgagcgaactcacccgcgacgcgaggacagcagcagcaggcggcgagcaagaaggcgcagaccagcctgggaagccccatgcttcccggccggagggcgagagccaagtgagcagctcgaggctgccgggggctgacgtcaggggggcgggggagggggcccggagcgcccgggcccgccccgccccgcgcagcccccagcccccgccccgcgcgccgcagccctagggggcgggccccggcgccgccagcccgggagctgcgcctaggagcgctgccggaggtaggccagagccggactcccaggctcctggcttgggaaggctgagggggtagtgacaggtgtctcggggtctgactggccgaggtggcagcgaggagaagctgtcccggatgcccggagtcgccccgggtcgaagccagccaggctcaccgctgctcagcccctgccagccaatgtagcccctaggggacctcctgggggaggagcagtagcggacctggtcctcggtgtccccaaggggcctcccacttgggctcccctcccttgccacagagaattcaggccggcctctatcgcttcccagaacgattgcaccactgccgctgccgccggcctgacactgcctcagcctcagtgctggcagctttgggagaagaaccctgcgccagtcccacagacccagaagtacctgtatggggagtgcagacgatgccttctgggctgtcccttcaaacgcaagctcctgcaagtctagcctttgaccagagaaaggaaggagggggctgaattcgcaggcccaaggtgttcacacttgtccagacctgggccttgagaatcatgtttcttccctcttcactctggagcctaccctggaactcagtttcccctcacctaagagaaagaaacagggagaagaaagagttaatgggcgagggtccccagcctgaccctgcaaacctgttgctgttcctgatgattgaaaggatcccggcagcgctgatcttcccccaccccatgtcttccccagccctattgattgtgggtccatagctgagggaagaatcaaatcagacctgcttgggtggggagctctgcagctccccttctcccaaaacgccggcttctccctgggtcttctggcctcttgaactaaggctctagggagggggaggtgctcttgcctcactctgaccccagcagcctggcctcagaaaaggggtccacatctgctggcgcgcctccaccagggagtgccaaataggggcctggatttgggtagaggtctgttgcccagcggggccacccctttgctcgctgggggaggtggagggtgagccagcaaaccctggagatggccaggtgacttgagagcatgctccggggtggcgttttgatgacgcagagatgactggaaaaccacaccaggcttgtctttcagagccttctcgacccctcctccaatgccattagtctccagccagaggctgtgcagagcccaggcccaccgggccaggggcctggagcctggagcctgcagggagaacaagaggaggacgctggctcgccctccagagtgaatgtatggactggccccaggcccagagctgactagatgagaatgttttgtctgctgggctggagtgggaatggctgaaggatgccgtttgccctggcaggcccggctgggcatggagctggcttccctgcccaacccccttccttcacttaacaccattaactaatcattcgcctctctggcctgaaaacaaagccagctaaccaccaaggacagtcagttctgaattcttcttccgctggaggagagtgaagccaggtgggggtggaggatttgtctctgcggtgaaagggaaatgaggtcagagcctagagcccagggtgacgtcccttcgcattgccccaccaaacaagcacagaagactgtcctttaaggaagccagtagcctggggctgtctaggctgctcggaagtgggtcatagcctcaggggacagatagctttgggatggtttcatgaggtgggcactttgggattccaaactaaagacgggtcaggacctcggaaaggacgcaggagtggaggcagggagcagggtggagggagcggaaggtgaaggggatcagccctcagctcttcttagaggccagaggctagtgctccggcagccccaggggagagaaggtggctgcgggacttccagcaggacaggagtgacagccagcagaagggagttggaggaggaggccacggccgtctaccctgcagggacccagcacctggactgggttggaagagcctggctcagatgtaggccagggccagaagaggccctgggggcagagtcctaattcttcttttttccctcgttgggttgcaggcaagaaggctgctttcctccagccccatggtggacctgggcccctcacacatgaggggaccctcctgcgcataatgccctctgcgtgtctctggtataggtctgaccacaggtggagaaactgaggccaggtggggtgggggtcctggttgggctcctcagccacagtctcctggatgggtggagctttcagctcattgtaaggagaagtggaaccctggggagttggaggtaaaaagacaaggatggacctgtccccagaggccatgaaggggcaagactggaacccaagtgtcctctctcagctccagcaaagggaacttagcgacttctgacccacccttctggatccaggggccttgaccaggatgtgaggatatgagaagggtgggtcagaagtagctcgaggaaggaagctgataaagaggtgtttgcagctgctgtgaggacatggggtgggagtcccaacaatcttggcagttaccgagactggggaaccccctggccaggccagataataggatccggcctgggtctttggagggggtgcggaagttggagaatttttccagaatgtgggtgtgagtaggagaagattatactgaaggagtgaaaacagggtggaaaagggtagggggcaggaaaccggatactgtactggggggtggatggaagatgtgggggaagagattgaatcgggggaagcagccctgctcccgccggatgctgtctcacccatgtccttcgcacctgacccagggcaggaggaaggaggcacagccgggatggaggtgcaccccacaccaccatgggagagagggagggtggccttctgcgggatgggaggggctatttttaaacttggaaaaaccgtgagttcatctccattctggaggctgcaaaggccccattgtacaggggtctagagagggggagcggggggagggggcgacgggcacaatggcgaggattatgttggagcaggcaggggggtggagggcggagagcgggggaggggctgtcttcgtcacagatggcctactgaactctggggtcgagccaggctggggcttgaactggggggcagggcccaccctcacaaagatccccgttggggaactggggtctctgacatccggtggcccatcctggggagggggctgacggtgggattcccacagcctggctttcccagggaccgcagggtctgttcccaggctcccagcattccgacgactcccctgagagctgctggcctcttccctcagccccttccctgccagggggtggggggagagaaggagaaagaggatgtggatgcatcgggactcctcctggggatgatggactcttaagccagaggcgggggttgggtgggcagcagtgggtggttagggtaggttgagcgggatcggagtccccaaccccgcggacccctcctccgaccgactgggactgtccctctcgtaccccccggtcttaggagcctccg

SEQ ID NO: 22224 - DNA, 1285 bp, Artificial sequence
  DNA replication origin
gatgatggactcttaagccagaggcgggggttgggtgggcagcagtgggtggttagggtaggttgagcgggatcggagtccccaaccccgcggacccctcctccgaccgactgggactgtccctctcgtaccccccggtcttaggagcctccgcacgggggccagcccacctgccggacctcaggcctccggcacccagggcctccacccaggggacccggccgcggcgggaaggcgccggcgctaagctccccaggagccggcctcgaggtcccgcccggcggaggcagggggcggggatccggccgctcgccccaacccaaacattaccataaatgctcaggcggctgcgggtggatgggcgcgcggggagcctggggctctccggaagccccagatccagtctccaggcccgacccagcgcgagcccgcgcagtgattcggtctgaccagccgtcccctttacaaagcggtgcagccggggatggcagagctggggtgggcgcggggacagggtggagaaaacccaggccgcagggggcgtctcggggctgcctcctgggtaggcaatgaggctgtgacctctggttaaagaaagagtggggccctctagctagatggcagcgtcggcgccgcggggaggcggctctgtctccctgcagctctgcgggccccgctgctgtcagcggtgacaccctgggtctcggttccccggccccagcacctaatccccttccctctcctctgcccccagcctgcacctggggaatgaagggtgatgggggcggagggtggtagcaggatgctgggagtttacacctctccccttcagggaagttcacatccgctccccagaataccaccatccagggagaggaatgtccccagagagctcttcaaatctgactttgagtcgtcactgaggggaaggccggctggtctacaggagggggcctgtgggaaacctgggggcgccatgttgaggtcttctggcccctctcctccctgaaggacgctcctgcagttcctcttccctgccacacggggctgccagcatcccaggggtagccctggagaaggggagccttgttccatcccatcccggcgatgcctgggaccctcactgctgctgccagggctgatcttggagccgggagtagagaggggaggaaagaggctgggcgcggtggtttatgcctgtaatcccagcactctgggaggccgaggcgggcggatcacgaggtcaagaaatcgagaccatcctggccaacatggtgaaacccca

SEQ ID NO: 22225 - DNA, 1591 bp, Artificial sequence
  DNA replication origin
cggctatcggtggcgatgtccgagcaggcgcggccgcagctccagctcccggtgtccgggactcgggtctcccgccagggggcgccactccccgcgctttgcagccctgagcgggggaggggcccaggcggcgggagcccccttggccagccccccagatctgccctgcgggaaggggtggaggaggtacccgtgcgggaggaggcgctggccgaagctcaggcaggggcggggaggggtacggtgaccttagagtcgccgccccgctgcgggctgagccgccgctactctcaccctgccgccccgcttaccccgcaggactgccgggacctcgaggggaccccgggccgcgaggagaggcgggacccgcggggcccaccgggcctgccggggagtgctcggtgcctccgcgatccgccttcagcgccaagcgctccgagagccgggtgcctccgccgtctgacgcacccttgcccttcgaccgcgtgctggtgaacgagcagggacattacgacgccgtcaccggcaagttcacctgccaggtgcctggggtctactacttcgccgtccatgccaccgtctaccgggccagcctgcagtttgatctggtgaagaatggcgaatccattgcctctttcttccagtttttcggggggtggcccaagccagcctcgctctcggggggggccatggtgaggctggagcctgaggaccaagtgtgggtgcaggtgggtgtgggtgactacattggcatctatgccagcatcaagacagacagcaccttctccggatttctggtgtactccgactggcacagctccccagtctttgcttagtgcccactgcaaagtgagctcatgctctcactcctagaaggagggtgtgaggctgacaaccaggtcatccaggagggctggcccccctggaatattgtgaatgactagggaggtggggtagagcactctccgtcctgctgctggcaaggaatgggaacagtggctgtctgcgatcaggtctggcagcatggggcagtggctggatttctgcccaagaccagaggagtgtgctgtgctggcaagtgtaagtcccccagttgctctggtccaggagcccacggtggggtgctctcttcctggtcctctgcttctctggatcctccccaccccctcctgctcctggggccggcccttttctcagagatcactcaataaacctaagaaccctcctaccggctccagcctttcttctttagtggtgggggctccctgtttctgggatcatggtgtggagggggtgttcaggcagaagggagggttcttggatgaaatagagatatgcggcagatatacaagaagccggcccaggggaatgagaggctgctccacagagccgccacctaggttgtgaatgggagtgtctgacagcgggatgccctcctggtgtggggctccatccatccttgagaaagggagcacctttttctaattcaaagatgccaactgaaccacgtaggggctgcctgcgccacacatacctctgccctcatccaacaaaaaagagccgaggactttcgtccatggctgctccggct

SEQ ID NO: 22226 - DNA, 2027 bp, Artificial sequence
  DNA replication origin
agcgctggcaccgggagcccggacgccggggtcctctcgcagtctgtggaccaggcaggactggagtcgggacccagaatcctgggacctgcctctctccccaccccggcgcggcccagtcggtccccaccccactgccgtgcccctgaggctgagcgctcgcagggccgagcatccggagagcacaggcaggcgcgagagggtgggagcggccagccctccctcccaccgccggcccgcgccagcctttcccacagtcccctccccagcccctttcccctcctccgccagactcaccccccctcccggctccccgatggcctccttcggggcgctcgctactccggaccctccagttggtggtgctccagcccccgcgcttctccccggccaggcgccccctgccctgccgtcaccccagtcctggttcgctccctgccggctccgctttcctcctcccagactccaagaggaaaccagttgttcaggggccaagagctcccggaccgggaaatagctgggaaataactcgtggtgtcgcccggcggccggccaaagtttagggggagaaaggagggggagagagacttgagctgggcacagagaggcagaacttcgagagacggacacacagggcacctcctgttcccagggccagaggagaggcagggcagtggcagagaccaaggaccagaccccatttcagggagaaatacgcagagagatgagggtggagagttctagaggcagacagccagttggatccctagggcctaggacaggggcctgccacatgaatagatgctcagtacatttttgttgaatcaaggaaaaggtcagaaggcaggcgatggagaagctgaaaaagcagatggaaaggggaagaggcctggatgggaagtggtctcgattgtccggtggcacagtgtggggccagtcagcagcctgggaccggtaaagggacaggaaggagcagggagggtggtagggtcccatgagccccagctgaggacttctcttccccctccctgggagccccagagaaggatgggtagagaccctgctgatgctccttcctttgttcccctgcgtgccagccctgaccggcaaaagaggacgggcaggaagagggcaggggccggcttcagggtcagggctgggcacaagcttccaggtcagctgcctctggcagcctgttgcagttgaagggccagggggtgcccagtagtgccaggccagactggcactggtgctccgcttcctggcagacagagcggcaagggggcagaacactgcctagtggggtgcaacggggcacaagcagcccacacaggagcctccggaaatgctggtagcagggcaggcttgtcaggctctgcggagggagagtggccttcaggcacctgctcccaggctcctcccctcccaggcccgccctccttccctccacccagaagaccttgtaaccgctgaggacctctaccacctcctcctgggtgatcatgcccacccagatgttagggaaggctgtggtgttgtagctcagaccgaggcacatctccacctggacaggctcacaggccagctctgcaggggtggaggggagggccactgtggggactgctcactggctctgtggcctgtggcaagtcaccgaatcgctcggtcctgtgtgtacatgggtccaatgggggtggttgtgaggaagcaagaggataacaaagagacaggctgtacacactctgaggatccctgccatccctgagagcctgctccagcatcgcttgccagccctgggcatcatgcaggcacgtctttaatctcagggaacatggggcacccgcgtttgcagggactgcttgggcatctggaagaaaccccctgctctgtgtaagaggatgccttcatctttggtgtgggctgtggaaaggggctctgggtgacagaagggactggttcttgaagccccaccaatgattcccagattcccatttcccttggggtgacactcagtactattgccacca

SEQ ID NO: 22227 - DNA, 1004 bp, Artificial sequence
  DNA replication origin
aggtttgtgtgttgttgttgttgttttgtttttgtctttttaaaaaatttagggagcggggccaccacggggaagggagaagggacgtggctcctggcgctacattcgggagggcgggctggccagttcgtagaagagcaggtaggcgtcgctggtgcgcacttggctggaggacatgggagtgacgctgcggagagagcggggagtcagcccggagcgggcaggaccgggagaccccccgccggcttctttctgtgcccccgaggccggccggcctgcctttcagggagcctccccacgggcagcggcttcgtggccttaaactttgccatccattctcggtgtaagccgtgcggggggtgggaggggggtgggtttggggggagggtggaggagtggggggagagtgggtggctacagccaggggctccggccctgccctggctctcacctggagtcgttgaaagtgtgccattctcctgtccctggactgcgacagtaggctgtatagtggccacccatggtggttccggagtgattggacacagcgtacaggttgtaaacagcatggtctgaggaggaggcagccgtcaagcccccgaggcccccctgccccgacttcccccctccaacctctccttctgggtctctcagtagctggtgctggcagctccccttcctcctgccctccctccggccttgcacacctgcgtcttcattctgccctgcctactcaaagatactcactggtgttttctgaggcaaattctcttaagtccaggtctcttagggggaagttcacaaatgttgtgagcttgctggttcggatcctggattctgagaaccgcttcagatctggcattgacgtgagtcaaggatagtcaaaccaatgcagaagggcagacaacaaaaggaaagcctacaaggtccgtttcttccgactgttcccctcacctatgggccccttgtcatcagtcacccttgaaagtcatgtcccagccctg

SEQ ID NO: 22228 - DNA, 1283 bp, Artificial sequence
  DNA replication origin
ccccacacaacatctgaatctgacttactgacagtcagcaagagggccgcaacagagataattccctgggacaaagaccttctcagcattttccagaattggtgaaacgctgcaaaagtctccatgttgcgcactcggaactaaatgttaaagcttgcccacaacagaatacccacccttacgtctatttttggcagtgctttattagttcttagcccctgtgcctcagatgacatctgtctaaacaggctgtaggggaaagcattctaccactggtgaccgtgtcaatgttcaccaaagcaggccctcagctgagacaacagtcactcagtgctaatgggggtagggaaatgggaaaacggagtcatctgtctacagaagcactcctgtggtgttttaagatgttgacacttaattctgacccagcagtgaggggcaagaaggacacttcgtcacccacgattactattcttgaggatctaacccctctattggcctggggggtggggagatgggagaagctcctttaaggcatccttaggacccttggttgttatgttttagggtgggggttgatgcctttgtctaaaatttcctcagctcaaaaccacatgccagtttctaggtgctctgtgtagaaggcgggtggataacaggagtgggggcgacagaggagggggagcagggctgctccatgcccagccagatattcttctgccaagaataggaaatcaggagctccagggaaagtcagcacttttcattacagaggggaacaaaatgtccccagagtgacctttcttacaggacaaacaatcctacctcagggtcgacagggagaaaggggccagaactgcagaaggtgggagaccctgcacagccaacctctttcggtgaaagccagagaaggaaatgaccccaagtgttatgctgggacacatgtgcaaagagttgagaaagtttggacccagtcttccttccattcagccatcagcaaacctagttttgactcagtatcaagcactgttgcagggagcagatggcaccttcaccatcagcaaatagacagctttcaccttctagaggagaggagcgggggctcaggagagccctgcctgggttaatgcagaggtagcatctgggcacccttcggtaggagaggccgaggtttgtgtcttcacacttgagaccccaatcaagggctttcccgcctacctcacctgtgtggtgagggtcgccccaagtcctggctgcagctaggaagcctggtgtggccctggcac

SEQ ID NO: 22229 - DNA, 1114 bp, Artificial sequence
  DNA replication origin
ggacacatgtgcaaagagttgagaaagtttggacccagtcttccttccattcagccatcagcaaacctagttttgactcagtatcaagcactgttgcagggagcagatggcaccttcaccatcagcaaatagacagctttcaccttctagaggagaggagcgggggctcaggagagccctgcctgggttaatgcagaggtagcatctgggcacccttcggtaggagaggccgaggtttgtgtcttcacacttgagaccccaatcaagggctttcccgcctacctcacctgtgtggtgagggtcgccccaagtcctggctgcagctaggaagcctggtgtggccctggcacggggcagggcacgcactgccagcacgggagctggtgcctgttacataagacctgtcaaagctcgggccccttctcccttccccaggcgggcagcgcccagcctcggccccggcattcccctgggggctgcttccgcggagggacccgctgcccgctgcataaatggagaggacggaaagaaggggaagttgccctctgtcacctgtctgcacctcgtctgcccttcacagggtcaaaggacccccgtcaccaacccttgggaaagagcccttggtggacagtgaaggggaggcggcccctttctgcccagccttcctcgccggggtttggcctcggaggagtaccccggcacggtccagcgtgctgccctcgcacaccgatcgagacccagtcaaggttatgctttcctgcacctgtcctgataggtgccaggaattgagaggccaagagccaccacctggtgccggggccaccgagagggagggggcaagggggacttcctcggacctccacccggggaggggaccacgagtaagcgtgcgatcacctgaggagggggcattccttgccaggagaccctgggaaaggaggggtgggggctgggaagaatccgtcccctcacctaggggcgcgtggcgggcagaggccagggagaaggcgggaccccaggccctcggcgcgggggtcccggaaaagggcccgcgtaccttggctttgttgagcaggagccccacgaaggtggagagcagcagggacggggagag

SEQ ID NO: 22230 - DNA, 1756 bp, Artificial sequence
  DNA replication origin
aaacagaggtaataggccgggcgtggtggctcacgcctgtaatcccagcactttgggaggctgaggtgggcggatcacttgaggtcaggagttcatgaccagctcggccaacatggtgaaaccccgtctctactaaaaatacaaaaattagccaggcgtggtggtgcgcacctgtaatcccagctactcaggaagctgaggcaggagaattgtttgaacccgggaggcagaggttgcagtgagccgagatcgtgccactgcactccagcctgggcgacagagcaagcctccgtctcaaaaaaaaaaaaaacaaaacaaataaaatagaggtaatagttactacagcatgatgttatagaaattaactgggataatatatataaaacccttaacccagtgcctgggatctaataagtacttaatgagtggcagttttggtttttcagcagaggataagcacaggctggttgacagcagtggtcaaagactgagggtggtgggcctgtggacaaacagccttagagaaaggctacctgaggcttcggggctggatgcaagggcaggtgctctagttgtttcaggacagaagagtgatgagatcagatgcaaacattgcttcagatggtgtagggctggcttgaaagcgtttggctggaaaggaggcttggagaaaggctgctgcagtttgtccggggtccagattcagtcagagtctgggtgaggacagtgactgtagagatcaccactcctcacatgcccactctcactgatcacaagcagactgcctgtggttcctgtcccctgccccctcctcccaccacactgctggcacacaggggagggggcaactgtccccatccctctctcattagcatgaaattgctgctttgtcggtggcctggggtactgccatacgtgtgtcctggacacagtccccatgtagctgtggtcatgtgtgcgtgtacatgtggggatgagcacaccagaaggaacagaaggagcccacagatgagtaacagcatacactgctgcctcttggagtatttttaaatgctaaaaatactggctaaaaatagccagcaagctccaaacaagatactttctctaggcagattcgtgagcttccctgttaggtggaggggtggggcatcagaaacgaaatctaaagacccctgatcttccagcatggctgtgcttgacgccagagtagaacactcgccccatgccagctgagcgcctatttccccactattgtattgctttctccccagctccccaaaacaagtcaaatttgagaatgggagagccggagctgggtaattggttagaagagaccagaaaaggttcttttcaggagccaaatgagaaggtgacctattggaccttataaaacatgagcactgcctctcttgaaagaagccaaacaggactgttttgaggagggcagctcagcccctaggccgtgaaggtccatcttcttaacctgggcacattgacctccacagactgcatgagtttgggtcttcacgaaggcctgagtacccccggaactctagacaaaagtttgtgcatatacgtatttcgccctgaagagagaagagctttcatcacgttctcaaaatggtttgcagccccctcaagagttaggaagtgtaatggtgccttgggggaagctcacccggttgccactgggtcttggggagacgtcctctgcgggccccaaagatcacttatcccgagctgagcctcaaccccg

SEQ ID NO: 22231 - DNA, 767 bp, Artificial sequence
  DNA replication origin
gggaactggagccggtgggacctggggctcggggaccgccgtcaggcgcccatgcaagacttcccaacactaggcttcgggccacggtccgagggcgcccagggaagaagggcgcagagcttagggaggggcctgctttccaggcaggggcgggagggggatgcttctgcagggcaggggccgcgtggcaccctgatgtctttcggggaaggcgctcccgggctttcgcccgctgggggactggtgtctggggctggggcgctggagaacagggaggaagggcaccaaggacagcctgtgggtctacattccacccagacgtccccaaacccagctcgcagaggcggggaggaggacggatgaaactgcggggagaggatggaggatggcgagctagagggaatctgccgggtgacctcgcggcgggctgggtgcggggcaccggaggagaaggaagccgcagtgccgcaggcggggactgggtggaaggcgggcggacgggggaggggagagctggaaaaggatgagagagggggaagggggactcatttgggaaaggagaggattggaatacggaaatggattaaggatgaggcccgccgggggcttgagagggaggaagagcagaccttctctgggtctggagccgcctgaggacacagaccagaggaaatgaatacagactgcacctccccagccgctctccacccctcccctggctcttctaccctctccagccccagacccatttcttccctttcttgctc

SEQ ID NO: 22232 - DNA, 1052 bp, Artificial sequence
  DNA replication origin
ggaggcggaggttgtagttagctgagatcgcaccactgcactccagcctgggcgacagagtgagactctgtctcaaaaaaaaaaaaatttaaaaaaaaaaaagaaagattactgtgggggcagcatggcgagtgactggagggccccatgaatcctctcctgcctgtggttctttgccctgcggtgcactcagcgcagaggtggggaggcggaaggtggcttctgggagagagggtgatgtgacgcacacttccttggggtcaagacccatatccgtcttatttgctgctgtagctcaggggcttccaggtcctggcacaaagtagagtcacacaataaatatttttggataaatataaggagtaagggcattcaagtatcataggtgctgcccatgaggcaagaaggagggaattcaaagaagggtttgggagaaagcagtggttgttttctggaaaggggaagaaaggcattcctgacagagggagccccagaaacaagggtggaggtgtgaagtgcacctgggagctgcatcagtgagggggatgagggtctgagatggggcaggagcagtggaggtggagaaggtggggcagatgggagagacccaagtcaggggatgttcagtgccttcctggatgtctttgggaggcatcacaaggactctgagattttggggttggctactctgaaggatcagagagaggaagcagcttcagtgcaaaagatcatgtattcagtgctggccacgttgagcttgagagcctgtgggatgtgcacatggagaggttcaggccagagctgaggagcgaggtcggaggagaggagaggttaactgctggttgttggcaagtaggtggtaatgagcaccccgggagcatgtgtagacctagaagaaaacagaacccaggacaggaccccaaagagcgctgacacttaagggagtggttgcagctgaggagtctgaggaggtggccagaaggatggagaatgaggagagggcgaagccacagaaacaggcgagttcagtgagggtgtggtcagcggtgtga

SEQ ID NO: 22233 - DNA, 919 bp, Artificial sequence
  DNA replication origin
aagattaaatggcatggcatatgagaaagcttttggcacagtgcctggcatctggtgaccatcaataaaataatgtcccttgcattccctagctataagactggcagccagtaggcagagagaggggttgggtgagggtctctgggcaggagctggtaggaggttgtctctccaggcctggacaaagggaatgcgggtggatggagggctgcagcactgtggggagggtcactggcacatcaggcaaataaatggatgtggaagcctggggcaccctctgcatctgaaaggagaggggagcagggggtggatttgaggtcgtcctgggaggtgatgacatgagaagtgggtctaggacaaaattctggagaacaacatatttgaggagctggctgaagagaagtcagaaaaggaatacagggagaagcaggagaggccacatcatgcaagccgagggcatggctgtggctggcaccgggcactgcggagcagtcggcaggaagcttgtgtcactggaccaggctccaaaggtcatggcagtctttgtggtgcggctggaaaagcaaggcccagagggcactggacagactgttgagaagattcaaggtcatgggaggaggacttaaaaaatgaagtgctgtgtgcaggttctacgccatggggaaggagccattggctgagagtggctttgaggtggggagagggagaggagggaggcaagaggcaaaggctgaaggtttcgtgggcgggtcaggcagggagttagtcggggctgcctggagggtcccagttgtctctgaaggaggaaagacttgagctggagcttgacggagggaaagcatcaaacagacaggccaaaggacatcctggattaggatgaggaggaaaaggagggacgaggtgtggaggtggaaaattg

SEQ ID NO: 22234 - DNA, 777 bp, Artificial sequence
  DNA replication origin
atgaaagactcagttcctcagtcacactagccacatttcagatgctgaatgtccacacatggctaatggctgttgaccatattgagtagcacagaagagaacattagccgcatcacggaaagttccattagtcagcaccttcttagaataatctttggaaaacatccctttcttcttttactttcctaccctcagagggaggataggatcataatgtgtccatctcaggatccctagggtccagcatgtcacgttatatacatttgttggctggttggctagatggatatatggatggatgggtgaagggagggagggagagagggatgggtatatgggtggatagatgggtgggtagataagtagatggatgatggatggatggatatatagatgaatagatggatggtgggtgggtgggtggaaagatgggtaggtagacgaatagatggatgaatgatggatagtgggtgggtggaaagatgggtaggtagatgaatagatggatgaatgatggataatggatggatatatagatggatggatatataggtggatgagtgggtggatgagtgggtggatatacggatggatggatgggtggatgggtggatggttggataaatgaatggatagatggatggatgagtggatggatggttgggtgggtggctggacatgtggctgagtagatgaatggatggatggatatatggatggatggatggatagatggaagcttgaattcccaaatttctatgccatggaagtcacagg

SEQ ID NO: 22235 - DNA, 854 bp, Artificial sequence
  DNA replication origin
agataagtagatggatgatggatggatggatatatagatgaatagatggatggtgggtgggtgggtggaaagatgggtaggtagacgaatagatggatgaatgatggatagtgggtgggtggaaagatgggtaggtagatgaatagatggatgaatgatggataatggatggatatatagatggatggatatataggtggatgagtgggtggatgagtgggtggatatacggatggatggatgggtggatgggtggatggttggataaatgaatggatagatggatggatgagtggatggatggttgggtgggtggctggacatgtggctgagtagatgaatggatggatggatatatggatggatggatggatagatggaagcttgaattcccaaatttctatgccatggaagtcacagggggaccaaggaagtgggcagagttgcctctgaactggccaggtgagctggtctgtggagatgttgctctgctccaggttctgcaaatgaacagaggggctttgatgaccctcagcctgaaaacttgaacttgtgagtagctctcaggggacttagagctacaagagcttgggggtttctgcaggtaaagcgaaggactgaagggtcagctgtggggacttcctgtttcagggtgagcacctagctgtgtctagggtggaagtagccaaggtggctgggagtggatgagctggaggaagggtagccagatccaggcctcagggatgggctgtctgggctcacccttctgcagcttgaaccccaaggagtggggccaggttctgggagagggatggggcagctgcaaggcttgagtccagctcagtcaagggcag

SEQ ID NO: 22236 - DNA, 973 bp, Artificial sequence
  DNA replication origin
cgcccggccagccgccccgtccgggaggtgaggggcgcctctgcccggccgcccctactgggaagtgaggagcccctcagcccggccagccaccccatccgggagggagatggggggtcagcccccccacccggccagccgccccgtccgggaggtagggggatcagccccccgcctggccagccgccccgtccgggagggaggtgggggggtcagccctccgcccggccagccgccccgtcggggaggtgaggggcgcctctgcccggccgcccctactgggaagtgaggagcccctctgcccggccagccgccccgtccgggagggaggtgggggggtcagccccccgcccggccagccgccctgtccgggagggaggtggggggggtcagcccccctgtccgggcagccgccccgtgccgggaggtgaggggcgcctctgcccgtccgcccctactgggaagtgaggagcccctctgcccggccaccaccccgtctgggaggtgtacccaacagctcattgagaacgggccaggatgacaatggcggctttgtggaatagaaaggcgggaaaggtggggaaaagattgagaaatcggatggttgccgtgtctgtgtggaaagaagtagacatgggagacttttcattttgttctgcactaagaaaaattcctctgccttgggatcctgttgatctgtgaccttacccccaaccctgtgctctctgaaacatgtgctgtgtccactcagggttaaatggattaagggcggtgcaagatgtgctttgttaaacaaatgcttgaaggcagcatgctcgttaagagtcatcaccaatccctaatctcaagtaatcagggacacaaacactgcggaaggccgcagggtcctctgcctaggaaaaccagagacctttgttcacttgtttatctgctgaccttccctccactattgtcccatgaccctgccaaatac

SEQ ID NO: 22237 - DNA, 1010 bp, Artificial sequence
  DNA replication origin
ggggctgatccccctacctcccggacggggcggctggccgggtgggggggctgaccccccatctccctcccggatggggtggctggccgggctgaggggctcctcacttcccagtaggggcggccgggcagaggcgcccctcacctcccggacggggcggctggccgggcggggggctgaccccaccccacctccctcccggacggggtggctgccgggcagagacgctcctcacttcccagatggggtggctgccgggcggagaggctcctcacctctcagacggggcagctgccgggcggaggggctcctcacttctcagacggggcggccgggcagagacgctcctcacctcccagacggggtctcggccgggcagaggcgctcctcacatcccagatggggcggtggggcagaggcgctccccacatctcagacgatgggcggccgggcagagacgctcctcacttcctagatgtgatggcggctgggaagaggcgctcctcacttcctagatgggatggcggccgggcggagacgctcctcactttccagactgggcagccaggcagaggggctcctcacatcccagacgatgggcggccaggcagagacactcctcacttcccagacggggtggtggccaggcagaggctgcaatctcggcactttgggaggccaaggcaggcggctgggaggtgtaggttgtagtgagccgagatcacgccactgcactccagcctgggcaccattgagcactgagtgaaccagactccgtctgcaatcccggcacctcgggaggccgaggttggcggatcactcgcggttaggggctggagaccggcccggccaacacagcaaaaccccgtctccacccaaaccagtcaggcgtggcggcgcgtgcctgcaatcgcaggcattcggcagactgaggcaggagaatcaggcagggaggttgcagtgagccgagatggcagcagtacagtccagcttcggctccgcatgagagg

SEQ ID NO: 22238 - DNA, 1675 bp, Artificial sequence
  DNA replication origin
cggggtggtggccaggcagaggctgcaatctcggcactttgggaggccaaggcaggcggctgggaggtgtaggttgtagtgagccgagatcacgccactgcactccagcctgggcaccattgagcactgagtgaaccagactccgtctgcaatcccggcacctcgggaggccgaggttggcggatcactcgcggttaggggctggagaccggcccggccaacacagcaaaaccccgtctccacccaaaccagtcaggcgtggcggcgcgtgcctgcaatcgcaggcattcggcagactgaggcaggagaatcaggcagggaggttgcagtgagccgagatggcagcagtacagtccagcttcggctccgcatgagagggagaccgtgggtagagggagaaggagagggagggggagggggagggggagacttgaggatttaccaatgaaagagacatggtcccaggtctcagagagctcagaggtgtgtgtgtgtgtgtgtgtgtgtgtgtgtgtgtgtgtgtggagtgtggagggatggtggagactcacacagaggtttatgcctctgttcacactgccatgatcgaggcatgaggctgggcatgatggctcatgcctgtaattctggcattttcagaggctaatgatggaggattgctcgagttcaagaccagcctgggcaacatagtgagaccctgtctctacacacacaaaaagccagatgtggtgtcgtgtgcctctagccccaggtactcgggaggctgaggtggtaggaatgcttgagcccaggagtttgaggctgcagtgagctatgatcgcaccatggcactccagcctgggtgatagagcgagaccccatatctccaaaaggggtgggggtgggggggaagaggaatgagcaaaatgcctgggcttgagggaattcaggcaaggggccacccagggtgagtcttcagaatgagtcattctcatcaagggtggggcacacttctgcagcagtcagtgctatggtctgaatgtttcccctcaagattcttacgttgaaatcttggcccccaaagtgatggtatttggaaatgatggtatttgaagggtgattaggtcatgagggtggagcccttgtgattggcattagtgccttttgaaagagtcctcagagagctctgcccctgctaaaatgtgaggacacagctagaaggtgctgtctgtggacatgaaagagggctctcaccagagactgaatctgctgtgccccagtcttggccttcccagcgtccaggactgtgagaaataaatttttgttgtttataagccacccagtctatggtattttgttatagaagcccaaaagaaatgagacatctagggttcatagctttaggcaatagaagccgattcagaccagctaagcagaaaaggaatttattagaagaatatggggtgtctcatgtaatcaatagtgttagggagggctggagaaccagacttaagactacgcttccaggcacgatgcccacgacatacagaactagatggatggggaaaccacagctgctgctgcctcaccagcttcagctgccactgtcactccccactgactgcacttccaggccaggaacttaatcttgctaccgtttctaacccccaaagctggacacattcttaccaccctt

SEQ ID NO: 22239 - DNA, 848 bp, Artificial sequence
  DNA replication origin
tattccatagtgagagggaaagcaggatctgccttcttcagagcctctgctgcccacaagggtgagacccctggaaggaccaatagcccagagtctcaggctgccctggtgccaccaatggcccagctagaggactgtaccccagggaccccaggaatgaggtgggggagtcaaggaccccagggcccagtttcccatcttttctagaaatagtcactgtctagaaataggtaggtagaggatacagacctcttctggacccatgggcttgggcctctgctggactcaggggtgggaccttgtgggaaactctctggagctgggagagctgatgtttgtggtatgaggtcaattgtctcagcagcctgctgagatgtgggggaggtgagaaaatgcgccattcccaagggctgtttggaagtggcttccctgggcaggcatgtgggtggagggggtggtgtgtgggaggtggcagctccctgcacctggctctggggaatgggacccaccctaactacctgtctgcatcttcaagcactatctcctgcctggattgctgctggtaccatgcctgagatacaggccacaccccagctcctggggggagagaaggtagaggaggctaataaggggcctacccaggtgccagggcagagacagagataggggaaagggggcctggggagggtgaagggggacctccctagagatgggcaggtgggggctcatggtgggtgatgccaggaaggagagaagccaagcttggcgtttatttgggctgtggactctcctcccttccaattattcacagccaggcccacaaggtcccctccaaagcatggccctac

SEQ ID NO: 22240 - DNA, 1891 bp, Artificial sequence
  DNA replication origin
agagggaggccctgaggcagagctgggctggggccagtgctgtggttgcacacagagtggggtgggggtgggggtgggggaccaggcctggggtgcatagccggggccgtgcttcagggtctggggaggaaagtaggagtggcacctgctttggggaccggccagcggcacagccactgtacccataccccaaggatgccaggttcctgtgcctcaggaggaggctctgtgaggggccaccaggggccgcctggtctgtgtctctggggtccaccctgtgatgggagaccaccaagcctgacactccagttggctgggcccaggtcccgagatccactttgcctcgggctgcccctgagcaccagggcaatgctgggagcttgtggtgatgccgcccctgccctgaactctggcctgggctcagtgaggactgcagcccttgccccaggctgccaggggggcatggccagggctgcatgctccacagagctggctggagccagaagcaggcagcagccctgccctcccaggtgcagctgcagctgcccaagttggggttgtgaacttaggcctccatatgctcttaggggcccaagaagacctcgccaccccctctgcccttgcaggcttggaagtgcctactcctgctgccttgcttctccccgctgtcagtgctggctcccatcttggagcaaggtcggggccaagtctgggtgttgtcacagcccagctgggtgtgcacatgcttggggcagtgctgacataccagccctctgccaccttggccccttctggactttgggcatcaatgagcatgggagggaagccaagggggtggtgagggcagcttggcactggcctgtaggcatccattggcacaaacagcctgggcgccatgaaaggcagcaggaggcagacaggttcctgggcagaagggggtggttccccagtggggcccccaccttcaggccagggacggcctgaaggctaaaggctgggctgccagtcctgtggactgcagtgggagcttgaggtgccttttccacctgcctatggtcgttcatggaccaatcagcatgcacttcctcccctctgaggcccataaaagccccaggctcagccagagctgagaagatgtctgacgaccagctgcagagggaagcaacccacttcagggcctcctctctgctgacagctgcagagacaactggatgacctgcctgcagagaagagtttccctctccaggatctcctctctgctaggagctgaacacctgttgggacaccctggctgtggaaaggagctgccccctgggggagactgagctgttctatcactcaataaagctcctcttcatctagctcaccctccacttgtctgtgtaccccattcttcctggtcacaggagaggaactcaggacccatcaaatggtggggctaaaagaactgtaacacaaacagggctgaaacatgcctcttgcttgccacattatgagtgaaaagaagagaagagctgcggcccttcaggtagcccagacttgggagctacccaagccaggactgtgactgtctctttggggccctgcgattcctggtgtcttcaagtgtccaggtgccactgtgttccccagtgccagtgtggaagctgcttgctgtgcacctggtccagttgcagcctcgtagggagccgatgcccatgacagcacctggagctgctcaccccactgcagcagctggcatgtctgactgtgagcagtggctggaccccatactcgctcacacacctttcaccattccacgcctgacttgctcttggcaggcatgggacccagaccagtagcatgagctgagcacagcccaccaggccaagagggtgaaacaggcccagca

SEQ ID NO: 22241 - DNA, 808 bp, Artificial sequence
  DNA replication origin
gcttccagggctccccggctgcacacccagactcaggagcctactgggcgctgcggcacctctcttctcagggtgtgctcccactccactcgctcagctgaggacactgtcctgggctggggaattcaggagcaaggaattgctcttgcccacccaatatgttccactgctgcaggtgtctgcagaggagaagggcagagaccagacattcgggtgatgcctctatctgcgctgtgcagtatggcagcctgtagccatgtttaaatgaaatgaaaattaaagaacattagcattaacataacgacaacaccggttactcggtggcactggctgcatttccagtgttccataggctcctgtggctagtggctatgtatggggagcacagaggtggaacattccatcaggctgttctcctggatgacactggttcagcccctaagctgggggagggggaggccctggtgtggggggttggggtcaaggagctggaagctgggtgggagccagtgtatgtgtggggtgctaccatggggtgccctgggacgggaggagggaggggcatcagaggaagagggcagacatccaaggagcccaggaagggcctggggacatgagcgggggtgcaggttggagccttgtctgcgtatcttagctctgagcttccatgtgcccatttacaacctcggaggactgtcacagtcaggtggcggggcagagagagcccgagagaggcttaggtccgctttgtcacgctgcctctgcttgctgtgacttgggcaggctccttcccctcccgagtctcagt

SEQ ID NO: 22242 - DNA, 722 bp, Artificial sequence
  DNA replication origin
agcagcaattcattgagcacctgctataaaacaggcggatcactagatattttacctgctttctctcctttaattcactcagcaacacaatcaactccataatagccctatttaaaacctaatgtaactgtgagtcagagagggtcaatgacttgcccaaggtcacacagcctaaaaggggctggctgtgtcagctttccagctggttccctgaatcacacatgccaggagctttcccccgggcacagtggtctgtccagcaccgggtgctggctgatgatgtgcttcccagggggctggaatgcaggactctggcctgtcagggagagttacagtctgatgggagggggctgctcctggcagagcccggtctttgatgggggagcccagctttgatctccttttgaagtcccggcctctggaaccagcagcttcagtggggagagtgcaggggaagggggagatgaaagggcaggggaagccagatttggagagagaggggggcagccacaaggagggaaacagatgtgtgcatgaggacccgggagacagggatctgggagagggagtgggagcggctggtgggaagaactgagggaaaggaaatgctgtgggcagacagggaaggccaggagggggaagggctgagtgtgccactgcggggcaggggagacatgagagacaggctgggcccagcagctcctcacccaccatccccagct

SEQ ID NO: 22243 - DNA, 1094 bp, Artificial sequence
  DNA replication origin
agagacggggacagagacaaggacaggtggaggagacaggactgctgggagggacatgatggcgctgagtataagaggggtcccatgggtccaggagccagcaggtcccgagacggctggcacagggggatgggcccaggaggggcttctctggtggcccctacagaacctttcccacccaccaggagagcccgctgggtcccaggacccacaaacaacagaaatctgctccccactttccagtgttccccacccctactacatctcaaccacctcctgtcctcctgtgacacgccatcctctgccacctcaacagaaatgtgcttagcctcagttccccgcttaggtatggaggagtgaagagcaaggggcccgaggctgtctgtgcagcatccttggagaacctggtgtgagaaccaggatgtgtccctgctccagcctgtcctctccctcgccaaagaaggggtgctgtgggcatgaggaaggggccgggtgccagatgcggttcctcccctccccagcccctgtgaaaggaggcatgcttggctactgcagctccttgtaaggtctgggtcccgggagaggccaacgggaggaaagcgtgaggcttggagttggggagagagtctggggggccagaagaaaagtcattaatcccataaaccctaatttggacctcctcccagcctctctgaagtacgtggagttggagtgggtgtaatcccaggtgcccctgaaggaaactcaaaaaaggaggggtctactgctgccccctcattggctttcacttgctgccctgaaccccagagaggccctctgtttgggtgcagggtctgaagggcactggaacagggtgccaggacaggggaggcgttgcggggagctgaaggggacctgagagtgtgggggatgggagagcagtgcaaggcactgggtggggtaggcttgggggattagctgggaattagcccttcctgccaggcagcccgccccaccacgcactctcacttccctgcttggcagccccacaggaggaaccaggatgtcagataggaacaggtgcaccgccatgcggcagacaccctcccccatcc

SEQ ID NO: 22244 - DNA, 1030 bp, Artificial sequence
  DNA replication origin
accagcctaaggggccggctgggatgcagggagtgaggccacttctggggcccacagagggataaggaggactgttggaacaggaaggggccctagacttgatttaggtttcaccggtgggaaaactgaggctcagagaggggaaacagtgtatggcagaaatggaacaacattcctgccctctggctcctggtccacatttcttctcctgttctcaccaggcccctgcccacctcccccaccctttcattgccaagcccagcaggtagggtgcaggcccttccaggaagggcaagaaggggctctcagagcaggagggaggtgggtgggtttacctgtggtccagaagcaggggtgggtggctaggggttatgagctagggtgggctcaactggatggtggcatattccacagcctctgcaggccctggcacgggggtccgcagccctggcacgagttccagggcagaggtgtccagctctgcatagtggctgtgagtgtcctttaggccagagccctaggaatgaggcagaagggacaggtggcaggaggggtcggtgggggtgtggtcaggaccagacgaggcaccccagggccaggcgtcgggggagatgggaggtgtgggtgtgcagggaagcatatgagagagaagggaaccatggagtggtcaggcggatggggggagagagagacgcagaacaccaattactcagtgacaacagaggaaacaggtttagaaaaggtgtttacaaaaattagtcacaaaacatttacctgctgtgctaagctgtgtcctcttaggccatgggcatgggtggacagaggcagggtgggtcctactcctgaaccccctgtatttgcctccgagacgttatttgtgctaaccctttcattttgcagagggaagagagatgcctggagaggggacatgctgtgcaggggggcatggggaggctcctggggcataaaacagaacttggagtcaaagggcctggctttaaagttttgccggacccccctgctgtggctt

SEQ ID NO: 22245 - DNA, 776 bp, Artificial sequence
  DNA replication origin
gcagtgtgaccttaactgtgctgaaccttagttttctgtaaaagggagaaaagggactgggcgcggtggctcacgcctgtaatcccagcactttgagaggccgaggtgggtggatcacctgagatcaggagtctgagaccagcctggccaacatggagaaaccccaactctactaaaaatacaaaaaattagccaggcatggtggtgggtgcctgtaatcccagctactcaggaggccgagacaagagaatcacttgaacctgggaggcggaggctgcagtgagctgagatcgtgccactgccttctagcctgggtgacagagtgagacaccgtctcaaaaaaaaaaaaaaaaaaaaaaaaaaagggaggacgggtagaaataaatgaggtaagcacgtgagagcctggcactgagcggcgcccagaaataataggaatagggtcagggtggggtgatggtggtggtgtgatggtactggtgcagtggtggtggcagtgatgatggtggtgatagtggtggtgatagaggtggtaatagtggtggtggtgatggtggtggtgatggtggtggtggtggtgatggtggtgatggtgatggtggtgatggtggtggtgatgctggtggtggtgatgctggtgatggtggtgatggtggtggtggtggtgatggtggtgatggtgatggtggtggtgatggtggtgatggtggtggtgctgggccagctgcatgaagatgagcaccagactcttccagcaccagcaggatacttcatca

SEQ ID NO: 22246 - DNA, 918 bp, Artificial sequence
  DNA replication origin
tgaaagacccgtcgttctgagaaaccatgttctcagccaagtccagctgctcagggtcgtactggtagcccagagtccggtccccgtagccgtcctgacgggcctcggcctcatccacggtgaagtagggccgcttggcgtcctcgtcatatttggggtgggggccgcccaccttgcgctcgccccctccaccgccctcctcctcctcctcctcctcctcatagctgcttccacccagtgggccggccttcttctcgtcgtctgagtcgtcggggtactgcaggttctgtgccattggtgggtggtgctgggggatgcctgccttgctgtagccgttgccatacacgtgcttcttggtgctgtagtcacccttgaaggtgtgccggcgccgacgcagggcgaccacgatcccgccgaccacaatcaacaccagcaggatgctccccgccacgcccccaatgatggccgtgggcaccggcccggcgcgccgcccatgttcgggaggagacggggtgtaggggaattctgggtgaggaaaagagatggaggggacagcatcagcgtgtgctcctggggtgtagagggggtgggagggaggcagggaaaggagaggccaggaaggacaggctgtctgcaccccaggtttgagcagctccagttcgaggccccgcagcactccacccatcctggagccctaacatgccgcagcgttggtagctggagtgagagacaggcaagaggagaggcagagggcagtacccacagcaccagggtcttccatccccactgtccttggtgtggtgctggcccagctcaatccctattcatggtgcagtgagacacgtgtgccagttccagctgcagcacactgcccactccatgccattcacagccacaaccctgaggaggtatgccatt

SEQ ID NO: 22247 - DNA, 1915 bp, Artificial sequence
  DNA replication origin
taaatgcaaaataatcaccgtaatcaccgtcttggggtgggagacaacagccccagggggagggcgtcagtctcggagctgcgggtttggagtatggcgggggggcttcgtctctttcggcggcccctttgccagacggctcaggacgctcgggccccctcccgccccacaccgccccacagcgggcgcggagagtcggctgctgcggcagaggcggctcctcgctcacctgcggttcctttcctggagggtgaggccggggcagcctcctcccggcctggcgcgggaccgggctccccctcggaactctgctcccagctctgggggctctccctggaggagacaccgcgggcttcctgccatccaagtagctgcatgacccactttcccgagggtgccccgcgtgtccttcctcgaggtgcgggctgccggcagccgaggggttaacctcgcgcccgaccccggggtggccctggtggcccattctgacgggtggggtggggacggaggctgggaccagcccaggcatattgtgctggggaatgaactggaaaatgcgtttaggaggcaaatccgaccgagtcccctcgcctggatttaaccctttgtgtccctggggaagctgccgagctcgccggctgactggacaccaagcgtgggtcaaggggtgtggggagttcctccagctctctgggtagaaaccagagacgacctgcagctctagcaagatgggattttggggaggggggcggatcttgactggagcacgtggtccccgccttggggtggcagaatagggggtcagtgtacagagaccatctcctcgtggggcaggaatattagatcccgagttcctgcaatgtgctttgccgcagaatggccaggcagtttgttatcgagggaacagtctggctgcctagttccggggctagggtgcactcctggaaggcagaagcctggcctcattcccttctatgcctcttctgctgccagccagctcactacgagggccccgccaatctcactaagtggtggatgtctgggaagcagtttgtgaaagccagtactggggtgcctccacccgtgaagcctggggtgctgccctgctcgatgtggggggtggggaaaatccagggctcacaggtgtcactgcccaccctgcccccagagggtggtcttggtgagagtgagaggtcttctcacactggatggcctgggaagccagccagagatacagaagttcgggctctaggacttgcctggccatggggatttgagcttccaggaacccttcaattacatatgtccacatccggaacccagagaaacgagagcttcccagagctctggttggtccagcacactaggggttaacgtaatcctgggatggacaaagggtggtgggaagggttgggagaaggggaaggaactcaccctattctccttccttttgttattctctttccccagctttgtgattccttcatggttaattccttcattgggggctagaggcctgctgtgctccacccactcaggaagtgggagcagggaggtgaactcacctggctcaaggtggatacaacccctgccaaaaatctacatgaaagggtgggatgcagagaaaggaaccagggttgagagaggtacttaataaatgctcttccattgactgtaattgactgatgggtagcatccatgcaccgaagttcccggaccgcccagctcctctgcccagtggctgggctcctggtgccttctctgcttgcttgctctagggtccacgggtgcagggaggcaggtggatatggttgtgcccagtctgacacttggatggaggctggttggcccagaagttgcaagcccacaccctactttgcatcacctgctggcttcctccccattgcccgctata

SEQ ID NO: 22248 - DNA, 924 bp, Artificial sequence
  DNA replication origin
caagttggagccgagcgggagggtgtgagcgggccggggccaggagcccgcgccgcgcaaccgggcagccgggcgcgccgggggtgggtccctctccccagccccgctctgcgtggaagaagagggcggggaccggcgccgggaggagagcggaggaggcgaaggggcatgactcgtgcaacttgcggcgggcatctgccgagcctctgagccggcggcggcccggggcccggactgcggccgcgcggatcccacccagcccaccccgccccggccgacggctgcagctgacctggatccttcgagcgcccgccgaccgccagcgatcttccctcatcttccgggctggtttctgctgcgcgaggagcgctgccctcgccgcccctctcgccggacccccggcccccgatggctcggatggggcttgcgggcgccgctggacgctggtggggactcgctctcggcttgaccgcattcttcctcccaggtaagagcgctcacctctgctgtccccacccccatccaatgcctccccggggctgggagccggatggcgggcacgactggattgtggggagtgaaaggagccagaaaagttgggtcacggcttgggtaaagggggtgggaggtggcacggcggagaaagaggttgagaagccgaaccgcctgccctgcagggaagcagtcagatgcacgtctctatgtagcatgaaagcactttctccgctcagttctttacaaaaaataataatatgtaatagcgttctgtttatttaataaccagctctctgctcgggaagcagtttggaaacactgcgtgttacataaatgcaaaataatcaccgtaatcaccgtcttggggtgggagacaacagccccagggggagggcgtcagtctcggagctgcgggtttggagtatggcg

SEQ ID NO: 22249 - DNA, 2075 bp, Artificial sequence
  DNA replication origin
aggcggcgggcgcggggctcggcggtcggcggcccgggtggctctggctgcgcggccgggcgcgaggagaacgggtcggaggcgccgcgcgtcccagccgccgccgctctgccgggtgccggcgatccgcaacaatgtggagccgcgctcgctgctctcgctctctttctctcactcgccgagctccagcctctcacccgctcgcccgtgatgtcagccagaggggaggggttagcgttaaccccctcctggcctcgatgcgcgcccgccggggcccggtcggagcccgagcgcacgcgccttcccgaccgaagcagaggcggatcgcgagcgcgggctgcggggtccggctcaggaccctcgctcgggagctacccctcggccgccttccagctggggagccggctggagcgcgggctgccctcctcctccgctgacaaaggcaggcagtgacccctagcggccggcggcgccgaggcgcggcgggtgggggtggagttaggaccgggccgggggcggcggtggaggagagggcgggatggagaatcccggctagcagcgtgggagctggcagggcttctgcaagccctctgctcccaccctggccccatttcacagacgaggaaacaaaggcccaaagaagagttccgcccgggacggaacgtggcatagctcgcaacagaacccagtctccggagatccctctcctctgcaccacttggacgttccacggagaggcagcggtgcgcggggcgacggggagctgccagagaagtcagtggtgggcatgagtgggtgagacgggcccactgaggtttctggtagagtttcttttctaatccctgctcccttcgggggttccttttccaaaaattgaagcaccccgcgccccgcccttgcccaaacatagcctgaaaacgagctctcctccagtttccaggaccttagttttgagagatttgtgggattcccgcgaaagtggatcgtccagtcagtgtccctggcagggcagggactctccgccccatcccgttcaccacccactacatccgggtgtggtaggatttctgccaaggcgactgcgccctccgggccttccctcttccccttactctggtcctcctatccccatcccctccccctgggggaggaagacagacagagtttcccactaaggagagccgaattctccccagaccctggccggacactgctccctctaccctttgcccagccctctaggcgggcaggagcagaggggaagtggctgtttctgataacacgtaaattctggttcctcactggagaaggggcaaagacagcgccatattcccactgtctggaatccggccctggagtgtctcggtttctcgcggaagtagtcagatctggcattgtcatgaacactcacccactcactgtatggtcttttacatttaacaaatgtaacctgggctttctttgtgtcaaaacacagtgcctggcttggggatacagagacatcatcattgtcctgaaggaactcaatctagttgaagggtgggggaagacagacatagaaacggatgtcgtaaacaaatatttaatatgggattgtgtgggtttggtgggtcacagaaaaagtgcccagtttagcccggggtggggttggtgtaaaggcttcagggaagcgaacacagggtctcggtgagtcatctatcagaccaaggtaagtgctggagggcagagacataaaagagactggatttaaggtagagggtcagcacgagcaaaggaatgaaggtaagcaatagtcaggtgagtagggggcccacaaagggttgactggtttagcctgagcctaagacttgaggaaaggagaggtctgcagattcgtgaatcatgcccggtagctgctaggagggttttaaactggggaacacgctatcagatttagtttgtggcagctgggaatctcccatctggctgctgagtgctttaagggccagggttgaattgaattcattgtgatggcctttagctctgtgccaggcacactgcaggagctgaaggcatggtttgaaggggcaatccca

SEQ ID NO: 22250 - DNA, 1014 bp, Artificial sequence
  DNA replication origin
ctgggagccgcgcccccattagccattccgcgctgataagcccgcgctgccctgccgcacactcagaccctccctcagcccgtgatgcattactgcatatgatttgtctttgcagcagctgccacagcagttcttccttcctaacaatattggcttcgcctggtgttaaaaaggggccgtaagtgccaccgaacatctttgctggggagaggagaccgcacactggggggatggggaggcgggcccgccccgaatgagccatttgctgcggattcatccaaaggccgatgatccactggcaaaaattaggcagggggtggggcgaggggttggggaggagacaagagctagtagggggcgaagagacgacatccgggaggcggggctttccccccaggccggcgcgcccagccccacgccccctcgcacccctgcccacccacccccgggccctgcggagtgtcaggcgcggcaggaggcggggtgtacctgtgtgtgcctctgtgtgtgcatgtgcgtgtgcgcgtgcctctgtatatgtgtgcgtgtacctctgtgtgtacctgtgtgtgcgcgtgtgcctgtgtgtgcctctgtgtgtgtgtgcgcgtgtgcatgtgtgtgtgcctctgtgtgtgtgtgcgcgtgtgcctgtgtgtgcctctgtgtgtgtgtgtgcgcctctgtgtgtgcctctgtgcgtgtgtgtgcctctgtgtgtgtgtgcctctgtatatgtgtgcttgtgcttctgggtgtgtgcacctctgtgtgtgcgcatgtgtgtgcctctgggtgtgtgtgcctgtatgcctctgtgtgtgtatgcctgtgtgtgcctctgtgtgtgtgtgtgcctctgtgtgtgtgtgcctgtgtgtgcctctgtgtgtgtgtgcctgtgtgtgcgtgtgcctctgtgtgtgcgtgtgtgcctctgtgtgtgtgtatgcctctgtgtgcgcgcgtgtgtgtgcgtgcgtgtccccaccagccttcctaccacaacccggc

SEQ ID NO: 22251 - DNA, 852 bp, Artificial sequence
  DNA replication origin
cctagacagacatacgggccatactcacaatgaagtagcatgagattaatgtggttggtagatgggtaataaatagggaagatctgtatttacattccacaccagccaagggttaggtggtacacggttcagaaagttttatgttcaattttatgtctagacagagcttgagatgaggttatcatttctcttctaattagtgcaagaaggcttccccaggcgctgctttcatgggttctgctgtcttggctttgccatttgttcccaagagtgagacataggtggagtggggagagggaatgagcactggattgggagtcattatacctggatcttcaaccttgactgtgccaccagcttgccatgataccatggataaattagcccactctcctgggtctccatggctgggctgtctatcaaggcccttcagtgggtgcactccctgagtctgtcaaacggggctgctgtgtgcaggtggctaggttgtgcactgtgcagggacacctggccaagaaagagttgggggctgaaatccagcctatgcttttctcatcaggcctgcatccacctggagaaagaggcatcttttctaatttgcacaaagttatcacagggactagcagtggtcctatgattagagttggagttgaggtggagatgggaaggggagtttctttagcagaaagtgagattgtgagttcggggatggaggataagggctatggagggaggatcagggagaagtgctgtggttggtgaacgtggaggtggggcagagagcagtgggaatgtgtcaagggaggttggtggtgagaagggcgggttcatgctgacagtggcccctttagc

SEQ ID NO: 22252 - DNA, 1036 bp, Artificial sequence
  DNA replication origin
ttcatctctaacacagggccagaagccaggatgatcctgttgttaagtgaagccagagactcagttggaacattcttcagggcagaaaaggagttcattaaatggctcagaattaagatgggcaggagctaaagaagagtgagacttaattcccttgcatacccaggggaaggggtctcttttggaagagatttgcattggctttagttgattgcaattacgctatccattgccatgctgaaaataaaatgaaaccctaacaaagttccaggtttaattgaaatttcctgggatctgttattatatcgctgtgattgttctgtgccactaatgaggctgtgctagctgattatccaagtgtctctccagtcactattccgttattgcattattaatgatcagatatgattgtcacagtcgatagcttgaacatcaaacaggcaagagacaagtcagacagccaggcagacagacagatggcaagggtgggtggggcggggcaagtgggtaggctgggctagccgacaacctggtacccagggtaggcgggggaaggggcatggccatgttagtgcgatgaggggctgaactgaggcgggaggcagggatggaggaggcggtggttggggcatgatgatggcaggaaccagtccttgcaagttggtgagttctaagggtctatagctctcaactctccacttatctggagaaatagccaatgactcttggtcaacagacaaaacaagaactagcatttctagatcaatgagatcgcacagcttgggaaatgggaaaaggtcagtgtaaggggcaggtcactcttccttggccagcctcagggagcattttgaagagctgctgagctcctctccccttctctgacaagcctggatgtccacagtggggacttggggtgcagtgagaagggctggtgggccctggaaaaggctttggaacaggaaaacggggaggcctgtccttcctaagacagccatgtgtcccgggcactgtggggaagacctgcccccaccggtga

SEQ ID NO: 22253 - DNA, 864 bp, Artificial sequence
  DNA replication origin
caccgtaggagctcttctctgggctggccgaggccgaagccggctccctcggcttgcggggaagtgtggagggagaggcacgggcgggaaccgaggcggcgcgccgcgcttgcgggccagctagagttccgggtgggcgtggacttggtgggccccacactcggagcagccggccggccctgccggcccggggcagtgaggggcttagctcccaggccagcagctgcggagggtgcgccgggccccccagcagtgctggcccaccagcgctgcgctcgatttctcgccgggccttagctgcctccccgcggggcagggctcgggacttgcagcccaccatgcctgagtctccccaccaccaccgtgggctcctgcgcggcctgagtctgcctaacgagcgccgccccctgctccacggcgcccggtcccatcgacagcccaagggctgaggagtgcgggtgcacggcgtgggactggcaggcagctccacctgcggcccggtgcgagatccactgagtgaagccagctgggctcctgagtctagtggggacttggagaatctttctgtctggctaagggcttgtaaatgcaccaatcagcgctctgtgtctagctaatctggtggggacttggagaatctttatgtctagctaagggattatgaatgcaccaattggcactctgtgtctagctcaaggttggtaaacacaccaatccacactctgtatttagctaatctagtggggacgtggagaacttttgtgtcttgctcagggattgcaaacgcaccaatcagcaccctgtcaaaacggaccaatcagcaccctgtcaaaacaaaccaatcggctgtctgtaaaatggacc

SEQ ID NO: 22254 - DNA, 1680 bp, Artificial sequence
  DNA replication origin
ggggtgaggcaggtgaatcactgccgtgggaaatgccgaggtgaggcaagtggatcactgttttgggaaatgctgagctgaggcaggtggatcactgctgttggaaatgtcggggtgaggcaggtggatcactgttgtgggaaatgctgaggtgaggcaggtggatcactgttatgggaaatgctggggtgaggcaggtggatcactgctatgggaaatgccgaggtgacgcaggtggatcactgttgtgggaaatgccgaggtgacgcaggtggatcactgttgtgggaaatgctggggtgaggcaggtggatcactgctatgggaaatgccgaggtgaggcaggtggatcactgttgtgggaaatgccgaggtgaggcagatggatcactgttgtgggaaatgctggggtgaggcaggtggatcactgctatgggaaatgccgaggtgaggcaggtggaccactgttgtgggaaatgcctaggtgaggcaggtagatcactgccgtgggaaatgccgaggtgaggcaagtggatcactgttgtgggaaatgccaaggtgaggcaggtggaccactgttgtgggaaatgccgaggtgaggcaggtggatcactgttgtgggaaatgctgagctgaggccggtggatcactgacgtggcaaatgccgaagtgaggcaggtggatcactgttgtgggaaatgctgatgtgaggcaggtggatcaccgccatgggaaatgctgaggtgaggcagatggaccactgttgtgggaaatgccgaggtgaggcaggtggatcactgccgtgggaaatgccgaggtgaggcaggtggatcactgccgtgggaaatgccgaggtgaggcaggtggatcactgccgtgggaaatgccgaggtgaggcaggatcactgttgtgggaaatgccgaggtgaggcaggtggatcactgccatgggaaatgctggggtgaggcaggtgaatcactgccgtgggaaatgccgaggtgaggcaagtggatcactgttttgggaaatgctgagctgaggcaggtggatcactgctgttggaaatgtcggggtgaggcaggtggatcactgttgtgggaaatgctgaggtgaggcaggtggatcactgacgtgggaaatgccgaggtgaggcaggtgggtcactgttgtgggaaatgctggggtgaggcaggtggatcactgttgtgggaaatgctggggtgaggcaggtggatcactgccatgggtaatgctgaggtgagccaggtcgatcactgttgtgggaaatgctggggtgaggcaggtggatcactgccgtgggaaatgccgaggtgaggcaggtggatcactgccgtgggaaatgccgaggtgaggcaggtggatcactgttgtgggaaatgctggggtgaggcaggtggatcactgccatgggaaatgccgaggtgaggcaggtggatcactgccatgggaaatgctgaggtgaggcaggtggatcactgttgtgcaaaatgctgggttgaggcaggtggatcactgttgtgggaaatgctggggtgaggcaggtggatcactgttgtgggaaatgctggggtgaggcaggtggatcactgccgtgggaaatgctggggtgaggcaggtggatcactgccgtgggaaatgctgggatgaggcaggtggat

SEQ ID NO: 22255 - DNA, 1118 bp, Artificial sequence
  DNA replication origin
cgcacacactcctgggcctccctttagagcaagaacagcctggccggacaggggatttcaccgctgccctctgcagcccgcagggagcccgagggcagacgtaaagcccatgccggcgtcggccatgaaacaggcctttatggggagcggaagcagccatcaaagcctagcgagccggggcaggccagggaacgctgagagcccggacgcggagcgcttcccaccgcccccacggccccggccgtggcgcctccccgcctggccacacgggggcgcgctccccctccgcgcctcgactgctctacgtccgcgagccccgtccgcgagcccagtccgcgcgcccctcgggtcgctcaccatgtcccgcctcgcgccacctccccgtctctaccgcgtaccttccgcgttcctctccatgtcccctctgggtccgcccagcgccccggctgcgccccctcggcgccctctttgccgggtcttttgctcgcatcctgcccgcattcgcggcggagagaaggaagacacagctcgtgcagcgcttcagcttgagcgggctccctcgatgcgcttcctaggctagcagggtgtgcggatgccgctcggctgagtcgcggggaacgacggtagctcacgcactaagcgccctctccgcgctgggctccgagggtgcggcggcgggaccagactttgcagggctttgtacagtctccaggcctgggtctctctactgaagggacttgggcagggtgtgaaggagggaggtggtggcgagagggaatttatgttcggaaagatccctctggctgctgggtggagggtgacttggagtgagctggagttgccctacagagagcaaccaggagattcctgagaagtccaggaggtgacggtgacagggtcacgcaagtgcagactccaatgcgttacacatatatgtgggattcgggcgtcggtccagcccctccctactccctgaagccgccccaggccatcacttgttggactgcagaccccctcccttcgcagagatcccttccccaccccagggtgttcccggcctgaggctcccaccagatgtgccacatcatgggtaagctgtgaccatcactagcaccact

SEQ ID NO: 22256 - DNA, 1016 bp, Artificial sequence
  DNA replication origin
ggcctggagactgtacaaagccctgcaaagtctggtcccgccgccgcaccctcggagcccagcgcggagagggcgcttagtgcgtgagctaccgtcgttccccgcgactcagccgagcggcatccgcacaccctgctagcctaggaagcgcatcgagggagcccgctcaagctgaagcgctgcacgagctgtgtcttccttctctccgccgcgaatgcgggcaggatgcgagcaaaagacccggcaaagagggcgccgagggggcgcagccggggcgctgggcggacccagaggggacatggagaggaacgcggaaggtacgcggtagagacggggaggtggcgcgaggcgggacatggtgagcgacccgaggggcgcgcggactgggctcgcggacggggctcgcggacgtagagcagtcgaggcgcggagggggagcgcgcccccgtgtggccaggcggggaggcgccacggccggggccgtgggggcggtgggaagcgctccgcgtccgggctctcagcgttccctggcctgccccggctcgctaggctttgatggctgcttccgctccccataaaggcctgtttcatggccgacgccggcatgggctttacgtctgccctcgggctccctgcgggctgcagagggcagcggtgaaatcccctgtccggccaggctgttcttgctctaaagggaggcccaggagtgtgtgcgggcggcgtgctccgtgctgggctctgtgccgagccctattcattgcatatcccagtttctgtctctgggtgcgtttccctggccctggccacttcccctctttgagcgtgggcactgtgtttattagttcatttcccatccccacaccaagcactgcctggcacagagcaggcgctcggcaaaggcttgcgggatgcgcagaccagctcatttaatgcttgcaggtgccctctgcggtgggcattactatttccaccatcctcatgatggatctggaatccacgggggtcccctgcccagg

SEQ ID NO: 22257 - DNA, 1168 bp, Artificial sequence
  DNA replication origin
tatttccaccatcctcatgatggatctggaatccacgggggtcccctgcccaggatcgtgcagcctgtggaaggcagcaggcgccgggatgccgaatggattgaatgagcttctcggggattccctgagcttggtgaacgcagagcccaccctgacggtcaggcctaaccccaccgccaataacagagcagccctaggtggaagtgggctgcctgtgcctggcactgggagcggcagaggcggctgccgctgtggaagtagcgcccgcagtgccaagctcctgtgcctgggaggacgcgggcactgggcgacctgcagtcggggctgcccccaggcagggctccctggctttctcacagcgcggctcgcgggaaacgacgctgccctatggcacagtgaagtaaggcgatggctgctctcagccagaggcggggctgggggagggggccagagatgccccgggagcccctggaccctctggagggtcgggtgggggaggggagatctctgtcttgaccacgcacttgtaacccattcttggcacaccgggataccttgcctgcaggtagtgctctgctctcggggagagggcacaacctctaatcctctgaccgaggctctctgcctctcacaagaagcccccaacacactggttttcctcacagcctgccccaactgctcatcggaacctgcagcccccttccctgccccaactgtccctctgcggaccccattaccctactttctgtcgagcccaactgccctatcctttatacaggctgtcgggggcaatggtggtgagcatgggctatggagtcagattgcctgggttcaaatcctggctctgccatcttctgactgtgtgaccttgggccagtttctttatttctgtgcctcagttttctcgtctgtaaaattgacgggatggtggcatctgtctcacagagtggctgtgagggtagcgggcacactgccacaggcacgatgaacgtcagctcttgttgccaacctccccccacaacacacacagcttagtaactctaccctcacccaacacataacacctagcttgtccctcataatgagctctcagcctaaatcagtgccctcagcaaacctgtggtgcagggcacgtgttagggtagacaagatcctggggaagactcac

SEQ ID NO: 22258 - DNA, 815 bp, Artificial sequence
  DNA replication origin
gcaagaggccgattctagccggaccctgcagttcacatggccctgtgctggggaagccctagaagggaaggaggctgcagagaagggagttttcacccatcagtaatcaaggtcccaacagaagtgaaaatggaagtcagggaacaattggttttgagcatcttcgtggggctttttcccttgcctgggactggcaggacagtgtaggtctgagcagcttccacgatacacacggggacacttaagcccaaagaatttttaaaacgtgcctaaattccacaactaatcagaggaggcagcaatccagatctcctggtcttcacccttcttattgttggggtgcaccgcagggcacgcatgtttccttgtggcttgtgggaaagccactgtcgtggagcgccagcgtcccgagtccctggaaattctcccaagtgacctggaatccaacatttccctggattttcatagtctataatagagagaaagaaccgggtctgcggtggtgggcaggactgaggaaaggccgtgaatgcgggaagcacgggaggcaggactgaaaaggaaagaggcacaggggctcacaaaacctgagggccgcgtcccagtgggtgacctgacccatcaaggtctaacacctggccgtggcaaagctgggcgagaacccccgatccaccctcccagtgtggggcagggaaaaggcagagtgcaaagcgaggtctgattttgcagaagctttttagaaattcgctgtcagagaaactgaaagaccaaacaaaacccctaaaaatccaagcccgattatttcatccacgtgg

SEQ ID NO: 22259 - DNA, 1009 bp, Artificial sequence
  DNA replication origin
aggagacagaacgctccttttgaatacctaagacttacccaccctcttttcctccagctttcctgctgctgggtcactgttagtcactcaccatccaggcccatttcctgataatcccccagccccctgggtgcaaggcccttcttattccctccaacacagacacacacacaccaagagcgggctggtctctaactcccaaaccgtaatctgggacacacacccacacacccacacccacccacccacccacccaccgggctggtctctaactccctaaccctaatctgggccaaaataggggggttggctcgcttctctgccaggcagagtgaagggcagcacttctcccagagggagggggcctcagctggggtctctctccaggatcctcctgctgcaagcgccccagccttccagaccaaagaggagacagggcttctcccggcttgagagggaccaggggcaaccagctctccccagaaaagtgaaacagagggagaggtgacagagggactccaaaatgtcagggctgggaggcctcgcagacccctcagtgccctgtacaggggtgagaagccaggcccataggaggaaagaggcttgcttgctctagatcacacagggagaacccacagtgagagcccacagcgagaacacttcgcctaggactttcccactagagcacaggggaatgactccaagaagggagtccagtcgttagtaggagttctggaggagggttagcacctggggggctctgggagcgctggaggagggagtgagaaagggaagcagaggggttctttggagagaatgaaggggtgggccctggggagtgggcaaagaggtgtagagaagagcccggcgtgaccttgggccagctgcgtctccctcctgggcccgtctttccgtctgcaggcaagagagcgcctgggatcccggggggctcaggcttgaaggtgccaccccggcgagtgagggcgcctcaccttcttgaagtcggcgg

SEQ ID NO: 22260 - DNA, 1891 bp, Artificial sequence
  DNA replication origin
cgactggactcccttcttggagtcattcccctgtgctctagtgggaaagtcctaggcgaagtgttctcgctgtgggctctcactgtgggttctccctgtgtgatctagagcaagcaagcctctttcctcctatgggcctggcttctcacccctgtacagggcactgaggggtctgcgaggcctcccagccctgacattttggagtccctctgtcacctctccctctgtttcacttttctggggagagctggttgcccctggtccctctcaagccgggagaagccctgtctcctctttggtctggaaggctggggcgcttgcagcaggaggatcctggagagagaccccagctgaggccccctccctctgggagaagtgctgcccttcactctgcctggcagagaagcgagccaacccccctattttggcccagattagggttagggagttagagaccagcccggtgggtgggtgggtgggtgggtgtgggtgtgtgggtgtgtgtcccagattacggtttgggagttagagaccagcccgctcttggtgtgtgtgtgtctgtgttggagggaataagaagggccttgcacccagggggctgggggattatcaggaaatgggcctggatggtgagtgactaacagtgacccagcagcaggaaagctggaggaaaagagggtgggtaagtcttaggtattcaaaaggagcgttctgtctccttcccccagctaaagagaggccctgtgaggctctgtccctgggggagtgcaggggtgaagccgattagatagctgggggagcccggggccccggggacccttgctgaagctgcctgtctttcctccctcgtagagacagggcgctttagaggagaggtggcggagtttgggaagtcagttagggacccagccagattgccatagttagcaggggtgaggggttaggcttgaccgctagaggtgggtggggttggggggtgaggcttgaccgctgattgccccagggccacggagttggcactgacattggacataagcaggcagatggggggtggggtagtgagcgttcacaaatgggaagactttgtagcccatccttactccgcaggcctaagctaggcaccctgcctccccacctaaaccctaggagaattttatcaagtgtgttctgttcctgaaaaatctatgttagtggctggatccatcaggaatcggggatctaatcttctgtccaagccctttgtccttgaaagttagccttaggccaggctgtgaggctcccaaccccctgcccactggatgtcatcttgtggctgcactagaatcctgcagagagacttccctggctgtggccaggacagtgaaaggcaatgggtagggctgagcttttatagcctttagctacatctggaaggtttttattgctgtgatctgaagggagaggctaagaagtacccaggtagctgtgatgtgctggcagtagtggctgatggcgggggtggggtgctggggattggagtgagggtatgctggtcatctgactgcccagttagaaaatgcatctggagattgtgagcacctcatttgaatctctacagtggttcagacctccacccaggtttctaaagtctgattttcaggttagcctctgacccagaagctaccatttcatacccacctctggcatctccaatttcatcagcaagggagggaattgggagtggaagacaccgaaaggaaaccagctttcccaagtccctttaactccaggtttctccattggcctaggacggggtggagttggagagtgcagtgtgggggagaatagccttaccctcacccaggccactcactcactgcctgcactggccacagcagcttctatgtccaga

SEQ ID NO: 22261 - DNA, 1462 bp, Artificial sequence
  DNA replication origin
agtgacacctgtcagagctcattccctccgcccctcacctgtgtgcatggactccagattcaccatcctgccccaggcggggccaaagccagcgcccccccaggcccctcgcctctgccccagccggggcccctgcgaagccagggtctccttcctccagttcccggccgccgccgccgcgggagccgctgccggagccgtcgccgccactgtcgcgcgctccgctgctccggcccgggcaacactcggcgccgccaggattgccacactccccaggtgagcacgcggcgcggggcgggggccgccggccacgccccctggcaggagccccgcgcctggccccaggcccatgcaaagcagtgatttgcatacatggagctggggacctggggagggggccgggggtgctgccggggcgggtctcgatcccgcggaacacctgcctgctccaacccagcctggcagcacctcctcaccgcgcccggagtggcgccaactcctggtcctgctcgccctttttaggaagccctggcgggttctccagcctgagcccgagcttccttctggacagatcgcgaagtgtaagcgctgcaaggagttggagtgtttggagaagtcgcgggggtctgctggaaagaattcagttttggaatctcgcctcccaaccgcttaccagcagtgtggctgggacaaggttcttcacctccctgagctcatttaactcacctgtaaaacaggacaggtgctaatcgggttccctattgggctgagcaggtgaccaagctcacctagcccccatggcatcctcacagcattgtgggatttagacggggtgcagtttattattagcagagtttccaggtgcacacaactgcttcctgcttgcccctccagtctcccgccccaggtcccaggttgctgtgaggctctacgagatgatggatgtggaagttaccagtgcccaggcttttggtgacagccaccttccagagcggggaagcggcttgctcaaaggtgcacacttccctagtgacagagcctggctggaatcaggtctctggactcccactccagtgctctttgcagcacccatcataggctcacccctttctcttcgtctcttcaagtcccagtaagtggtctgtcaccacaggatggcctgcatggaagcccagaaagctgtgtgcagacaggagggcagggcctcgctttccttcccagacaggactcctcatgaacatgtcttctccttagtcccatgggctactttctgagcacagaacaggttttgggctttcctgcctctacaccttgtttacagtgtcctttccccctggcacgcccatcccaccgtgcactccagtcatgcccacgataacacccagcatttcgtgtgccttcactgtgtatcaagcactggggtgaccaacacttgaaaggcatctttcgtgcctttagttct

SEQ ID NO: 22262 - DNA, 1164 bp, Artificial sequence
  DNA replication origin
atctgtccagaaggaagctcgggctcaggctggagaacccgccagggcttcctaaaaagggcgagcaggaccaggagttggcgccactccgggcgcggtgaggaggtgctgccaggctgggttggagcaggcaggtgttccgcgggatcgagacccgccccggcagcacccccggccccctccccaggtccccagctccatgtatgcaaatcactgctttgcatgggcctggggccaggcgcggggctcctgccagggggcgtggccggcggcccccgccccgcgccgcgtgctcacctggggagtgtggcaatcctggcggcgccgagtgttgcccgggccggagcagcggagcgcgcgacagtggcggcgacggctccggcagcggctcccgcggcggcggcggccgggaactggaggaaggagaccctggcttcgcaggggccccggctggggcagaggcgaggggcctgggggggcgctggctttggccccgcctggggcaggatggtgaatctggagtccatgcacacaggtgaggggcggagggaatgagctctgacaggtgtcactgcgcgtgggcaggggtgaaggagagggacaacgttctggttagggaggggggcttgtttcccagcggccaggagagggcggtgtggatagcgggttgtcctggggtgggtgccggtcagtatttggggactaaagggaggggatctgggataagaaaccctggaaaagaatgagggtgggggctggtgaagggcgggagggcttcgaagcccccggtctggggagtggcagttgtatgggacgtgggtgtactgaactgtcatagtctcaggaggttgcagggatgggtggttcactcactcagccaggggtgtggacctgggagtgcataagtgagggaaatgtgtatgtccacatgctgtgtgctggtgtccgggcatatgtgtgaaatggaggcaaagcggacatttaggtggttggggggcttaggagaagtggctgaggtggggcaattacagaggtgcccctggggcaggggccatgcccccatgtgtttgagaagggatggtgacagacacatcctctgggttccatgtcccatgccttccttccctaaggggtggaaacctaggagatgcaaatgctttgccg

SEQ ID NO: 22263 - DNA, 973 bp, Artificial sequence
  DNA replication origin
tgggtgtactgaactgtcatagtctcaggaggttgcagggatgggtggttcactcactcagccaggggtgtggacctgggagtgcataagtgagggaaatgtgtatgtccacatgctgtgtgctggtgtccgggcatatgtgtgaaatggaggcaaagcggacatttaggtggttggggggcttaggagaagtggctgaggtggggcaattacagaggtgcccctggggcaggggccatgcccccatgtgtttgagaagggatggtgacagacacatcctctgggttccatgtcccatgccttccttccctaaggggtggaaacctaggagatgcaaatgctttgccgggagtcaggcttccctgaatgaatgaatgagaggtgggcatggagggaacccagcccctccattcaccttgctgttcctccttccacagctgggctaaggcaggagctgccaggcagccaggttgggcttggcttggggcttcctgttagggtgggccttctggaggtcacagggcctgagcaaagaacaagtgaagaaagcggtacctgacctggccatttctaacctagcaacttactctcaaagtgggcaggacccagtgatctttctttaggatttcggggctgttgatgggaatgttgttacctggtctcctttctgggagagtagggaggaggcaatgctccagacccaccccaagaagcagagcaggcctgaggcctacccagcctgaaaacaagcgtcagtgagtgcccggagggaggggacctggagtgcccagttccccagatgctgtttcctggcagggctgagtgagaggcagactggcagtgagatgttggcactgagtggctctccaggacgtgccagaaaggctaggtgaggcggaagaagccatccaactgggtgtcatccagagtctgaggaaagtctgtttctagactgggcatacctggggcagat

SEQ ID NO: 22264 - DNA, 1474 bp, Artificial sequence
  DNA replication origin
ggccgccggcctcctccgctgtctgcgcgcgcgcccgcgagggcctccagaacccggcgagccggccctgcgccgggagacgccgccgcctccgcctcccggaccagggcttccaggccgggccggacgggcatctcccgcccctcgcggggagcgtcggggaggagccgccgcctctggcgattgcggaagagtccgggcctcaaagggatggggagcagtccgcggcgctgagagacccgggtccctgtcacctcgggccgcgggacctctccgccggcgccagcggctcgtcccagcaccgggagcctggtgagggcggcgagcacagaaggagccccgggcccgggacatggaatcgcgcgagcccggcgcgggacggccggagacgcggccaacgctgcggccacgagcagccggcagccccagatagagagccgggagggagggccccggcccttgccgcggcggggagttcgaggccccgagactccggaggaggagccgacacccgtccgtgagctgatcccgccccagccccggcgggagtcccgggtccccttcccactgcgcgcggatttccctctctgaggaagtttatccttgtgccttctggaggatttctctctagctcgactcactctggactgactcgctccctggctttctcagttcgttttgggagataacttgttttgctccaagccgcatccgttgaccccttacagtcggatggtctagatgactgaatggagttttgagttggacttttgtgtccctgacggagttgggcctgatcccagagcactgggggtggggaggaggtgttactgtaaaatgcaagttggataaaaggaggacctctcgccaagggccccaatgagtggcacacagtctactatcaccgacaggttggtatgaattcctccttcgttcggcctcccggaatcgggcccgacctagcaggggagtcggtgattgcagattgcctttggccagcgaagttgacaggcagaggaaagagggttgtttcggagctgtgcagttagcctggggttgctgccgagttatccagttgattggcttttggaaatgtaatttttccggagagaaacttcccttccgattctcagagaagggggaggcaaaaccatgattgtggttttccgcctgtagtgtgcattaggattgtgtactcgtctggaaatcagaggagaaggtcattttaggtgaaggtcggtgcctgaagtcggctcggtattggtgtattatttatcagctttagccgtgtcctgcagtagattctcaagacaattacattttaggaatttctacctgtgaacttaatgttgagcctactgcatggtgatctgggaacttgatctctttcagatgttgacctgcacggtgtttaattattatctaataactttccagaatgttgacattaccagtaaatcacaggttcttgctg

SEQ ID NO: 22265 - DNA, 1227 bp, Artificial sequence
  DNA replication origin
cgagcgagcccggcgcggggagcgcgggaggagcgcagcgaggcgcggggcgccgcccggcgggcagctggggaactgctgcggccccgcgcacggccggccgggggggcgccccttcggggccgggccggagccccgcgggcagctgcacgcgccccccagcgcccctcggagcgtcgcccgggagcccaggcgcgggggcggcgggggcggcgggaacggcgggggctgctgcgggcagggcgggcgcgggtccgcgcggccgggggcaaacttgcggctgcccgggggcccggggccgagcgagaggcgcccggctggggagcggcgcccggcagaggctaggggcgcgcggccaagcgggctctgcgaggtacggacctcaggtggggaacccggcgcagcccgcacactccaccgccctgcgcaaaggggcagcccgccccggccccgaggagttattagcccggcggcttcagcgagcaaggggcgccccctggtggcattcgggaaacagcgcgggggacgagcgtgccccgttagaagagactgcggcctcagtggtgcggaagatggagaggtggaggtttcatgggacgagacaagagcaccttgttcaggagactgaagagcaacagcttgcatggagtcattccagagcactgttgtatacataccaacatcttgggaggatctcatgttacgcatgaagatcctgaggctaggagaggtgaagggaccaggccaagaacacacggggagcaagtggcaggacccaggaggcaaccccgctttctgacgcgcggttcatttcagtacaccgtgtggttcatcctaatacaacagagttgcccttaggaggaggctgggtgaagagggagtcctgggggaataggagggagggcaagggacacgtgaccccctcaaacctattagctccctcttatccaacccgcagagtctctgtcttgggcagaccaccaaactgatcacaccggccctctcaccttcaatggcctgtatccccacacccaaccaccagcactcccacaatctcattaagctctctgtgaagggtttgttcacagacgtccttggtcaggtctcacgcatgaggcatactatcgggactatagactgttctggacgttgcattccccggggagggctggctggctagcctgggcgcgtactgggcctcctgcttcaggagtcgtgcctatccct

SEQ ID NO: 22266 - DNA, 984 bp, Artificial sequence
  DNA replication origin
gtggcatcaccagacaacagcaccaagaggaagatggcagcatcaagtacagatgccaagagccacgcagcccaaggtccagcccgggagtggctcggcccgcattgccccaccactgccaggcagacgggccagaggcgcccggggcccagccccctcggccgcctcctccaccaccccaaggccctcagccaactctccccaggctccaactcctcccctcactttgctcagctcaagggagccagggaaagagacacaggtgctctcagtgccttgaaccccctgtcccagctgtcgcctgcacgccctccaccccagccaggtcggagcgcacagctctgccagtcctcactgaagagaatctaaatcagctcccctccccctccgccccagccccctcccccatcacgcgcccattgcaggtctctagagtttctccctcacttcccactcggatgaactagggtgggatgggtgggagccccattctccccgggaaagaggatcatttctgataggacgctggttcccccaagcaaggcggtgtgcagggtgggggggtgtggtggtggcccgagtccagtgcaggggcagggggcagtcgaggcagatggcagtgaggaaagggggagggggcttggtgggatgccaggctgagccgggatggggggctgcagccggggaacagaggcgctgggagaagcggagggtgacgaggtgtaggggagacgcgccaggctgggaaggggctgtcatccctgcaggggacagaggcagggctgggagttgcacggggagggggaggaccagagcgggaggaccgcgagcccggggaagggatgcggagggagggagacggaccggggtgaagactggaggaactacgggagcagagcggtggggggttcggcggcgaatctggagacgcagggaccgaagtgccagggaccgggctggcgggaggcgggagcggggaggagg

SEQ ID NO: 22267 - DNA, 1440 bp, Artificial sequence
  DNA replication origin
cccctccccgtgcaactcccagccctgcctctgtcccctgcagggatgacagccccttcccagcctggcgcgtctcccctacacctcgtcaccctccgcttctcccagcgcctctgttccccggctgcagccccccatcccggctcagcctggcatcccaccaagccccctccccctttcctcactgccatctgcctcgactgccccctgcccctgcactggactcgggccaccaccacacccccccaccctgcacaccgccttgcttgggggaaccagcgtcctatcagaaatgatcctctttcccggggagaatggggctcccacccatcccaccctagttcatccgagtgggaagtgagggagaaactctagagacctgcaatgggcgcgtgatgggggagggggctggggcggagggggaggggagctgatttagattctcttcagtgaggactggcagagctgtgcgctccgacctggctggggtggagggcgtgcaggcgacagctgggacagggggttcaaggcactgagagcacctgtgtctctttccctggctcccttgagctgagcaaagtgaggggaggagttggagcctggggagagttggctgagggccttggggtggtggaggaggcggccgagggggctgggccccgggcgcctctggcccgtctgcctggcagtggtggggcaatgcgggccgagccactcccgggctggaccttgggctgcgtggctcttggcatctgtacttgatgctgccatcttcctcttggtgctgttgtctggtgatgccacgcggtgccacctccctgcctccctccagtggctctcctgggcatgtctcccaagggtctgggttgtctgggaagaggaggggagctctgagcacagctgggcccttttgccaggcagtgggcagctgtcaagaccaggccaagaggtctgagggctggtcaggaggactgagccctgccaggaacaaagaactaccttcactttcactccctatgggtcacctggttggtagtgacacttctaggagcaccgggaaactgcgggcgtggtatctccggggagagaggccgcctgggttggtagtgggcatctgagagacaaatccggtcctgcctgactccctgactgtctgtgctcgcgtggtcaggggcgaggggcttgtcgaggtccactgtgttccggtcccaccagggatggcagcccctggaattccactgggcgtcatcatgctggctttatttgctgaagctgcagctcaggcttcatcattaatcaggtttattatttttctcactggccagatgtgttcctcaaggtcacgacccttcggagagttaatctaatatgcacacattacagtgtctgggtttgtttaattttccatattttgttcattccttgtggcccgggcttgcc

SEQ ID NO: 22268 - DNA, 675 bp, Artificial sequence
  DNA replication origin
gtgggcatctccttttccacagatgaggaagggagtcccaggaggtcacacactctgtcccacatcccagactggtgagtgcggtaggaccccagcttcttcccctacacttgggcatcctctgccttaaaaaccaagagggagacactttttgattcatcacaggttttctttaaacaactgagcactcaagtcatttacacagagcccagcagggatggggcggttgtggagtcccctgtttggggggtgggcaggacccttctctcccacagggtgatagtttgggtggatagcacaccaagacacccggtctctgggaacatggcgtgtgtgttgattgcacctgccaccagcattcagacctggcaggagctggcaggggtgctcaggaatgggggaaggaagactcacagtgaggaggctgagaaggggctgtgcaggcaggatgaggggagagaggatgatctgaggactgggcgctcgggcacaggacgaggcaagtgggagaagagtcccgtgtgcagcagaaggctggagtcagggagcagcggattgtcacggtagacggggtgggtagaactgctggaatccaagagggccctggccaccaaacagagaaggctcaggtcagtgcagcaggctcgggggagccggtgaagattcgtgggcaga

SEQ ID NO: 22269 - DNA, 1228 bp, Artificial sequence
  DNA replication origin
cttacccgggtgtggtagtgcgtgcctgtaatcccagctacttgggaggctaaggcagagaattgcttgaatccaggaggcagaggttgcaatgagccaagattgccccactgcactccagcctgggtgacagagcaagactgtgtctcaaaacaaaaacaaaaacaaaaacattttaactttattcggaaagcaactgaaagccactgaaaaattttaaacagaaatagcttgaccagatttattttcaaaaataaaaataatcactctggctgtaatgtggaggatggtggccctgacacaggctggaggcacgaaggcacctgctgagcctggcagtgatcctgccaaaagagccaggcaccggggtacagaggggagtgtgggcccagaagcacaaaggaggtagaatcgcaggacacctaggggctggtggatgtgggtggtgggtggtgggtggaaggcaggtgtttacgtgaggctcagattcttcattcggggcagtttggagtcaattaccaagacactggagatgggaggaccagattgcagaagaaggtgacggattcagttccattttagactggttggctttgaagtgactgagggatatctatgtggaattgagtgcacacacccagagcccaggatagagacaagtggtggggctggggattttgaaattagggcaagtagggggcacaggggctttaatgagctcccctcgaaagaatgtttaacgcgaccaaagagaagctgatgacggagcgctgagaaccgtgcacgctggggcctgagtccacaaaagagatcaggagaaacagccacgggtagcacagccaggagagaggttgctcagaaacccaggtagaatgggggatagtccatggtggaaaacgctgtagtaagtacagtaagagtcatacagtgtctagtggatttggccactgggaggtcattggtgctcttcctgggtgtgggaaggaggtgactgccatagcagaagagcattggacaggtccagaggggacatggggacaggcagatggcctctgcagcccagctgaggagagaccaggaaaacccctgggagcagaggcagaggtttgagggagcacttcccaatgggggacactcagcagggatgaagaggttagggtgaccaaccatcctggtttgcccagctctgcggaacttcctgagatacgagacttcagtgctaaaccca

SEQ ID NO: 22270 - DNA, 1069 bp, Artificial sequence
  DNA replication origin
gggatgaagaggttagggtgaccaaccatcctggtttgcccagctctgcggaacttcctgagatacgagacttcagtgctaaacccaggatgatcccgggcaaacctgatggttggttgccctaggagagtttactccctgcagtaagctggccggtattcaacagcgggctctcctgggggaagccctgacttgtagggtttgctgatttccacggtgtaaataccatggtcaattttaagttgccaacgtgatgtcactaaatgcggagctgggaagaggtgtgtacggcccactcttgtgagcctgtctgagcaggctccagcacacccgggagagagcctggtgggtggcagatgggggtcctgaggaggtgggggatccagggaagaacctcctgggaccagagggaagagggaaggggggtgcagatctttgcagggagggttggggagggcttgggggccttggtggtctcaaggaaggaagaggggagtgtgaagggggaggtaagagggagggagggaaggagggaagaaggagtttggaaaagcctgtaaaaggagggggtagggagcaggccgggacccccacccaggatcctggagcagtgctgagggcagggaggtgacactgtccaggcaccacacttgtggaacagcctagaagtgggcatgtaggagggaaggagctggctaggcagggtgtgtagggcaaggtcactaaaggacaaaggagcaggacagctcgggatcccggttctacatcccccacctcacaggactgtagcgaggattaaatgagttaaaatgcatgaaacacttactacctgagcacgggcagtgggctagcacattagtattagtatagcagcaactgagtgaacgttgcattttttatgtgtgtatctgtgcacatttgcattgctgcacctattcctaccttgctcccatgtaacatgcagtccttaagatatgaaagtgacactgtgcctgccttcagtcagtaggcatcactgtaccttttccagggtaggtatacacgtgcatgaatacagtcccaacacgct

SEQ ID NO: 22271 - DNA, 1637 bp, Artificial sequence
  DNA replication origin
gatgttgagatgtgaacctgcgaggtagacggcagcctcagccattttgctatcaataaattactctttatcatttaaggcagtttgagttgcgttttctgtcacttgcaaggggtttggttctaagtgcaatgaaaagccattaaaggaatttgagcagagggatcccatggtctgatttacattttaacagaattgctgtggctgcctggttgcggggaatgggcggcagagggtcaggagtgggagtgggaggctattcaggaggctggtgcagcgtcacagggggaagaaggggcttacacccaggggtggtggcagagcagacagatgcaatggtgctggtgcctttggacttggcatcccaggttgctgctgccgcagggctgaaaggaagaggtggatcaaggatctggagtgagtgggaggaggatggggctgttagatgagactgagtaagaacaggggttggtgggggtggggtgagttggggggtggggtggggttctcctttgagccgatgctgattagacaactcagcagagagatggcgtcagcagttggatatcatcagtctctcggcagggtgaagggtcagggctggagatgtaatctgggagtcatcggtgtttaagaggaaaggaagaggcaatgtaggaggggatacagatattgaggaggggcagaggatggcattctggggtatgccaatgttagagtcgggcagaggcggggagccctgcagtggacatggaggaggagtggccagggaggaggcaagccagggtggatgtggcgccacagacaggacagaggccaggtgagtcctgaggccccgggagtcacacgggagaagcatacagacatgagtggagggtttgacaacagtgaggtggtcactggtgacctggataagaagccagactggggtggttggagagtgagtgggaggagaggaacggaggagtgggcacaaaccgttctttgaggagtactgtgcacaggagcaggtgcacagagcagtggctggatgggcatgcagggctgagtggggtctttcatttgtaagggcaggagacagcggagcatgcatgagtgcacagtgaagggcatgatctaatgtgggggtattcatggataactcagaacagaagggtgacttccagaatgaaggccttgagaaggtcaggggctgggattcacgagacgaatggtttggcctcttatgggagcaggaacacttctcccaacatacatggagggagggcagagaacatgagatgagagtgagggaagccggtagatttggtggtgggaagttaacgagttcctgtttgcttttgtatatgtatgttttcatccccggtccctggctcataactcccatagcccttgttactgtaaacagaatctctctgtctctgaccttctcctgcccgcttttcacctgcccaaggcaagactctgatctgactatgggtcatgaaacctttattccagagtgggtcccgccctcatacccaggaggaaggaatgctgcagagagaggccaagaagaatctgaacaggcaggccgttctgcatccagatcataccctttttgtccaattaaatttttacatggttgttggccgggc

SEQ ID NO: 22272 - DNA, 1375 bp, Artificial sequence
  DNA replication origin
ggagcgcgcggaggtggctgctggctgcaaggactgcgcccagcctccgcctcgcccctcgaggctcccgcgtgggccggcgggcagtgcgtgggccacaggaagcgggctgactggacccggctcaggacttcgcacaagggcagctctttgtttacagctcctctcccagctccccgctttcctttcgcccaccgcctcccttttccggcgatcggctccgccggctgcgggggggtggggggggtggggtgtcctgtgtagccgcccacctcctgtcccggcctcgtgctcccgctggggactgtttgcggtgagtctgtcgcacgcacgtcagggccgaggcagtgatgcggggcagcgtgggaggacgggctgcggagcccgcgtcatcctgcctgtggggagcgctgtgcctgctctcctgccagcgcgcccagctgtcccggccgccgccacgcgggactgcctgccatgtcgccaccggctgctgacctcattaggcctcatgtcatggaggagccggcgattaaaggactctaagaaccagagctaagtggctgcaaagatactgacagcctccctagaagcccactttccagtgagctgctgcatcctctcctcctttaattagcaggaatgcgctggacaagttgttacaactgcagggaaaacgataaaagatggctttgtattagtgtggcaaattttattaaaccgggagaaagggtaactgaaacatgacagccgtgtgtgtagtgcctcctgaatttgtaataacccaatcttgttctgaatcatccctgtgttggctaaaggaatataaagcgttttacagatccaatattgtacgaggtacaacagaacacagccgagtgaggaaggacgacaggtaggagaagggggcctccagcgcccggcagcgctcacggttaatgagaccggagtagaaatacagggtctggctgcaggctttgcctcactaattactcctgccccctggctcttttctacatctcagtctttccacttataattcagaggtaatacctggccacatgagaaaacttaactaatagcacgttagttgccagggaatggacaaaaccatcttttcctatagagagtgaaaagcaagacaggaaatctaggagaaagagttgagacacacgtggttattctgggcttggggtgtgactttggtattaggctggaaggatgatgctatgtttcctaccccttgagccgtgttgaaagtaggcgtcattgtctctaggataaaaatctgagccaggcccacagaggttaagttttatatccaagatacagtaaatggcagcctggatttgtgctttgcactttaaagcctgttctt

SEQ ID NO: 22273 - DNA, 847 bp, Artificial sequence
  DNA replication origin
tccgcatcagacagtggccaagccaggggtagagcccgaggggagaaactgtgtcctcccacaggcctgtgagcacactcattccgtccattcatctgctcatgctggcaactgaggtttaagaagcacctactaagtgttagatactgagctaggccctggggattttacgatggaaagctgttgtgcatgagagtgccgcaggtgttgggggagaagtgtgtcgttaggagctgtgagcatggagaggagggcatgcagttctcccacggaggtgactgggagtgatggggccgtggaaagactttagagaaggaacagcccttgagctcaggcttcagctaagaatgagtttgcagatggccgaggaggataagggcgttccagtcagggcgtgctgctggagcagtggcatggaggggaatctgcatgttttgaggctgggtgctattctgtatggctggggatggagggttccggaggggcctggtaggagtttagggtggccaggaggtaagagcaggtcacagagggcttagaagccacaaaggtgatggaatttgggtggtctcctggagatggcaagggaatgccacaattcattggatgagaggatggtttggagcagggcaagaccagaggcaaggatgccagttgggaggctcggctcagtggtccaggtgagaaatgaggaggaggaggaggacaggcttcggggagacattcaggaagtggactgcatggtggtgaccggttcagtattggtgggcccttaggctgggtttccccaaaagtacaccctgagaaaatgacttgtattgtaacgggtttggttgaggggcgatca

SEQ ID NO: 22274 - DNA, 1197 bp, Artificial sequence
  DNA replication origin
cattggatgagaggatggtttggagcagggcaagaccagaggcaaggatgccagttgggaggctcggctcagtggtccaggtgagaaatgaggaggaggaggaggacaggcttcggggagacattcaggaagtggactgcatggtggtgaccggttcagtattggtgggcccttaggctgggtttccccaaaagtacaccctgagaaaatgacttgtattgtaacgggtttggttgaggggcgatcatgggaatcagcaatggcacagtgaggcagggaggggcacctgtgtttagcaccacagcacgttggtgtgcaggaggccgggagaaggccttcatgaagagagcccaggtgcttgcagcttggggaaggggctggggcagggccctgtgggcatctgcacggtgggtgaggggagggaggagtcaagtctgattcccaggaccacacgttgggtggaaatgccattcagatagaaagaatttgggggagtggccatttgggggcagaaaggggatgacaaattcagctttgccatgttgagtttggggtgcctgtaagctggccacatggaagcacccagcaggaagttgattgatggggtgtggaatccaggagaggggtgtgggcgtgagacacagatttgggctttatttgggtagagatgcagccaaagccacgggcccagattgtgtcacttatagtcacttaagaagagcagagagcagatgagagaggaaagagctgggaaacacaggaatttatagaacaatctggggaagaaagcctggcaagtcaactgaggagcaactggagaaggtggagggaaaaacgagggcaggtgagaccctggattccagggggtggttgccagttggaagagattggaaaagacagtggctgccgagaggagtcaaatcaggtgagggtggaaaagctttcgctgggcaatgaggaggtcatggggcttttgcagggaatgttttcagtcgtgtggtaaggagcagaagccagagaggcagctgtacgaggtttttgagcaaggaagtgtcaaggtcaaagtggcattttagaagatgattctggaaaaggtgtgtaaggtcagagataggagaggctgaggtcaggaggccagcaatgaggctgctgcaggcttccagccagctgggagtgcagcagtgagcttagagaatg

SEQ ID NO: 22275 - DNA, 1731 bp, Artificial sequence
  DNA replication origin
ggagagtagtttcatggaagccaaggaggttgattaaatgagataacatatatgctcttcttaggacagcacctggcaggttgtaagtcgtattgccagctagtgatatagttagacaaagaatcaaaagttcaccagttttgcaaaaatgaatattgatgttgacttggcaggtgcagtttgggtggagtggtggggacggaaggcagagtgcagtgggtcgaggagaacatggcatggggtgaagtcagcaaatgttgagtagtcatttgagaagcctggcttgcattgaaagtgacagagaagggagagccagagggcacagctggtcagggtggtcaggggagggtctgcataggaggggcgggccttgactgttagcacaggggagccagcaggcctcgggagaggctgaagaagaaggaggcctggtgaggcagagtcccaggggaaaggaaggaaggctgtgggttgtctggagccctcgttacctgagcttgttgggaaggtatggggcacaaagtcaaccagctcactgagagtggcctcagtttaaccagtgtgtgagctgagagccaggggctgagagcagggtgatggttggaggtgaagggtggtgttaggggtcggagcccagcaatggttacaggtgaaaggtgatgttaggggctgagagtagggtgacggtttgaggtgaaggcagtggttacaggtgaagggtggtgttaggggctgagagcaggtagatggtttgaggggaagggtagtgttaggggctgagagctgggcaatgtttagaggtgaggggaggtgttggggctgagagctgggtggtggttagaggggaagggcagtgttagggctgagagccaggtgatggttggaggagaagagcggtattaggggcagagagccaggcggtgtttaggggctgagagcaggtagatggtttgaggggaagggtggtgttagggctgagagccgggtgatggttagaggtgagaggagttgttagggctgagagccaggcaatggttagaggtgaggggcagtgttagggctgagagcaaggcagtggttagaggtgaggggcgggtgttagggctgagagccgggtgatggttacaggtgagggaagttgttagggctgagagccgggtgatggttacaggtgagggaagttgttagggctgagagccgggtgatggttacaggtgagggaagttgttagggttgagagccaggcgatggttagcggtgaggggaggtgttagggctgagagccaggcgatggttggaggggaagggtggtgttaggggctgagagtcgggtgatggttttgagggtaagggtggtgttaggaatttagagtcaggtgatggttagaggtaaacggcggttttaggggctacgttgtctcctctccagaatttctatattgaagccccaccccctaagacatcagaatgtgactctatttggtgttgaggtaagaaagttaaaacgaggttgttaggtttgtcccgaatccagttggacttctgtctacatgaagaggagctcagcacacaggcatgcacagagggaagaaagaccacgtacgggtgcagggagaaggtgccatccgcacaccaaggagagaggtcttggaggaaaccagtcctgcccacaccttgatcttagacttccagcctccagaattgtgagaaaaggaattttggttgtttaag

SEQ ID NO: 22276 - DNA, 1459 bp, Artificial sequence
  DNA replication origin
ctctgatatgacaatgtgtactcctgttctgcccctggggattgtccactcaatgggtgggcacgagaaagagcagatgaggtgtttgtggtaaagcctaagccagtgcagccatccccgtcgccatggcaaccccagcgcggttggggaggacccgctcctccggcgccccctcccattcacgcagcggacgtgacacgtgcggcggggtcacgtgttgttgttgggccgggaaagctgcttccgggtcaatgcaggacactgggctccggcggccagagtgggggactaggtgaagcggcgccgggccggggctggccgggaccaggcccgaggctgagcggcggcgacagcggtggccgggaggggggaggagaggcgcagccagaggagccgccgcagtagctcccccgcctcccgggctgaggggtgagtggagccgggcccgctggctctgccgggctctcgaggcccgaggcgttcccctctggagccgaggcgcggagggtcgctcctgcagggtgctgggataggacactcggggaagggtgaaagccacatggggcctgtctcgagcagctgtggggatgggagacctgccctggggctagagggaggatggggcctgcctggcctgggctatggcggagctgggagggtcttgggctgggctgggctgggctgggctgggggactggtcccgggttggaggagggcgtgttggggagcctgcccgggttcctgggagaatctaggcgtctcaccttgccccagcgtgggggatgggtagatgcctcccagctgttagaagagggagacgtgtctgggactgctggggaaataggaaacttgtctctgaactactgaatcccagaaaagaggacatgtccccagggaggtttgctgggggaaggacgggcatgtctaggcccttgggacattaggcctgctcttaccaggggctgataaaaggatgtggatgtggtaattgaataagggcttttgggagaaaagatttgccccaaggttgggagactgagaacgagggtgttggactgacaggcgggtgccttgtcgtgggatcttgggggaagtaaggatctgtgtggagcttctctgttgagttctaggtccgctagtaggaagacattctgggaattggtgaagagaggagatttaatagtcttttcttgggacacagtgattccagaagttgtagttgaggaaagttggttggaagtgttgaactgtatacagtcagtggagaaaggaggagctctactgtgaaggttgctaggctacaaagagcttgtaggcaacgcctagggctgttgagagaagttggtaatgctttcaagtccaaatacaggctgagctggggcttgtcccttgttcatgtcatgctgctgtggagctcttacgtttccagtagtctatcttgagcaaagagtatgaatag

SEQ ID NO: 22277 - DNA, 1397 bp, Artificial sequence
  DNA replication origin
ctcgaattccattgtgcacatctgcccaaaatggggcgacgaaggctctcccatctgtcaggggaaaggattctggcgtgaactggctcactagcacattgaaggaaacaactccgttgttattgacctacgaaaataagagaggttttgcacagtggatctgaaaccataacaacttcagagtcacaaaccaagacagacattcgcctaactgtatgaatgaaaacaacttttaaactactgaattagaacccccaaacaccgggttccattgctcagactaagaggttcgtttacttccagacaaactcattggttttctttcacattagatttgtaaccagcttcatttctgattaataatcagtctcattttcatgttccctatcctgtctctattacacttatcaaatgctcctgagttgtgcttctgtgtgtgtgtatgtgtgtactacaggtgagatgtgcatgtgtgtgtactgaagggtgtgtgtgtactggggtgaggtgcgtgagtgtgtgtttgtgtactgaggtgaggagtatgggtgtgtgtgttctggtgatggtgtgtgtgtgtgtactggggtgaggtgtgtaagtgtgtgtgtactggagtgggggtatgtgtgtgtgtattggggtgaggtgtgtgtgtatactggagcatgtgtgtgtactggagtgggctttgtgtgtgtattctggggtggggagtgtgtgtgtatacgggggatgtggtgtgtgtgtatactgggatgtgtgtgtgtgtgtgtactgggggtggtgtgtatgtgtgtgtgtatattggagtgtgtgtgtactggggtgggcagtgtgtgcatactggagtgggtgtgtatatgtgtatgtactaggggtggggtgtgtgtgcttactgaggtgggatgtatatgtttgtgtactgggcatggtgtgtatgtgtgtgtatactggggttggtgtgtacatgtgtgtgtactgagggtggtgtgtgtgtatgtatattgaggtgtgatgtgtgtgtactgggagtggtgtgtgtgtgtatgtgtgtactgggggtggcatgcgtgtatgtgctgggccagacagggagtaacatgggtactaaagacagattcagggtcactaatacaaaataagcaggaaaaataaataagcatggaagtaaagttaaatttgaaaattgaggtgccctatgttagggcttgcttcctattttatgacaaaagaggagtgtcagagaaagataaatcaaatactccttcatccaactccagtctctgatgaaaatattctgctttgggtgagacatttaaaagacctccactgatgtcacaaccactcctgcactcagagcaaggacaaggttaagacctacagatgcccagttc

SEQ ID NO: 22278 - DNA, 1956 bp, Artificial sequence
  DNA replication origin
ttctcctgacttctccaaccccaccaactccaaagaatatccacccatgagaatctaagacacaccactcggaggtacacagcacttgggatgcaaacatgtcacccccattccacagtgcagcacctaaactcccttactggaatcaccctccagtttccccttgctcttgccccaaacaccacggcccctgctctgctccttctccagatccagtgcttccaaagccccagtcctctgcctgcactaaccctcctccttcaagtccaaaacatcatctgtcctgtcttctgactcttcagacttgtggccttagcagttgttcaccacaacccacaacaagcagaaaggaagtcagaacccacctataggcatctgtgtactatggaagaagctggggaagaagagatggagcctgcctataggtatctgtgcactaggggaggagctcgggaggaggagatgaagcctgcctataggtatctgtgcactaggggaggagctggggaggaggagatgaagcctgcctataggtatctgtgtactaggggaggagctggggaggaggagatgaagcctgcctataggtatctgtgcactaggggaggagctggggaggaggagatggagcctgcctatagacatctgtgcactaggggaggagctggggaggaggagatgaagcctgcctataggtatctgtgcactaggggaggagctggggaggaggagatggaacctgcctataggtatctgtgcactaggggaggagctggggagatgaagcctgcctataggtatctgtgcactaggggaggagctggggaggaggagatgaagcctgcctataggtatctgtgcactagggaaggagctggggaggaggagatgaagcctgcctataggtatctgtgcactaggggaggagctggggaggaggagatgaagcctgcctataggtatctgtgcactaggagaggagctggggaggaggagatggagcctgcctataggtatctgtgcactatggaagaagctggggaggaggagatggagcttgcttataggtatctgtgcactaggggaggagctggggaggaggagatggagcctgcctataggtatctgtgcactaggggaggagctggggaggaggagatggagcttgcctataggtatctgtgcactaggagaggagctggggaggaggagatggagcctgcctataggtatctgtgcactacggaagaagctggggaagaagagatggagtctgcctacaggtatctgtgtactaggggaggagctggggaggaggagatgaagcctgcctataggtatctgtgcactaggggaggagctggggaggaggagatgaagcctgcctataggtatctgtgtactaggggaggagctggggaggaggagatggagcttgcctataggtatctgtgcactaggggaggagctggggaggaggagatgaagcctgcctataggtatctgtgcactacggaagaagctggggaagaagagatggagcctgcctataggtatctgtgcactaggggaggagctggggaggaggagatggagcttgcctataggtatctgtgcactaggggaggagctggggaggaggagatggagcttgcctataggtatctgtgcactaggggaggagctggggaggaggagatggagcctgcctataggtatctgtgcactaggggagaagctggggaggaggagatgaagcctgcctataggtatctgtgcactaggggaggagctggggaggaggagatggagcctgcctataggtatctgtgcaccacagcaggaggtgaggaggaggagatgaagctgaaaagacagattccagagggacaacaaggcattttcgaggccacaacctccgcaagagtgagctctgagacaatgtgtaaatacagt

SEQ ID NO: 22279 - DNA, 1240 bp, Artificial sequence
  DNA replication origin
cagtggaggcaaggaattgcaattcagaaatacattgttacttggctgcctctgctcttattgtacaccttgaaggtgaagttaattaagtcctgttgtggggtttgagggccagaatttaatttttggagctttctttcatgttgggagcagattgggtaataaaataaaatgtatattgagaataagacggccttctgacctttcagggtctagggctgtaaagcgtctcagggttgctgccgaacgagccatgaactgggctgggtttttcatatttgatgaaaaagagcctaaacgctaactgatttgggaaaggtcagataaagaaaaaggagcattaaccttgactatgcctttagatccagccacctttttaggaggaaattgctgggcaggtgggggaaggctagtcgcagaacgaaactgtaagctggaccgggtgtgaggaggggaggtgataaaaggattatagggtgggggagcagagactgagcagagactgaggaagaattgggacctggctcggcctggcgaggaggggagaggtcagatgggtctgtagaaaaggaagattaggaagactcagtgacgcttggggttgggactgaggggacaggtgggagggaaaggaggaggatctgggacgagttgcattgggaacagagactatggagggaacaatgtataaaagaatgcctggacgtcaggcacctcagaccatttgcccattttacgacaagaattatttagatcttgtaggatggaaaaattgaaagtgccattttctggctatttggaaccactgttgagtttatattggggtcaagcggcattgcagaagaagataaggttttaaggccaggtgtgagttgaagaggttttaagttcttgagaacacaggctaagggagaaggaggaatggagggtggaaggttgcctatagtgaaggaggcaagcccagagaaaagagagaatagagacacggagggaaagggttcaggggttcttaccttccaggaaagcgggaaaggggttggggcgtggaaatgaggggttggggcacagagataagaggttgggccacagagagaggtcggggcatggaaataagggattggggcacagagatacgaggttggggtacttgcccctcccccagaaaagcgggacttgccgctaagggtgaaggaccaaggcaggcgtccctgcctggtctgacacctctgaaacgtgggtg

SEQ ID NO: 22280 - DNA, 1587 bp, Artificial sequence
  DNA replication origin
cttcccccgcacccccgcccggagccgagtcccgggttgccagcgcgcccatcccgcccccaacaggtctcgggcagcggggagcgcgctgcctgtcccgcaggcgctgggaggcgagccggagcgaagccgagggccggccgcgcgcgcgggaggggtcgccgagggctgcgagcccggccacttacgcgcgggctctggggaaccccatggagaggagcacgtccagcgccgatccatgcttgatggtgccggggcgctgttggcggttcctccggggggtgactttgctgtacagctcctctctcgcagccatgccgagcggactggggtggccgtactgagccatggctcagcggccagccatcgccagggaaggagcccgagccggatggttcgggaaggaggagggagtcgggctgggccaggggagggggctcggggacccagagccaggcaggaggcggcggcagcggaggcggcgctccgagcttccccagtgtcgggactctgacgcttcctggtgaggccacaggagccagaacgccggcaagcggccgctgcgggaccagcctcagccactcgggcccccggctgcccccagctctgcgcctgcagtagccctgtctcctccgcccccttccctctcctcgcctagcagtccgggaatttgcaatgagtaatttttgaatggatcaaaaaggaaaaggagccttgtgggctggccctgacttgcctgtacccgggccccgcccctctcttaaagcggccgcgctgtccgaggctgctccgtgcgggcaagagctgtagtcgcgctacttggagacggaggatcccaaccttatgggctgcttgtgtgcttcacctcccgagagtcacccccggcgccccagccctctccttggctggcatacccgcccagctgggcctcaagacaggagatcaacccatctcaagtttcatgtgattctagatgcggttattaatggaaattgggtgaactggtggatgatactaatggaccagaaggccaagccgtaaggcctaggtaaaaggttttgcttctcaaagatcctgcaaaacccaaagggttgttaggaccatcggaagttgagttcccaatcagccggccaagtggctgcactaaagacctactgcgctctacaaggttatggtcagtgactgaatagtgccttcccggtggggcagaggggttggggagaaggacctcaggttctcagaggtggcaggacctgggaggggacaagaaaagagggacagggcagaaagaagagggaagggaaaaagaaaggaggaaggaggaggagaagaaggaagggctaggagggtagaggaagaaggaacagagaaaacatacttcctaattataagaggtgttcaaaagggaacgggcttatttcattagggagtggatatcctgtcaataaaaggattcaaagacggaccgaatcaccactgcacaataataagtgaattgtatcataggctggacaaaactactcccactgcaaagatggtggaagccacaaccatattgatgccccatgccccacctggtgaatttgg

SEQ ID NO: 22281 - DNA, 1554 bp, Artificial sequence
  DNA replication origin
tggcccagcccgactccctcctccttcccgaaccatccggctcgggctccttccctggcgatggctggccgctgagccatggctcagtacggccaccccagtccgctcggcatggctgcgagagaggagctgtacagcaaagtcaccccccggaggaaccgccaacagcgccccggcaccatcaagcatggatcggcgctggacgtgctcctctccatggggttccccagagcccgcgcgtaagtggccgggctcgcagccctcggcgacccctcccgcgcgcgcggccggccctcggcttcgctccggctcgcctcccagcgcctgcgggacaggcagcgcgctccccgctgcccgagacctgttgggggcgggatgggcgcgctggcaacccgggactcggctccgggcgggggtgcgggggaagacgcggcgcgggggcgttgggccagggctcgccgtgggatgcctaaagctgggggacgagggcgcggggttcgagtcccgggtatagtgctcagcctccgccccagccgggtggagctcagcgtttctctcgcgcgctcccctaggtctccagcgccgagcgcctagggaggcggggccctgcggaggactcgggcaccctctccgtctggaatactgggctggtctgggatcctccggtgtctgggaaagggcgggagactgcggggcagggaggccggcgcccccgttgcagcggcttccagctccggatgtcgctctcgggttcggtctccccctggagtaggaggagcgggagcgtgggtgttcctgcgtgttcattgatggggaggatggaatcagaaggagaagcgatccctccaggggacctgggttctcgtcagtggtgacggcagctcagaaatctgtgggtgcctgagagtaaggagggggagctgttcttcatccttcctctaggagagtggggtaggggagggcagggagagcgcaggtggctgcccctggagcctgctggggagaggcctgtttgccagcatagggtggcggcggccggagtcgtctcaggccggtcggctcaagtctcaggggctggaactctgcctaagaggaagccaaggcccagcggccaggcccttctcccctggttaatccctgccgtgcagatttcttaggtggggacacaaggcctggcgtccggactgggcgcagcttcttttcatctttgaattacagcacctgaacaggagagttggccaaacttaatcagtgagggccaagtaaatgaaagtcctttttatttttttcccttctcacatttttttttcaggtgataactttatttatgtatttatttttctgagacggagtctcgctgtgtcgccaggctagagtgcagtggcgcaatctctgtaacttccgcctcccaggttcaagcgattctcccaccttagcctcctgagtagctgggaccatagacatgcgccaccacaccgggctaatttttatatttttagaagagatggggttctgccatgttggccaggctggtctcgaactcctgacctcagg

SEQ ID NO: 22282 - DNA, 1079 bp, Artificial sequence
  DNA replication origin
agcgtgatggagtaagcggcagagggcctgaggggcaaggtggcgtggcaggcacgagtaagtctagcagggctcttggaagaagcagtttccaaaggagagggccccatattggcaggcaggaaggtgcagggtgctcccttcttcctcacagaaaacccctggcgaggaagaggtgtgatttgatcagggtggctgcatcagacaggcgttcagtacctttcccaccagagctggtgctgctcaggagctgagccaagtcagggcctcatgcagcccagctctcctgcctgtgagggagacccaggcgtcagtgagatgtcccttttgaatccagcccatgcacctgggcccctttacagcggttctcacttcaccagcacctccccttcccacgcaggcttcctgttttgaaaccaccaatagatggaaaatgtgagtactgccgcttgaatggctcaggctgtgtgtgtgtctgggtgtgtgaggttctgtgtgagtttgtgctgtgtgagcctgtgtgcgcacataaatgtgtatgtgcaaatgtgaatttgagtgtgatagtgtaggtgtgactgtatgagcatgtgtttgtgcatgtgggtgagcgtgtgactgtgagtggttgagtgagtacatggacacgtgttgtgtgcatttgagcatgtgtatcggtgtgtggctgtgtgagtgcctatataagtatatgatcatgtgtgtgttactgtgtgtgttgcatgagcatgtgtgcctatctatgagctcgtgttgtgactgtgatcatgtgatcatgtctaagagtgcctgtgtgggtgtgtgactgtgtgtgactgtgtgtgagggtgtttgtgtgcatgtgttgtatgagtgaccatgtgtgtgacaacgcaagtgtatgatcaaatgtgtgtcactgtgagtgtgtgttgtgggtgtgatcacatgtgcaactgtgtgtgacctgatgtgagtgttttgtgtgtgattgtgtcagtgtgtgagtgatcacatgtgtgctatatgagtgatcatgtgtgtgactgtgtgatcgtgtgtgattatatatgtgtgtggcc

SEQ ID NO: 22283 - DNA, 1104 bp, Artificial sequence
  DNA replication origin
tccttttcttcttgatttgtagcagttcctcgcgtattttagtagttttatttgtggcaaagatctcctcccccgggtggcctctgccctccggcgctgggaagtccgggcggcgaggcagcctctcccggggcgttcgggctcctccggctctgccccgatgtcgttattacggccgtttgcagcctccgtgccagggccgggggtgcggttcgggacgcgggatcctaggtcgggtcctgccccgcccatgtggcgccggcgtctgtgttgtctgcggtctccagggcagcgccggggcgggcgggggcccgggcggcggcggcggcggcgcgggaggatgcggggcccgtccgggtcgcggccgcggaggagcgccgggcaggtgacgggcggtggcctcccggatctggggtgggcggcgcgcccggggagggaaacgggaagggcttactggggatggggacggcaggaaaccacccaagcaagctggggaggagccggcgcgggagccttcgggacggagtggggagcgacaagggggcgaggccgcgacaaggggctggggggccgccatgcgaggcttcggcgcccgggcacccagagcagccctgttcccggtcaattaggaccggtcccgggcaccaggcccgccgacttgtcacttcctggacctccaaacgccccttgtgacaggccttgttcctcaggaacaagcaaaggtagaaaaccgaacgcctcccctgggcagcttccggcctgtttcaaaccagggttcgttcctttttctttacgattcatcttggtgagcccaagcagggttccttttcccctccaggagaaagttcgattgtcccatgctagtggactagacccactgcagggatccctggggagctggccgcttcttagtccctaggtgccatcggatctatcgctgtcttgtttattcaggagactagtcacctctcttggtcagaaatttcagcggcacaaccttttttttttttcactggacgggaggagggagccacattcatgaaatttaaacgcccactttctaacttattcaagctgtcagctgttccttcttccaccccatgt

SEQ ID NO: 22284 - DNA, 1103 bp, Artificial sequence
  DNA replication origin
cctctgagaagacgccgggtgtagaggagaggtgaagttgagattcatcttgagcggagcacctgccacaggacaagggccgggacgaagtggaggacgcaggcagagtctccaagcctgctcgaaagccggcaaccaccctccgaggctcgaatctccgctgctctctcccgggcctgggctaccccgggcgctggagaggcaagaagacaagctcctgggtaggttgggtctctgtgttggagaattggcagcttggagaggggggccgggagagccaatgacgaggctgccagaggcagaggggagggtgcgggaggctcggggcggggcggggagctgtccgcggtgctgaacaccaccggccgagcctgggaacaacagagcccgcagggttcttgttcctaccaggtttctcgacctcaatttctgccccgtcactgcaggggctgctttgttcccagtcgtttttaaaagaaagccaaaaggaaaaagtctctgttgtccggcaaactcctctttacagaggagaaggcactaaaagggccccaaagcaataatggataaagcacttattcaggcatttaggcctgggttttaagagtttccataattttggtggcaaaaaaagaagggaggaagtgaggagaaagggcatctgatacttcagattgctagattctacttaagtttatggctgagggaagactggattattaaggtaaagaaagaaaatgatgatggtcatcacaacagtctttacctcagttataggcagtgggcaggaggagggttatgtctacattagtcaagttatttggtctgtgtaaatatgtccagagtcacctcttagtgccatcctccatgtcgcctcaaatctttgctttctcctcatttcactcacgcggcttgctatttctgctgttactctttcaaccctagccccccgaattaattgtactaggtttttgtttcccactccttttcccagcctgtttcctttcatttccgtccctcccaatcttttgtttttttctgtttgtctttttctaatctgtcacatttatttccctggagtcaatttgctaaaattagggtgatca

SEQ ID NO: 22285 - DNA, 969 bp, Artificial sequence
  DNA replication origin
ggcgcagtggctcatgcctgtaatccaagcactttgggaggcggaggcgggcagatcacatgaggtcaggagtttgagaccagcctggccaacacggtgaaaccccgtctctactaaaaatacaaaaaaattagccaggcgtggtggcacatgcctgtaatcacagctacttgggaggctgaggcaggagaatcacttgaacccgggaggcagaggttgcagtgagctgagatcgtgccactgcactccaggctgggcaacagagcaagactctgtctcaaaaaaaagaaagaaagaaaagaaaagaagaaagaaaggagggagggagggagggaggaagggagggaggggaggggagggaaggggagggaagggaagggaagggaagggaagggaggaagaagggaggaaggagggagggaggagggagggaggagggagggagggaagggagagtgagtgctggggaacgtggccccggtccacatcctgaagaaccttgagtgttcatgcaggagtctcctcttgatcttgtaggcagtggtaaggccactcaagattaagtagggcagtgctttgcaaacttctccatgagtgcttctaaaggcagaggagtgtacatgcggaccttggagatttgggacatagcccagaacaaattgcatttctttaaagtcttgctttagcttaaaaatgcatataaggccaggtgtggtggctcttgctcttaatctcagcactgtaggaggccgaggcaggcggattgcctgagctcaggagttcaagacccatctaggcaacatggtgaaaccctgtctctgctaaaaatacagaaaattagctaggcatggtagtgcacacctattgtcccagctactcaggaggctaaggtgggaggatcacttgagcttaggaggcaaatgttgcagtgaaccgggatctcaccactgcactccagcctgggtgaca

SEQ ID NO: 22286 - DNA, 1269 bp, Artificial sequence
  DNA replication origin
cccgcctctgcacggccccaggtctcccccggccctccctgcccggccagctcacgcttctccccgaccggcccccaccgcaaaccccaaacgccgcgcgggagggagggagggaaggagggaacagcgagagagagagggaggggctgcggtaggaggcaaccatgtggttccagctgaattttttttttccctctctctttcttcactcctttttctttccaaacagggaaaagtgttccacgaagcggtagcgccttttcgcctcgcgttttcctccctgaccctggtcccggctcccgtccgggcgccagctggtggggcgagcgccgggagcccatctgcccccaggggcacggggcgcggggccggctcccgcccggcacatggctgcagccacctcgcgcgcaccccgaggcgccgcgcccagctcgcccgaggtccgtcggaggcgcccggccgccccggagccaagcagcagctgagcggggaagcgcccgcgtccggggatcgggatgtccctcctccttctcctcttgctaggtgagtgcctctgggagggcgggagtttggatggccgtgggcaaacgcagccctgcgtccgggaaagacgccggttctgaccgggtgtccctgcagcccctggagtcagccggcttttcagtccctgcctcctggccacggaggagcacatctggcaaccgagggccgcccagtcggccatcgagattgtctcgcacatctgggcccttgaacaggcttggggaaccgtttgatgtgcagggtcctctttagggcggtgtttagtttctggtgtatctgggaaaagtggagaattggtggagggaaggtttatccaggaatttttgtgccaggttcctgagggtgggggttttttgttgttgtttcaaacaggcgcctccgaggctcagattagaaacagatgtgttaaagggtgagcagagtgggggataggcagggttggagaggaaaggggagagggaaaaagggcagggcccaaggagcaccaggaagatgcaaatgccccaagtcacacagggaaggaaggaaaaggggaaaggggaagggttgggaaggagagagaaaaagaggagaacaggaatgtaaaacagaagagcaaggctgggggagtccgagcacagagagtgaagaagacttggaaaaaacgcagcagaggaaccagaacagagggaaatagagcaagcaccactttttcctgaaacaggctccagagcaaagggaagagtc

SEQ ID NO: 22287 - DNA, 860 bp, Artificial sequence
  DNA replication origin
gggcagactcccaggggccgaccctggggcggggctgctcggctccgcggaacccaccgtccgcccccgtccggccgccagcctcctgccctccgcgagcctcctgggccgggttcccggagcccgggcgcgcaggccctggcaccagggggattctgctccctctgccttatgttctttctgaaagggggtggtgcacattttggccagggccacgtgcagagcactttgctgcaaagcatctcgatagacctctttccacggggctgtgggtccccttcccctgggtgctggctggcttagctctgctcgggacctgagggagcgctgctgcaaataccgacagtagaaagcgagcgaacgcgaaaggccccaggaaagccaggccaaggggggtagccgggtgccaaagcaggcagtcggtggggagagccctggtcggccggccgctggctgccttcgcacccacttccgcgccccgccgtcggcctggtcagtctggtggctttacactaacagaaccagacggggagggagaggagaggcgagaagagcgcagaggacagaggggagagggcatgaggagacgaggagggagaggcaagaatgcgaacaaggagacctagagaggaagagatggaagagagaaacgccagatttgtgagagacgtggaagcagagagaaacgagagtaaaaaagaagcgagagagaagtggagagaaggaccaagtgagagcagagctctaggaacggacaaggcctcgtccatgggctctcagccgaggtgtcaccaatgcctcctgcaaagaatcaatcctacgcccggcgcctctcaacccacccgcctctgcacggcccc

SEQ ID NO: 22288 - DNA, 1155 bp, Artificial sequence
  DNA replication origin
gcactaccttaaaaacattatgctcagtgaaagaagccagaaaacccggacaaatattgtatgattccatttgtatgaagtgtctagaataggcacaaatctatagtgacagaaagtagaatgatgattgtcaggggctgagggaggagaaatggagagtgactactcctggatatggggtttctttttggggtgatggaaacattctggaattagataatggtattggttgcacagcctcaaaaatatgctaaaagccattgaactatatactttacaatggttaaagtgatgaattttatttatgtgaatcatatctgaaagaaagaaagaaaaaaggaaggaaaaaagaaaggaaggaaggaagggaggaaggggggaagggagggagaggggaagggagggagggaggaagcagggaggaaggcggggagagggaggggagggagggagggggagtcagatcatcagcttgttgatagagcgctctggggaacacaggtgttgcaagtggtcaggtaagtagtgaactgagaggctgccgggagcagaggcccagctctgagggagagctgtcttaagcggccatgctcgtttaaaatggggaaaggaactggaaattgcaaggcagggcccaacccatataccagaactgggcattagataggcttcctaaactagagctaggaggaggtgtcaaagcagaggcttagtcatatcaacagagtgaattgtggggggaatctgggtaaggaaggtgaggcctggagctgcatttacaggacagaggagccacaccagggacaagtgggtgcaggcacaagggagctcagggcccgcagggactcactgaggccagtattacactaaggctgagcattctaggacttggcctccatggactggtatagctgagcctgctccagcacattcttactcagagttggtcaagatttttggagctgagcatataggaaatgaaactaatgcctcagctggggctaggggttgaggatatggggagggtagcaggctgagacctccaatttttcccactgtaaagctttgtaatctattacaatgcaaatgccactgaaaagttaagtaacaggccccaaatcacacaggtagagaatgaaacagcagccggacacg

SEQ ID NO: 22289 - DNA, 1359 bp, Artificial sequence
  DNA replication origin
gcgccggcggcgaagcgtgggggtcgacgaactggaccagaccgggctgccctcgggcgcaccctgcggctcgggcacctgcagggcgggcagcggccggttctccatcatgttggccgccggcatgggggccgtcgcctctgcgctccccctgagccctccgccagcggcctggttcgcgtctccctctggctgttccccaccctcggccccgcggcacactccccaatcctggggccgaaggaacaagttcctttcccggagcgcagcgaggaagggacgcgaggggacgcggcgtagcgcgccgccgcccggagtctaacttttcggagcgcgcgtcctccgggccgtcagccgccggcgaggccacccgggaggggcgggagccgcctgccagccactcggcagccctcctggggctcccctcgcgcgcccgcttgtttttcttccgctgcgcttcctcgcttgctggcgtctttgccttagcgggactcggcagccaggggccccagggggcggtgcagcaaactctcagcggtttgcgttcagcagaccaggttggggagccggcttggcgctgcagggaggtagagagcgggaggaagaggcagtggtaggagggaaagggagagagagacagagagagagagagagagaggaagcgagacactggataaaaacaaaaaaggaggaggaggagcgggggctgggggcggggtgaggggggctatcctgaatgggctagcactggcagcgaccgctagtgtaactgtacacggattccctcggggagggactcgacctccaagtaaaggctgctccaatcagcctactgaaataggatcacaaaccaaactttctcagggcaacgattggccaggcaactcccattagtcgaactcggctatttccttgggggtggggggtgcagagaaaggggagtcaatgaattcagtcctcactctctcaggccacccatgatacagggttgaaggaaaatgaggagacttttcaactagctcttgtctcctaagaaaggcagtttaaattatttgggggcgtgagtagtggcactgcaggccggagtatagtcagaggaggaaagcaaggttgctggaggctgcttccaaaatgacaagctgagaagaggacagttctcccgtggcggcgtgagctgaggataccagacatgacataccaaggaaagacagacaacagggtctgagagacaaaggacacaggaccagtaaggaaaatggggcctgaaccctgtacatgagccagctgccagtaccatagccgcgtccctagcaaagaatgaaatgaggagtcggtgagcacccacaaagcaatgcatcc

SEQ ID NO: 22290 - DNA, 1172 bp, Artificial sequence
  DNA replication origin
agaccagggcaagcagagaaggtggggcatctcacctggtcaaggagcatcactgaggatttgatgatttccctccatttttggagctcagtatcgtggtacttttgttgggactctaagagctgggcccattctgtctgagactggggtaacctgtggggtagaagaaggggtaccccagcagctggagttatgctcagcgaactgtcctgggctcccagacccctaaaggacagagagtcacatcagagtgctttgtcctctgctcactgcccccggttcccctgtgccccagatcagaagtgggctgaaactatagggagagattctgagtttccctgtgggctcatcccagagggatggggaagggcagtgaggcagtcccaaggagactgggagacaggtatcatggcactgggtgggatgaaggtggaggtgaggggacgaggccaggattacctttcttggagccttagaccctgccaggcagtgagggtctgcgtggtgtattccaacatccagagtttgtagaagagcatcatgttaaggatgaccagcagcaccagactaggaaggagacgtggggaaaaaaacatcagcagtgagatgtcacctgagcctaggacatcccccatcccagaggctgctgtccctgaccggtgggccatccaaagcattgcagtgagtgactgagctggagggatggagcaagggagagagagagagaagcaacctaatctggatgggccaggatacaggggagagccatggagaggggcatgggatgaaggcactagaaaggagagatgcataggcacccagaacctgggcacctgggggaagagaggtacggtggggaggaaaagagatgagggggtaaaggagaaatcatagagccagtacctgaaacagatcctaatgggagcaaggaagaaaaatggggaggaggcagaggttagaaacaggcaagtgtggggaaggggaaacctgcactgaaaatcaacctgggagtgagtgagagtatatgagaaaaaaatactagaagcaaagacacaatggatgagacgacccagcaaggacagggcacaagaaaacaacagacagactcttagtatttccacgggtgctaaattgagaaaagactccccctaccaacccaaccttaggaccta

SEQ ID NO: 22291 - DNA, 1045 bp, Artificial sequence
  DNA replication origin
ccccaacctctgacatcgccggccgaacgggagctgccgcttccttcccggccccgctgcacctccccagggagccgagggcgggcgtggacgggaccgacgtggaacgcattctgtagcccagacgggcggccccggcggcttcgggagtggggtcacgcccagctggagaagcagttagggcggacgaagcaggagccgcggggctgggaggattccagtcggaacgcaaccgatcctggggaggcgagaggtgaatcaacctggacccttccacagcctggctgctaggccagcagtgcgactcccttccgagctgagcttaccctgggcgcaaacgagcgaggcaggggcgcgagtggaagctggagttccggggtgggcggggaggcgactgtccgtggtgctgagcgccggcgagagcgggcgcggagcggctgatcggctccctcgaactggggaggtccagtggggtcgcttagggcccaaagcccccacccggctccaaaagctcccagggcctccccaggcaccggtgctcggcccttccttcggtcagaaagtcgccccctgggggcagttcgtcccaaagggtttcctcgaaagaatctgagagggcgcagtccttgaccgagggaatctctctgtgtagccttggaagccgccagccccagaagatgcctgccttcaatagattgtttcccctggcttctctcgtgcttatctactggggtaagtaccagcacctcgccatgccggatgcaggtaacagtaacaatgctaacaataataacacattgatgtcgttggtgacagaaaagagctctggctggcttgcctctgtgcgtatctgccagacatggagatggcaggggttccatgagagctgggattttgagatgggaaaggcgcctccccaccgcccttccccgctattctccaacctcctttggtggttcttccgcccttcctccagtttcctgatcattccaaagtattttttccctttccctttgctgaaaggaaatgcagtcacgttcacgaa

SEQ ID NO: 22292 - DNA, 911 bp, Artificial sequence
  DNA replication origin
tcagacctctggctttgttctctggcctctcaaagttagaaacctttgctggagcagctgagatattcctggaccattggccatagcactctgatgggtggtgccagccaaagtacttcactggggcagtagcagtggaattcatgttcattcatgtgtgccagcaatagcggcagtgcggcagggtactatgctcatcacctgtggtagggtaccagtgggagtggagctgtggcattcctattcatggtcacattggcaatgcccgtggtgggggcaggctgctgttgcacacagggctgccagcctctgtgcctgtgtttgcagtagcaggggtggtggtggcgtatgcgggggttggggttgtcattgtgtgtgtgttcatgtcagcagcagcagctgtgttgggggagtggggttgctggcatctgtgtgtgcatttgtgctgaccatggtggcacagccaggggtggggtggcctcataccagtagcagtggtgcagggtgcatgtgtacacatgtgccggtgagtgaagggagttgaggtctacccactgtctcacatgccagcaatgtggtggggaggtggctataggtgagtgcatgctggaagagtggcatgggagaggctgcagtcggggaacagtgtgggtgggatagtacatgatggtgggagccactcttttggtgcttttccatggtcagatgcagtctgccagtgagggagctgtgataagggcactcaggaaacatcttgattgggtatttgaggctgcactgtaagcatgcatggccaggctgtggtcctgggggtgggggcagcagacggggagttgctcagattgggctggacccatctcacaggcaagacaccctgctctgttcatgtccaataggccccctaaggctaa

SEQ ID NO: 22293 - DNA, 941 bp, Artificial sequence
  DNA replication origin
cccaggctggagtgcagtggcgtgatctcggctcgctacaacctccacctcccagccgcctgccttggcctcccaaagtgccgagattgcagcctttgcccggccgccaccccgtctgggaagtgaagagcgtctctgcctggccgcccatcgtctgggatgtgaggagcccctctgcccagctgcccagtctgggaagtgaggagcgcctcttcccggccgccatcacgtctgggaagtgaggatcgtctctgcccggccgcccatcgtctgagatgtggggagcgcctctgccccgccgccccgtctgggatgtgaggagcgcctctgcccggccgcgaccccatctgggaggtgaggagcgtctctgcccggccgccccgtctgagaagtgaggagcccctccgcccggcagccgccccgtccgagaagtgaggagcccctccgcccggcagccgccccgtctgggaggtgtacccaacagctcattgagaatgggccatgatgacgatggcggttttgtccaatagaaaagggggaaatgtggggaaaagatagagaaatcagattgttgctgtgtctgtgcagaaagaagtagacatgggagactccattttgttctgtactaagcaaaattcttctgccttgggatgctgttgatctatgaccttaccccaaaccctgtgctctctgaaacatgtgctgtgtccactcagggttaaatggattaagggcggtgcaagatgtgctttgttaaacagacgcttgaaggcagcatgctcattaagagtcatcaccactccctaatctcaagtacccagggacacaaacactgcggaaggccgcagggtcctctgcctaggaaaaccagggacctttgttcacttgtttatctgctgaccttccctccactattgtcctatgaccctgccaaatcccca

SEQ ID NO: 22294 - DNA, 985 bp, Artificial sequence
  DNA replication origin
agagagcacagggtttggggtaaggtcatagatcaacagcatcccaaggcagaagaattttgcttagtacagaacaaaatggagtctcccatgtctacttctttctgcacagacacagcaacaatctgatttctctatcttttccccacatttcccccttttctattggacaaaaccgccatcgtcatcatggcccattctcaatgagctgttgggtacacctcccagacggggcggctgccgggcggaggggctcctcacttctcggacggggcggctgccgggcggaggggctcctcacttctcagacggggcggccgggcagagacgctcctcacctcccagatggggtcgcggccgggcagaggcgctcctcacatcccagacggggcggcggggcagaggcgctccccacatctcagacgatgggcggccgggcagagacgatcctcacttcccagacgtgatggcggccgggaagaggcgctcctcacttcccagactgggcagctgggcagaggggctcctcacatcccagacgatgggcggccaggcagagacgctcttcacttcccagacggggtggcggccgggcaaaggctgcaatctcggcactttgggaggccaaggcaggcggctgggaggtggaggttgtagcgagccgagatcacgccactgcactccagcctgggcaacattgagcactgagtgagcgagactccgtctgcaatcccggcacctcgggaggccgaggctggcagatcactcgtggttaggagctggagaccagcccggccaacacagcgaaaccccgtctccaccaaaaaaatacaaaaaccagtcaggcgtggcggcgcgcgcctgcaatcccaggcactcggcaggctgaggcaggagaatcaggcagggaggttgcagtgagcagagatggcggcagcacagtccagcttcggctcggcatcagagggagaccgtggaaagagag

SEQ ID NO: 22295 - DNA, 1275 bp, Artificial sequence
  DNA replication origin
gctggggattcgatccttttctcccactcacgggtcccaccccgccgcctaggggccgtgttcattacctttgaaaatgctcagttcttcttcggtccagggcggggcagaagggaggatgcagagggagaaacaggtgagctcctggaatccgcgcaaccttcagcctcttcccacccacctcccatctcggatttctatcccccaacccttagctccctccacgccccctgcacctccaacccgcccttattctccccctgctcctggggagggctggggaagggcagctgtcagccagccgcgcgccgcccgcctcacctggcctagtctccgctggggccgccgcccgcgcctccccgggccaccccagctccgccaggccccccagggcccgggcccttccggccgcgctctccgctctttatcttcttccgcgccatgtggccccgaaaactcgcctggattttggcggcggccgcgttggcgccgggatcgtccagcgggatgtctagaatgtcgtcgtccggcttggagcaggcgttctcctgggggcgaagcaggggggttcttgtggggtcactgggtcttgatccgcgggagtggggtaggaatagagccctgagggacagggactatggcgacgcgggggtgggaggtacagagaggggtgtcgagcctggagcagggctatggcagggacactcactggggcatgggcagcgacaggcgaagaaggttcagggccaggtggacagtcatgtctcaattcaggaaagagaagtgcaggcaggattgggtgcgggagagccaggcccatcaccagcaccgagttaggggtctgcagagctgattggagggtgggtttggaggggcaaggaaaacagcagcaggcactcctggagtggccgcctgtccccctgctctcagagggtacctccagctcagaaggacccagtctgagtccagggttttccgtggagaggatggagaagcctcagtccgccagccctctccccagtagaaatgcagaaagctcacagctggaattagggagaggatggggatactagtcagtgagccagcctcccccgacctaaggctagaggcccagagattgttttcccattgactcttcattttccactgcccaaggatgaactcaaacacaggagataggagatgatttggatgaagtgataaagaaaaggcttcactccaagaaaaaaaagaaaaagaaaagaaaatgaaaagacctgcaggagcaagaagccc

SEQ ID NO: 22296 - DNA, 831 bp, Artificial sequence
  DNA replication origin
acctggccctgaaccttcttcgcctgtcgctgcccatgccccagtgagtgtccctgccatagccctgctccaggctcgacacccctctctgtacctcccacccccgcgtcgccatagtccctgtccctcagggctctattcctaccccactcccgcggatcaagacccagtgaccccacaagaacccccctgcttcgcccccaggagaacgcctgctccaagccggacgacgacattctagacatcccgctggacgatcccggcgccaacgcggccgccgccaaaatccaggcgagttttcggggccacatggcgcggaagaagataaagagcggagagcgcggccggaagggcccgggccctggggggcctggcggagctggggtggcccggggaggcgcgggcggcggccccagcggagactaggccaggtgaggcgggcggcgcgcggctggctgacagctgcccttccccagccctccccaggagcagggggagaataagggcgggttggaggtgcagggggcgtggagggagctaagggttgggggatagaaatccgagatgggaggtgggtgggaagaggctgaaggttgcgcggattccaggagctcacctgtttctccctctgcatcctcccttctgccccgccctggaccgaagaagaactgagcattttcaaaggtaatgaacacggcccctaggcggcggggtgggacccgtgagtgggagaaaaggatcgaatccccagcccttccctctgcccaccctcacccctcccagccggggaaaatgcaccctgcccctgcgggttttctgatacatccagac

SEQ ID NO: 22297 - DNA, 936 bp, Artificial sequence
  DNA replication origin
tctttattgttcacattccaacccagcacagtcacatgcacacacggagatcagaaacctttcggccacagccccaggagcccggcgggggggagggcgggaccgacaggggcggggcggggccgtggaagactcctcctaccgagcctcccaggcgctcggcgtttgcataaacaagagagctggagaggctgccctcaacagtgcgctggggaaaggggagggaacgtgacaggcaggtgtgggatagggacttctcttccggtcagagcaagggtcgtccgaaaccaaaacaaccctcttcccttcatctcgccccggatccaaagtcttggggctaggctggggcgggagtggcacggagatgtagggcgccccttttagctgcgcacagaacgaaagaactcgttttttctttaagtgagtgtgcttgggtgacgcttagggcgccctccgcagtgcgcgcaggaaagcgcactgaggctgcggaggcagagctgcatgctgggtgcgggaagaggtgggcgagaagcaaaagaaggaagattgggagcgcatggtttagggtggggtggagtggaagggcaaatggggaccatactagactgcagaactaactaaaagggcacggactcagcgactccgcgacggagcctgcctgggtgagggagtctctgggacgcagggggctcctgtagctggcaggttgctgggcaggagggggtcacaaacacggcagggaagtctcgtcgctgcgaaggggacgcggcatccatctctcctcgggaactgaggagagaaaaggtctgagaacctgccctcttctgctacttcctcttccccccacccttccccctttcagtaccaggattctttgggcggtgagtgccagagggccccagtcacccagaacccccaccccgagtcaaagcgctg

SEQ ID NO: 22298 - DNA, 1170 bp, Artificial sequence
  DNA replication origin
gcggaaaccctttctggccgccgggtgtgtgtcgtagaaaggctgggggagagccggcagcacctgcaggctccaggcgtgcccggcctcagcggaatggccagcgggccgggtccccagggggcgtccagctccttgaggcggggattgtttcctcccgtagagcctccggtctagtggcccccccttcattgtcttctgccttatcactgggtacaaatttcctgcccagaccacagagatcctccaggaaatgggaagggggatgctgcgaaggccaagtaacagaggtgggggttctgtacggcgcagccgggaagcggtgggggaggcttgcatcctggccggatcggctcccagcccttagaggccttcagcctggctctcctagggcgagggtggagagcggggcctggctgcggcctcttcccgcggcgttggccgcctgctcgccacgcggaggtggcgtcttccgctccgaggcagagggccgaggcctggagggagtagggcccgggactggagcggcgatcatcctcaggcctggccgtgtgcaagcccaaggttattccccaaagggcttaccagttggctgctctgttgcctccccgaagggcaaaggatgagtatttctggacgccgtggtgcaaacgatggccccctccttgaaaccaacaccccggtccaccccctgagcgccggacacactcaggggaggcttcatacttgtctagagaccgtcgttcgcgctgcccttaattccttgccacccgagagttctctgcccagatcgcccgaaccccagaagggctccgaggagctttctgggtttcaaccctccgttttccgagggaagcccgcctctgagattgcgcgggagggcggggagcatcgcattcactgggtcaggcttgggcgctgggctgctctgctctctccagctcctggcaagctcagaaggagccgcagggttaataggtaaccagacggcctcccaaacccctccgccctttgagaactcgggagtgagggaccctggcggcccggagcagcatccctactctccctcaggaaaactagggaagcaagtgggctacgtggcgcgtacgacagaaacagtcggtccaccctttcttctcatatcttcccctcctcgctggaaatctgccc

SEQ ID NO: 22299 - DNA, 1946 bp, Artificial sequence
  DNA replication origin
tggttctgacttcggatagtccccaaatttcccacccttcctggtcacccttcctatcccaccccggcggaagggaaggttacggctcaggatagttctggagcctcctcttccccctctactcgtacctggctggctcgtggggcatcagagcttacctcacccctccctgcgtccagacctggaggaggccgcagggtcccgccgtccgcgcgctgggggcgcccccgggcggcggaccccgcgcgccccgcccgggaggacggcgacctctccgccccctcgaatgccccgccccgctgtcgccgtcggtccccaccccgccaccggcacacaggcgcgcagacttgggctggagccgccctgggtgtcagcggctcggctcccgcgcacgctccggccgtcgcgcagcctcggcacctgcaggtccgtgcgtcccgcggctggcgcccctgactccgtcccggccagggagggccatgatttccctcccggggcccctggtgaccaacttgctgcggtttttgttcctggggctgagtgccctcggtgagtgaaacccggacctggaggggacttgggatgcgggatggggtgagttcgaccctgagggagaactttggccactgctgcggaactgggtcccacgactcgccctcctcccctgacctcctaatcccactccagggcatcactggctggcgctgacttctcgctttgtcggggacagcccccagtttgggtgtgggggcggatggcggggggaggtaagggcatctctcggaagacctggatacctctggggtgagttatcggaaccattcctcaccctgtccactccccaccccccacccagcagagccggatgagctgagccgctagatgagacactggctaaagagcttaaggacttaactctagccccctctcatccccgaccccacatacaagctgatgaggaagatcccccggggaaatacccctggtccccaggcttgacacacgcacttcgtgtcaattccccagcgcagatgctctctcttgccccctcctgcttcctgccctgggaatcaagggaggtgccccaaaaggacgaccgtgaggtcatttgggacacaggaaatgggggaggggttcaaacgcacagagaaacagaattgtgaccaccccacccccccaaggcccaccacccttattggtttccagagccaaagggaagaggggaaattgggaggagggtggccaagggtcagagaggaagggaacctccttggagcaagtgtttgggaagtgttgtaggcctccaggggcgctggcttcagctgaagctggggtggctcagaactccatctgggagaggacccggcaggactaggcccttttaaactatttcacttgctgtccctcagctttcttgccatctcccttcaaggatctcgaatgggagtgaagggtgggtttagctatattgactttaactcatttctcaggttggaggatgtcaggacaagtaaggcctgggaagctgtagagtgaaattctacaatgatggggacagagatgaggatcaccagtgtcccctttagcatgttctgtgccccacaggtgtcggggcatgcaatattatagtccttggacaaaatgagtctcaagtacagccccccaggccacaccaaggccacaagtagccttctgtccctctgggcttggtgggcctgctccaggatccctcagacttctcatcccgcctttcccaacttcaacttcagctctgttccttctgcattccaccccaactctatcccccttccttgtggggggtgggggctgggggaatctctgaagccagggaggacagttcaagttgactgcctgagtgtcccaggcttcacctgctgctcatctgcaaccctttgtcctaccccagctttgagcctcagtttgtc

SEQ ID NO: 22300 - DNA, 925 bp, Artificial sequence
  DNA replication origin
cccgggggcgcccccagcgcgcggacggcgggaccctgcggcctcctccaggtctggacgcagggaggggtgaggtaagctctgatgccccacgagccagccaggtacgagtagagggggaagaggaggctccagaactatcctgagccgtaaccttcccttccgccggggtgggataggaagggtgaccaggaagggtgggaaatttggggactatccgaagtcagaaccacccgtaacacctgacatgtaaacgctcctgggctctggctccaaacttgggggtgccgcatccccggcccaatcagggcggtcttcctgaaggaggaagaggggagcagcgttttccagctgcagggagaggccggagcgccggccgcgcgggctccctggcacagcgggaatctgtggctttcctggaggcgggggctgcgcggccaccggagcgcggcagcgagggcgacggcagaggtcgcgcgggagcccagggcgccccgggacgcgccagcggggaatcttcacccgcgggcaggaaaaagcgctccgcgagttcagcagaccccagcccaggctggaggattaccccggcctgtgcctcatactccgagcagggaaggttggcacaaggtagtcccgggagctgagcaggaaactgaggcaacgtgcgtgctgctcccagcttagcccctgaaatgagcggcgtacgggcctgatgctgactggggaggaggggcggctgcgggaaggaagacaggacagtccctccgtttcttctttatcccccaaatcttcagtgcctcccatccccgcagcgaaaggctcaggcgcgctctgatcctttaattcccgagactagatcttggtcgctgtgaattgaattttacgccccccttcccgcgccattcggtcaaaaggcacctctgcg

SEQ ID NO: 22301 - DNA, 1310 bp, Artificial sequence
  DNA replication origin
tccccggcttctcctggtggcctgagcgacggaaatccatcgctgtccgacccttccacgcctcggggtgcctccccgctcgggccgggcagtgcggcgggctcgggggcagcggcgtccgggggtctcgggctggggctggggggccgcagcgccgcctcgtcctcggtctccttctcccctggtggcggcggtggcggggctgcggcagccgccgccgccgcctgccggggcatgtcgtggacgccagccgagacgaacgcgctcatcgcagtgtggggcaacgagcggctggtggaggcgcggtaccagcagctggagggagccggcacggtgttcggcagcaaggcccccgggccagccatgtacgagcgcgtgtcccgggccctggccgagctgggctacgagcggaccccgtcccagtgccgggagcgcatcaaggtaaccggccgcccggcctggggcagcgaaccagaggcagagagaaggcggggaagcgggcctcgggggcgggggccggtctgagggcagggctctcctccggggcccggtgggcgattcgcatctcctccgcctttttcttctctccctgggaagggggctttttcccagatggccgccagcccgtaggtttcctgagtttgaagttgggcgtgcctgccgccgcccctctttcttgccaattgagatgttcctgcgctctgaagttggtagtttctcattgtgcgccgtgcggcagtccccgtgccgctggcgcctcttgcccccaccgccggggcccctcgctttgttccaggcggaggggctcccaggcagaggcttaccggccggggcaggattgaggaagggcagaaggggggggcattgagcccctagtttaggaatagttaataagtggccgtagcggagccatagaaaaagcgccttgggacgactggcctttgtgtcagtcgctttgcttctatcttgagctacgaaggacgagtaagactagagatgctttggagaattggaaaggcttgattgtagccagattgtgtattgttaccgcggagttagtgtacaccataaaagttagcttggccaagagttggtctggaatttggattgtcgatgcctccagagttagattggcttgaggccctgcggtttcttaggaagctccttcaggaaagccagtttttccctgcttcagtttctgtgccggatgtggtgacaagtagaactctcagtgtgcatctggccgtccttgtgtacctgcatgtttaaatgcagaggcttaatttgggctagaaatcttagccaggtta

SEQ ID NO: 22302 - DNA, 1070 bp, Artificial sequence
  DNA replication origin
agaccgaggacgaggcggcgctgcggccccccagccccagcccgagacccccggacgccgctgcccccgagcccgccgcactgcccggcccgagcggggaggcaccccgaggcgtggaagggtcggacagcgatggatttccgtcgctcaggccaccaggagaagccggggaaagcacctccatcttcggaatttttagcggcgagttggcgggcagctccgagccacagggcgcagccatcttccaagcggccgccgctgcaccgcccggaagtgacgcgcccgcgcatccggccaccgcggtctccggggctgccctcgggcctggctcgcccgcgggcggatggctccgggtctctgctgctgaggatgtggctgccgggcggaggtcgtccactcccctgggcctttctccgcgagccctcccacgccgcccgctcctctcccggggcgaagggcggggacgaggcgcgccgaagccccgagctgaagagaagggtgggggcatgagggcgctggagtgaggaacagattggagccttcccacttcctctccaatctcagcccccgggaggaggggtgaggccctcgagggggcccggagttaaggaggaatagaccgtttctctctctcctgtctcccccgcctctgcccgtcttccctctaagccggcctctaggtgcagaggctgacgtccaggatggggaccggggaagcctctggagggtatatccgggaaggcaccaaggctgaagtgagagcggttctggggaaggctttaaaaagcagatatggaccagggtagagttcgtacgctgtagcttttcaagaacaccgatctcattaattaaagaacagcaactatttaattccagttataaactattgttttccagttagtctgggtaggtgtggccgtttgtagaatagttagattacattagtctattgcgttggtacagttgtctatagcttgagcatataaaaactcctgagcccagcagaaaagttactttccaataccagtctccatcctccgtgctttggaagttgcatcgttttccggttt

SEQ ID NO: 22303 - DNA, 1095 bp, Artificial sequence
  DNA replication origin
gcggggagcaggtgtgaagcggggtggcagcggcgcgcggtcaccctccaccgcgccgcggagacccggcgtcacccccacgcgcacacaatggcgcgggggccaggccgaggacggcccattagcggctgatggaggaggcgggagcccggcgggccgcctaatccccgcacgcggacacctgggtgggagcgcgggcgagtggagggcgcgcctgcacgcaggatcccgggctgggcaacggcctagaccgcctctcgccaaacctcccacgccagcgccagtccgacgaacaggagctggtccagcgaacaataaaaggccccggggctggggagggatggaagcgcccttggagcgcgcaggctacgggcgcccccggcagcgcccccgcgccttcccctcccgccccgcggccgctgattgcctattgtgcgtcccctctgcggccgcccgcgcgatgcactctgcgagctggccccttcgtttctaaatgagcagccagcgccgcagacacgtgccaagggaagggtagttcactgcgtggggcggggggacatgcaataagacaagagaccgcacggaaatagctccgtgcccgtctgctgcactgtccttctcacgtgccttcggacaaggggactttcactctctcccctcctctgccccaatcgctctgtctccctgagactgaccaccctcttctctaacccgaactccgcaggggagccttcagccttttattattatttttttcctgggtagtagatgtctttgccttggctgggctctggaatgctcaggtaaaaagtgggtctggccggatgcagtgtgtatcttcaacacggaggctagagaattggatagaggagcagcgctagtctgtgacagctccagacgccctgctccaagcaccccaatcctaagcaccccaatcctctggtatcttccgtcccagggaactctggctggtcgtcatggctttgtttaatgctcctctctgccacactaccgcgttccctgtgggatgggaacctctgggaaaggacctgacaagggaccagaaaaaggtttggggaatcaaagtctagtagt

SEQ ID NO: 22304 - DNA, 1667 bp, Artificial sequence
  DNA replication origin
ctatgccaggtctatactggtggcccggcctggaataggagatcatgtttgcctctcacagaagagacaagggaggaggaaggcagggagaggggaggagggaagaaggaaagggagagaggtagtcattcattttggcagcttctgacttctgagccttttacccatagataataatatagattattaagactagaagggaccatggaggggccatcttcatcttagagatgaggaactgaggcctttaaaggatgcatgtgtaattatgctagctggacaccgaggcccatgtctggaagctattttcctgaccagtcccctcctgaccatggggtgtgctctggagtactaagtggagcagggcagaggtaggacacgagcacactctcagccctatctccctgtccctggtggcctctgctgaatgggttccttggtcaacagatagcagcccctctaggccagtggaggacccatggagaggccagcagggactggcggaagtggctgtgcgcctgcaggagcccatagtcctgggaccccggaccctgcaggtgtcctggactgtgagtgtggtatggggaggagattcagggtggggatgattatgaggcacatgagggcctccaagagtgagtatgggagagtgggaggtgagtggctggggaaggcggcatgagtgggaggaggggctgggcctggatggcctggagggcctgtatggccccagcctccccttctggtgtgccttgtcctgtctcccacaggtggatggcccagtccagctggtgcaaggtttccgggtgtcttggagggtagcaggccctgagggaggaagctggacaatgttggacctacagtccccaagccagcaaagtactgtgctaagaggactccctccagggacccaaatccagatcaaggtgcaagcccaaggccaggaggggctgggggctgaaagcctctctgtgaccaggagcattcctgaggagggtaaggagggccaccgaacagatggatggacaagagggaagaaggggtgggggtggaggtggaggggggatgaaaatttgcaggaggagagcagggtgagtgggtgggaaggaggaatggctctcagttccctaagatgttagaacagggagggggaatgttggggcaggaggggcagcttgcaatgactatttgtgtccttctcaccatgctccaccctggcccagcccccagtggccccccacagggagtggcggtggccttggggggtgatggcaacagcagtatcactgtgtcctgggaacctccactcccctcccagcaaaatggggtcatcacggaataccaggtagagggattgaggagggactggatgggagggccaggccgggagggagagggaggacctagtggctagaattagggtggaggaaatctattacaggtttggctttagggttggggatgagtttaggggagaagagagaggtttccaagtgttgtttccaggttgaattacatctgtataaggcttctctaccatttggagccttaagtttcccggtgaggctaagaatcccatttctgactctaaatccgggactcggcctccctagatctggtgcctgggcaatgagagccgctttcacctcaatcgatctgcagcaggc

SEQ ID NO: 22305 - DNA, 1229 bp, Artificial sequence
  DNA replication origin
ggggctggcggtgcggctggcgagggtgctgcgggagcccgccttcctcgcgggcagcggcgcagcctgcggggcgctgcttctcgggctctgcgccgccctctactggcgccggaaacagcgcaaagagctcagccactacacgggtgagctcccggcctcggagcggacggatccgggagggagccaggcggcccatggggaggggcaggggcttagccgctggcgagtgaggaccgggtcgggagaaaggggtcgcacctggagttcagcctcttgggtaggggcgggatacgtggggcgactcgaggagctgccaggactagggagggctgcgggccaagacggggcgggatctggatgacgtttgcctctaagacgccacgaggaggccaggctttgcaaccatctccataaagaaggggcaagttcgaggacggaaagcccactcaaagggcggggggcggggcctggcaagagggggtgtggccaggatcccaggcagtaaattgtgcggcggggtctggatggaaaggcggggcccgctgaaagaaggcgatccgagttctgctacttcctagtaagggacgtctctggagagattctgaggtgtttgaggtcagtggttttcaatcttggttggctacacataggaatcacttgaggggcttgagaaaaataccgacacctgagtcccacccccgagaaattctgatgaaatgggtccagggtgcagcctgagtggtggaactgggaccggggcctaggcgtggacaagtataggggtatttctgacccttctcctcatttcacctcttctttctcccacgggttcctttctggaagcctcttttgcctacacaccggcaggtaagccatctctgccccagtggggttcagaccccccgggacgggcccttctctcactcattcgccccctcattttccccagtgtccttcccgcactcagagggcctctctggagccagttccaggtaattctcttagcccatttcctcaggatgacctccaccgacaggccactcttcttccgccccgctgacgccccaggtggagggagcatggccacctcccaccccaacaccaccgccactgtcctgaaactcccgaatatcgccacctccctttcctttgctggcctcttcaggctctccgtccccaacgctcacctgctctccctcaggccacccatgggccttggccccgcc

SEQ ID NO: 22306 - DNA, 914 bp, Artificial sequence
  DNA replication origin
ccgtgcgctcgcactcctcagcccttgggtggtcgatgggactgggcgccctggagcagggggtggtactcgtcggggaggctcgggccccacaggagcccatggagcgggtgggaggctcaggcaccgcgggctgcaggtcccgagccctgccccgcgggaaggcagctaaggcccagcgagaaatcaagcacagcgcaggtgggccggcactgctgggggacccagtacaccctctgcagccgctggcccgggtgccaagtccctcactgcccggggccggaagggccggccggctgctccgagtgcaggcccgccaagcccatgcccacccggaactccagctggcccgcaagcgctgcatgcagccccggttcccgctcgcgcctctcgctccacacctccctgcaagctgagggagcctgctctggccttggccagcccagaaaggggctccccacagtgcagcggtgggctgaagggctcctcaagtgccgccaaagtgggagcccaggcagaggaggcgccgagagcgagcgagggctgtgaggactgccagcacgctgtcacccctcactgagaccccacttcagcaccccatgccagcctcgctcgctgccaagccaagccccgacaaagatgagcatgggcacagcaggtcaaacagaatctattggtgccagtgggcaactttaggctcagatggagatgccaagagctagccagaaaacagcgagtgatccgggacttggggtggaaggaggacatagaaaagtggaaaagggagcagcagatggcaccaggtgaccacatctgcagcagctgcctgaatgaaccattcatgccctcacgtcttgccagtcttgtcaccattggcacctgtgctcagggcgtaagtccttcttgtgtccact

SEQ ID NO: 22307 - DNA, 1384 bp, Artificial sequence
  DNA replication origin
ctctctcctccttgccctgtcgcaatgaataatactctggcttggggactggaataaaacacacgcgctctgaggcagccgcccgcagcagcagccgccgccgcgccgccgccgccgcctgcaaaagcgtctctgacatggaaatgaatgacagcttacctgatgccaatcttcatcagactgacaccggcgtgacaacacagcctatacttcccagcactgctcgggacgtcagcggcacagggacccgccccccggacccccccttcacacacctcccctctccccactcccccttttctccccaccccccatcacccccacccactcccggcccggccgctgccaagtcggaggagccgctggagtgtctccctctaccggaggctctcgggcggcgggcgcgggcctgctcctgcggcagggaggcgggcggcctggagaagcggctccgctcgcgaggagcctcggatggggagtgcggtggacccccaggaactctggagcaccctcccgcccccaagccaagtcctccttagcgaacaaccggggccgagttccaagatatcaccggtgctgaggggaccgagatgaggtgagattttctgtggaccccaagagaactccccagaaatgatgaaacttaaaacgggcaagaaatccttccttccaccagcactccccctcccccttttcctgcctggctggcctcatttttatgattgcatttgaataattctcattaccctggccccagaaaaggtgttcagatgacactctggttagttattcctggtctcaagagctttttctgctgtgggcttcccggggtgtctggttcaaggtggggcagagggagagaggaaagagtggataggctttgtcagtaaagcacttctttgcaaatgtcaggcaagcctgttctaagccactgctattttcattctaataaaaagtcctcaagaaactcagtgagttcccagagttctgggggctggggtgcagtcatataaagggaaagaccagctgggctgtttcagcctgggcctgctggggtggcttcatctacatcagggaggaaatgggctccttacatgccctctacagtggaagacaaaagcaggcatgtgtagacccacaagcgcctccattcactcagcagagatcacagtcctactaagagccacacacaggagcacacttgcttgcttcctcaacttagcacatggccctccgcataaagggacaagagaaccccttctgcctctggaagtttgcttcttgctccccatagaggagccctttcagccagtcaggcagccattgatcctctgaccccaggccaggcagggggcctggaagaagcccagacaaagacaccgac

SEQ ID NO: 22308 - DNA, 799 bp, Artificial sequence
  DNA replication origin
ggagggggagtgctggtggaaggaaggatttcttgcccgttttaagtttcatcatttctggggagttctcttggggtccacagaaaatctcacctcatctcggtcccctcagcaccggtgatatcttggaactcggccccggttgttcgctaaggaggacttggcttgggggcgggagggtgctccagagttcctgggggtccaccgcactccccatccgaggctcctcgcgagcggagccgcttctccaggccgcccgcctccctgccgcaggagcaggcccgcgcccgccgcccgagagcctccggtagagggagacactccagcggctcctccgacttggcagcggccgggccgggagtgggtgggggtgatggggggtggggagaaaagggggagtggggagaggggaggtgtgtgaagggggggtccggggggcgggtccctgtgccgctgacgtcccgagcagtgctgggaagtataggctgtgttgtcacgccggtgtcagtctgatgaagattggcatcaggtaagctgtcattcatttccatgtcagagacgcttttgcaggcggcggcggcggcgcggcggcggctgctgctgcgggcggctgcctcagagcgcgtgtgttttattccagtccccaagccagagtattattcattgcgacagggcaaggaggagagagggagagagggaggcagcagggaggagagagagggaggcagcagggaggagggaggcagggagcagcgagggacggcgggagcgtgcagagagaagctggggaagcgccggg

SEQ ID NO: 22309 - DNA, 1386 bp, Artificial sequence
  DNA replication origin
cggagcagcgcgaggggcggcgaggccgggcacggaggctgcgagagccccgcgggccgcccgctcccctgcccggccagcgctcagccccgccgccgccgccgccgccgcctcgccgcgcttgggcccgtggccggccgcgcattgtcctcgggtgcaaggagccgggctgcggactcgaatcgccgcgggcccaaccccgtagcgggcgggcggggagctgtgcgccaggagcgccaggggacccgagaataggaacaggcacgccggcccgagcccgggtgcagaaggctcccggccgggcgctccgcggggagaggctgggaaccgcgggcaggctccaggttctctttctcccggcttcgggcgtccttggggccggcgcttactccgcgccaccagcctggagatgctttccagcggctggaggcgggagcggtcccaggctggggccaggtgaccggaggagtcgaggagccgcggccgcggcctggggaggcagggcgaatgagggtttgcagacggatcagtggagacaggggaacaccggcggggcccgggaagccaggatccgaggggctacacgcacggaccctcacccagggaggagcgagaatgtgtagggtcaccggctttccatgattgctggggatctttggtgaggcgggcgtaggggcccgcgcgaggcttgggaatcgggagcccttctggctcgagaactaggggatgagttcgtaaaagagggaactgaaagcgatcgagagcggagagctgagggggatggcgcaggatcccgaatctgccgctcaaagtttgcatttctttcgggttaggagacgggctttcctggctcccgatccccaggaagaaacgagcgaaatgggccgtcctttcccggggctcttcacgggggagccgggggtttccgcgcggtggggagactcgggttgggaattgaggggtaggggcttgtggatcggcctgaattagggctgggttttaggaccagtctagagttcggtttataggatccagactgtttacggaatcgggatcgaggggccgataagtagtttacacgccggccagagcagagggctggaggtcggagttgggggctggaggaacgggtggcgtttttaggattcagtaacaggatcacagctttttcttgtggtggaagctattggaatttggggagggtagcacgaggggtcctgcagctccgcgtgtgaaaaagcgtttaggtaggcgatgaaagtagttgatctgagccatggcaggcgagccccgaatttttgctgcttccccctgaaagtgtttctttaggaggagaggacttgggccacacaggacccggtcctaagagagcgattccgggaagcg

SEQ ID NO: 22310 - DNA, 966 bp, Artificial sequence
  DNA replication origin
gtttacacgccggccagagcagagggctggaggtcggagttgggggctggaggaacgggtggcgtttttaggattcagtaacaggatcacagctttttcttgtggtggaagctattggaatttggggagggtagcacgaggggtcctgcagctccgcgtgtgaaaaagcgtttaggtaggcgatgaaagtagttgatctgagccatggcaggcgagccccgaatttttgctgcttccccctgaaagtgtttctttaggaggagaggacttgggccacacaggacccggtcctaagagagcgattccgggaagcggacagatcgaagagaccttctgggcgaagcggcagggcagcctcgcggggctgggagtggatctgaggtcccgacccaggcggctcggagtgctccaggagccacctgggtctgcgggcgcagcgcggcggggcgggagcggtggcccgcaggggccgcggcctgcgatgaaggccggggggcagcgctagcagcgaggtgccacagtgggccgaggagtctgggctgtggcccagggtaggaccggctcaaactccagtgccctgattggagccgcttcctgtgcttacccgcgccggactgagaagcccacaaacccggcctttggtgcgcccgggggaggaggaagcttggagtgccctactgtcatctctcctgtccggagacttcaggatattagcttttcgggtttcaaatgctctataaccggtggcagccaaaagcttcgcattttaggcagtttagacgatcctccccgccccaaatctgagaatgatggtgttcaaacataacacggtgtattacccaaagcccctgcccttgccctcctgctctctctgccgttctggccttcggaggccccaggaccttggtggaagcggggagggagggtcccgtttctggtctcataatctcccactcgggctgcatc

SEQ ID NO: 22311 - DNA, 1001 bp, Artificial sequence
  DNA replication origin
caggaccttggtggaagcggggagggagggtcccgtttctggtctcataatctcccactcgggctgcatccccatagcttgggcctagctgtggggtgtggggtgggaaggggtcccgaccagggaggtaggttattctctgggcatctagagaaagagtgtgtgtggggggtgggagcgggggggaggagggcattgaggggaggaagatttgagatttcctcctcttaatattaaacccaccatcccagccccctgcacccctggcagggagagccagacagcccttacaggacacggaagacgcacgacccacgacccacgagtggcctcggcggcccggggcgcggcgactgccgccgcggagctccaaggctgttgttttgtaggcttggaattcgtgagagctctctcccgctgagagcccgaggggggagggagccgtgaccccacggagactccctggtcaccgcctcccctttgtgagcgggaaaggcttgaaagccaagagaaagagaggctgctcagaataaggggcagggggttaccggagggagatgggcccgaccaccgctcacagtaaaatgcctcgtgcgaattgcactgaagtatacccaacttgagactggctgttttatgatcctctctgggagtttactgctctctgcttttaagtctatagattgctttaagttaatgaaagtgctgctttcaaaaggggcttttattgtgtggcagtggcaaatccagtacctcccctttactcttccaaaatgggcctgtttaaaaagagggagcttgctggatcccacatggcagagcttgggggagggtgccatgtgacaatgagaattaataaaagttaatgtccaagtgattctgaaagacgagtttgcttcttttccagtccggtttcatctgttcattctcgtgttgcctttgggctttcactgagtctgcctttaaatgttgcttggtgcctccccagcagcctctcccag

SEQ ID NO: 22312 - DNA, 957 bp, Artificial sequence
  DNA replication origin
tgatttgctgtagcgctggggaccctggcatgagcccatgcagagacagacggccctgtttgatctggtgattcaatgggtcttctccttctcctcttagagcaggcagatttggatagggcctttcttctagctgctctttaaagtgatgtggacttgggtgggagggctttggttctgaggagctggatgcaggaggcctgagggggcatctgtgggaacaaacaggatgaaaggggggcgctccgttcaggtttgcaaatgccatgaataccacctcacgctggcccccgagctaagtactggggatgcagaagtgaataagaccttgtccctgccgtcaaggaactcatggggaagtgagtggggtgggggctcggccatgtaaaaacatgcatggacactggggtttgtgcagccatagagaagactctgggtgctgcgtggcagtgatgggggggggacaggaacttgttccaaaatttgctggtaggaggtggtgccagaatagaccgtcctgggaattagacagcagaaagaagaaaagggagctcagggcaggagggataggctgagcaaaagcacggaggtgtgagcaaggctgggaggtgtaggcagggacagggtgagagctaaggcacttggatggtatcttgcaggagatggggagctagtgcatgtatttagatggggagtggagctgtcaggtttatattttagagcactggcctgagcagcagtgcgcatggattagaggggaccagacctttgtaagaagagcagtcaagatgtgtatcagttagaaagccttagactgtaagtagcagcaaatccaacccaaaaaggcttaaagagtgaggcatttagtttcttatgtgttacaaagttcagtaccaggactgctctagggttggagaaattcaggggctccatgacatccacaagcacccaggttct

SEQ ID NO: 22313 - DNA, 1162 bp, Artificial sequence
  DNA replication origin
cctgcccagcccttcagggagcgcagctgggacgccgcgccaggccctggagatgtgggatgatgggcacttccagtatcatctcagcatcggccctccagccaggcctggtgtgtgtgtgtgtgtgtgtgtgtgtgtgtgtgtgtccgcgtgtgtgtgcccgcgtgtgtgcgcgcgtgtgaaggcagggcggcgaggtatgggggctgggggaagaagggaacgccgcccgatcgcgctggggcagtgggtcggtacctcgtcccgggaccgttatctggtccagtcaccgtaaacgccccaagatcatctttgtccctaaaaacttacccccgaccccgctcgtgcccctccccagagtgcggagccttccccagaccgcgcattcctgcagtgtcagaaccgctggcagcggccgcagacgccgggagagcgattgttttactacagacgggcgggagaagggaccggggcggctgcgcggtggcggggcgcgctgccgtcgggtgggccccgggctctggaatgcggggagcagtgtttgacggcgtcgaggaggtatcacagcccgctcttcttcccttttgcctatcccttctctcctcgccgctaggcatccccgactctcatccctctcccgtgtccgggcttgtttggccggaagggcagtggagtgtgtatgcggcctgcacgggatgagtccggcttcctcagagtgccagccattgtgctgcctggaggaggctttctttaccccaccggactggggggaggagggggatctgagatggaggtgaatggagcagcgggaggagggggaggggagcaagcagaaccgcgaaggggttgctgatccatatgcaacgaaatactttttctgtcaaaatgtgcacaaacatgcacactgggtgggttctgcggaggagcagtgggaaatctgaaggtggatcagtgcagggtaggttttagggacggatatgggggacgaggcacggaatcagttgatctatggaccaagtgatgggaagaaggagatggaatggggcttgtgtggaggtgccgaggcccagcggggttagcgtggtgaaatctccaccgctccgctccactcgggtcagctcagcaaagcagggactgagcatttgtaccgcagccccgagat

SEQ ID NO: 22314 - DNA, 1024 bp, Artificial sequence
  DNA replication origin
tttatccagaaactagtgtcaggctttgcgaggtatccatattggtagttattgcacgctttcatcttggagtttctgaatattcatgagggaagcagaaaggccaatgttaaagaggagagaaacagaaatgcataaatattaataaaggcaagcccacgtgctcggaggaaggctatgaatgttaacgaggggatgacgtccagctcccgcgcgtgccagttgggtgggtgcccgagcgcgggcgcgcccccggagcccgggcacgagcgcggggaaggggtggggtggaggcgggagcggagccgggcgccgccggagctgcgcggggagcgctcgctggctggctggctggctggctctccgctgcgctgcgctgcgctccggccgctcccgcggcccgtggatgggggtgtccggctgagccccgggatccgcctccctccgccaggacccgcacaggtgccgtcgcgggggttgactttagttaggacccgactcactgctgggggtggggtctggtgggggtggtaaggaggccccgggattctctgacaggacggtctggggtcgccgcagctcccctcacctggtcccattctgggattagaaaggaacaacgggaggccgtcgccttcctgcccagcccttcagggagcgcagctgggacgccgcgccaggccctggagatgtgggatgatgggcacttccagtatcatctcagcatcggccctccagccaggcctggtgtgtgtgtgtgtgtgtgtgtgtgtgtgtgtgtgtccgcgtgtgtgtgcccgcgtgtgtgcgcgcgtgtgaaggcagggcggcgaggtatgggggctgggggaagaagggaacgccgcccgatcgcgctggggcagtgggtcggtacctcgtcccgggaccgttatctggtccagtcaccgtaaacgccccaagatcatctttgtccctaaaaacttacccccgaccccgctcgtgcccctccccagagtgcggagccttccccagaccgcgcatt

SEQ ID NO: 22315 - DNA, 1314 bp, Artificial sequence
  DNA replication origin
gattttagaaacgcaagcagcgttgtggagtcaatgggggagggcaaagaacaggaggagagatctgtgagaacgggatcggcgaggaggcgacggggaggaggcgacgcggaggggtgaggggtcctctccgccgccaggcggagttgggagccggacgatcccgcacgcagcgcgaggcgggaccccggactgactacatttcccagtctccgtcgctccgcgcggcccaccccttcggctctgggccccgcctcgtggtgccggctggttcttcgcgctcgcccgacttcccagcggccccgtgcggcccgggcatgcccagtgcgggcgcagcggccccggccctggaagcgccccggcggagctggcctgcggtgggctaggggcagggccggagccgcggcggcggagctgtgggtaggtgcgggctcagccgagctaggcctcggggccgccgcgccgcccattctgagtggcagggaccgggagggcaggcagggcccgagcgtgggttggtggggctaccggcgaggaccccttatgggaaggggccggagggagcgggacggggccgggcacatccccgggcgaggctgccccaggtgcggcgcagctatctttagctccctgtgtgacccggagcgtgcgtgatccgcacctcgcgtgatccgtacctcgtgcacagttgtgcctagggagaccagttttctgccgaattgcctaggagctgtggggagatgggcctgaatggacccgtggactcagaggcagcccgtggagccccgtgggaagtgaggatgtttaccttccctgtacctggagtgggctacgacagcttcctgtttgccgagacttgggtttagtgacttagaaataaaagtgtgtctcagcagatgcttattagcttctaatgactgttgggaatttaatggcatttgtatttccaggtttgagaggttatttgtccatgggatgctcgtgttaaaacaaaaatcttcattgcaaagcttaagtaaaaacaagtctcgaccgaggtaacgttagaacaccgggttctgaggttcactgtagctgccattcatttgctgtcagtctgggcaagtcatttaacttctgagactgggttctctcacctgttaaatgagccagatgcatcttcatctgtctagctcagctgtaggattccccctgtgtcattcagtctgtgtgtgtgttctcaaattgtggcaggttatttttccccatgcctcagctatttgtcagactgggtaattcaccaaatattcctgtaggaaggatgttaggatctaa

SEQ ID NO: 22316 - DNA, 1077 bp, Artificial sequence
  DNA replication origin
ggcacgttctttccgcgctcttgactcctacgcgccggcctatgacagctcggcgggagcatacagacctgcctctagactgctaagtgatagctgtaatgaccaattaaaaacttgaatcgcggcccggtttacgcctccggatttgacagacagttccgagaccctatcgctctccagaagcgtcctattggcctggagccagccaacgggggagcggtccgggaggcggacccggctcctgccagggttgggtgcgccgctgaacggatggctgagggagccccgcggatcgtttaggaaagccggccaggtgagaaggccgtagaacgtaacttgaaaatcagcggcaggtgcagtccatggcgttgatggggctgaacgaagtgcaggaggcaaaactctaaatgggggtggagagcagagcttagggccttgcagaggagggggcgtggggcgtggtgtgggggcttcctggatggaaggatgcgaaggtctagggagggagggtaaggtgggtcttgagaacagagcgtgggaaagactgggtcctgggactagttatggaggggaaggcgcgtaggatgctggggtgatgagtgtcccgcgctgaggggtatcagaggtggtcagttctttgagggtgggaagaagagggaggtgggacccgctggaacgaccggaagggagaagagagtaaaagatcgtgagagggtgtggaaacgtgtgtaggaaaacggggctggggaaattgcagtctgggaaactagaggcagggtggcaggagatgccacagcttgcagggcacagttgaggagagcaggttggtaagtgttttaagaaaggtgtctttgctcttatttgcttggcggtgtgcgaaagtgaccaaagagcacgagatgaaatctcccttacggccctgccctcaatgactagctcgtttactcaagttttcaagtagagatcctagcagtctcattttggtgtgtggctcgtatcaacgcagtggtgttaagtttgttcctatttcaggcattccagaaaacagctgcaaaccctgagagatatggctggatt

SEQ ID NO: 22317 - DNA, 1306 bp, Artificial sequence
  DNA replication origin
ggggccgacccccccacctccctcccggacggggcggctggccgggcggggggccgacccccccacctccctcccggacggggcggctggccgggcggggggctgacccccccacctccctcccggacggggcggctggcgggcgggcggagggctgacccccccacctccctcccggacagggcggctggccgggctgaggggctcctcacttcccagtaggggcggccgggcagaggcgcccctcacctcccggacggggcggctggccgggcgggggctgacccccccacctccctcccggacggcatggctggccgggcgggggggctgaccccccacctccctcccggacggcacggctggccgggcgggggggctgaccccccacctccctcccggatggggcggctggccgggcggggggctgacccctccccacctccctcccggacggggtggctgccgggcggagacgctcctcacttcccagatggggtggctgccgggcggagaggctcctcacttctcagacggggcagctgccgggcggagggtctcctcatttctcagacggagtggttgccaggcagagggtctcctcaattctcagacggggcggccgggcgagacgctcctcacctcccagacggggtcgcggccgggcagaggcgctcctcacatcccagatggggcggcggggcagaggcgctccccacatctcagacgatgggcgggcggacagagacgctcctcacttcctagatgtgatggcggctgggaagaggcgctcctcacttcctagatgggatggcggccgggcggagacgctcctcactttccagactgggcagccaggcagaggggctcctcacatcccagacaatgggcggccaggcagagactctcctcacttcccagacggggtggcggccgggcagaggctgcaatctcagcactttgggaggccaaggcaggcggctgggaggtgtaggttgtagtgagccgagatcacgccactgcactccagcctgggcaccattgagcactgagtgaacgagactccgtctgcaatcccggcacctcgggaggccgaggttggcggatcactcgcggttaggggctggagaccggcccggccaacacagcgaaaccccgtctccaccaaaaccagtcaggcgtggcggcgcgtgcctgcaatcgcaggcattcggcagactgaggcaggagaatcaggcagggaggctgcagtgagccgagatggcagcagcacagtccagcttcggctccgcatgagagggagacc

SEQ ID NO: 22318 - DNA, 1489 bp, Artificial sequence
  DNA replication origin
gggtcggccccccgcccggccagccgccccgtccgggagggaggtggggggggtcagcccccctgcccggccagccgccctgtccgggaggtgaggggcgcctctgcccggccgcccctactgggaagtgaggagcccctctgcccggccagccgccccgtccgggagggaggtgggggggtcagccccccgcccggccagccgccccgtccgggagggaggtggggggggtcagcccccccgcccggccagccgccccgtccgggaagtgaggggcgcctctgcccggccgcccctactgggaagtgaggagcccctctgcccggccagccgccccttccgggagggaggtgggggggggtcagcccccctgcccggccagccgccccgtccgggaggtgaggggcgcctctgcccggccgcccctactgggaagtgaggagcccctctgcccggccaccaccccgtctgggaggtgtgcccaacagctcattgagaatgggccaggatgacaatggcggctttgtggaatagaaaggcgggaaaggtggggaaaagattgagaaatcggatggttgccgtgtctgtgtagaaagaagtagacatgggagacttttcattttgttctgcactaagaaaaattcctctgccttgggatcctgttgatctgtgaccttacccccaaccctgtgctctctgaaacatgtgctgtgtccactcagggttaaatggattgagggcggtgcaagatgtgctttgttaaacagatgcttgaaggcagcatgctcgttgaggttgagagtcatcaccaatccctaatctcaagtaatcagggacgcaaacactgcggaaggccgcagggtcctctgcctaggaaaaccagagacctttgttcacttgtttatctgctgaccttccctccactattgtcccatgaccctgccaaatccccctctgtgagaaacacccaagaattatcaataaaaaaataaattaaaaaaaaaaaaaaaaaagaaatggggaaaggattccctatttaataaatggtgccgggaaaactagctagccatatgtagaaagctgaaattggatcccttccttacaccttatacaaaaaccctagaagaaaacctaggcaataccattcaggacataggcataggcaaggacttcatgactaaaacaccaaaagcaatggcaacaaaagccaaaattgacaaatgggatctaactaaactaaagagcttctgcacagcaaaagaaattaccaccagagtgaacaggcaacctacagaataggagaaaaattttgcaatctactcatctgacaaaggactaatatctagagtctacaaagaacttacacaaatttacaagaaaaaatcaaacaaccccatcaacaagtgggtgaaggacatgaacagacacttctcaaaagaagacatttatgaagccaacagacacataaaaaatgctcatcatcactggc

SEQ ID NO: 22319 - DNA, 963 bp, Artificial sequence
  DNA replication origin
cagggaaaccgacacggggcgtaaagcgcggcggggagtccggggggctcccgcctggagggctgtgtgagcggcgggccgcggggcggcgcggggggcgctctccactctgcggaagctgccccctctgccctccggtccgcgccctttcgccccgctctctgccctccgccccgctctctgccctccgccccgctctctgccccccgccccgctctctgccctccgccccttccgcgcgccacccagccttccagcgcctgcgcgccgcaccgcggtggtcgcgggcgcggacgcggacgcctgccccctaaggaagcccattggccagcggatggggccagcaccgcctcgcgccggtggtggaagcacgtgctgggggcgggagcagcaatcgcagccatggcgtcgttactgtggggaggcgacgcaggggcggcggagagcgagcggctgaacagccacgtaaccgccaccgagccggggggccacagccgcgggggtggagctcccactcgcagagggagatcggctgggaggggagggagagcccgcgagcgttcgaagtggggcgtcagatgctggaggggagatgcgggaagggtttggaagagggccacagagggagaccccgtccccacccccacgagaggcaagacctttggttagaaagggcaaaaatgacgacccctggaaatccagggtgggaacgcagctggtagtcccagctagaccccgagttttctactctgcccatttgcccattaagcctcacctcgcttccatccatttgccagcgcactttcctagccaccctccccttgttggtgccgtgagccccaagtactgcccaactctaaactagaggcctaggaaagagaaactgcatgtacagggaatacagaaaatctccaattttagggtaactcatacaggaaacccaaccttgaaaggaatctgctg

SEQ ID NO: 22320 - DNA, 1362 bp, Artificial sequence
  DNA replication origin
ctgctcgcgtgctccgggccggcccagcaccctccgagttacgtgcccgcgctccccggcggggaggagcgcagccgcgggggcgcgccccggtgactccgcccctcagctcccctcccctgagcccgggagcccggctcgcgcggctaggtgcgaggagacccgggaccccacgcccgcccgccctgcccagcgccccagccccggcgtgcgaggcgccgctccctcctctgccctgcgcggtgcatggaggggcccgttcggatcgcagccgccgccaccgtagccgccgccgcgcgcgcgcggggggatgacctgggggtggctttccgagccggctgcagcgcaggaggtctggaggcttagccagccccgcggagaggtgcgggggtgggggtcccgccgcagggtcggagggaggggtggcgcgcgggcactgggcttggggggccttggcttaggggacgggaggtcccggggacgggcgggccggcgttccctggagggcgtgggggtgcagggctgcgtgcggggtctggatgctgatgcttgcccggcggggagccccggcgttccgcgtcctcgggggctcggaggcacctcgcgggaggaggcggggtgaggtgtcagtgacacgacgaaacctcttcttgacgatggtcctcgggggcaggtgagatgccgcagagcggggagctagggcgcccgcgcgttttcccaagggagccgggtccctggcctctctcaatctccatccctgcagagcgcccgcgagagacagtgatttatgtgtagggagaagcaagagaaatttcctgcacaatgtatctttctctgccttcacaagactcactgacttcccagccccagggagtgtatttttccttctcctctgtaaagctttctgtggattgcattatcatttgctaaatacattacagctcgctatttatttcagtcggcagcttccagacctttgttgctttctctccacatctaggaatttcagcaataaatcactgagggggatagatagactctcttgcccttcccttcattgttctccctaaccccaccaaatcaggtggaaggctctccaaaaggagctgtttccagaatgcctgcccttcctcatcaggacgacagagggtggcaggtgctttaagggcagactgctttccagtgggaatccagaatttagagaacctcatcaacagaaagtcagcctttgtgtcccaaaccagacaccttgaaaaacaggaggttggactaaaagctcacatgagatttattttcaggcctatgccagtaaagatgaaagacgccaagtcagtgaattctgattcctttcggcgctgataa

SEQ ID NO: 22321 - DNA, 942 bp, Artificial sequence
  DNA replication origin
cgctgccgccaatgtccgctctcaggcttgggcactagaggtgctccgagccggcttcacgcttcttggaggcaactccatcaaccccaccaggtctgggtcctgcggggcaggtgacagcctgcagtgtggaggaagccagctccctccttggactaaagggaggaggaaactgctcagtttcaagagggctgaggagcccaataggcttagagtgttggaatgagctgcgttctactgggggctcttcattgcacaaccccagggggtgccatccacacagtgttctagagttgcgtggcagtgtggcctgctcctgagagccccactgcgcactcctgccctgtttacagcaagaaagggcaggggcagtagggagggagggagggaggaaaggaaggggagggagggagggagggaggaagacaggaaaggaagggagggagggagggagggagggaggaaggggcgagtcttccctgaatgccgctgcgggtcaggctgtgggtgggggcgctcaggtgggcagtgagcgatagaggctgggcttggctggggttgggagagggaggccgccagaggagggccgagccccttgaaagctgctattgtttgaggtctatgctcagagaagccctgagtaaaaagagcttgttagagaggcccaggctggagacaagctgctctcagagagccagtgaaccgtgcgaaatgacttaaactaacatccctgactgcaccgggccgggacccaggagtcagggccgtgggctcatcagaaattcatagaaggtgccccgcagctcagctttctctggccgccttgttcattgagcggttttttctttccagtcccgcggctctgaaagggagacaggggctgcctgatggggaagatcaagtggcctttgaaaacctctctcggagtttattaaacccagg

SEQ ID NO: 22322 - DNA, 1283 bp, Artificial sequence
  DNA replication origin
gctatcacaacatatcctagactgggtaatttataaataatagagatgtattgctcacagttctagacactgggaagtccaagatcaaggcaccagcagattcaatgtctagtaaaggcctgctttctgcttcgaagatggtgctttctcactgcatcctcacatggcagaaggggtaaggcaacttctttcaacctcttctaagaacactcgtccctttcatgagggtagagtccacatgacttaatcacgtccccaaaagccccgcctcttaacactatcacattgggtatcaggttccaacataggactttagggaggacaccaacattcagaccacagcaggattcagtgtgactgtttctgcctggatcgtggagtgcgagaagaggaactagagccactgaggggttttaaacaggagcaacacgatcggattttccttttagaagaatcacctgggtgaccctgtggagagcagatgaggatgtcaaggcaggcagcaaggaggccagatggaggctgtggttgcagtctgtgtggcagggacagggagtgcctgaaccatcatggcaagaatcagatggatcccagggtgacgccagcaacaagaagtgggttaagtcgcatggccaggtttctggatggaggttctacccctcccagagatgaggagcaccagggaggagcggagtgagggacagagtgaatggtgcagtctgggatgtggtgaatgagggtacctgtaggacatccctcaaatagggggttgggctgattggcatggtccttgggggatgatctgggctgtagatagtgatgtggacatcatggaacaggatggcatcaccccagagggtagagtagggggccaaggagggaagctggagggaccccaccaacatttaagggacagaccagagaaggggacactgaagaggtgcccacagagacaggagaaaagccaggagagtgtggtgtcgtgaagctaaggaggaagtgatcacggtgcctgctggattcggtcccaagtaggtcagtggtggcctcactcgagaagagcagtttcagtggaatttaaggtctggacacttgcacaggagaagtgaatgggaatagaaacagctggtaaactgcccactccgccttgaaagtggcctttgggatcgggcgcggtggctcacagttgtaatcccaggactctgggaggccgaggtgggaagatcgcttgagcctacgagttcgagaccagcttgggcaacatggcaaaatcctgtctctac

SEQ ID NO: 22323 - DNA, 1540 bp, Artificial sequence
  DNA replication origin
agggaacggagaggatccggcttcccgcgaaaatctggtccagggaaagggaccccggaaagcagctccgcagggctgtggcagccccaccccgacccgcgctgcgcccacgtgcagggcccgaccccctccgggaggcgcggcgccggctggggtcaggcggccgaggaccccgcggctccccgccccgccccgccccgcgggcccccgcgcaccgccgccgcgtactcaccctcacgggtggagcggggcggggcagcacggttccgcgcgcagctccgatccgctaggcgcaccgaccggcggcgcagcgctggcgcgacggctcgactcggccgggtccctgtcccgggcgcgggtccggcctgggagcgggcgagtccgcctgcaggggaggcggggacccgggcccgggttgggggcggggaaggggctggacacgcttgcgcacacggcggcccgactcccaggagctcccgggaggggtagaaagggcggggtggaggagggggaagggcgggggtgatgccgcgcggtcgcaggcttgggatggtgttcgcgcctccgagacccggacagaggcaagcaggggcgccgtgggtgccagagaggcggaagaggaggcctgatggggtgagcacagggccagggcaggcactgcctgtgaatggcgccagggtgggtatgcccagcgcagccaaggcgctcgctcccgggaacaatgagaatcaagaaagggtgcagtgctctatcccacggggaacggtgtccttccctcactggggaaactggggcagggtcctgttccgggagcctatgcttcccgtgccccatgcacgcaaggcagccagtcagtcccctgggcccagacgtgggcccttcctctgcttcggttggggcctgctgcccctaaactgctctctctgcacccctcacttgcatactctttatcttggcctcagaaagtttctcagtttcctttccgttattgaaggcgccaggcatcctgtctccaggaagaaacccctgggcccctgaccctggttctttggacccaggcatccccccaaataaacctgggaactgcccaggctgaagaacagttcagaagtcaccctacaggacaatccacagccccttaggccagtccctttcacaggtcagcacagtgtttccggagccccacgtatcaacagcccagtgccgggagcgccaggggctccaaggaaactatcagacccattccctgtccccaggaagcttaccatccagcggcacagagaaggctcaccatggactccattcaagaacgaggcaggataggatgtgaataagtgcaaggtgtgagtgactgacagtaagtgcaagggggttcagagaagtggcagctccaagcctgcttctgctgaagctggagggcttatctgtcaagaacccccaactcaggaagctctgctccaagtgagctgagtaaggagagtctgcctccaagttgttcctctgcaggtgactgtgctccatgctaaatcattccttgcac

SEQ ID NO: 22324 - DNA, 1979 bp, Artificial sequence
  DNA replication origin
cgggtctcggaggcgcgaacaccatcccaagcctgcgaccgcgcggcatcacccccgcccttccccctcctccaccccgccctttctacccctcccgggagctcctgggagtcgggccgccgtgtgcgcaagcgtgtccagccccttccccgcccccaacccgggcccgggtccccgcctcccctgcaggcggactcgcccgctcccaggccggacccgcgcccgggacagggacccggccgagtcgagccgtcgcgccagcgctgcgccgccggtcggtgcgcctagcggatcggagctgcgcgcggaaccgtgctgccccgccccgctccacccgtgagggtgagtacgcggcggcggtgcgcgggggcccgcggggcggggcggggcggggagccgcggggtcctcggccgcctgaccccagccggcgccgcgcctcccggagggggtcgggccctgcacgtgggcgcagcgcgggtcggggtggggctgccacagccctgcggagctgctttccggggtccctttccctggaccagattttcgcgggaagccggatcctctccgttcccttggagtgagcaagcgggacagttctgcggaaagtttccgcccccaatcccccagccctgcgcccggactgaagcggcggcccccacctccagcatcctcgagcgatggtttctcccacaactaccccggtcaggtccagcacttgggagctgactgtgctggaggtgacaggctttgcggggtccgcctgtgtgcaggagtcgcaaggtcgctgagcaggacccaaaggtggagttgtcagtgggaggccggctgtgcccagggtcctagggccacgttatgggggtcgtcaggcctaggccactgtgcctcagggctgcatgggtggtgagcagtgggagggatgcgatggggggagtgggctcagctgtctgctgtgggtgtttcctcggggacctggctggcagggacctcccggccagcccagaactgccaacatgtctgccagcactgcccctccattcccagtcctggggggaggctctgtctgggcagcttgaggcctgacctactgtggctgcttcctctgctccccagcctgggtcctgagggcctggcttaagggaactgctgccagaaggctgggagtgtaggcagtgttcgggtgcccagctgtgccctgtctgacctcatggccacccacaagctggcaccccccacaggcctcttggggaagcctgtactttccaccgccggaggcgggtaccgcgtggaagccaggctcaggcggactcattctttttgaactttgggaacaggcctggtacaggctgagttctcacaagagacacacacccgtgtcactgtctcctgagctgtgccggacccgtcctacagactccacctcctctaggtcctggccctggcatctgccagggggattttaaatgagttgatatatgctaagtgctttgaaaggcgcctgcacggagggagagctgtataaatattcactattggtaatatttctcccatgctgttactctccaaagctgcccgataattctagagtgggttccggggacgtgcccgctgtttggggcctagaaatgaactcgggaggttgttttgcttgctgagagctggtctgggaatgccccttgaccgttccctgccctgctcctggcccactcccagactgctcctgtgcctggccccattgcgctgggtgggtgatcctaagctgccccatgggccctgggctctgtcaagacatggggagcttgccaggagttggggccagatcccccagactccaagatggtaaccgaggttgtgagggtgcacatggaaggaagagttagaagagtgaattggaaattgccagcttggactttgggcagagtgggtgtctttagcttggggatgggttgttgttcagagacaacagggccgccttctctgt

SEQ ID NO: 22325 - DNA, 2432 bp, Artificial sequence
  DNA replication origin
tcaccccctcttggggagggagttctgggcctggccaggtctgagatgaggccatgcccctggctgctcttatggagccgagatccagtcagggtgggggcgctggagccgtgggagcccggccagggcagggggctcgttgctgtggcaccccctctctgccagcaccaagagattatttaatgggctatttaattaaggggtaggaaggtgctgtgggctggtcccacacatccaggaaagaggccagtagagaattctgcccactttttataaaaacttacagcgatggccccaccaaggcctagacacggcactggcctcccaggagggcaggggcattgggaatgggtgggtgccctccagagaggggctgctacctcccagcaggcatgggaagagcactggtgtgggggttccaccgagaaggggacctcatctagaaaagaggttacaaacctaccattaaactatttttcctaaaacggaagcagttgtgatgtcctgtgtcctttcaggtgggggaaggcatgggacagggtgtggcagtgggcaggcttgttagaccagagcagggcatggtcactcaggaaataatgacttattgagtccagtgttgggtgcccggtcatgcattatcaccctggcatagcaggagagtgagtggtgctcacagcacccgtctgcaggcacccagcctggcacccggcaccctgggttactgcccagaggagggaggggctggaggatgccagacgagagtgccagagtcctctcccaccttccttcctctcttccccaccattcttcagttacccaaatctcatgcttgggaggtatgtgttttaaggacaggggtggggtcagacaaagaaagccaagtttcccttctcagattaagtgggaaccagaaaatggagtttatggaaggtcttgccagcggcccaggctgccaggatgggatgggcaggcctggagggcagtgtggaagggatttggcaaggcctaacagccagttgctgggccaggggatgaaacggcttctttcctaggtctttagcatcctaacaatcctgccgtttgcctgtctctcccgccttcgttctccatcttcccagatcctgcttagctgccaactgggcttcctgccaccccacagctgttcctttacatctggagccaggagggagagttggaactccccacttggggaatggaactggcagctgtattcctggctttctcggaaagagttgcggccttgaggttttgagacaagccaggctgggacaggacagataaagaggggcagcagtttgggaggaacagaggaagatgacatggttctccacagagcgttggaatggccttgtggacacccacttcatcccccagaatggccccaaggaccctcccagggaacagaagggctgctctctcagcagcctggctgctttgccaggggagaggggggttctgagagcgagtagagccccagcatctgcagccccaagcccactcccctccacacgggcaaactttgtcttgaaggctgtgtcctggggagcgagcttgcagacagcaggggttgtgagcgtgtggggatctcaactctgctcaccccgatgcgtccccagctgccgctcatgtggagatgcaagggagtgtccgttttcccatccggggccattgagaatggctgtctgcatacatgatccagctggcctggactgaggccactgcctgttactgaacgtgcctaaactcaagctagaatccggcacacaggggtgggtcagacccgtctaaactccacacacgcacacatgtagatatgggagcattttacattcttggtgggttgtttgtgattctgtgtgcggacagtccttcctgctcacatactgagaagactgtgaatgcggggtgtgtgtatacccaaatagaccattgtttgcttgggggggtggggatagctttctccagggtgcccaacatcctacgcagattgaggcaatactggccaagggtcggagctgagaatggggctttgatgtggggctgttggatggggttctttggttttctgggaaagggactttcagtcttcaattagcccaaccaacgggaatgaactgcctgccagcctgcctgggactgattaaaccataccctggaaatgaggaggggaaagagcacagtagggcacgtgcttgagggcaagtcaggagatctgggttctccaccagcctctgtcgcctttttctgtaagaacgtgggccagtcatttctctgcaacaaaagggtgggtccagctaaggagaaccgcttgtctcagaattacctagggagacttgggaatagagattcctgggtctcacccaggctgctggggacagcaggatcatcgcacgggcctcttgactctacgg

SEQ ID NO: 22326 - DNA, 1005 bp, Artificial sequence
  DNA replication origin
ccagctaaggagaaccgcttgtctcagaattacctagggagacttgggaatagagattcctgggtctcacccaggctgctggggacagcaggatcatcgcacgggcctcttgactctacggcctgcgtgtaaagcctgcgctaagccccagtgtccttcagcggcgtcaattaggcgcacgcgcagtttcctctccggaggggcgggcagggcaggggagggaggagctactgatgtagctcgccccgccctggcgtcagggccgtgcaagcgttgtccgcatgggcgccgcgccgaccctcgcggccgtgggaacccgcccggaatctcgcagggcctgtcgcgcttcgtccaggttgacggcctcctccccgcgcttttcgggatgctggccccggcgccccgcctcaggcgaggccggcccctccctggcaagcggctcaaggcttggcgacggctcaggggaggctgggcggactagggggccgcgcccctccgaactctcgctgggcctcggtcatgccacctgctttgggttcatcgcagaggctggggtgaaactgccttaggttgcgagggagtggaagagctctgtcccatcgaatttagatcctggaagtccacagaggggaaactgaggcccggaggagagaagggactccccgcttcgtcaccttgctgggcaggataagagtcaaggtctctagtgcgggaacacttataaatgttactctgtgttcacatcacatggtgtgccttaattttggatgccaaggattttatttacattttccaaggacacaaatgcattccgttgctttcctccagaggctgcctagcctacgaggagtttgagcttggaacaggtttttgtgggagacagtaaggtgcgatgcacaccaaatagggacagttggaccgtgagttcaactccctgctctgtcgtttagccgagtaaacctctgcttctccatctgcaaagcagtgatcatgcatgtctctctc

SEQ ID NO: 22327 - DNA, 967 bp, Artificial sequence
  DNA replication origin
tgtgggagcatgtgcacgtgtgtgtgcatgagtgtgtgtgtgtccatgtgcatggtgcgtgtgtggtgcgtgcatgtgcgagtttgtgcatgtgtgaatgtgggcatgtgtgagtgtgggcatgtatgactgtgtgcatgtgtgagggtgtgcatctgtgcatgtgtgtgtctgcatgtgaaagtgtgggcatatgtgtgtatgcgtgtatagatgtgtgagcatgtgcacgtgtgtgtgcatgtgtgcatgtgtgcatgtgcgtgtgtgcatgtgcgtgtgtgtccacgtgcatgtgtgcatgtgtgtgggcgtgtgtgcatgtgtgagcgtgtgcatgcatgggtgtgtgcatgtgtcaatgtgcatgtgtgcacgtgagtgcatgtgtccatgtgcatgtgtacatgtgtgagcatgtgcatgtgtgcatgcatgtgcatgtgtgtgcgtgtgtgcatatgtgtccatgtgcatgtgtgcatgtgtgtgtgtgcatgtgcatgtgtgtgcatgtgtaaatgtgggcacgtgtgaatgtgtacatgtgtgaatgtggccgtgtgtgtgcatgtgtgtgcatgtgtgggtgtgtgtatgcatgtgtacatgtgtgagcatgtgtgcattgcttgtgtgtccgtgtgcatgtgtgcgtgtgtgcatgtgtgcatgtgtgtgcatgtggttgtgtgcattagtgagtgtgtgcatgtgtgtgcgtatgtgagtgtgactatgtgtgagcgtgtgcatgtgtgaacgtgtgcatgtgtgcatgtgtgtgcatgtgtgagcgtgtgcatgtgtgtgtccaagtgcatgcgcatgtgtgggcatgtgcatgtgtgtgtgcgcatgtgtgtgcatgtgtgagtgtgtccatttgtgagtgggtgcatgtgtgagagtgtgcatgtgtgcatgtgtgtgatcatgtgcatgtgtgtgtgcgtgtgtgtacatg

SEQ ID NO: 22328 - DNA, 768 bp, Artificial sequence
  DNA replication origin
gttactggaatatcggattagaggcagcgaggacgagggaggagggagtggggcgtgttgtgggagtgctcaggcacacgcacagccacgcacatacatccaccctcagaatggggcctgattacatcttcccaaataagtggttatcatgctgggtattcatgtagccaggcattattgattggtcttcgcttcactgcacaccagatgggggtgggggctgggggggggtgggggttggtgaggatggaggatgtttgggggccagcaggctgaagagaaatcagcagtcgctcttggcagctgtgtctggcgtggaagggggctcctcattacctccccattcagactcggccaggctgggccaggcagtggcgaggggaggaagtttcagagtggtccccgcttggagatgtattattcatcaccccctcgcaggattggttattatcctcaaccactatagagtttgggcttctaatttttaatcacaaggaaggtggaggcgttagccttttcgtgattaatccggagataaaaatagttgactgttttggtgttgtgcttgttgtcagtcaggaaaaaaatggcattaactgttggggcactgaagcctggggaggactgagcggatcccaggcagagtgggtccccagagctggaagccagcctaagaggccacagcgcggccttagccgggggtggctgagcgacactcctgcacccagctggctcctggggcattgattatgaaagaaacacatcatc

SEQ ID NO: 22329 - DNA, 1260 bp, Artificial sequence
  DNA replication origin
ccttatttgaacactcagcagtgtatggttgaagtagggctgctgggattggccaagactcagctattgttacaggcacatactcctaagttaggttttcaatcttgtctacctatgaagttaagttgcagttcatccacaaggactcaaatacagaggtgcagggtcctcaggccatatttagtttgctttaagaagttgtccttaaacatttactgagcacttgccccttgaaagtttctgggaacaatgagttcctgtctttgtggagcatactggctggtggagaaggcagacgtttagtcagaaatacacaaagatgagcgtattattataaatatggtgattattttaaaggaaatgacatgtgtacgagtttaggtggtgtagtcactcatttagacctgtgggtaaacaggagggtgggctgtgaagtcagggaagtgttccatgcagaaatgatgcttgagtggattaggcaaaaatggaaagaagttagctggagtgagggagggtgtgtggggtcggggagacccttttctgcagagggagaagaatgggcaaaggccacgtcaggaggcagctcggcacatctgaggatctgcaaggtggctgttggaatgcatagtgaggggagatggtggggtgcggctagagagaaggcagaactagaccatgaaagcctttaggggccatgctaaggactttgtactttctcttgagaaaactgggatggcatcagagagttttaatctagaggaggctgatagcatagacccgtgactctcaacacctacttgaggcaaggatgggctggaggctggagagactgtagcagtggggcttgggttggtggcagtgcatggaggtgcagaggtgcctgaaaaaggagatgctgaggaggggctatgggtaggagttagtgacgggttggatgtggagcgtgaaaatgagggagagctctaagagacatcttggctgctagctttgggtggctggatggacagtggtgtattgagggagagggtcgtgagtgcagagaggtgcaggagagcctgaggtggcaagggacgtcacgtgcatgtgggatgtgtggcctggagcttgcaggacatttccaggctggagaaacacacttggaaataatcagagacgagatggaagttgtggtcatggcttgccggagattgtctttcatgaaggagattaagagtgagattcccggccgggcacggtggctaatgcctgtaatcccagcac

SEQ ID NO: 22330 - DNA, 778 bp, Artificial sequence
  DNA replication origin
cagggagggcccagggcgccagggaggccgcgccgggctaatccgaaggggctgcgaggtcaggctgtaaccgggtcaatgtgtggaatattggggggctcggctgcagacttggccaaatggacgggactattaaggtaagcggcggggcaacggacgcgggcggcggggaccggccggggaggcgaagcggcgggcgggtaggtgcggggcccgcgtcccggaagacgtggcctctctcccttccctccgcgccccggcttcgcgccggctcctccggcgctcgggtggcgagtcctactcgcgggccagccggccaggcgcccgcattgagggcgaccctcccccgaaatcccagcccccaaagtggagccccggcccccctcccacctcgctgcccgccggggctgcaggaggggacggcgggaaaccgggggaccccagggtacggaacggagtcaagggcgagagacctcggggtccaccactcccaccgacacccggggctcccgtggccccagcgctaggcactgggcttcctctccgcagaggcggaacacggcgggggcgggggctgcagtcgcccgggctcgggtccctgcctggtgggccctggggtgggtaagtggcctcgttgcacgagggtaggggtgcaagtgagtgtgtcgggggatctatctgagcgggctcctccagatggaagcccctgtttacatgtcagcgctttcccttcctctcggcactcagtcgcccggctctaggcgctggagagccgccg

SEQ ID NO: 22331 - DNA, 1231 bp, Artificial sequence
  DNA replication origin
gcgggggcgggggctgcagtcgcccgggctcgggtccctgcctggtgggccctggggtgggtaagtggcctcgttgcacgagggtaggggtgcaagtgagtgtgtcgggggatctatctgagcgggctcctccagatggaagcccctgtttacatgtcagcgctttcccttcctctcggcactcagtcgcccggctctaggcgctggagagccgccggctccgcgggactcctgggccggcctcgccgcctctccggcggggaaccttccccagcccccgtccgcacagatccctagcgccccgagcccccgcccttcgcgcctaggcgtgcgccggctccaggaccagggctcctggagctgtcgcctccgaaagggtcctgcgtccttcggagccgcctccgttgcaggggccggctgtgagcccgcgccccgcgcccgcccggccattcccaccccagccgccgccgccaagcctgggtctaggttgcaaagtgcaacccaggcggaaaggtgagggtttgggttcgcgtctcacttcagaaaagttgactgctgtctctgaaagggttcgccaagtagggccaggagcagagaggagggacaccccctaacgtgacgggccttagaggacctaggggaatgaatgggaccaggggttagcttcgaggctgccgcgcaacaccaagcgggagtctgtctggaaaaactattaggctggcgaggtggggactggcagagcccgccattccccagaacccgaaagaatcgactccctgctcagggctcagcaagagaaggctaagatgttgggctcagagaattcaagagatttttatcttctgggtggggtcgtggtttttattttctaagttttttttatgaaagtttgaaatatgctgacttaggtaaaagacaccaaccgaaggaacttgcaaatctggagatgagataactgactgtgatgggttaaagggagctataagagcctataagagcctgggttcctcaaacccaaagtgagtaggtgagaagtaggtgagaggggattcctgcaaagacccgagagtgggggtcattgggccattttatgcctgtttctctgcttcctgttgatgtgttcatgcaagtgtctctgtatttctgggtttagtaatgagatgctcccctctagaaaactccctcgccccaatcaggacagttaccacttactctgaaggcctcttctgat

SEQ ID NO: 22332 - DNA, 1009 bp, Artificial sequence
  DNA replication origin
ctcagaagcccatgcatcaactcaggctcagcattgaaggggctgagtcagcagacctggatctgcgtcctaactttaaacaagcaccttctcttttgagtctgctcagccatgtgttctcagttatttatttgacgacaatttattgagcacctaccgtttcaggccctgcccacgtgtcagtgagggaggtgataagaactaggacagacactctaagcagggtaaagagtgaggaggcgctggtttcgatcaggtggccaggggaggcctctgaaaaggtgaggttcaggtagagaaacccaaaactcgtgagggagagagtcatatgactagatggagtaggaatgttccagaatgaaggagctcaggggaagagattctgaggcacgagggtgcctgggggtctaggagcagcagctagagtcttatgaggctggcgcggagggaagaagtgggagggagggggcagtagagaggatgtcagagggatggtggggccacactaagggctttgcattttgtcataagccattgaagagttttgagcaagaggattacaaacgaggaaagcatggctctggctgcttgctgtccggagaatagacttcaggaaggcaggaggaagtggggagagcaggatgcccccgcagaagcctaggagaggtgctgctggcttgcaccaggcaggggcagtggaggtaaggagtaggcagattcaggttacaacaggccagagaatctccaacaaagctgggtgcggtggctcacgcctgtaatcccagcactttgggaggccgaggcaggcggatcatgaggtcaggagttgaagaccagccgggccaacatagtaaaaccccgtctctactaaaaatacaaaaacttgccaggtgtggtgccatgtgcttgtaatcccagatactcaggaggctgaggcaagagaattgcttgaacctgggaggcagaggttgtagtgagccaagactgtaccactgcactccagcctggg

SEQ ID NO: 22333 - DNA, 801 bp, Artificial sequence
  DNA replication origin
gcttgggattgtattttctttggctttctggcgcgctccttattatttatttcttttccctctgttttatttttattttcaagctgccggccaggctggatgccgtccattcaccccgctgccttggagcgctgcgcgcagacagccggagccggctcgggctcagccctgggggtggggggcagccgagggcgcggggggcggggtacgcgggtagcagctcaagggtgaggggcagccgagagcgcgcggggcggggtactccgggagcagctccgggtggggggcagccttgggcacagggaggtggggggaactcagggggcagctccgggtggggggtggccgagggcgttgggggccgggggatacaggggacagctcgggagcagccgggtgggggtggccgagggcgcggggagcagcttgggggttgggggcagccttgggcgagggaatgttgggggacgcagggggcagctcgggtgggggtggccgagggtgctgggagccacagggggccgagggctggggagaacaggggcaccgcggggttggagggaggacgccaggctgtgtgcctgcctggctggggcgacaggaatccatcttggcagtgggtgcctccgcggtccagggatctcgtgacccggcagtaacaatttggttttcctgaaaagatgatggtaattcggtgtaagacctgggggtaggaggcagctgaaacttggacccccactggagtccccttcttccattcttttctccctgctttgtgcccagggggagcacagaccttcc

SEQ ID NO: 22334 - DNA, 1060 bp, Artificial sequence
  DNA replication origin
gccttgggcgagggaatgttgggggacgcagggggcagctcgggtgggggtggccgagggtgctgggagccacagggggccgagggctggggagaacaggggcaccgcggggttggagggaggacgccaggctgtgtgcctgcctggctggggcgacaggaatccatcttggcagtgggtgcctccgcggtccagggatctcgtgacccggcagtaacaatttggttttcctgaaaagatgatggtaattcggtgtaagacctgggggtaggaggcagctgaaacttggacccccactggagtccccttcttccattcttttctccctgctttgtgcccagggggagcacagaccttcccctcgagggtgctcgtgggcggcatcccgcgggagccggagcctctgagaggtctcctcctgcccctggagatcccaccctcacctctctggagccactggtggatggcggagtggcggggtgggggatctatggagagagtgggatccccttctctgttagtgtggagactagaggctttggggagccaccgtgcccccgcccccagccagagtggattgtccagggcccggtgtggagggctagaggctgagaaggagggagcaggaaggcctaattccggtggctctagaaggcagacaggaaaagctggggtcagaaagaagggagagggggaaacaaagaatgtggagtaaaccgttcctgccaagtgcggatcaccggagagctgagcagctgggctgatggagtgggagagggatggacaaagaactacagctaccaggaccttgtgtcatacacaggacccggcttcccccgctgggctacaaatcacaaactccttcctaaccccagcttcctcttacatggctgaagaaggcattcctggtgtttttggctttctggcgcgttccttattatttatttcttttccctcttattatttatttcttttccctccgttttattatttctctctctgcctctgtctctgtttggcaactatttccctcctccccaaatcctggcaagatctacca

SEQ ID NO: 22335 - DNA, 1351 bp, Artificial sequence
  DNA replication origin
cgcgcgcgcgcgtgtgagcgtcccatgcctgtgtgtgagcgccgcgtgtcacgcgtgtccgtgtgtgagcgccgcgtatttagtgggtgcggtggagcagacagaaagaagggagaaactattagggcagaaatcttggctcggagcctcggcggggctgctcagtcgctccgcggtgcgctaagcggacggttggcagcatttcgccgtttcccgagagggatggagcagatggggggattcctttgggaaggcgggggagccacagtctgggcgctgcatcccccgcccgacggctctgattcccgccgtggagtgagggtccgggggcctgatccgccagctgcagggggagtaggtccagggacaggacccaggctagctgtccccgggctcgctgctcaccccggacgatctctccccggcgtgcggcggcggctgggcggcgatggctggaaacgcgccctgcacggacaggaggcgggagcagcccggagggaacggagctcaaccttgcccaggcgtgggcagagccggcgtcctccgcgccacctcccggctctcccttttggattcctacctgccttgaggacagatgatgaccagagtgtgttctttaattcgtggaagccgtaggaaaggcagctgccagggcaggctgaaagggagggctgctgtctggggagggccggcaggtgcctctgaggaccggtctgttcggggtggcccttctcacccggtggtgttccttctggcccctctccgttacccagccttttggggtcaacaccccccctgccagccccctctctcagggcagacacagctggtcaaacgtggggtgccctagcacctagcacaagtgctaggtgaatgatgtctacgaccagaaaactggtttattacgttgcaatgagaaaaatgcttgtcactaatactggagggcaccaagtccatcctctcctgtaaggacagtgacagggaaacttagtctctaacagtggcctgggggtcctcttgcctcggagaccagcgtacacacagcccgttgcccaggcaccctcccctgggacagagcacagagcggtccggccagagtgggcctcctgattgcccctcttctctctgtagagggggtgattgttaaatgtggctgcaacaggccctaacaggaaagctctgtgtccccttaggggactcagcttgcctaggtgctcacgcactgcaccatatgttgtttgacctcagggcttaacactattgtggagaaagttcttaattccctaattgcctagttcttgggagaggctttggctgtgcagttctcaggtccagataacacacactataa

SEQ ID NO: 22336 - DNA, 1465 bp, Artificial sequence
  DNA replication origin
ccgccgaggctccgagccaagatttctgccctaatagtttctcccttctttctgtctgctccaccgcacccactaaatacgcggcgctcacacacggacacgcgtgacacgcggcgctcacacacaggcatgggacgctcacacgcgcgcgcgcgggtctccgtccctggcaccccgcagcaggggtgcagccgggggcagggggagccgggggagggcgcagggggccgcggggacgcgagcggagggctggatgcctgccgggctctctctccgccttcctcttccctcccagtcctgccgagctgacggcgtcccggatcacatggagcccccgccccaccccagcccgccccccgccgccaacgccggtggcccttccagtcgcgttactacccagagattcatttgtaccagggacggagggagagaggagagggaggaggggacacacacacacacacacacacacacacacacacacacacacacagagagagagagagagagagagagagagagagagattgttccagctgctctcgctagagaaagggagtgacccaaggggccgcgagtgaagggacaggatggcttaggtacctctgcccacaggaccccacaacagggagaggttccagctacagctcctccgtggggtcatggcaggggctggggagtcccctcaaaagccctgagcccccctgcaccgccgctaagggacaccccagaagttagcatcagtgggactcggaagctccgatctcaacaagtaagttgtcttcttttcctcctccatttctcccccagctcgcgggttctggagggcaggatgacaccctcaggtgtccatcacctgggcagcaggctttcacagggaacctgctagactgggagccaggggggataaggaaaagcttagggcaggtccaagtttaggaaattggagatctccgtggctgcaggctgccctgtgcgttgggagcccagccataaacaccttcacttctggcactagaccagggctacctgggggtgccccagatctcccagcagtggtttgagaggcaacagtggccaggagtgggtggggtgtggaggacatttttcacctggtaggactcttccttcaaatgggagcagggagggccaggatggggggcggtgcccccctcagccttagatccccagcctaatcttgctttctcttttaagtgtggccaaactggaaacacggccttgtgatttctgcccccctcgctgcccaagtcacttcctgcgtacctccctatctccttttaaagagctttcaaatggttcagaaaggccaggggtcaagcctgtgaggacagaggatagggaacagagaaggccggccttgtcattgctccccttctcttcaagtcagtgcttctccctgcagagctgttggccccctggttttatctgtgccttccctcaaaca

SEQ ID NO: 22337 - DNA, 1470 bp, Artificial sequence
  DNA replication origin
ggtgggggagggatcccgcgttcacatgggggaggaacccatcagaacctttagaaatgggattctctgcctacttgcacgggcacccagtggagccactgctcatgaagcagacggctgctttgcagtgatgaatacacttcagatctgagggagacgtggaattagtcacggtggaaggctatagcacattcttctagagcagaagcgcccccagagaaatcatttgtcaggtcatacagcaaaacaatgacctcagcccccagggcgctgcagcctgcgagcagccgggcatctgtcctgagagctgagcagactctcggggggccagctgccctggcacctgaagcacttcctgaggagagcgaggaactagagagtgcatttggaggtcaaatttggaattggctgtctagataattccctcccccgctccccgctcccatcccttcttctccccaccctccctggaggtacaaggagaaaactgccactgagaaggaggccgggggttagggaggcctagggttagggaggccggggtagggaggctgggggttagggagaccaagggtcagggaggccaggggttagggaggcctagggttagggaggccggggttagggaggcctagggttagggaggccggggttagggaggctggggttagggaggccggggttagggaggccagggtagggaggctggggttagggaggccaggggttaaggaggccggggttagggaggccggggttagggaggccggggttagggaggccagggttagggaggccggggttagggaggccggggttagggaggctggggttagggaggccggggttagggaggccggggttagggaggccggggttagggaggccagggggttagggaggctggggttagggaggccggggttagggaggccggggttagggaggccggggttagggaggcagggattatggaggcagggattatggaggcagggattagggagggcaagggttcaggagggcaggggttgtaaacctggcactccctactccccatcccagccaggcgttctcatctctgcctgtttccttcctgttccactctccctgtcatatggagtggattttctctcccctccctcaacctctatgtatgtgttggacatcggtttttgcctttgctctggactgaatgtttgtgtcccccaaccccaaattcccacgttgaaaccctaaccccaatgtgatgggatttggaggtggggcctttgggaagggattagtcttagatgaggtcaggaggttggggccctgggagtggcattagtgccttagtggaaagaggaagaggcgggtcatggtggctcatgcctgtcatcccagcactttgggaggctgaggtgggcatatactggagctcagaggttcaaggccagcctgggcaacatagcaagaccccatctctac

SEQ ID NO: 22338 - DNA, 1168 bp, Artificial sequence
  DNA replication origin
tagatcaggccctctggaagatcatttagcagtgtgcttcaaacagtaagggtaaaatatatatatatatttttggagtctcccatgtctacttctttctacacagacacagtaacaatctgatctctctttcttttccccatatttcccccttttctatttgacaaaaccgccgtcgtcatcatggcccgttctcaatgagctgttgggtacacctcccagacaggtggcggccgggcagaggggctcctcacttcccagacggggcggccgggcagaggcgccccccacctcccagacggggcagtggctgggcgggggctgccccctacctccctcccggactgggcggctgccgggcggaggggctcctcacttcccagacggggcggctgccgggcggaggggctcctcacttcccagacggggcagctgccgggcggagggggtcctcacttcccagacggggcagctgccgggtggaggggctcctcacttcccagacggggcagctgccgggtggaggggctcctcacttcccagacggtgcggctgccgggcggaggggctcctcacttctcagacggggcggccgggcagagacactcctcagttcccagacggggtcgcggccgggcagaggcgcccttcacatcccagacggggcggcggggcagaggcgctccccacatcccagacgatgggcggccaggcagagacgctcttcacttcccagacggggtggcggccaggcagaggctgcagtcttggcactttgggaggccaaggcaggcagctgggaggtggaggttgtagcgagccgagatcacgccactgcactccagcctgggcaacattgagcactgagtgagcgagactccgtctgcaatcccggcacctcgggaggccgaggcaggcagatcacttgcggtcaggagctggagaccagcccggccaacacggcgaaaccccgtctccaccaaaaaatgcaaaaaccagtcaggtgtggcggtgcgggcctgcaatcccaggcactctgcaggctgaggcaggagaatcaggcagggaggttgcagtgagccgagatggcggcagtacagtccagcctcggctttcacaactttggtggcatcagagggagaccggggagagggagggggagggggag

SEQ ID NO: 22339 - DNA, 1160 bp, Artificial sequence
  DNA replication origin
agcgcctggccgccgagggcagccgcgggggctcggccgggcgtcccccgcgccagcgcctcatcccgcctcgcgccccgtcaggctcgggggcgggggcgccgggccgcggcctccaagtccccacctccggcacgcaccgcgctcgccctcccgcggcggagtcggcccccggggacgcgggtcctcgggctccagagcctctcaccctgacgccttcgggccgcccccgcagcgcccccgcccagctggccggcgcgtgcccccgccggagcccgccgcccgcccagcctccgcctcctccgctccgcctcctcctgcacccgcgacgcccgcagcggggagaagaggcgcgccgccgcggccgcgggcacgagcacgcgcgaggagggcgggcggcgggcggagcgcgcgcgcggccgagggggcgggggcgcgccgaagcctcgcctgctgttgtcccgggagcgcacgtgcgctgcggtggggcgccgaggggcgttcggcgggtgcccctaggggactgggggacagggaacgcgaagtgggtagagacgctgcctgagaggtcccgacgtaggctgttgcctcggccccggcattgtgctgcggtgcaaaaataaaaaaccggccgccgccgcagcagcagcagtagcaccgggaagaggcatcctccgagactacggcagtggctcctctctactcccagctgacccccagaacactgtcaccgcgccgcggaggagagggggctttgcctcaagtcaggaagatcctcgcctctccatcccttgcacatttgggtctagaatggacgcgccccggttattatttggaatccgggggcctaaaagttccttcagttggcttcttcattcagagttatggaccagaaaattgaaagtggcatggcaggggagagaaaggacaagaaagggtgaaagagtggccaaactgaaggtgcgtggctagactgaaaagaggttttggagacaagggaaggagctccctgggaaccccctgcctgtggatggcactgcccttggtgcttcccctgttccttttgttcagcccccaaaggcggtgcagcacttccacctgcaacgaccatctgtgtcacagaatacaggaaagatatcttgacattctaccgcgttcta

SEQ ID NO: 22340 - DNA, 1182 bp, Artificial sequence
  DNA replication origin
gcgcacactcctgcacacacacctggagcgcgtcccgggggggagggggaggagagccaaaacgagcgtcttaaaatagagagccaggcagaggagcgcgagacaccagagcgggaggcagcgactgagagccgccgggcactaggcgcgcaggtcggcgccggagtggcacgggcgggcgggggcggggtgggcgcggacgcccctcagcacacactccgcacccggccctgcaggaagctcgcgctgattgacagctgcgttgtcccaaaaaggctcagcgaagatgctgatctgcgggtgggtctagacgcgcggcaggcgcgcccgctacccgctctcctccgcgcgccacccgagccccgccgcctccccagctgccgggagcggggcccaggccccgccgtcgcgccagccccgcggccccagcgggccgggcactcgcagccgcgctcgggccggcggacgctcgcgccggctcaccatgcactgccacgccgagctgaggctgagctcgcccggccagctcaaagcagccaggcggcgctacaagactttcatgatcgacgagatcctctccaaggagacctgcgattactttgagaaactttccctctactccgtgtgcccgtcgctggtcgtgcgacccaagcccctgcattcctgtacgggtaagacgctccgctaggggataagtggggttcggtagctttcacgtccgtgtaggtggcctgtgctttgcgatccgagggcgagaggaagggttaagttaagggattcttttcctgcgcctcagcaagcggtgggcattgcaaaggcatctgcgacgtggccgggaaggaccacgcaaggtgtggatggcacgagtggaaataaaggcggcagggccttaggagtgggctgctcgcgcaacgcctgattgtcctgctcggaggagaacgcttcctcgtttcctgctgaaagttcaaacacttgagcaggttcagcgtctaaatcgttgtttcaggaagtggtggtgtgtgtgaatttcaaacttgagcttggcggccttgcatctcaccttgagttaacttgtccagcctcctactgtctccactgtgaattttgcaagtaaatcagtatcctgaggttctcaacaaaatctcgaattcactgagctttgcttacaatgatcgccctctg

SEQ ID NO: 22341 - DNA, 942 bp, Artificial sequence
  DNA replication origin
taagtattggagatttaatggtacattaaacagactaagtccttgccctcgcggaactcgtattctcatagagctaagagacgagtacctcagtatgagatagtaataaatgctatgctaatcagtaggcaggctcaggggtggagagcagtagtgtgttattttagctgcagtgattggagaaggcctctctggggaggtgacatttgaaagagatgaaagaaagcgtgccatgaagtgatgattgggagataaaacattcgaggcccaggaatggcaagtgcagatgttttgtgtcaggaatatgattgaggaacgagaggaaaatcattgtggctggagtgtagggagcaagtgtgagggtgttagaagatgaggatgggagaggttgccagtagttagattatatgggactttgacgttaatttaaatgtgagggggaaccactggaagatggtgagcaagggtgacttgatctggtttacatttaaagaaacatccacctgctgggtagaatgaacaatgggggacaagaacggaaatggggaacccctgtaggaggcagtggcagtcgtccaggtgagaggcaaggctgccgcagatgggagtgaccgttcatcagaggtggagggagtagtggggtctggatgtggttgaagtgggagccagtgcggtttgctggtggcttgagtaggggtctgagaggaggaaggtgagacttaccccatccatggctttggcttgggcgcttggttagatggtggcatcatttattgaggtagaagaaaattgaggtgtggagactgcaagacagagaaaagtgtggtcgggaaggtgtgaggtgtagtggcagcgtgagatgagactcggtggatcaggataatgcgtgggcttcactgggccagtggattggtggcttttggggaatgggttcaaaagaga

SEQ ID NO: 22342 - DNA, 1058 bp, Artificial sequence
  DNA replication origin
gtgagacgcgcaagcaggctggaacctgcatccccaggcccagccgcgcgcaggcaccctcgccgaccctccgctctcccgagccgctccaggacccgcccgctgtggccccgccccggcaccctccaggccccgccccgcgctgccccgccccttccgccgcgcaggcccagagcgtgcgcgcacccagactccttgcgggagcgagtgcgtctgggagcccgcggccggagaagggctgcgggttagggggccggcgcccgcggttcaggtgagggcgggcaaggggcggcgaaagggttgaagtgtctcctgggagtggagggagcgggagcgggcggctgggtccgcgaggtcgctgcccgtgtgggcgtggggagcgggagcggggcgtggggagcggtgcgacgcgtgaggctgggggttagggttaggcacggcgtgggggaggggcggggccgagccgtgcagttctgaggattggacccgggccttgggccagccgggctggcaccggaggggaatttgctgcagagttgagggctttggagccggcggttgctctggaaggacccgagggtttagcttctgcgttggggagggtccagcggggaaagttagaccaggtgctgaaagccagtgatgagaggccgagaggccttcgtggtctagtgaagaggttcagaacgcccgaagatctggaaatccttggcttccggggtccaactccctggcagctgcctggttttggtattttgagattctgttcagaatagtggcagtgcaaaggttgtcagtggactagattaactttagctagacacgcaccgtcactgaagaaacttgtgagcaagttgtatagagacctcctaagaggcaggtaggacactgactttgcagttgatagtctgttctatgccagttctgttaagaaggttttattctgagcatcaggttgcttctgcaatttttttttggtgctattttgaagttttgttaaactcacatgctatgtgctgtctcacccgcttcacttatttaggcataggcatgatgag

SEQ ID NO: 22343 - DNA, 600 bp, Artificial sequence
  DNA replication origin
aatccattcatgggtgggaaacagtttgccagctagggaaagggagaggtgaggagtgagggaggaatattggcatctcaagcagagggagcagcagggagtggtgatgccacgttcgggagattgggagaaggggactgatggagggtgtggcaagaggaagccagggaagcgggttaagctagcgcgctgtgctaagtaattagacttaccagcgtttcagagctgggctaattcaggccgaggcagtgggtgtggagaagaggggccatgttcaagacaggcgtcatgggaggctgacaagaacttgcacttgggtggaagggggaagggtggacagcaaggaatggagatttgcagcttgagaggctagatgtttgggaacaccgctgataccaaaaagcacgacttaggcagaaggagtgggggcagatagcggatttggtttgggggatgttaggatggaaaggcctcatggagatttggcatccaacaaatgtgtgcccgtcacgatgtgcatagcatggtgtggtatttgtgttaggctttgaaatttatgtgatgattcggttaaggtcagttggttgtttaaagggaata

SEQ ID NO: 22344 - DNA, 938 bp, Artificial sequence
  DNA replication origin
gccgggacggcggttgggcggcctgcgcgctccggcggcggcggttgcgcgggcgctccgggcgcggcgggcaggtctccgccggccgggagccgagcaccgggggctgggggccgggcgccgggctgggggtggcagtgcgggcagggctccggggctggccggttgcgggcgcgtggggcggagggtcctgttcgatggggcgcccagctttgtctgcggaggccgcgccgcccacttgccatcgatggctgggcccccggcctgccttcccaagctagcgtccgggaccggggcggggggccggcccgcaggggtgtggggtggcccctgcgggtctgtcccgtggcaccgcgtcggggctggccgggcggaggcggaggccgaggccggggtcgcggccctgccccagtccgcctgcacccagggtgcagcgcagaggcagggcgaggccggtcggcgctcgggagagggctgatggtgtgcacctctccagcccctcgccagcttttgttaagcaggtttaaccctgcagctaggtgttgatactctactaagtaaaatggaatattccccgtctgccctccagccacgcgaacgcagcgctgttgaatttgtgtgcgcgcctttagccttgcttggtggatgagttggattttagtgcattttcaatcaatgtgcgtgtacacttaagcacaaggagaggtggctttgtgctgtcatcgaggattagatgtgtgatgagacccacccagctctgccctgtgccctaattctgctgctttgcctgttgaaaccttgcctgtctcgtcaccccaaattctctaaacttagcagtacttaacctttattaaaaacagcagaatcactcatgactgttttgtggcctctttttctgacctgttctctttgtttctatcactcctccatcgctgtaa

SEQ ID NO: 22345 - DNA, 1083 bp, Artificial sequence
  DNA replication origin
cctttgtgaaggcaattttaagggacagcaggatgtggaagcctgcggttaaggagtgagctgagtcactgggtaaccagtgttgaataatgtttctcaatgtctgaaatgacactcacttcctttccagattggtagaggagaaaaaagaggcgcagtgaaagcgctctcaaggtgcggtgggtcagggtgataggcggcgcccggccgctccctgggggtcctgagggcgagaccccggcaggctcccgactccgggagccgggcgggagttcggttttcgccggcgctccacggccaggccacttcggaggcaatctgtggcggggcgggcggacgcgagggccgcctcacccccgcgcgtcttccgggacaccgggccctcgggcgcgcgggaggcgggcttagcacgggcgcaggctgccctcggcgcccgagacacccaggcacagctggaagcttcctccccgttagcacgcgggccgcagcgggggcttgaccccaatgcgaagagtcgggttttctgattggctgagagtagaaacgcaggcgagcgccgcctgagacccgctctgcgattgggttttacacgaacagcagagcacgaaataaagaggccttcagtcattgggccattatgtgaatctccttttggcttctctgcagactgaataagcgtctcaggatcttcgtcatgactcctaaatctgggcctgtcagttcgccccagcgtttctcgtctctaggcacggcatggggcttacagagtttaaccaatcatataacgtcgagatcaggttgccaggcagattatgctaataagaccccgccttttatgctgctcccactctgcggcgggaagaaccacctggaggtggcggggggggttgatttctatcacccctagggagagaggatcggggacccgctgatcttccagctcccctcacccaacgtcgtgtaagtacctaaaggattaagggaaccagataagccagggtccagactaccccatagactgggagggtgtttcgtctttgcttagtcccacccaaaatggcgcccagctctttccgcgtctca

SEQ ID NO: 22346 - DNA, 1537 bp, Artificial sequence
  DNA replication origin
gcttcacccagtggatcccgcaccggggctgtgcaccctgcgccctcactcctcagcccttcggtgatcgatgggactgggcgcgtggagcagggggcggctctcgtcggggaagctcgggccgcacgggagcccacggagtggggggagtctcaggcatggcgggctgcaggtccccagccctgccccgcgggaaggcagctaaggcccggcgagaaattgagcacagcagctgccggcccgggcgctaagcccctcactgcccagggctggtagggccggccggctgctccgagcgcggggtccgcccagcccacgcccacccggaactcgcgctggcccgcaagcgccgcacgcagcctgggttcccgcctgcgcctctccctccacacctccccgcaagctgagggagcgggctccggccttggccagcccagaaaggggctcccagagtgcagcggcgggctgaagggctcctcaagtgccgccaaagtgggagcccaggcagaggaggccccgagagtgagcgagggctctgaggactgccagcacgctgtcacctctcagctacattgcccaggctggtcttgaatgcttgggtctcaatcaatcttcctaccttagcctcccaaagtgttgggattacaggcatgagccattgtgttcagcctcaaggcagtgttaaataatatatggggcatcgttgtcacctcttttttttttttttttttttttgagacagagtctcgctctgtggcccaggctggagtgcactggcaccatctctgctcactgcaagctccgcctcccgggttcatgccattctcctgcctcagcttcctgagtagctgggactacaggtgcccaccactgcgcccggctaatttgtttgtatttttagtagagacggggtttccccgtgttagccaggatggtctcaatctcctgacctcgtgatctgccctcctcggcctcccaaagtgctgggattacaggcgtgagccaccgcgcctagctgtcacctccttcaaaaaaaacaacaacaacaaatagagacgaggtttgttaccctcgctatgttgcccaggttggtctcgaactcctgtactcaagtgatcctcccgcctcagcctaccacagtgctgagattacagatgtgagccaccatgcttggctctatttttctttttatcatctatttttttataggaatgcttcagttgattatcataagtaggatattgtagagggttgaattttatccccctaaaaagatattcaaggtctaatccccctccccctcctcatacctgtgaacgcaaccttcttcaggaatagggcctttgtagatgtaataagttaagatgagtttatacttgataagggtggaccctatatacaatgattgttgtccttgtagggagagggagatctggaaatgaatacagttcaggcaagacgggcaggtgaagaaggcagaagcagaaagtgaagtgatgaaactgcaagtcaaggaattccaaggattgctggcgaa

SEQ ID NO: 22347 - DNA, 721 bp, Artificial sequence
  DNA replication origin
cagacggagtctcgctcactcagtgctcaatgttgcccaggctggagtgcagtggcgtgatctcggctcgctacaacctccacctcccagccgcctgccttggcctcccaaagtgccgagactgcagcctctgcccggccgccaccccgtctgggaagtgaagagcgtctctgcctggccgcccatcgtctgagatgtggggagcgcctctgcccggccgcccctactgggaagtgaggagcccctctgcccggccaccaccccgtctggaaagtgaggagtgtctctgcccggccgccccatctgagaagtgaggagcgcctctgcctggcagccaccccatccgggagggaggtggggggtcagccccccgcccggccagccgccccgtccgggaggtgaggggcgcctctgcccggccgcccctactgggaagtgaggagcccctctgcccggccaccaccccgtctgggaggtgtacccaacagctcattgagaacgggccatgatgacaatggcggttttgtggaatagaaaggggggaaaggtggggagaagattgagaaatcggatggttgccgtgtctgtgtagaaagaggtagacatgggagacttttcattttgtgctgtactaagaaaaattcttcttccttgggaaaaaaaaaaaaaaaaaaagaagttgagacttgcccaaggctgaatagttaacaagaggctgaac

SEQ ID NO: 22348 - DNA, 1009 bp, Artificial sequence
  DNA replication origin
atttcaggttcagcctcttgttaactattcagccttgggcaagtctcaacttctttttttttttttttttttcccaaggaagaagaatttttcttagtacagcacaaaatgaaaagtctcccatgtctacctctttctacacagacacggcaaccatccgatttctcaatcttctccccacctttcccccctttctattccacaaaaccgccattgtcatcatggcccgttctcaatgagctgttgggtacacctcccagacggggtggtggccgggcagaggggctcctcacttcccagtaggggcggccgggcagaggcgcccctcacctcccggacggggcggctggccgggcggggggctgaccccccacctccctcccggatggggtggctgccaggcagaggcgctcctcacttctcagatggggcggccgggcagagacactcctcactttccagacggggtggtggccgggcagaggggctcctcacttcccagtaggggcggccgggcagaggcgctccccacatctcagacgatgggcggccaggcagagacgctcttcacttcccagacggggtggcggccgggcagaggctgcagtctcggcactttgggaggccaaggcaggcggctgggaggtggaggttgtagcgagccgagatcacgccactgcactccagcctgggcaacattgagcactgagtgagcgagactccgtctgcaatcctggcacctcgggaggccgaggcaggcagatcacttgcggtcaggagctggagaccagcccggccaacacggcgaaaccccgtctccaccaaaaaaatacgaaaacccgtcaggcgtggcggcgcacgcctgcaatcgcaggcactctgcaggctgaggcaggagaaccaggcagggaggttgcagtgagccgagatggcagcaggacagtccagcttcagctctgcatcagagggagaccgtggaaagagagggagaggagggagaggagggaga

SEQ ID NO: 22349 - DNA, 1909 bp, Artificial sequence
  DNA replication origin
gatatctcacttgcttttccctgagttcaaggccctgattttgtaggtgaggtaacaggccccagaggggctacatgtcctaccctaggctcaacaactcaatgaggatttaggtagtcacttgatacttttcccacatacttgcagatgaacctgcacttagtaatacatcgctttaccctcctaccccttacatttaagtcacttcatgcttttcactattgtacattcattttaagttcaatcacacaaagcggtgcagtgagacaggttttaatattcacatttgacagagaagaaaagagagtcccaagcgatggaggaacttgccggtgatcatgcggctgtgtcagtcagctccggctgctgcaacaaaataacataggctggggggcttcaacaacagggatttatttttcacagttcttgaagcctgggaagtccaagctcaaggtgccactttggcccctcagtgatggacctcttcctggtttgcagatggcggccttcttgctgtgttcgcacatggaggagggaggtgagggctgaggttgggggtaggggacagagagtgtgagagaaaagcaagctctttggtgtctctcctaataaaggcactcatcccatcatgacctgctacctccatgacctcatccaaatccgattacctcccaaaggccccatttacaaataaccatcacactggggttcagcgcttcggcacacacattaggggtggggacaaaattcggtccatagcaagagccaaattcatgccagttccagaactagtatcagcacccaagataactgggttcaataacactgggcaaacatttatcgaggactgcactgtgaggggcactgcggcatgacagacccaagtcttgtcagtgacctgagagaggtatggaataactagggagcgagtgccacagtgggaaacatccctctgagcaatcagaagcgatatttcagccgactgagccgaggaacagtgaaaacgcttccaacaggcagatgttggggagaggacattgcaggcgcagaagagtgttaggaagggctgtgaaatggaaaggtgtcgtcttggaggaatcgggcagagccagtttacccacagggaactgggcatgtaggggagagtggtgcagaataaggctggaaaatcccgagttcttacaggcgcactcgtctactccgcggacagtctcttcctttctattgtcagcgtcctgggggtagggttgtgttatgcatttagttgaacctgaagggactagtccaggtctctcagaaggcagtacctaactcacaggcgactgaaaggaaacaaggccagcggagccctggcggtggcgaggctgtgccaattgctaaatggggcagcaggacgtttttctctactgaagtggcaatgccgcggagcaggaaggcagagtagcaggtctcccgctagtgcgtctcaaccgaagaagcggcgtgatctcttcctaaaacacacgaggaagggggcctgggctgtgaggccggcgtggttcttgcacccctggtctctatccctgcctgggcaactgctgggaaggaagggtcggcaagaggcctaaagaccggaggccaagggtgcggagcgcggccggactcagaggcgaggacccggcggagaggcctgggcggagcagggcgggagaggcgcgccctgagtagggctcgggggaggacgatggctgcctcctgcggtcctccccctgcctcgggggacggcccttggcagaccgtcccggactcctaattcatcctgtttttaataaaaccatttccagaatcaaaaagagggcggtacccaaaggagtctgaagaatgcccagcaggggcaggggagcggggcgtgcccgtatcgggaggctga

SEQ ID NO: 22350 - DNA, 792 bp, Artificial sequence
  DNA replication origin
ggaccccgtacgctccctcgcgcggcaccggggcctcggctccgggcctcccacctgcgagcggcgggcttcgcctttgttgccaggtggacgcggccccggccttcgcgcgcggcagggatgctgcgagccccgggggagctcccgcgccaggccgcccgctgctccctctgccgcctggggccgggtcgcggacgcgcattttttaagtggcgctgtttgcctgcgtccgtagaccgaggaaacccgctctgggtgcgttgaccgctttcgtgagggtttcagtgagtagggaaggtgcccgcgaaggcgtgtaaactgttggaaaaatcgtcctcttcgggtgtcagaattccatcagtggttgtgcttcgaggtcgcaccctgagcatccccgctgcgagaaaggcgaagcggcagggccgggggttggggaggccgcgggagggggcgggggcggcggggtccgcggtgcgggccggagcgggcagccttggaggagccctgctgtggccgagggagacggcgagcttgatctttacttcccttctcgaagtggtgcttgaactgctggtctggaatgtgtagttctggtgtcgtttatttcttctccctcttcgctcttttaaaaattacaactggtttctgcatacttagctaatttcagagagacctgaagactggatttgattgggcattaattgagagctttcttttaaagacctcaggtttagaatatatttacttctacagaatgttcaagtatttccacgggtaaaaataaatctaata

SEQ ID NO: 22351 - DNA, 818 bp, Artificial sequence
  DNA replication origin
gcttcgaggtcgcaccctgagcatccccgctgcgagaaaggcgaagcggcagggccgggggttggggaggccgcgggagggggcgggggcggcggggtccgcggtgcgggccggagcgggcagccttggaggagccctgctgtggccgagggagacggcgagcttgatctttacttcccttctcgaagtggtgcttgaactgctggtctggaatgtgtagttctggtgtcgtttatttcttctccctcttcgctcttttaaaaattacaactggtttctgcatacttagctaatttcagagagacctgaagactggatttgattgggcattaattgagagctttcttttaaagacctcaggtttagaatatatttacttctacagaatgttcaagtatttccacgggtaaaaataaatctaataaaaagcctctctgatggaacggcttaacacctttgtattcatccagtttaaagctttgtgactgtgagggtaagaaaggagttcagctttaaagagaaatagttaacgtttatctacagaggattttggattgcgattgtttcagtgtgtccacacaatggtcagagttgtatctgtgatccctgatatgtcgcatgaaaacagctaggtgagtgagatgggaagaaaaaataaaggctttcgtatggaagatgggacttcactagtgggtcgggtgtcagaaaccatcgttcacactcgcactccacttcccactgctatgactaatttgaggcattagtgaattcacagtagaagactcagcagttttaaagaattcgttaatacttgtgta

SEQ ID NO: 22352 - DNA, 970 bp, Artificial sequence
  DNA replication origin
gggggtgtcagccccccgcccggccagccgccccgtccgggagggaggtgggggggtcagccccccgcccggccagccgccccgtgcgggagggaggtggggggggtcagcccccctgcccggccagccgccccgtccgggaggtgaggggcgcctctgcccggccgcccctactgggaagtgaggagcccctctgcccggccagccgccccgtccgggagggaggtgggggggtcagccccccgcccggccagccgccccgtccgggagggaggtgggggtgtcggccccccgcccggccagccgccccgtccgggagggaggtgggggggtcggccccccgcccggccagccgccccgtccgggagggaggtgggggtgtcggccccccgcccggccagccgccccgtccgggagggagatggggggggtcagcccccccgcccggccaaccgccccgtccgggaggtgaggggcgcctctgcccggccgcccctactgggaggtgaggagcccctctgcccggccaccaccccgtctgggaggtgtgcccaacggctcattgagagcgggccaggatgacaatggcggctttgtggagtggaggggcaggaaaggtggggaagggattgagaaatcggatggttgccgtgtctgtgtagaaagaagtagacatgggagacttttcattttgttctgcactaagaaaaattcctctgccttgggatcctgttgatctgtgaccttacccccaaccctgtgctccctgaaacatgtgctgtgtccactcagggttaaatggattaagggcggtgcaaaatgtgctttgttaaacagatgcttgaaggcagcatgctcgttaagagtcatcaccaatccctaatctcaagtaatcagggacacaaacactgcggaaggccgcagggtcctctgcctaggaaaaccagagacctttgttcacttgtttatc

SEQ ID NO: 22353 - DNA, 2140 bp, Artificial sequence
  DNA replication origin
ccggatggggcggctggccgggcagaggggctcctcacttcccagtaggggcggccgggcagaggcgcccctcacctcccagacggggcggctggccgggcggagggctgacccccccacctccctcccggacagggcggctggccgggcggggggctgacccccccacctccctcccggacggggcggctggccgggtgggggggctgacccccccatctccctcccagacggggtggctggccgggctgaggggctcctcacttcccagtaggggcggccgggcagaggcgcccctcacctcccggacggggcggctggccgggcggggggctgacccccccacctccctcccggacggcacggctggccaggcggggggctgaaccccccacctccctcccggatggggcggctggtcgggcggggggctgacccccccccacctccctcccggacggggtggctgccgggtggagacgctcctcacttcccagatggggtggctgccgggcggagaggctcctcacttctcagacggggcagctgccgggcggaggggctcctcacttctcagacggggcggttgccaggcagagggtctcctcacttctcagacggggcggccgggcagagacgctcctcacctcccagacggggtctcggccgggcagaggcgctcctcacatcccagatggggcggcggggcagaggcgctccccacatctcagacgatgggcggcggggcagagacgctcctcacttcctagatgtgatggcggctgggaagaggcgctcctcacttcctagatgggatggcggctgggcggagacgctcctcactttccagactgggcagccaggcagaggggctcctcacatcccagatgatgggcggccaggcagagacactcctcacttcccagacggggtggcggccgggcagaggctgcaatctcggcactttgggaggccaaggcaggcggctgggaggtgtaggttgtagtgagccgagatcacgccactgcactccagcctgggcaccattgagcactgagtgaacgagactccgtctgcaatcccggcacctcgggaggccgaggttggcggatcactcgcggttaggggctggagaccggcccggccaacacagcgaaaccccgtctccaccaaaaccagtcaggcgtggcggcgcgtgcctgcaatcgcaggcattgggcagactgaggcaggagaatcaggcagggaggttgcagtgagccgagatggcagcagtacagtccagcttcagctccgcatgagagggagaccgtggggggagggagggggagggggagggagagggagctctgtcttgatgatagaataccacttagtttgcaatacagttaacgtatgaataaactaacaaagaacaggaagggagagatgcctatgaaatcttgaagatggcaaacagactgagccagcaaatcagaaaaggctgagacctcatcttagccgggaggagccaagtaaaagcaacctcatttgcagagcaaactcagatctgagagatagaaagcaccagggcctctgaagacatgctgaggccccaggggacatagatgaaactaaatgtgagcatttagccccctgaatacccctccctacctggcagtctaggaaaagacttgaggtttacttggggagagtgggcccagcagaaggtgagggactgagcagtgaaagtctccctaaccaggcccggggcagagaactgactgaaggattcctccctggagaggcaaaggccgctcttgaccttgtgcatgtgcaggaaacttccagaaacttccaaccatcttcttagtgttcccttcttaaatgtgaattagatggcttaggatcaccaaagacttcaggaacaccttgaacatgaacgagaacaaaacaagaagaaaaagcaacttgaaggcaatgtagggaatagacaaagacaagttcttacctcaaaggagagaagagggggcataacatctatgaagtaattgtttgaaatttaaagacgttcagataacaaagggttcttggaaattagaaatgtggaagcagaactaagaccccagtagaaatcttccagaaggagaaaacaaaaaga

SEQ ID NO: 22354 - DNA, 1713 bp, Artificial sequence
  DNA replication origin
aaaatgcaacgaaatggtggtgagctccatgagagaggtacaaacagagctagttctggttgagagggaaggaaactcctggggaggaggtagcatatcagtcaggaagcgtgaggtttgcagcaataacaaacaaccctcagctctcggtggcttaacatcccaaaagctgactgactcctcattcatgctacatatccagtgtgtgtcattgtagccacttagggtcacaggtcacagagttaaacctctcagaagagagcagggcattgtgcagtgcctccttatgctgctatgtacaagtggtgtgtcctctcattggacattttcttggttaccgctagccatactgccatacctaacttcagagaagagagagtaacaccctggcctgtgcccagaaggcagagagctaaaaacattcaatgaacaacactaaaaaaccccatcggtgtcttcgacccaatatgcggaaggagtatgaaggagaagagcttccaggggatgaaaagctttatgaaagctgccaagatcagaacgcctggctggagagaggggctccaaacaggaatgcttggaggcacggtgttaagggaggacagggcagagtgtgaagctgggctaaggaggttggatttgatccgggagacacggaaagtcataaaggagctgtggtttcagatttacctgactgctttgtgtaggagagatcagagggtggcagcccagaggcaggagatctttcttaaccaggcaaagggctctgaggactcgaatagcggtcttctaatgcgcaggaatggaagggctatgcttgtcagcagagtcttgatcagatttggaactaattggatatgagatgtaagcagggtggagaatcaaagatgattccaggatttgagcctgggagaatgctgccattagaattagagaaaacagtggaaaatgggcaagtcagggaaggaagatggggcttgttgatctcaaagcagggatttttattttgttcactcctgtttccctgtacccaggacagtgcttagcgcctagtgtgtgcttggtaatgttcattggctacagaatacagtagaacataaatggagacgtccccaggcgaccgctaaggcagaactggcactccttggtggtgtctgtgctgggagggaggtcttcctgtctgaagtcgtaagatgagacgtgctgccaagagaaaaagcttagagaagaaagggatgaaactgaagggagaactttgggaatcatgacatttaggactagaaaggaggaccggaatccagggaaagggggcatttgaggaagcatcagatgctgcaagtgggcgaggggcgttgggatggctcagagggcatctggtggcacagctcatgtcactgggcctccccagggtagccgggcgcaggccagcaagcgcctcccgcctggagaacaggaggctgcgtagccgacggggagcctgggccaggggcggttctggtttctgtttggttttggggggttcataaatgcgatttagtcctgtagcaaagtgagcaaggtgaaggggagagaccggaggcgcatgagggaggagggaaaagatggttggcatcaaggaggtggataaagggctgccctcccggggcagggcccctggagggccggaggggtggtgaacgccgtcgtggtgatggtgagggccttagcgaccaccac

SEQ ID NO: 22355 - DNA, 1934 bp, Artificial sequence
  DNA replication origin
gcggagctgcagccggagaaagaggaagagggagagagagcgcgccagggcgagggcaccgccgccggtcgggcgcgctgggcctgcccggaatcccgccgcctgcgccccgcgccccgcgccctgcgggccatgggagccggccgccggcagggacgacgcctgtgagacccgcgagcggcctcggggaccatggggagcgatcgggcccgcaagggcggagggggcccgaaggacttcggcgcgggactcaagtacaactcccggcacgaggtgagcgcgggccggggacccggggcgctgggaagctcctgcccgcccgaccctgcagcgcggcgctgggctcggccggctcccctggcgtgtccgtcggtggccgagctctgggcgcacaggtggaatttcctgttcagcgggtgccgggccgcgggcgggcggggctggccggacctttggtaccggaccggctgcgccccgccagggggaggcgggaagcccctgggccttcctgcgccctcggtcctttctttccctgagttgaaaaaaggggctccgtctcggcccctccatgactctcgcgctgttagtgaacatctggaagaaaccaggggcttggagtggggttatttgggaggaagtgaaatttcaggagggtttggagtctcagccatccttggcctctgcagaaagtttctttcgtctctctccttccccgtcaaaaggcgctttgggacctcgcagaggacaactgggaggccagggctttggctgccatacgggctggagctaagaactccagagttgggcttgcctgggcttctcgagaggggatggagccctttgggaaggcggctgtatgggaagggatgtgggaacacacatgtcttgagccttttgcgaagtaccgaaacaggaagctcttctttggcagaaagaacaatgaaagacctattgaaagatctcaaaaagattacatgttcctgtatggagttggggatgggtcgctagtcacttcattgacggacccacctaggtggtagtgcccgggcgggaccagcagccaggtctctaccctctctgtccaaggcagacccccaggtttcctggaaggccagggcataccaggtcagggcggcgctgagaggcaggggctgtgtggcagagagttttgctcctctgcaaatgatggcctccctgccctgccaaccctcactttctcccctccttccgggtgcccctgggctccatagtctccgccgttgctccctaagtcaggcctgattttggtgctgtctcagatcaattccttttgtccaagcagcatcccgacctagggagcttgcagaaaatcagacgctggggctttggaggctgcctgcaccacagacaggacctggggctgggctctgctattttctccacttttcaccctcagcaaggaggaaagcttccagtggacctgaaggcttgggcccttcccctggctgtgcctgtgccctgctgtgaggcagattcaccttctcttccttgctgtaattgctatgtttgtgtccttgctaattgcctacttggggttctagactccctgcctcttcagcagagaacctgctgtttggaatttgttatttcagggcagtccggtgcccccaccccaagtttgttctccctgacttccctttctaggactctcctgcccacacggggaaagcagggtcttcctggtcgtgtggtccagcctcctctctgagccatctcaccacctgacaagcagccaggctggggctcaccttccactcacccccaggatcccacattcagcggacttgtcttgtcacctgcaagccctggctttagtttcccccatccctgctcatttcctcctcctctgcgaagctcatttgctctctgcgcccttgggctgttccttccccctc

SEQ ID NO: 22356 - DNA, 1252 bp, Artificial sequence
  DNA replication origin
cggctcgctgcctctctcctcccccgggaggctcaggggcccctatctcgggccgccgcgcctaggcccgtgagcagcctgtggtggggcatggcggcacagccaccggcgtgcccgcgagtgggagtgcgaggaggcggggagggaagcacccccagcgctcggaggggccagaggggaggagcgagggggcccgggagccgcgcgctggcgaccgttggggacggttggccgagggcaggcggttgtttggggagcgcggcgacggctcgcgtgttcccagcggggcggggtggggaaggggaaggggactgaggggaggggagggggaggttgggagggagccgccgccgcgcgcgtgcggccggcgccgccgccgttgccgctccgctcactccagcctgtttgggggcactttgtttgtgtcccacaatgctctgcgccggcggcctggctggggaaggggaggagaagggggcggggcggagcgcgctcgggggcggggctcggggcggggaaggaaacgtgatgattgcgcaagcgcagaaaatgggccctcttggccgtcgggacttgtactgttggtgactccgtctccttagacggtggagcctgcgtgacccagaaaggccgtgagtcttgacactgtatttttgcatatgtgcgcacatgtgccgatttacattcacatgccccataagccctgtcccatttgtccttcctctaagccgtcctcttacccagttcccctctcacacctgagaagcatttctccgcaggagtcacatttatagcattatttttttcttcgaactaaaaacataactcctattttctcgggtagtttttgtagggaggtcgaaatagaaacacttcagcccctcttcggcgagggaggttagttggtaaggtgcccattgttcacccatggaaacaggcctgccaagggccgccccgcagacaggtgagcccgcgcccccgtcctgggcggactgcgacatgcggcgggtgtctggattgcgtggctcctcgggcctcctcgcagtgcttgctctcttccgttctagcacttgcctcggtgacctggcaggacgtgcggttcttgagatgagtggagaaacggactcccaggtccctctcgttcttccaacacagggacagctagagctgctccaaaaatataccctacttcttccacaaccgtgaatctgtcatttttactgcaccatcacttacttcctggccttcccgg

SEQ ID NO: 22357 - DNA, 2407 bp, Artificial sequence
  DNA replication origin
cttcttccctctcctgcgcgcagccaccgccgcagcccccatgctccccgcccccgccgccccccggtggcctccgctcctgctgctgctgctgctgctgctgccgctggcccgcggcgccccggcccggcccgcagccggggggcaggcctcggagctggtggtgcccacgcggttgcccggcagcgcgggcgagctcgcgctccacctgtccgccttcggcaagggcttcgtgctgcgcctggcgcccgacgacagcttcctagcgcccgagttcaagatcgagcgcctcgggggctccggccgggcgaccgggggcgagcgggggctgcgcggctgcttcttctccggcaccgtgaatggggagcccgagtcgctggcggcggtcagcctgtgccgcgggctgagcggctccttcctgctggacggcgaggagttcaccatccagccgcagggcgcggggggctccctggctcagccgcaccgcctgcagcgctggggtcccgccggagcccgccccctcccgcgaggacccgagtgggaggtggagacgggagagggtcagaggcaggagagaggagaccaccaggaggacagcgaggaggagagccaagaagaggaggcagaaggcgctagcgagccgccaccgcccctgggggccacgagtaggaccaagcggtttgtgtctgaggcgcgcttcgtggagacgctgctggtggccgatgcgtccatggctgccttctacggggccgacctgcaggtaggactgagagcctcctccagccgccgtgcccggaggccccccagacgcctcccagcgtctctaaaatctccccttccaatccctctgagaaaaaaaaaaaaaaaaaaaaaaagccctccccactcatcttctccagccttaccccaaacgagattctctcctgtctgagaaagagcagtaactcttttctgaacttctgccaccctggatccctgcgcccccacccccaggtcccttccagtttagagtggggctgccgacgcccatccctctcatccgaatctcccgcggcacgtggcgcactgacccgaaagtgggtatcaacgcattccccggcacctgcctctcccagcagagatgaaaattgagcgtttacgaatagctcccactcccacccctcagccctctactgcctccagatctgagaggctcccagggaaaggcagatgggatggagagagatggctgtctgattcccttgggtatggaggtcgccataagcaaaagacattgtttgaaaggagctgaacctggagaggggctgcccaacttctgtgcagccagctggttgtgatcaatggggcatggactaccttgccaacctggcgctcagccccggcagaacttggcaatgccagcagccagcacaagagggaggggcagagaacttctgcctgggggctcagcccaggagctgaagctttggtggaaacgcgaggggcgcaggggctggaacgagctctttgggtgaatgtctctagtaaagccagacccacacttggtccacccagctgcccttagcccagacacagctcttacctaaacaggggagaaaaacagagtccaggggatggctacctaaccagaccatttctaactagatgcaaagatggtgctgactcagcaggaggtgtctgtgttgccctaaaccccaatttctcccctaaagaccaggtgaaggcttttccaggaggaaaagagggtaaggcttccagaagaggggtgctctttgcccctagggagcacagaaccagagatgtgccagggaaggaagaactgacctgcccagacgtcatagttccctgaaacagggatcctggcaatgcagcagctaagctgacactttgtggtgatggcatccttggccgggacccaatactaggctcagtctgtgcccgactgctgggggccccaagggcataggcattgcctgtgcagaatagtccagacaaggaggcgatcagccttctgtttctcaccccatctttcccaccctctatcactgggaaaggcagggtaggaaagacccagggagaaacagatgattaggatgggaactgctgtgggtgagagtccacgtggctgcccctctggctactgcaggtgctgactacaccccagggacgcacccctgcaagcccttgtggtatttgcttccccaaaagcagggcagagcagctttgggtcacgctgatttaacacctgtttccctgcctgtcctgagagcacggagcggtgggagcaccagccctctcctctgactcctttctttaagcaagtactagagagtgtggcaggagaggggtgagaagagggcttctcccatctctttaggacccccacacctggctcctagggggctcc

SEQ ID NO: 22358 - DNA, 1720 bp, Artificial sequence
  DNA replication origin
aaaaagagaaaatcaggagttgtactctgggaaacagcaaataaggggcttcaaggaggtaaaaaccagtcattgaactgttacaatagccctgaggcaacacagagttgtattcattgcttgcccaggtcagactgtcccaagcactgtacaggatgtcccaagcactgtacactgtgctaggacgaagtgttttgcttgttttgagaaaagggttgaagagaccattctttccattgtccttcctctagaagtgtttccccaaaacattctagactcgttattcctatcctataaattatgcaggaaaggaggttctgcaccatgctaggttgggaagttcatcctttcatctaattcacagctgtccctctgtgtttctgagaaagcaaagagaggggggatacttagagggaatttggcagcactttcccctgggcaagagcctcctctttggaggtaacaagccctgagagtctcagatgcatgctgaaccaccacactgcaggaaggggtcagatgggctgaaaagaatcagcgatgacctcgactgtcaacatccccagcataagcacagagctgggtacctgggggcaggtgaattggcaaaggatttaaaggccctgatcccagcggttcctaatgcatcacccacattgacaactcagagaaaggcacagttggtggatgagtctagagtttgtaggtagagaacagggccctccacccaatccagacctgtgtcattgagactgggatgggatgcagttttgtggtcttgagaccatgtcatccctctcttcctgaatactacccccttccctagggggcagtggtgacatgggacagaataaattcacctcatacacatttgttcctggggctgtggcaacgcagtgaaagggcctgccaccttacttgaagtcccgggcaactagcagtatccagaagagaagacctttttcagggactggaggtctgtttccctcttggggaaatgctaacttccaacctcagtgctggtaacttaccactgtgctggcctctgccccacctgccctctaacaggacagtgagagtccctcttagggttaaccaggtgggttgttttttgttttgtttttgttttccccatcttcagtttggagtgaaagttaggaaggctgtgcagtagtgatgagaggagggcatgattttagcatgaccttttcctcctctccctttatgctttacaatgaaaagctcaggaaccttctccccacacagtcggatctccggaggcatctgcagggatcccaacagtgtcgggctctgcagtcggactctgcagggatccgaacagggtcgctgagaccagtgcacgagcctcttcggaagatgcatcctggactcttggccgcagaggagaaagcggttggggtctcccagggactctttctaaagggtcagtccagcatggtaggggttaacgtgggtccacgcgtagagggaaaggaaagaagttgtagttgacacttcaggggggcgggtggcggacgggtctcgctgcctgattggttttgcatttcatcccaatttttttttctccactctctctccctcttttcagtttctctctctgatcccaggggaggggaaacgggaatagtgagagatcaaaaataaacctcttatgtcaagccgggaaggaagtataaataagaagggctcggcagcccac

SEQ ID NO: 22359 - DNA, 2236 bp, Artificial sequence
  DNA replication origin
ggtccttgtccccggatgtgggtgacatcgtggcgtgagcccctggccaccgtcctctgcccgctactccagctggcagaacgctggcatatcagtggggtggagagtgagggggagaaagcgatgaccccactcagcacggcctcaggacgcagaagtccagctcctggggcttgcggtgcaagttgcactggtcccgggccagcagccggcctccgtggcccacacacttgagtgagcgcctctgaaatccccggccgcagctcttggagcagggtgaccaggcgctgagctcccaggtggggcagggctccccgcaggcttgtgtctccacgggccgatgggctgcatcacaggcagggaccgtgcgctgcccggcggagccccggcagtccaccgcccgcttctgcaggccactgccgcagctcgcggagcacggcccccagctgccagccacccagcgtgcagggggcctgtcgtccggctgctccacctggttggagaggctgaggacgctgttgtgcaagacagagggtccccgggggtccttgggatgagaggacttgtcctcccgaggctctttgggcagatagaaggagtagcggacccggggcggtgtcatcttccccacggagaggacctccacggtcagcggctccaggatgggccgggaagcctgcaggctctccaccgctgtgcccgtgccgctgtaccgcagcagactgcccttcaccaccaggtcccgctccaccgccgacaccacgaaatgcccgttgagcaggtacttgccttggctgttcttcagagccaggtagttgtcatccccgatcagccctttgtaaccgcgctggcggatgtcgatgcttgaggcgcctgcggggatggccaccacgaaattgtagccatgcctggcgggggaaaggggggccgtgcatcagatagaagcctggacctgaggaccttatgctccaggatctgttttcctcagtaaacctagctttcggtgaattctggcatgggagtaaaagcacaggttttggagtcagagaggtccctgccccttggcgattggtgctggaaagctgctgaacttctccaagcctccacatcctcacctgtaaagtggagctcagaattccacacacctcactgaattgcagggaggactgagtccaccaaagcacagaaagcatgtagcgtggtgcctggcacacatcaaggatatgtagacatctgccatgaggacgaggaggaggaggaggaggaggaggaggggtggggcgggaggagtaagtccaccatcccagagcctgaggctaggagctcaatgcagtgagaggacactggccctggaggcagggacgcagatccagcctggctcacacgccaactcctggcaattttaagcaagccagtatctctggattctggtgtcctcatctgcataatgagtaggttaagctaaatgatttctaaggctccttccagctccaacaggctgtaaaaggaacatctgccacttaaccagtgaggcaagcctggggtatgtacctcccactccccacgtggccttgccaccacaggtccctgcaaagcacagcctggaatgccatccgtccctggtgcccgagctcccagagacagggctgggcatcctcccttcgcatcaccacccaggggctcaggagagggcgacgtgtccaggggcacagtcaaggctccaggacagccatctaggcctttccatcaccagcacctgggctcccaaattttctaggccaaccatagcctccacccctaactgggacctcaggtgccctgcctaccccctcttcttctagaacgtgggtcagggctttccaaggagcatatgtttgacctcaggaagctcaagctgggaggcccagattctgaagttgggactagatgcccagggattgcccaagacgtgaagactccttcagtcccagctgcccacttgctgtctcttggcagtttattgccattctcacctcaatctgatccccaaggtcagggcctcaggcccagggagaggctggcagctgtcacgttcagcctcatcaaggtgaagctacgatgctaaccgtgttacttggactaactcccttattccccacaagagcacacatgaaatatattagtattatacccactttacaagtggggacatctagagacctggagattgagttcacttgcccaaggtcatccagaa

SEQ ID NO: 22360 - DNA, 1372 bp, Artificial sequence
  DNA replication origin
acggaggccggctgctggcccgggaccagtgcaacttgcaccgcaagccccaggagctggacttctgcgtcctgaggccgtgctgagtggggtcatcgctttctccccctcactctccaccccactgatatgccagcgttctgccagctggagtagcgggcagaggacggtggccaggggctcacgccacgatgtcacccacatccggggacaaggaccatgggctggggcgagaggttccctcctcctccctggactgggcagagggaagcccaggaactcccgcacagtctacctcaggccccgctcctcgggccggttgcggggagaggctttgaggtgcagggcagaaggtgctgaggcccagtttccaaggaacttggaggatgggcaccttccaggcagaacttcagggaccccggcccccagaacggaggccacaggctgctggaagagccatgtcccagcagcttggcaccctcaggtggccccatgggctctgagccgtgtctgaacgaggcagggttttcacggtgcttttagcccactttcctttttgaactgacatggactaagcaataaaagctggctggggctgggcagaagccacggggagagtgagattagggcccctggagcctggcactccaccttggaagacgtggacgtgcacagggagtcccgaggtttctcatcctgcactcttggccctcctataaagaagcagcctctccttcctctgatgtgcagggtgtaggactagtggtagggctgccacggaagtgtcctctgaggctctgcaggtagcggggaaagccagtagggagtctgctgtcttcttcaagatggagccggccattacagaaagatgttgacatttgctaggggctatgcagtctgtggctgatgcagggagttttcagaaagttctggagggttctgctgtcactggactggggttggtgctgagctctgggcctggctttgggagatgtcaccctgggatagggaggaggaagctgcatttctaatggcttcctcctccagagaggcacgtatatgcaggctgacatccgagggtctgtgtcgcctcagacagccctgacagtggccacagtcccgtacccattgtgaggggctggggcatgcctaggagggctaggtgctgaacatctatgtgcctataaactcgtcttcgttccaaacagctactgctgtctgccctgggcacgtcacgttgcatcctaggccttagcttctccactgtttgctacctcagattatgccctctgggaacccagccgtatccctcccctaggacagtggtgacctggtccttccaccacactcagtctttggagagcgagctgtc

SEQ ID NO: 22361 - DNA, 1786 bp, Artificial sequence
  DNA replication origin
tggatagatagatagatggatagatggatagatagatggatagatagatagatggatagatagatagatggatagatggatagatagatagatagatggatagatggatggatagatggatagatagatcgatagatggatagatagatggatagatagatagacagacagatagacagacagacagacggatggatggatggatagatagatagatagatagatagatagatagatggatagatagatagatggatagatagacagacagacagacagatagacagatagatagatggatagatagatagatagatacatagatagatggatagatagatggatagatagacggatagatagatagaaggatggatagatagatggatagatagatagatggatagatagatggatagatagatagatggatagatagatagatagatggatagatagatagatagatggatagatagataaatagataggagacaccaccaccaccaccaacaacaacagagcactgtccgtcctcatggcccatgcccagtgggcatttatcagaagtaaagacaggtggattggccagaaaaagtagaggtgtttgcaagtaagggggtaaggaatggaaatttctaatttagaagtagcccttctactaagggccagattaattaggaacgatggggaatctgaaatcaagatctctgagagtctatatccacaccaagctgagctccttgcaacttctgatcctgaagcctggggagtgtaatggataaaaggctacctagatcaaccctcacctgctcccaccttctctctctgtctgatgcttgttggcctttgacaacacaatttgccttctaccctctggctgcacacactcagtgatggtgaactcactctattctgagatgtagatttccctccttgggcaggtctgccaacatgtccttccgtgcaccatgttaccatcaccactttccctgatccactatgctccagaataaataagagttagagaattgggagtagggtttgcaggtcaagaatgtgtgcctggtgaatgaggaagaaaagatttgtggcatttccttgcgcagaaggaacagagggaggcaagggatggtagaaagccatcaggtaggagacactcagatgcctgctgctggtggtgtgcgctgcgtctcctgggactgatgagtgagacacgttcatccaactaccctttgaagacgtggcaagccctcagcaagaggttaagcttcccccatgaggatttcccaggtcttgctttggctccagaacagttatttccaatgctcagaagctcagaaagtgaccaggagaaaagaggtagagcattgtggagaaagagagagaggaggtgggagggagtgtgtgtgggagacagagaggaggaggaagaggcactgagaaactgaatgtatcatagaagagagggagcagcagggagtatgcacagagaggaagaaaaatggagagctgagagagtaggggaagggagagtggggacatgccagggagggctggagcaagcagcaggctctgtaaggtatggctgctctgggctctggggtcccacattgcttctgctactgggccaccagactgggaaacttggtgggggtcggggttagaggggtggttggacgaggagggctgtgggaattcccagtctgcactgacaggatccggaggcccagccctgaaagccccaggagccccgatggctccaggaagatgggtgctgggtgga

SEQ ID NO: 22362 - DNA, 1773 bp, Artificial sequence
  DNA replication origin
gaagaaaaatggagagctgagagagtaggggaagggagagtggggacatgccagggagggctggagcaagcagcaggctctgtaaggtatggctgctctgggctctggggtcccacattgcttctgctactgggccaccagactgggaaacttggtgggggtcggggttagaggggtggttggacgaggagggctgtgggaattcccagtctgcactgacaggatccggaggcccagccctgaaagccccaggagccccgatggctccaggaagatgggtgctgggtggattggacctggacagagccactgagggctgcaatttggcagtcgccctggctttattggcagcaagtctgacgggagctgaaggcctccctgctgggccctgcggctgccacgtgcccgcctctcggacgccttgcgaggctggtcccctagggcgcccgggggtggacgggagagcggcgcgcatgcgcaggatgcgcttgggcgaggagtggggagatcccaggcaagactgacacggatggggcatgcaggcgacaggccggggtccacctaggcctgggagtggtcgtgctttctgttctgtttttcaattttaatcaatgggctgggcgcggtggctcacgcatgtaatccagcactttgggaggctgaggagggcggatcgtttgaacccagaagttggagaccagcctgggcaatatggagagactccgtccctcctaaaaataaaataaattatccggagtggtggcgtgtgcctgtggtcccagctactcgggaggctgaggcaggaggatggctcgaacccagcagtcagaggctgcagtgaaccacgactgcaccagtgtgctccagccaggccaccttctgagaccttgtctcagaaaaaatattaaattttcatcagtaaaacttgtctgggaaaacctttcctaaagcctgtaaagctttacattactatccccgtcctcaccaggagccaacaaggaatgtgtcgctgcattacagaaggggagcccatgcaggagcagctcaaagactgcccatgagactccagagctggcgctctgcccactgtggtgtaatagcagctactctcttgaaggcttagggccagctagtcccaggcctttgatggctggggccaaaggggtgggcaggacttggcttttcacttcctttaaaagtctgtccacattacctgtggggcatcatggaataaaggaagaaaagcatccaccctctttgttttcccctccctggagtgaagccgccacctgctaagtacaagcccacaatgaaacatgtcactcctgctggggcttacctacccaggaagcacaccctgggtccatttaaaaacactggagatggcctgctgtcctgagatgcacagggaaatgggagacacaaccagacaccaataacacactgcaagagtgtgatggcaagtgtcctcagaccatcctctggccagtacagccagagctcagtcagaaaccaagaaactgcccgggtaggagctgagtttaaccctgcaagtcttaattttgtgcaaggactgtacaatgagctgtaacgggtagacactgagcaaggcagttcagcttgtctgataggacagaagcagtacatatggaactacagtatctggagggataagtatctggaagtggcaagaaatgaacagactggtgctgtggggatgggaggagggaaacagtcaccttgggctggagagtgagcaatcaggaagggctt

SEQ ID NO: 22363 - DNA, 966 bp, Artificial sequence
  DNA replication origin
ggccgcccatgtctgggatgtgaggagcccctctgcctggctgcccagtctggaaagtgaggagcgtctctgcccggccgccatcccatctaggaagcgaggagcgcctcttccccgccgccatcccatctaggaagtgaggagcgtctctgcccggccgcccatcgtctgagatgtggggagcacctctgccccgccgccctgtctgggatgtgaggagcgcctctgctgggccgcaaccctgtctgggaggtgaggagcgtctctgcccggccgccccatctgagaagtgaggaaaccctctgcctggcaaccgcccctactgggaagtgaggagtccctctgcccagccagccgccccgtccgggaggggggagggggggtcagccccctgcccggccagccgccccgtccgggagggaggtggtgggggccagccccccgcccggccagccgccccgtccgggaggtgaggggcgcttctgcccggccgcccctactgggaagtgaggagcccctctgcccggccacgaccccgtctgggaggtgtgcccagcggctcattggggatggcccatcatgacaatggcggttttgtggaatagaaaggcgggaagagtggggaaaaaattgagaaatcggatggttgccgggtctgtgtggatagaagtagacatgggagacttttcattttgttctgtactaagaaaagttcttctgccttgggatcctgttgatctgtgaccttatccccaaccctgtgctctctgaaacatgtgctgtgtccactcagggttaaatggattaagggcggtgcaagatgtgctttgttaaacagatgcttgaaggcagcatgctcgttaagagtcatcaccactccctaatctcaagtacccagggacacaaacactgcggaaggccgcagggtcttctgcctaggaaaaccagagacctttgttcacttgt

SEQ ID NO: 22364 - DNA, 1282 bp, Artificial sequence
  DNA replication origin
tgtttaacaaagcacatcttgcaccgcccttaatccatttaaccctgagtggacacagcacatgtttcagagagcacagggttggggataaggtcacagatcaacaggatcccaaggcagaagaacttttcttagtacagaacaaaatgaaaagtctcccatgtctacttctatccacacagacccggcaaccatccgatttctcaattttttccccactcttcccgcctttctattccacaaaaccgccattgtcatgatgggccatccccaatgagccgctgggcacacctcccagacggggtcgtggccgggcagaggggctcctcacttcccagtaggggcggccgggcagaagcgcccctcacctcccggacggggcggctggccgggcggggggctggcccccaccacctccctcccggacggggcggctggccgggcagggggctgaccccccctcccccctcccggacggggcggctggctgggcagagggactcctcacttcccagtaggggcggttgccaggcagagggtttcctcacttctcagatggggcggccgggcagagacgctcctcacctcccagacagggttgcggcccagcagaggcgctcctcacatcccagacagggcggcggggcagaggtgctccccacatctcagacgatgggcggccgggcagagacgctcctcacttcctagatgggatggcggcggggaagaggcgctcctcgcttcctagatgggatggcggccgggcagagacgctcctcactttccagactgggcagccaggcagaggggctcctcacatcccagacatgggcggccaggcagagacgctcctcacttcctagacggggtggcggccgggcagaggctgcaatctcggcactttgggaggccaaggcaggcggctgggaggtggaggttgtagcgagccgagatcacgccactgcactccagcctgggcaccattgagcactgagtgaacgagactccgtctgcaatcccggcacctcgggaggccgaggctggcggatcactcgtggttaggagctggagaccagcccggccaacacagcaaaaccccgtctccaccaaaaaaaaaccaaaaaccagtcaggcgtggcggcgcgcgcctgcaatcgcaggcactcggcaggctgaggcaggagaataaggcagggaggttgcagtgagccgagatggcagcagtaccgtccagctttggctcggcatcagagggagaccgtggaaggagaccgtgtgaagg

SEQ ID NO: 22365 - DNA, 1997 bp, Artificial sequence
  DNA replication origin
gagaaaacagtgaaggacatggaagggaagtcgggggggggctttcagggaagacaaggggatggagtccaggcgacgacatcgccttggcggggggccaggagggagcaaggtggtgtggggtccacgcctgcccacgccccgcggctctcggctcggccagcctggacccggagctcctcgtgacgtggactccctgggcgcacggggcggaaaaggagcggccgccgaagaagctgccttatcatccgggcagcgccttgggcccagacccacaggggcgaactccccgcggcccccggccgccaacagaggggcgcttgctgggcctgaggatctgaactacgttctgcgaaggtcaaggactgaaggaaccgccctggcactgcggggggacgggccgtaggctgtgggtgcagggccgggggtggcctgggcccctggtgcgccctccgggggctgcaggctttgcttagagcacagcccagggctccccggctccagagtggggcaggcgccggatcctctgcggtctgagactcgcccacccagaccgcacacccttccagaaagggcaaggccccgctgagtgatcaaagccccttgctccccacccgctccaagggccctcgctgaggatttccccttctcctccctgggtttcgatcaaggcagcttccacttccacccgccccttgacatttctctccgctctgatggggaagtgacggggtggacaggacaaacagcttccttctgagccccgtcttcacccgccgtgtgcctcaggctggctctgctccatgatcccaaactgtaaggaggaatcctcccattttgttccccaaggatgtgggccacggcctacgcttagcacccacgtcctgccttccttggaccccaggctgcttctcactgcttccagccattctcccgcactcaggccccgcgccccgcgctctgacaccttgcagatgggaagtgtgttctgtatttccgtacaaggcagcgtccacggtgtatgtttctgagggcagagaacgctttcccttccgggtaagcgtggagtcccctgggtgcttgggttctgccgtgagcccatgctgagcccgtgcagcaaggttcgcgctgagcccgtgcagcatctccacagtccccgggaactgactaggtgcgctgggctggcttgggccgggtttctgccatctgatctcggggtgtttgtgtgtcatgcccacctcttctggtactggggttcacatctctacctgctacatgcatccccctgggagaatgcctgcccctcgatttctggaattctgacagttttgttcatattcctaatgaaatatctgtgaatgtgtgagttgcaccaaggtgttcagggaagcctcgctgcgtgtcatacttttctctcctctcatctggattccaggccttctctgccatcttggtgtgctcctctacccagttccacaaataggtgagctcagggacagacgtgtgaggggagagacgtgctgatctcatcatgagtgatcatgagatctcatcatgaattcagcaacatgggtctctgcctgtgagaccaccaggttcatgtcctctctgctgtcattgccaacacaacagcatagggttatcccatagaatttcatcatatgtggacgagggagccaactgtgtaaatgagaatccctctacccaggtaataggtatacgaccagtaataactggtattgctgagtctctctggaaggctggcaggtggcaagagtgggaggaggtggcctggggtgccagctgccagcaggaagggtgagaacagctttgaccccaccttctgaggagtgcagtccaagcctgcggtatgggaggggagatgggacagagaggacccaagatccatggcacccttgctggccttccgttttccgtcctctcagaaggctgctgaggcccagccagcccctcctaaaggacttcacctccacctg

SEQ ID NO: 22366 - DNA, 1534 bp, Artificial sequence
  DNA replication origin
gagttcgcccctgtgggtctgggcccaaggcgctgcccggatgataaggcagcttcttcggcggccgctccttttccgccccgtgcgcccagggagtccacgtcacgaggagctccgggtccaggctggccgagccgagagccgcggggcgtgggcaggcgtggaccccacaccaccttgctccctcctggccccccgccaaggcgatgtcgtcgcctggactccatccccttgtcttccctgaaagcccccccccgacttcccttccatgtccttcactgttttctctcctccttctcttccatgttgtcttctgctgaatataaaccccacagcgggtaaagatggcaaccccagggcgcagccaccccgcgctcccgctcggccccgccaggtggcgctggcgcgttctttccgcggcgcggggctgagcggagcggggctgggctgggcgcagcggtcccggggctgggagggaggcggcgcatccacacagctccgccaggtgccaggcgtctttcgtgtgtcatgttactcattactcataacacgaacaaaacaagactgctgggcgaggtaaatatcgttagcttttctaaatgaagaagttgaacactatggcatctgatcgagaaaaaagagggagctggaccccctcctggatgggactgcgggcaggcgtgggaactgtcatcaaggcatcccacatggcccctaggtaagcacgagtgaaaagtctcaaagggaagggaggaaaaacagaggaaacgggcagggagtcacaggctgacacttcgcggttctttacaacctcggtctttctcttgtccttccactctagggcttgaaaccttccctccaggattgactctgatgcccctagaccctgcctacaagaggtgccacctcccatgcagacctctgggtgatgctggcacagggctagtccatctcccatgcagatctctgagtgatgctgacacagggctagcctatctcccatgcagatctctgggtgatgctgacacagggctagcctatctcccatgcacatctctgagtgatgctgacacagggctagcctatctcccatgcagatctctgagtgatgctgacacagggctagcctacctcccatgcagatctctgggtgatgctgacacaagcctagaccatctcccaggcagatctctgaataatgctaggtcctttttgaagaaactgagagagaaagagaggggatagagaggagacagaatgagagtagacagaggaaagagagagcgtttccattttggcatctgggccaagaaatgcagccatataaaactgttcttacctaagctttgatgtggcatcagggatgaaagtgccttccctagcttcataaaggatgtcacacaaatgcagagaatcaggcaagaacccaagaaaccaaatcacccaaacctctgtgtgactccttcagggttatagaccctgaaagtaaagtcagaggcaaaaaaggggttaaaaaggagactcgattgcctag

SEQ ID NO: 22367 - DNA, 1278 bp, Artificial sequence
  DNA replication origin
cgtgcgatccgggcccgggatcctgcggcagccgcctcggtcaacttcctcggagcccaaatgcgcgctgcggccgccgctgtccggcggggctcggcggggcaggggctgcggcggtggccgaggagggagaggccgggcggcgggagcggaccgcggcggccccaagctcggtagctcgctggggaaggcgcggcgcagcccgcaccggagccgcgcggacgccaagctcagcggccgcccccggcctccgcgccgccttcctcccgggagcagccccgacgcgcgcgggccccgaccgccggggttgtcatggcagcagctccatccctgaccgccactttctcccggtgccgcctcggagcgagcgggcgggctggcggcgcggactgcgctctcatcccggcgggagggcgcggggcgcggggcgcgggcgcccaccttaacccccgccgcgccgggcccaggctgtgcaccagcccagcccaggccaggagtttaaccatttacgcgcttccaaattaggaaaaaagacaaagttaccatgcagccttaatcagcctcagacttgagacatcttaataagggtcacaaactaattaactgggaaaggaacaccctgcagcatgcatacatgcacctttaaaatgatcagattaatcccattagcattcagagtaaactcagagtgttcggaggatgttttagaagaacctcatagttattcagtagtacagcacccgcccagcagccccccacaaagctgctcaaaaccccagagactcaacactaccattctagagatctgccatatataaaacaaatccaaaatcacagaagcctcttagtgtgcgaaactggaaaaatcgcatcatcaaaatgttggtcaagttcagacacccacttacattctttattcttgttttgtcgccattaaaagatgctgggcctgcaaaagtgctcacttgggtggatgagtgtgagccacttgctgtatttatacagcagactcccaggtttcctgggcctcacactctcgcacagctgatttcatctttaagaggtgtgtttctcaaattcttgaaacccggggagagactggatttgcctcggtccctgtcacttctcctctctggctgctgctggtcctcctgtgcctgtattattatttctcccttaacttcggctctgagggaatggcctgcgtttcctttccctggctgggcctggttcttgtgcaagggggaagcacagagcagctcagcaggcacagtggtg

SEQ ID NO: 22368 - DNA, 772 bp, Artificial sequence
  DNA replication origin
ccggcgcggcgggggttaaggtgggcgcccgcgccccgcgccccgcgccctcccgccgggatgagagcgcagtccgcgccgccagcccgcccgctcgctccgaggcggcaccgggagaaagtggcggtcagggatggagctgctgccatgacaaccccggcggtcggggcccgcgcgcgtcggggctgctcccgggaggaaggcggcgcggaggccgggggcggccgctgagcttggcgtccgcgcggctccggtgcgggctgcgccgcgccttccccagcgagctaccgagcttggggccgccgcggtccgctcccgccgcccggcctctccctcctcggccaccgccgcagcccctgccccgccgagccccgccggacagcggcggccgcagcgcgcatttgggctccgaggaagttgaccgaggcggctgccgcaggatcccgggcccggatcgcacgaagcccgcgcggccgtctcctccgcgcgccacccctgcgcctcccgcgagctccacttcccatctgctattgtttccgattgttttccggtggcgagcccggctccgaaacttacaaagtgttggatgtcccccgttcgaactgagggactgcagaccgcctctgggtagctggatgaagcccaccccgtccccttctggtaccaaagtgcttactcctctccaaagtgccgtgtctgaactgccgctgggaagaagcggctcctgagacgcgcccacacctttcacctgccgcgcgcttccccctcctcg

SEQ ID NO: 22369 - DNA, 1750 bp, Artificial sequence
  DNA replication origin
cgagccccgccggacagcggcggccgcagcgcgcatttgggctccgaggaagttgaccgaggcggctgccgcaggatcccgggcccggatcgcacgaagcccgcgcggccgtctcctccgcgcgccacccctgcgcctcccgcgagctccacttcccatctgctattgtttccgattgttttccggtggcgagcccggctccgaaacttacaaagtgttggatgtcccccgttcgaactgagggactgcagaccgcctctgggtagctggatgaagcccaccccgtccccttctggtaccaaagtgcttactcctctccaaagtgccgtgtctgaactgccgctgggaagaagcggctcctgagacgcgcccacacctttcacctgccgcgcgcttccccctcctcggccaccttcccggcggaagcagcgaggagggagccccctttggccgtcctccgtggaaccggttttccgaggctggcaaaagccgaggctggatttgggggaggaatattagactcggaggagtctgcgcgcttttctcctccccgcgcctcccggtcgccgcgggttcaccgctcagtccccgcgctcgctccgcaccccacccacttcctgtgctcgcccggggggcgtgtgccgtgcggctgccggagttcggggaagttgtggctgtcgagaatgggggtctgtgggtacctgttcctgccctggaagtgcctcgtggtcgtgtctctcaggctgctgttccttgtacccacaggagtgcccgtgcgcagcggagatgccaccttccccaaagctatggacaacgtgacggtccggcagggggagagcgccaccctcaggtagggagctgacattgttctgcgaactgatggtttgtatggggtcggggtaaggggcaggggtgcaggtgtgtgcactgaggcgtgcctgggttggcggagaggtcgctggttccctgggctgcacaatttatggctgcgctgggggctctgcccgggaatgtggcagtcgtagggaaaggctcagaggttctggcggtgagctttttcccaaaaactggcctctgcggctcaggcacttgttaaaggtgaggggtggctggaccaggtggtcgccgagattgagggacttgtgcctggcactgtctgtgcctgagcctggtggccgtggtgacagggggcttggaggggctccccgcgagcagtcttctctgaagttaatgagccccaaaggaggggtctggcttggagtgaatgcccccactcgcccatgccatagggctttgccagccctggctcctgcactctgggagagccgctgctttgtcctgggcctgactgtgcccgggctttcctggggtgccttcatgccgtgagctggtgggcagacagagatgctttctcctgtctgaacgtggctttctgaggcccaagtcatggagtctgatttgtccgtggaaaatggcatttactgtagtgaactgtgttctgttcctgctctccaccaaaacggtacatgcaaaactcgtctactgaagagaaactaggtttcagtgttgggttgggtcctgattggcttctggggttaaggcttacaggcactgggggaggagaagaagaagaatcttggttatgctttgtgtaaggtagaatgattctatctccctgattaccttgcctgcagaaacgctaactgaatttccagtgttgataaaccacacctctcatatgcgggcaaaa

SEQ ID NO: 22370 - DNA, 1046 bp, Artificial sequence
  DNA replication origin
tgaataagtaaagcaagttctacaggtgggcctgatttgcatcttgagttctagagcacaaccttcccagacacaccctgccttcctcacactgcccgcatatctgtctacactcagtcccagcaaacgcaaacggatgggctcacagtggggatgcaaacaaagatgaggcgactgagtgagtgaatcaggaaaggatgttttcattttattgagtgaattagactaagtcaaaccctcccttagagtgtaaagtagaagataaataatgtactggtgtgtgtttgtgtgtgtgtgtgtgtgtggtgtggtatgtggtatatgtggtgtgtggtgtggtatgtgattgtgtagtgtgtagtgtatgatgtgtgtgtggtggtgtatgtggtatgtggtatgtagtgtgtgctatgtgatgtatgtggtgtgtggtgaggtatgagtgtgtatgtggtgtgtagtgtgtggtgtgtgatgtgtctgtgatgcgtgtgtggtgtggtggtgtatgtggtgtgtgtggtgtgtagtgtgtgctatgtgatgtatgtggtgtgtggtggggtatgaatgtgtatgtggtgtgtagtgtgtggtgtgtgatgtgtgtggtgtttggtggtgtatgtggtatgtgtgtcatgtggtatgtggtgtgtgtgtcatgtgtagtgcgtagtggggtatgtggtgtgagtgtggtgtgtagtgtgtggtgtgtgatgtgtgtgtggtatgtggtgcgtgtattttgtgtgttgtggtatatggtgcatgtgtgttgtgtgttgtgtatctgtgtgtgctgtgtggtatgtgtggtgtgtggtgtgtgtgtggctgggtgtatgctgtggtatgtggtgtgtgctgtggtatgtggtgtgtgtgcgtgcatgtgtttgtatgtgtgtgtgtgtatattgtgtgtgtgtaagagagatcaacaggggtcccaggcaagggggatgagtgggctgttggcagaggaagaagcgcagcccagcaaaggtggagcctcgctttccataagcagcttgggt

SEQ ID NO: 22371 - DNA, 2211 bp, Artificial sequence
  DNA replication origin
ccgctgcgaggggcgccgcgttctctccgctggcgcgggtgtcgggacggagcgaagtgggcgcggtgcgggctcatccccgcaggcatccccagcccggtgggcgcggcggaggttaaggtgggcgcccgcccgtcgggatgagcgcgcagtccgcgccgcccgccagcccgctcgctccgaggcggcaccgggagaaagtggcggtcagggatggagctgctgccatgacaaccccggcggtccgggcccgcgcgcgtcggggctgctcccgggaggaaggcggcgcggaggccgggggcggccgctgagcgtggcgtccgcgcgtccccgcgtctcgtgccgcgtccccggaggaggcgggggccgccgtccgcccagctccccgtgcgcccggagcctgcgccgggcggcgctcccccggctggccgcgagtcgccgaccgggctgcagaggacggccaccgaccggacgaccctggctgcgccggctgcgcgtccccgccttggaactttttgccgccttggggttccagatgcgagacctggggctgggggacacgtacatctgtccatgtgtgtgatctaataaaccatttcctcctctccttgaagccgcagctttttatgacagctcctgtatgtcagagacacttgccttcttctttgggttataaacttttgatgccagagctctgcagaacgtgcccaactgaatcttaaagtagcgtctcgaagagagaggcagagaaagcgcaatctgtgaccttcatccccgcaccttgcttcttcctctcccctcctggccgcctccctcctccccaggggagcgtcaagaaagctctttttggatgcaggagggggcatctggttctgctaggctggaaagctgaggcaggatctgaggaagaattctcagactccggagagcccggactcctctcttctccttccccctgctcctggcgaactctgccccttccctcctccccgcaccgcttcccgagcccgctggtgcgcggggcgggggaccaggactgtgcggctgccggagtcctgggaagttgtggctgtcgagaatgggggtctgtgggtacctgttcctgccctggaagtgcctcgtggtcgtgtctctcaggctgctgttccttgtacccacaggagtgcccgtgcgcagcggagatgccaccttccccaaagctatggacaacgtgacggtccggcagggggagagcgccaccctcaggtagggagctgtccttccgcgggggccgagcccctgggctgtggtcgctggggagaggagggaagagggggcagaaggctccatgggggaccggaacgcgagtgggccttgtgcaggcccgaggggcgcccgcttgcgtgctgccgtgccgactgccgtgcccctggacaggtttgtcctgtgctccggctatgctggtccaggatcttatgcgtgaaccttgaagtccacgtgtgggactccatggttctttgaagccacgacaggctagattctctcctgcttgggcaccgtgatgagaacatgagtgcatgggtttgaaacactggggggctagcctgagccccttggatggctgtcacaggccagaaggtacatgatgaggcaggatcgtcctcaggaccaccaggctagcccttatcagagatgcacctcaaatgtgaggctgtggaattaccagtgtcagcccacggcctgttatgagtctcctcaagacccagcactcgtgccaaacctggtgtagtgctcctagggtccctattgtaaattatgacagcagttttatttttgcagactgggtccaaggaaaggaaacatgtagcttttatgcaacaacatcacttctgtgtgaaaagcacaataggagagctttttgttttaccttaatgagttacagagaatcacttgcatgctccaggcagagaggtggagaatcttggaatatgaacctttggggactggacttgctgcagcagatactttaataaaaatgcagccaccactttccaccagctcagcagatatcatcttttatccctttaatgaggcagttctggtcctaggagacagattcagggacgtcccagcttaactatgtctcacaatgtacacagggcgaatgcatttgccctgcctatgactttgatggttatggtgacaataaaacatcctgacccagattctgca

SEQ ID NO: 22372 - DNA, 1249 bp, Artificial sequence
  DNA replication origin
gggtcgtccggtcggtggccgtcctctgcagcccggtcggcgactcgcggccagccgggggagcgccgcccggcgcaggctccgggcgcacggggagctgggcggacggcggcccccgcctcctccggggacgcggcacgagacgcggggacgcgcggacgccacgctcagcggccgcccccggcctccgcgccgccttcctcccgggagcagccccgacgcgcgcgggcccggaccgccggggttgtcatggcagcagctccatccctgaccgccactttctcccggtgccgcctcggagcgagcgggctggcgggcggcgcggactgcgcgctcatcccgacgggcgggcgcccaccttaacctccgccgcgcccaccgggctggggatgcctgcggggatgagcccgcaccgcgcccacttcgctccgtcccgacacccgcgccagcggagagaacgcggcgcccctcgcagcggcttcccctacagaggggcggggtggggggagcggggagggagaggggagggcgggagagggagttctggggaaagcagcaaactgaaaactgacactggcaccttccctcgccgatgccagcgcagaagttgacaaaccccgccctggagagctgaactaccctgcccacgccagatggggcaccggtgtgcgtgtccatcgcgctgcgaacggctccccgcccagccaagtccagccctgacggcgcgctgtcctgggcccgcgcagaggtggagtgcacccacctccgaggacccacctcggaaacgcccgtgcccctccactggacgcctgtccccaaagtggcaaatctcaatttctccttaaaacacagcatgcaacattgtccctgtcctacaccttatcgtggtaaaaagcaagggctgggaaaaacacaccagatcctaaaaagtagtaggactgatcctcctaaaacccctcacaggaagcggcgccgcagtggtgctgggaggtgactggggtgcttttggaagccagcctccccctttctttggtctcggatttgtctctttctgctctaaaccccagagctccgcttcccttgggcccctcgggaggccctctccgctcccctggcagaagcctccccgttgtattctaatttaatggttgctatgtgcatctgctctactgtattttctctcagagccttttgttaaattagactgggctctgcacaattggcaaaatgaaatttaattcaaaaataa

SEQ ID NO: 22373 - DNA, 1679 bp, Artificial sequence
  DNA replication origin
gggatgggcgagggggaggagaggatgaggaggggaggaggggagggtggcaggtggggaagggaagaggggagcgtggggaggggaggatggggaggatggggaggaggggaagagaaaggatggggaggggggaggatagggaggagaggaggggtgcgggggaggggaagaggggagggtggggaggggacggcgcagcgggtcctctgccttgggcagacccggccttccctttgccccagccgggtggagcccggctcgcctacccaaggccccaagactccagcgcgggagctggtggcttccaggggctcccggagtggcccaggaccccgggtcgtgcggacgcggggctcctctagaggctggaggggagccgaggcggaggcccaggcccgggcttgtcctgcccttggcctggggaggggtccctgagccgggagctgctctgggcccgggtcacccccggccgtctcagggctcttagcagcaggaatggcgccagtaaagaacgcgcgctagaaggaaacggcaggactctgggcacactcgggagcagggacagaacttcccggggctgctgagggacgcctcccaggggaccgcgctcccgttgggatgcaagggacagatgcctggaagagaaagggcctcacagcacacgctggcggctgaaggctgctgagaagggtgggggctgtatgcggagaggggcggggaggggcgctgccagcgcttcacctgccattcgaacggcgggggctggatgtttactgtggcctcagtttctccttctagaaggagattctggattgggtgatgagtaccattgatgtaccccacaaagcctccccctggggttaagaggaggtgcttaggtccagtagcaggatccccctagagcaggagtgcatttaatacactattgggcttatccaaagggagaatgtgatagaagcctccgtctgtcatctcaagaagagaagtcaatctactccagctcaggatgtggaaaacaaaagacgagctgtgaacaccaaatacagtcctgtgtaagagcgcttcattcattcgctcagccacttgcgaattccttacatattcgttgagcttgtgctttgtagcacacactgggttacgaattgggaaagcagagaatcatcagcctcagttcctaagttgcggaatctgtgatctagtggaggaggcgttcacttaaatgatcagcaggatgccgcatcctcagagatgtctgctaggtggtaccaacggggctgacatcccaaaggaaacggagaattaactgttcaaagagccctaaccctccagatggaagcaccaagtcctgtaaatataagggatgggtatacctcccctctccaccagggacatcagatgcgcctgtcaccctgaagtcaggagcacactgggatgctgcaggagtgtcctacaaggaatagctacattgattatctcggcttcgggtccttccaattctaacacttccaatttatgtttgtggatataatgttgaaactggtcctctcaccaaaagctaataaggcctggcggtaagcccctttccccaccatgcacgcttcacccccactcttccactcacctgtgtccccactagactccgagacccatgaacagtcgtgttctgcaccgatatc

SEQ ID NO: 22374 - DNA, 1355 bp, Artificial sequence
  DNA replication origin
gcacccgtgtgcgcaccacactcacatcacacacaccacgcacacacacgcacacacacacacgcacacaccccgccgagcgggccgcacagtcactggggcgccgctcgctttgctgcctttcccgcgggtgcactgagcggcgggagcgggagccgcgggctttgcctgagccgggcgcgcgctgtggtctcactcccagacccgacccctctgagctgcccctctccgaggccccgcgaccgcatgcgtgtgtgctcccactgccccagcctgagtcccggatactggtgcccctgtctcgggtcgctggctgcggagagggctggcctgagggagccaaccccaccccaccccagcctgggaagggccagagaggggccaggcagggccccggaaggctcggcccatgcatccagcgtgcctgctcccaggaattgcacctggattgttccagccattgagtggataaatccacatctcaaagctggattcagttgcatgttcgccacttgcaatggaaagagacctggcactccattcatactggaacagttatcttgggtttggagtattctgcaggatattcctttggaacacggcctcgccactggggagagaccacatctccaataacgggaggcccatgtggaatgccagatgccctccagaccagcccaggatcccacatgggctgtgagcgcgaggacaggaaggattcgctgcacggaaggttgcggaatgacgggatgatgaacttggtagatgtcccaatcctaaatgttctctctttgaattcttactgtgtgaaaaattcatttggcaattaatcatatacagccttgtgacatcttttctgttattgtctggaattgttatttcaatcctttgttactaattgactttttgcatgctcccgcctcgtctccctaactagatggcaaattctttgagagcagagacctctcttgacattttttttttaactggcaagcggagactgtattgtgcattgtacctacccacagaaaagatctgtagggcaggccttattggtttcattttataaattaggaaagtaactaatggtaatagctcctccaggaacaaacaactagtaagtggcagaaccagcattcataccttggcagttctccaaagcccaccccccagacacctgcacagggccttgcacaccctgcgcactccataaacatcatttggttcttatcattctcaaccatcaatgttttaagaaggctaattaacatccgatgaaggtcaattttcaaattcaagtttcgttgtttagtttcccagaaagaggtgttaagcttcagctgagagattcagct

SEQ ID NO: 22375 - DNA, 1681 bp, Artificial sequence
  DNA replication origin
tgaagctgtgcactcccacttcctgcaatctctttacttagcagcaaattttccttcattaaaattaagcctcatttcttgctcatcttttcctgtttttctcagcaaaactgagtgcaatcctgaacctgtttttcttgctgctttattttcttgtcagttcataactgagtcctctttccctccaaaaacaattgagagctttattccacccgattttgcctctcctttgtgtgggaaacaagaagaagagaagatgaggagtgtgggtgtgtgtatgtggggtgtgtgtatgtgtgtgggggtgtgggtgtgtgtgggggtgtgggtatgtataagtgtgtggggggagtgggtgtgtgtatgtgtgtgtgggggtgggggtgtatgtgtttgggggtgtgggtatgtataagtgtgtggaaacagtgggtgtggatatgcatgtgtgtgggtgcgtgtatgtgtgtgtatgtgtgtgtggggtgtgtgtgtatgtgtatgagggggtgtgggtgtgtgtatgtgtgggagtgtgggtatgtgtaagtgtgtggggggagtgggtgtgggtatatgtgtgtgtggggtgtcggtgtgtgtatgtgggtgttgggttgtgggtatatgtgtgtacagagtgtgggtgggtgtatgtgggtgttggggagtgtgggtgtatgtgtgtgggtgggggtgggggtgtgagtatgggtgtgtatattgtgtagtggggtgtgggtgtagggggtatataagtgggggaggtgtaggtgagggtgtgtggggcagtgagtgtgtggatgtggatgtggggtgtgggtgtgtgtacatttgtgggtgggggttgtgggtgtatgattgtgtgtatattgtgtagtgacgtgtgggtgtggggggtgtataagtgagggaggtgtgggtgagggtgtgtggggcggcgagtgtgtgtgtggggcgtgggtggggtgtgtgtatgaggtggggtatgtggtggtgtgtgtatgtgggtgagggggtgtgggtgtatggggagggtgtgtgtatgtgggtgtgggtgcgtgtatgtgtgtgtggggtgtgggtgggatgtgtgcacgagatggggtatgtggtggtgtgtgtatgtggggggagggtgtgggtgtgtggggagggtgagtgtgtgtatgtgggtgtgggtgtgtgtagtgtgtgtgggatgtgggtggggtgtgtgtatgagggggtatgtgggtatgtgtgtatgtgggcgggggatatgtggtgtgtgagttgttagcaggtgaggggttaggaagtgtttttcctaaatgtccaggatgtactagaaggatccatttgtatattttggcaccaggtttttgtgcagactctaggattactgcttgtgtttcagtgtatttacgctcattgcagagatagtgtggccttatatatccatctggagtgtcaactgctcgaggtaattctctagggtcagattcctagacagggaggtaacagaaaaaaatcgtggaattagcattggattctctgaaacagcagatctcaagcttcgataaatctgcccctccttaaggctatctgcccatctctttagtttatgctcattttcccttcttctctcaatcaggttatctacctaacttctgtttaaggaccaacatagatacatgga

SEQ ID NO: 22376 - DNA, 1082 bp, Artificial sequence
  DNA replication origin
cacagagcaggaagaagaggaaggctggggccagcccaacgtcggggtcactgtgccaggcaccccctccaggtcctggcggtgtcgatcaggacaccaccaatgcgttcttgcagacaaaatgcacctatgctgtgggaggaagagcaagcggttcgcccgccgcgcatcagtgcacccgtgtcccggcgcgcagacaggtccggggcacctgcagctactccggggcacctgcagctattccggggcacctgcagctactccggggcacctgcagctattccggggcacctgcagctatcccggggcgcctgcagctactccggggcaccgccatttcccgcccccataagcgcctagagagccacgccgcgccccgctcacccctgcaggcccgcagccgctcccaagggctggcagtgtcgctcacaggtgcactttgttcatgctgtctgcctccacagttgccgaagtgagttctgcactaatgagctcagcatgcgggacagcagcgccggccctcactctccagggacgcatggagctctgtcaaatgacccgacaaacctttgcagcgcagaggcttctagagggacagagcaaccaccatgccgccgtccgaggagctggcaaaggcacgcggcacctgcaagccggagaaaatggtgtccttcctcctgtgctggactgagcagggaaggaggtcggggctgcgggcgttgtccctggagctgcaccctgagctcagcttctaattactgctaagtgcattttccttccaccagtcacaggtaccttcctgatacgtagagcccatcgaatagaaggtggtgtgacttgggattctaaaaaggagactcggggttagaaggggtgcgtggtgtcaagaatgaacaagaaacatgctggactcaggaagccggctggccgcagtgaaatggagactctggagcacaggccgcggggctgcaaggcgcaacctgaaggcttgctccgctctggaaaggccctgctcctcctggacggtgtctcttcccttcccgcctcccctcggaggctgcctcccctcggacaggaccagg

SEQ ID NO: 22377 - DNA, 1003 bp, Artificial sequence
  DNA replication origin
tcctttcttccctgaaaatcgtgatcatttagttgagccttggaagggagaagaaatatttggtttcttttttcctgtacaggtatatgtttagaggctctgcctgtggattcatgccacatcccactcagagcgtccctccacccagctcactccagctctggtcatgacctcagcactgctccagttggggcgagggagcggcccctcctcctttcccagggagcttgtcagccggtttggacgaggacgctggggtgtacgagaacagcatggactgcgtcaccctgcctcggccactggccagccaccctgccaccctgcctctgtctgtcccttttgcagggtgggggcaggagagggggtgggctctaagccgctgctgtatggcgtcatttctcactttgtagagaacacacacctgaggagagcataccagagttcacgtggtgctcctcagtcagctgttgagacagggctcaagtctgggcaccaggtctctcggggcaaagttgtgccagcttcttttctgccacgcttctgccaaaggctgacttgtcctccacagtcagagatgcactttgggcattggaggactgtgggagggtgaaccatggaaggaaaggggggtgagaggaatggctgggtgggggaatgggtaggaggcagcagcggtcgtggaaggggcggctgtggaggagatgctttgaaggagggaaaggcaggaatgagcacagcctcgaggcatgttggtgggcagaaaggctgctggattaggacggaggggagggaggggcagaagtgaggagcccggactggtgaggagggagagctgctcagaggcctggagtgccctgtggaggaggttatgtgactcacgtcgaagatggccagtgcaccctgggcggggtggggggtcttggtcactacctggctcaggtcgtttgaagcccctgcactcccccatgaagccagctcccctcacagtaacctgcaggcagag

SEQ ID NO: 22378 - DNA, 1287 bp, Artificial sequence
  DNA replication origin
gacagaaaactaattggagccaggctgactcctgggcaaagccatcggtgccagggtccaagcagcagtgagcagcgccaggccacagagctgaatggagggacacatctcagcaagaacaaggtgtttctgaagaagggaggtgagaactggaggagttttctgagccagagtgagtgaatgagtaaccacagccgctctttcagggggtactcgtgaccactgtgtgtgcagagtgggaacagtcaaggctgtgcaccttgctgagcaccaggcacagaatgggcaaggaggatgactggggtcctaaatttctccatttctgacacccaggaagcagtctctttctctagcactgccagttccgaggaggagtcccatggcacttctgcctctcatattacagagagacagcctccaaaagacccctcataagcaaaaaaaggttcacgagaggagtgtggtgtgcatatgtatgtgtggtgtgtgtggagaagagtgtgcatgtgtcacgtgtatgggtggtgtgtgtggatataggcaaggtatgtatgtgtgtaatgtgtatggaagcgtgtataagtgtgtgggggggtgtgtttgtgctcatatgggtgggtggtgtgcaggcatggtgtgtggatataagcaaagtatgtatgtgtgtaatgtgtatggaagcgtgtataagtgtgtgtgtgtgggtgtgtttgtgctcatatgggtgggtggtgtgcaggcatggtgtgtgtaaataagtgtgtgtgtgcatagggatgtgcatggatgggtttgtgtgtaagtgtgggcaggtatgggtatttgtgtgtataagtgtgtgcatggatgtttgtgtataagtgtgtgcgggtgtgggtgtgtatgcaagtgtgtgtgagtgtgtgcatataaatttgcatgcacaagtgtgtgtgtgcctatggctgggcagtgtgcaggtgctggtgtgtgtggggctgtggcgtgggcagtggcaggtgctggtgtgtgtggggctgtggcgtgggcagtggcaggtgctggtgtgtgtggggctgtggcgtgggcagtggcaggtgctggtgtgtgtggggctgtggcgtggacagtggcaggtcctggtgtgttgggggctgggctgtgaacagtggcaggtcctggtgtgttgggggctgggctgtgaacagtggcaggttggaagatctgtggcagccactgtccatgcagagatgccctgtgcccgccccctagggttctgccatgtctgattgctgcaacttgccctct

SEQ ID NO: 22379 - DNA, 2092 bp, Artificial sequence
  DNA replication origin
atcaggtaaggaaatagggactcagagaggggagggcagctgtctaaggttacacagcaggattctgactcaggcctatctgatctcaaagtctcttcactctctgaattctgcctgttggagtatggcttgtggcctacaccacaaaagtgattttgtagggacccttgatgttcattcattcattcacgcatctctacgttcattccatacatatttactgaattcctcctggagactgaggctgcagtgaagaacagcagtgctgagaaggccctggccacagatgcaagaaacaaaagtgacgatcctcaagccaacacaggtttcctgtttactagtgtccccagtgggcggtgatagcacaggttgtgacacttttttccagaaaagtggcacaaggtaaggagcctgcacaagggaaggaggccgcacaaggtgaggaggctgcacaagggggaggaggctgcacagagggacgaggctgcacagggggagaaggccacactggggcaggaggctgcacagggggaggaggccacactgaagtaggaggccacactgaaggaggaggccgcacaggggcaggaggccacatagggggaggaggccacactgggggcagaggccacacagggggaggaggttgtgctaaaggaggaggctgcacagggggaggaggccacacagggggaggaggccgcactggggcaggaggtcgcacatggggaagaggccacactgaaggaggaggccacacggggaggaggccatattgaaggaggaggctgtacagggggaggaggctacacagggggaggaggccacaatgaagaaggaggctacacagggcgaggaggccacacaggggaaggaggccacactgaaggagggggccacacagggggaggaggccgcactgggggcagaggccacactggggcaggaggtcgcacatggggctggaggccacattgaaggagaaggccacacaggggaaggaagccacacaaggggaggaggccatactgaaggaggaagctgcacagggggaggaggccacacagggggaggaagctgcacagggggaggaggccatactgaaggaggaggctgcacagggggaggaggctgcacaggggaggaggccgcacaggaggaggaggctgcacagggggaggaggccacgctgaaggaggaggctgcacagggggaggaggccacacagggaggaggccacacagggggaggaggctgcacaggggaggaggccacgctgaaggaggaggctgcacaggggaggaggccgcacaggaggaggaggctgcacagggggaggaggctgcacagggggaggaggctgcacaggggaaggaggctgcacacgggaggaggccacgctgaaggaggaggctgcacaggggaggaggccgcacaggaggaggaggctgcacagggggaggaggctgcacaggggaaggaggctgcacaggggaggaggccacgctgaaggaggaggctgcacagggggaggaggctgcacagggggaggaggctgcacaggggaaggaggccatgctgaaggaggaggccacacaggggaggaggccgcacagggggaggaggctgcactgtgggaagaggctgcacaggggaaggaggccatacaaggtggggtgaggggcctgcatgagtcaggagcctgctgtggtcccttttcactctgagatcagagaacgggcgataccctgtatgtcatcaccagctgatgtttctgtctgtggtccacggaaaccaagggctcttgacacagattagcccctgtgctccgggctgttccctggcctctatggggaggaggggcctcacttaccaacatggcttcttgcttccgaatgccttgttctcccaaagccaaaatcggtactcagtcctgctccctttccttctgtggaaccagctgcttcactaccccccactccctccctctctcatttctctccatcctggtgggtaaagggccttttctttgtactgtcatgcaaatgtgtgagtctcttccacaaagtgtgtacttaagaagggggcgagg

SEQ ID NO: 22380 - DNA, 1463 bp, Artificial sequence
  DNA replication origin
tgagtaaagggagacataaggctgccttgacaggtggggtgtgatgagtgatgcgagcataggcaggatcaaaggagaaaagataccactgctccaggtcccagaaatgtttccagagaattctaaatattcacgaaacactcttgccatctcccctttccaggagatgccaaaagatcacaaagccttttgtgaaggctgttctaaccctgtctccttctaggaaaaccacttattctgttgattccccactggactgcattgagtacctgcctctgacatggcccctctaacacaggagccaaggagaccattcactttggatggatggatggatggatggatggatggatggatggatggatgatggttggatgggtggatgggtgggtggataggtagataggtgggtggatggatgggtagaagggtggatggatgggaggatgggtggaagggtggatgggtgggtgggtgggtggatggatggatgatgggtgggtggatgggtagatggatgaatgatgggtggataagtgggtggatgggtgggtgggtggtggatggatgatgggtgggtgggtgaatggattgatgaatgatgggtgggtgggtgtatagatggatgatgggtggataggtggatgggtgggtagatgggtgggtacattatttggtttatgggtttctttcctcactcagcctctctctactcacttgtagactgtgctctctagcatagggaccaagaccatcctcagaagggcactagacctgggacaacgcatcctttgtagtgcagaagtcggcgcaaataactgcacatagtaaaatgacacctcagccctagtaactttcgtttaaagatcgaaatttcaaaatcaatgcagaaaggcatttaggaaaggggagtgggcagcccctttgcacttccccacccagcccctcaaccccaaggtgggagtggtgtttctagttgtctcctgacccgaacacagtgtggaatctcataggtgtttaacacgcgtttgttgagtggattcaggtgctgcggaagctctctccagagcttaggagcttagcggggaggtagtatggcatcaaggtctcggggctcagaccctggagcagtgtgcctgggttcacagccccacacctcacatcctgccagggctgtgtggtttgggcaaggttcataacctgttgtgcctccatttcttccgctggaaaatgggagataataaaagtgcctcccacatagggttgttgtgaagattggatgtgtaaatacagacacggtgttcagaagggttcttgaggcagctcatgccatgcaagtgcccattgttagtagtctatgagcatcgcatttgaagtcagatggtcttgtgttccagtcctgctcagccctttgcaagttctgcctcagcctcagtgtgaggaggttattcaggtcccttatg

SEQ ID NO: 22381 - DNA, 2001 bp, Artificial sequence
  DNA replication origin
gcgcggcaccaccctgccctgagggaccgggaacctcgaccggggaggccaccccgcctccgcccggcagccagacgcagtgttcgacatgttttccaattacttggcaggctccgcagcgatgctcgaaattcattttccatcccgagaggggaaaaacaaacgcaagagaaggcagcagctgctctcggcgagttgggaaacttcgccgcaaccagccggaaccggagcggggcaccgggcggctcggggtccccaccccttcccccacccccgcacccctgaaccccctaccccgcgcccctccctcacccccgcaccctccatccccctccccctccccctcctcgcccgcgaggctcccctgactgtggccccgggctcctcccgccgcccctccccgcagtcccaggctcctctcccagctcctccccccagcctcgcatcccccgcagccccgcgtccccctcccagcccagcgcccgtccccgctcgctcccggagccactgccctcccccgtcagcctccttcgagcttattctctgggcctctggaccacaacaaggtccgcagcccgaaggtccccaaccggtgggtttgatcgcggtggggaggacagggcaggacttcgcggggcgggcggtgagtgcagaaagtccacacccgcagctgccctcccagccctgtgggcacggccgctctgcgaggtcagtcgcccccttctctccgcggaccgtcgcggctgttagaatgcgcctcctcctttactgccgtttccccattgccccagacacggtgcgtgacatcggtgctcaggaaatattcgtggaaggagtaaacgactgggtgggctttcgctgctgtttcttagcgctcgcatcagttttctgcctcctccgcccttcagggccctcgttctctgtgtcttcataggcacctgttcgtgggcaggcctggaggtcccgaaaatgaaggctgagcgggtcatgcaagggaaacctggtacgtgagcaggattccagggaaaagggcaggtacaacagtctctgccttataagcaggtacagcagtctctgccttttaaggaggaggcgggaaggctgagtgagcagctgcttgtggcgtgctttcagcaaggaagatgtgcttaccagcagcgtgtgtgcccatgtgggcttctgggaggcagtgtagcataactgctaagacggcttccaccttcggattgccaggcctcggaccctggctttaccatttagcggctgtgagattttgagcaaatggcttcacctctctgtgcttctgtgtcctggagtcctggtgaagatcaagtgagatagcatctcggtagagggggcatcacatgcccgccacttggtagaccctcagtacagggtagctatgaggattcctatacccgggaagaggcaccagccatagcacagccctttccagcaccaatgactgctggctgttagtcttcacgttcataaaacactttcctaagccttttgtaatgtgagtcggtgatctagtcagtccagaaggaaatagtcactgctctctaggagcttatactggaagggaaaagattatgagggcctctaaagatgttggggaaccacagacaaacatttaggaaaaataaaaatattaggtgtgcatttgggagccggtgtaggagggggtgtgctgtcagagattcatgtttggtcaacatgggggctgcatattttcaaaggagaatcagagtcctggctctacgggcttcaaagaggggctcccctgaggacctgctggacccaggactcctggcattctgaggagggggcttctttgcgtctttgtgccccctgagggagggctctctggggcctagaatgggaggagagtggtgtggcatcctgtggccagcaggtgatgctgttgatctagtggtgcaggttgccaggttctggatggtgccctcccaccccccactcatgccccagctgctgatt

SEQ ID NO: 22382 - DNA, 1402 bp, Artificial sequence
  DNA replication origin
aagcaagcaaagggaggaagccctctctctccactattgcagctgagaagctgtttcactagaaaccaccagatggtgacgtttccacacaaaaaccacatttcctgacggtgacctggccttccctttgagtcagctcctgcaggctgggccagtagagattttagcaccgtttgggaagcctctgaagatggagcacctctgagtgtcttcgtgttgttatgaatacagttcacatccacctgcctgaaccacatagcacctattctttccaagaacatttgtggagcatttatgcccagcactgggcccgtgctgtgtgaggatacccaggtgaatgttctgttatgttctcaaggagctcaaatgggtagaagggctgactgcaaacaaataatgaaatattgtgtgaaaataagccaaaagggtataaatggtagagcacagaagggagtggttttctctgcttgagagaaaaattgtcagctgattcccagaggcagtgatgcttaagcagagttttagaggctttcgccaggctctgacaaccaaggagaggtcctccaggcaaagggaaagtccagtccatgtcgcaaggatggaggagggttagggaactgggcctggctgtctgaatgtctggaatgccggtatggtgggtgggggtgtggtgggaggaatggcaggagaagaggctgggaggtgggtcaggtgctgagaggtgacaggtgggtgcaaaataaccccatgaaactggcagaggacccgggggaggaagcatggaagagcaccacgctggtcaggtctggcttcccaggggagagaagatgggcccaggaaaagagggggaacacacggcttgcagaaggggctggagggcagcagccggacaggaatggctgagtcacccacaggctcccactgtctgtctctcgcgcgcatctggagtttggggagagagggacccatattagtattatagccgcagctccatcaaacctagggtggaaatgaaatcattaagtggctcaaatggagttttgttctgtgcatgattaaccccaggaggggagtttgggaacaaatatgcctcctctacctgtattacagggggactgagctacggtaaattaaaagaaaatcactggcaaatttgggaccagtcagctgtgaccaagccatttgtgtagttaaatggagctgaaagaactaatcaaggctttgtggtcatggatcctttgaggggagaggtgagagctgggggtggcaggtgggcgggaagccagtccaggaggccgcaggtggaggtctatcaagggactgcttggtgggggtggcaatgtgcggtgctggcctgtctctgtcttgcaggtcacttcctaataggaccttgttaattctg

SEQ ID NO: 22383 - DNA, 937 bp, Artificial sequence
  DNA replication origin
tttcattttgatgaggcagatgaattttacacaaactcattagttgtgagtcacaattttcataactacttgaaaggtgaagtcttacatataatgggaacttgccttactcagagaagagaacctagatttctattttaaaatcgtcatccccattttacagatgagggacagtcagtccagagaggctaaatagctttcctgatgtcatccagccatgaaatggcatagccagagtttgaatccaaatggtctcatgccagagccagtgtccttaacccctgccctctccagcagagctgggtgaaggatcaattcggttgttgttggtggtgagctttacctgccagacactgcacaaggaagggagagaggctaaggttcctcccctgccccactcttcctaggggccaggacacctggactttctctccccaccacctttccctcccagcctccctttgcctgcatgctccagtaaggtagggcgagggagtagaggatgagtaggaggtaaccaggcagaggggcaggagagcagccagccctgggcagcagcaagtgagagggctctgagaggggagagaagtctggcttcatggacacaccaaaaacctattctggctagatgggagagagggagtgagagggggcatgggggaggctgtcaagaggccggttgggccatgtggcaagtggagacctggttaaggatcctgccttatcccagcagagacaggaaacaggatgtgcaggaatgttaaagcaggaagtgattttacacgtggagacaggctgtgccaaaggacggcggcagagagcccaggaaggatccactgggcagtggcaggttcgtgtgagatgggagcggcgatctggcgatacatggctcctggagtgggggagaagaaaggtcctgggggcacagttgggggat

SEQ ID NO: 22384 - DNA, 1302 bp, Artificial sequence
  DNA replication origin
ctctgggcgcaggagggccccagagcaggtgagctcataaacgctgcctgacagccctcacactcaccctatgccagacagcctcacccacaattccagggcctctgggctgctgacaattttatagctacagatggtaaagaaatgtcagggcagtcctctttatggaggccactcttaggaatgaatgagatttatagccctggttaggaaagtgaacctcccttgacatctctagggggggaaggcacctgtctccttctcgcctggaaagccagaagcacctggacgggaggctcgccgtctcccatgcaggtgcccgatgcctgtgtgtgcccaggcacagggcagagggtccgtggcgagcggcagcaccttgtcaggctactgtgagagggagcgagcttcgggtggccctgagtctctgtgagggactcagaggctccctgaatgcccaagttcctttagcttccacctggaaggacactcaaggagaggctgactgcgggggcagggggagggacacagtgctggtccctgggggtttcacttcctgccagctcaatgcctgtctgcccaggggaagcctgccccctcccctcggggaggtcctcctaagaccctttccctacagcatgacccagggaggacgacaaggctacaacagggaccttgaaagcaatgtggacccaagggctaggtcacatttcagtcctgtgactaccaaggtcaggctgcagaaggcaaggagcacaggggagtgatgacatttcgctacaaagccccataggactgcagggacctgaccctgcagaggaccccactgtcaaggaagaagtggggctcatcccaaccttgtactcctcgagagagcctaataccacgaagatctcaagaagctggtgaggggccagccaccccaggagaagggatgctatgcctggggctgctgggagaatagggtgcgggggggctcttcctggataccagaggggccccagagaggtccccaagggtgcagagatgcaaagcagatctcgggtgttctgggccccttcggggtgcatgcagggccccagggcttctgtgggaggccctgggtgtactggcagcaggctggcgaggctggcgaggagtgaggagagccgcagggggctctagaggggccggacatggggacggggggtggggggcagaagctgcagctaggcggtgccgagcgtggctcgatgtggggaacccagaagccgtggggatcgaggagcggcagcggccaccccacggggcggtgaggggacatgg

SEQ ID NO: 22385 - DNA, 829 bp, Artificial sequence
  DNA replication origin
ttgtactcctcgagagagcctaataccacgaagatctcaagaagctggtgaggggccagccaccccaggagaagggatgctatgcctggggctgctgggagaatagggtgcgggggggctcttcctggataccagaggggccccagagaggtccccaagggtgcagagatgcaaagcagatctcgggtgttctgggccccttcggggtgcatgcagggccccagggcttctgtgggaggccctgggtgtactggcagcaggctggcgaggctggcgaggagtgaggagagccgcagggggctctagaggggccggacatggggacggggggtggggggcagaagctgcagctaggcggtgccgagcgtggctcgatgtggggaacccagaagccgtggggatcgaggagcggcagcggccaccccacggggcggtgaggggacatggtttggatcccctgtccaggaagcaatggcccggccgaagccccgtccgcctgcccgcccccgcccgcccagccgaggagctcccttacctattgagctgaggagaggcttgtctcgacaacactgcccagatagctgagatcaatcagaaacaaagcagttaccaacaccggccggggggcaccgcccacgcacacccagagggaagcagggaggggcacagcgagcaccggacaggcgaggccggagcgtgggggagggaggaggagagagacggagacccagacacgatggaaggaagcagatgagctgagcgcgcacaaagcacagagacagggcggccgcggcacctccgcgcacaggcggcggctgcggctcctcca

SEQ ID NO: 22386 - DNA, 1343 bp, Artificial sequence
  DNA replication origin
ggtttggatcccctgtccaggaagcaatggcccggccgaagccccgtccgcctgcccgcccccgcccgcccagccgaggagctcccttacctattgagctgaggagaggcttgtctcgacaacactgcccagatagctgagatcaatcagaaacaaagcagttaccaacaccggccggggggcaccgcccacgcacacccagagggaagcagggaggggcacagcgagcaccggacaggcgaggccggagcgtgggggagggaggaggagagagacggagacccagacacgatggaaggaagcagatgagctgagcgcgcacaaagcacagagacagggcggccgcggcacctccgcgcacaggcggcggctgcggctcctccacctccctgcgccctaagccccgcacccccttcctcggccggccccggagcagcccgcggtggggctgcgggtgggaggtgaccttggacttccaggtaccagggagggtgggggacggggcagggggagggcgctgggctccctcctcctcgaccacctcccatcctgccttccaccaggccagcctcctctggaactctctgctccctccacaggcggctacatcgagaagagagaccaaaggacggagccagagagagagagagagagaagagggcgggggacggggtatccgggggcactacagaggcgtggccggctcttccgaacccaaaggcgatggtgaggaaggaagataggagagagaaagactgactggagaaggaaggaggggcagggggaggaggagcggggacggcagggaagaaggatgagagaagaagaggcacaggcaggcgtccaggccctggtacctggaataccagctgctacagtttagagagtgctctctcaggcgggctggtcgcgggagctggtctgtctctctgcagcttcctgcgaggtatacggggggggggtgggggacgtgtcctgcacatggtcacaaggcctgacccttttctctgggcctccaggagaggctgaggagggggctggagtccggcgctcactagggctgctaagggccaggagttcgggaacaggaggcccctggcctggtggtctggagaagtcaggctccggggtcctgcttagcaagcagcaggggccggggaagaaaaggaggctagacacgaggtgtgtgggcaacccccaggacccctgcccgatgccaggaccgcagggactcggagagccgtcaactccaagagggacggggtccacccccgcaagggcacgcgctgtgatccgccgctccctggtaggtggtgcgcccgccgagagctcagggcttgccg

SEQ ID NO: 22387 - DNA, 855 bp, Artificial sequence
  DNA replication origin
gggcctccaggagaggctgaggagggggctggagtccggcgctcactagggctgctaagggccaggagttcgggaacaggaggcccctggcctggtggtctggagaagtcaggctccggggtcctgcttagcaagcagcaggggccggggaagaaaaggaggctagacacgaggtgtgtgggcaacccccaggacccctgcccgatgccaggaccgcagggactcggagagccgtcaactccaagagggacggggtccacccccgcaagggcacgcgctgtgatccgccgctccctggtaggtggtgcgcccgccgagagctcagggcttgccggagaagacgcctcatgctcccggcagggcacctgggcaggtgggcccgctgcgccccagcgactgcaccccgcccaaaccgcggcggccagaactcctctccgagggacgccggtgcggcatgtccgcacgagccctgtcgccgggcggatggacggggtggagggcagggcgaggcgggtgggggaaggaagttgcccaggtgcgggtggcggaagaggcggcgcactcaccctgaagtaggtaacgtgggtggtggggtctccggtcggagcaattcctcccccgtccttcgaggggaaggcgtctgtccaaacacgtccaagctgtccccaggcccagcaggggcggggccgggtggaggggaagggtagccggtggccagagtggtgaagcccatggcgggccggtagctgggactcccactgcggctgctctgggagggggagcctgtggacggcgtagactttcgagaaaagctgactgcagccggcggctgcagggtgatctctgacatctctg

SEQ ID NO: 22388 - DNA, 851 bp, Artificial sequence
  DNA replication origin
ggctgcagggtgatctctgacatctctgcctgctgcaggaggcccgggcgaggccgggcacgggcggcgagctcaggggagccggtgcgggagctgagggggctttgggtcagaggtgagagccgggagggctgtagcaccacttgatgtaaactgggctcggcgcgcctggcctgccgagggctaggccggggccggggctggggctcataccaccgggtgtccaggccaaatgtgctggggccgccgtgcgcccccggctcagccggctcggggtaaggcagcacaggtatgcccatgccttggcttgtatgtcgcagctgcccttggcttaccagaggttgcataggtctgtcctgccacttggcggcggggggcgctgggacagggcccctgccgggcgacttgcctgcccaacccttcggtgcctccagagacaggatgcccgggtaggccgcgggcacctgcagggaggtggggggcagtcctcgggggaggccggccttgggctgcagactctcgggcacatcacagggtggcagctggtgggggaacatcatcgctggggtctccagccccccgaaggggaattctggccggccccagggctcaggggagcgccctcctgtaggtgtctgagtcaagggcagcgtgctgttggatgcattctctccattctcctcggggatggtggggtggccaaagggcccctcggtgggcaggggcggggacgacatgacggagctcagggggctgcccacttctggcacgtagaacgggggcggctccacctccccagggctgctgctgctgaggtacccataatactggccatggtggaagggccgggg

SEQ ID NO: 22389 - DNA, 876 bp, Artificial sequence
  DNA replication origin
ggtgcctccagagacaggatgcccgggtaggccgcgggcacctgcagggaggtggggggcagtcctcgggggaggccggccttgggctgcagactctcgggcacatcacagggtggcagctggtgggggaacatcatcgctggggtctccagccccccgaaggggaattctggccggccccagggctcaggggagcgccctcctgtaggtgtctgagtcaagggcagcgtgctgttggatgcattctctccattctcctcggggatggtggggtggccaaagggcccctcggtgggcaggggcggggacgacatgacggagctcagggggctgcccacttctggcacgtagaacgggggcggctccacctccccagggctgctgctgctgaggtacccataatactggccatggtggaagggccggggggcagggggccgggcctggcctgtggcctgaagccgaccttccaggccaccggggccctccagcccgcggggctggaaccgagggctgtatgctggtggtggcaggtaggactcctggctggatgacagaggggtgagctgggacttcagggcggccacagatgtgggcaccagtgggtcctcgttctcctcgtccgactggcggaactcggggtacatgtccgtctcctcggcgaaggggaagccctcgatgcgcctgctcttcagcgagggctccatctcggcagggtccatcacgaagcggccgtcagggcctctgctgatgagctcgatgggcgtggtggcctctgcctcggcctctgccttggccacgctgtacttcttgctgctgatggcccgcttggtcttcttgtacagcgacagctccttctcacgggtggggctcagc

SEQ ID NO: 22390 - DNA, 754 bp, Artificial sequence
  DNA replication origin
gcctgtggcctgaagccgaccttccaggccaccggggccctccagcccgcggggctggaaccgagggctgtatgctggtggtggcaggtaggactcctggctggatgacagaggggtgagctgggacttcagggcggccacagatgtgggcaccagtgggtcctcgttctcctcgtccgactggcggaactcggggtacatgtccgtctcctcggcgaaggggaagccctcgatgcgcctgctcttcagcgagggctccatctcggcagggtccatcacgaagcggccgtcagggcctctgctgatgagctcgatgggcgtggtggcctctgcctcggcctctgccttggccacgctgtacttcttgctgctgatggcccgcttggtcttcttgtacagcgacagctccttctcacgggtggggctcagcatcctcttggccgcgggctggccctggtcgtcggaggattctgacggcgctcggagcgtgcggatgctctcggggctcaccttgccagaggacaagctgcaaggaggagcaagagccgggaggggatgaggtggggcagtgtgctggccaggacttcctttccctctctcggcaaccacccagcacccaggatcctcacgctcaagaaaactggctgtgtatcgtggtgtgaaatgctttggccaactctccaccgtctggacgtgaatcctccttttttttttaaagacggggtcttgctatgttgcccagactggtcttgaa

SEQ ID NO: 22391 - DNA, 838 bp, Artificial sequence
  DNA replication origin
gagggcagcgtgggcgggccggggtctcaggcgcgtcctccccatctgcttcgggcttctctcctaacccccatttctgttcccaccctcttccctgccccttgttcaccaaggtagggaagcccagcagaagcaagcacagtgccctgcccagtgggagcctgcagttccgtgccctgagtaaggaggaccacggggagtgggaatgtgtcgccaccaacgtggtcacgagcatcactgccagcacccacctcaccgtcatcggtacgtggccggcaaggctgggccgggcggcggggacagagcaggctggctgggggcggggtgctggacgctgggagcgtcccctggtggccgctgcactctgcgggctcccttcctaagtcagtgcagccctgaactccgcgtccagcaccggcagcctttgcccccgtgggctctgtcggggaagggcagcgtggctcctgtcctcagggaggtctttctggggacaggcctgatgtccacagcagcccacctgagggaaagaggcggctgtgtggctggcagggactgcagagccttgagtttaagggccttagggagagctggagggctggaatgagggagacggggactgtgcagcatctcagatgagggcagagctgagacctgcaggccaggcctggcgtgcggaggctgggcaggaggaagtttctggggttctgtgtctgggcgttcccgtttccgattgcccgaagcgcgtgtcccaggaccttcgcctgggccctctcagcctgtccttctgggtcctgacggctataatcacagtcacagccaatgcttttggagcctttac

SEQ ID NO: 22392 - DNA, 1420 bp, Artificial sequence
  DNA replication origin
cgcaggggcagactggcccatggtccccagagtgttgtaaggcacacaggtataagtgccaagagcctcctctgtggcctcctcaattcgaatggagccatcctccatcagggtccaaccgaggttctgccagacacagacgatagggcagggaacgctggtcagagactccgcgctccatcccaggctgggtcccagctgggccaggcagcacgcaggatagtacaggagctccagcccggggcgggcggcacccgcagacccctacagaagcagctctctgtttgcccagggcttttggaaggggccaggagtcctggcagaaatccagagcccagaggtggcatcacagtactggggggagccctcactccaaccctcaacatgcatctctctagcaccttctcaacctgcaggggacggccgtccttgttccacttgaccacggtggccggtggttctgcgtccacagggcagcggatgtagccatggatccccacgggcacgtaaatcacagggggcatgttgaggacacgcgctgggtctgcatagaggaagcgcaggtgagagagcagacagacagacacagggacagacagacagacacagggacagacagacagacacagggacagacagacacagggaagccaggtgggagagcagacagacagacagacagacacagggacagacagacagacacggggacagacagacagacacagggaagccaggtgggagagcagacagacagacagatacagggacagacagacagacacagggacagacagacagacacagggaagccaggtgagagagcagacagacagacacagggaagccaggtgggagagcagacagacagacagacacagggaagccaggtgggagagcagacagagacagacacagggaagccaggtgggagagcagacagacagacagacacagggaagccaggtgggagagcagacagacagacagacacagggaagccaggtgggagagcagacagacagacacagggaagccaggtgggagagcagacagacagacagacacagggaagccaggtgggagagcagacagacagacagacacagggaagccaggtgggagagcagacagagacagacacagggaagccaggtgggagagcagacagacagacagacacagggaagccaggtgggagagcagacagacagacagacacagggaagccaggtgggagagcagacagacagacagacacagggaagccaggtgggagagcagacagacagacagacacagggaagccaggtgggagagcagacagacagacacagggaagccaggtgggagagcagacagacagacacagggaagccaggtgagaatccaggccggaggcagcccatgcaccagccca

SEQ ID NO: 22393 - DNA, 1988 bp, Artificial sequence
  DNA replication origin
cgtcgcctcctgcccggcggccgcctcccagagctgcgggaaactctggctgcgggagtttgcggtctccgggcaggctgcagcacgctagagccccgcgccgcgaggagcgcctgcagggaggcgcgacccggaggatccctgggactggcggcacccgcgtctaaggccccgggttcgcgcggccctgcgggcgtccatcgctccgctcgcgcccctcctgcccacacatcttggcagctggaggtcggatccccctagcaggggcgcccggtgagaggaggattgatgaggccagcttcgaggtgtgtccgcttttggctggaccccgccggcccccgcgcctctcagccgcacctgggccccggccaggcaaaagttccccgggagcgcgccgcagccgcgcgggccccacgccgccctccccaggctgcgaggcagagctggctgggggcggcggcgggggaggggaggggcggggaagggggggtccccacgctgtgaatccgagcggaggggggattttctctttccgctttcctgggtctgagctgggggagacgcaaggggggagccaccgagttgggtgatgcgtgcgtgagcgcgcgggcttttgctttggagatgggcagagcgacctacaagcctctgggtggcacccccggctctcggcccttgtatggaagtgggagcggagcctggagggtgccaggactgtgagctcagggctgtcagcgcgcagacacgacccggctgcgggcaagttcaccaagccggaggagatggcggcgggagagaacccgctgtgggtgggagtcagcaggcaggactcgccgacagagaaccctctcccagcggcatggggcgccgggtgggctggaggcgcctctcacggggtcccctcgtcactcgtctgtgcaggggggcgtgcttcaggaaactttccggaatggaatgaatatgtcgcctctgcttctgaggggggtggtggtgtctgaaaacagaacgagcagagggcgaagcgaagggtgattttgttaactgacatgttggtccggacggttttaaaactcttcatttgtcaggtgggaacactgaggcaagggtgatggcggaagcttacggaacggggggtggatgtgaggtgcatcgggctgcgcttgacagtctgcctgtagcctcatcctctcccccatttccttgccgtcttccaatgcccgcatcctcctcccctcccgtttttggtatgttcctgctatgggactgtccctgaaagcacaaaaggatgagctgggatctttgaatagaaaagagacgctgaaggaaggctctgaaatagcctccgaacctaagtcagggtgggcaatggacttctttgcaagtttcagcccagaataaaggaatgtgagtttatactgcagcaacacgcagaatcgcaagatagaaggaagggcttcccaaaattgaaggctgcctggcatgaaggttatgccctctttcagggtgcagaggggtccttctgtctggaatggctggacatgtacccctgtctggaagcagagggtgaccttgctggtcttggggtctttcttagcctcaattgctctgtgtgtggtagttaaggacctaggtctagagccatatgactgggattcagattctggctgtgtcacctgccgaccctgtgaccttggacaaattctcaacctctctaaatgtcacttgcttcaatagaaaatgtgccaatagcatgtacttttagggtttttaggtggacatgagtgttataaggaaacaaaacaactacctgttatatagtacgtgctcagtaaacattaacattattttctcagtgtccctgggattccaagatcctcctcaatttctttcccttgggccattcagggcactaggagctgagaatgtgttgcggggaagttcagaaggctgcctgtgtcaggaagtaagacccctttctgggctgacct

SEQ ID NO: 22394 - DNA, 1653 bp, Artificial sequence
  DNA replication origin
aatatgtctttacagtcccggggccctgggaaagtgtgtaagtgtgtgtgtatgtatatgtgtgtgtgtgtgttgggggtggagttattctgggtcatgccacctggaaatcactgcatcaatgagacctggagatcactgcatcaatgagacctggagcagctcacttcattgtccccagaaaggcatctttgcccaagaagagaaccaaaatcatggctcagggagagatggccccaagttatgcatcttgagtgtgtttgcacaggtggaggggtgggtagggtagaaggttattcaacagtcctggttctctggatctatccaggccctcgacctttatccatgtgctcactgactgctctgttgggggcctctttctgcctcccagctggcggtgagctaagaggcttccggtgtcagggaatgctccacctccggtgttcaaggccactttttgtgcatgtgtgtgtacctgtgtgcacgctttcccagaagcaagtctccttcttgttgttttgggagcttcatgtcctggagccagggctttgtggctaacgagtgctttgagaggatgaaattcctgagctctcgctcgctgaccctctgccttccttccttggccaacagcccatcccagggagcggtgtgattcttaccactgccttcactccttgaaagaacaaacatcttcactgcagcctctgagcgctggtgtgaggtgattgtttgtagtagatgtttccatgacactcatttatttcttctgcaaatacaactgtattgggggaggggaagcagacaggctagggtagggagactggaacatacgaagaccttccagtttcctatttacattcctctgtaggatgagaagctccttccctttccctgggtctcctccatcccagactcctaaagcttcccccaaacccatcttggtttcatgcggccgagtcggggctgggctccgagtaaggtggagaggggaggaaccatgtgcgtgaggaagcagcctttatcaggagaagtgggaaaaagacccaactttgactgcttggagtcgggattcagtaatgatgagcagcagtgaccagcactgggggtggagtgtgtgtgcacgagtgttcctgaggggtctgtggcacttcgcagctgagccaatgactcactctaaatcttagcgactttgagaggtcattttagtcatcccccggtctgcatcacgtttggagggggtggtgcgctgctctggggacgtgtctgggtgcggagggagacggggtggggaggcggcgcgtgacctctttgaaaagatctccggcgaaggacgttccccggctctcccgggccgccggctcctgggtttccccatcatagaatcagcatggtcctctcgggaactgctttttgccggatggaaaccggatgttgggttccatgagtgggcgggggctccacttccctcagacctgtccggggtaattgagacccgccagggtcccgttagaagctaccatttccctcaccagaaacttgccacgcagtgtgagccgagagagaagcgggcagagacgctataccaccttctccccggcaatgcgcatgattctgcggctctgtgctcgccacacttcaacgcaccttgaaatg

SEQ ID NO: 22395 - DNA, 1174 bp, Artificial sequence
  DNA replication origin
tgtgggaattaaacacaatatcgtaagagtggcaggtgcccccgaccatcttgccctggattctgggcaggaagggctggaagccagacggtgagatgtacgtggaggtagacgacacagtctctctggcagcttcttacgcccctcatactccatggactgtttataaacgcccttgcgagatttttaagctctgtgtgggtgggagttgggaatttattatttcatatatattgcaagggcctcacatatttctgcatattcctgtagaatccttggcacctgatttagcatgagaaagttctcatgtttggtgtttaatcaaggtttttatttttgcaatttaaaccagtttctctaaccattggattttgcttcagagggaagcagaaaatgcaggactagatccctactctttgagggcctgtacacaccaggcctctcaggtgtggtgccatatcacctccttgaactgaggtgcggtaggggtgagccagcaagctcggatgtgagcccacctcttctaccgccaaggcccaggtctgtccgtcacaccactgctgctatgaaggtgtcacatgtgcgaagccatcacagttttggcactgacagactagcagctgacattctgtacctggtcctgagaggtgtggaggtggggctggctgtggttgaggggtctccaaattgtctgcaggctgcgtgtgctcaggcactcagggggttgggactctccttgcctggctttcggacttcccacctcatttgcatctcagaatgtcacctcttttcttcatgccgctggttattgatgtttatttttaactggcttgtgattgagatgaatcagagctgtctccgtcagctgcagatgcacctaattggggcgttggaggttcgggcctctctgtcctctttgggggtcctccctgtttatgatagttggaaggctgggacacatctgacttcctatctcgctcctggaagctgctgatggcgccacgagagaccctttgagcctgcctgaatgcccgtttctccggcccctgctccctttgcacccctgggaacatctgtgctgccgaaggcactttatttgtcttcataagacaagagttaaaaataaaaatcaataacgaccagattaccaagggaagattaattccacttctgt

SEQ ID NO: 22396 - DNA, 1020 bp, Artificial sequence
  DNA replication origin
tatgttgtgccaacctcttatctcatcctgtgactcagaaagcctaacccgtgggagtgcagcccagcaggtctcagttttttcaccaaggccccattcaagatggagttgctctggttcagatgcctctgacacacagatgcccacagatccatcttcacctcagcaatgcctctcacacacacagccactgcaaccctgtgtgtctcctcccgagagggtccctcagacacagtcgtgtatttcgccactcagaaaggcgggttcgccttcctacctatgcacacagaggccaggaggacagacacagtgcgacacagaggcaggaatagcagttccatgtgggctggggcccccgctccatttgcccctgcgagggaggtttgtttcccgcctgtgcgtgctgttctgggctcagcatggagacgggggcgggggggggggggtggaggaggagggcggagagcagcttctcagagtcaggctccttcccagctgcgagggcaaacaattcccaagaagaggattgggaattctctgtgagggcagaagagtgtgaggagaacaggctcgggcggggcaggaaggattgcctgagaacgttgaacttggccttcgcagggcaaccaagagtcagagttttcgttgatgccagaaagagaagttaggagtgtgtgggtctgtgcgtgtgaaaaaagggagggagaggcaggaaggggacaaggacagacatcgaggtggaagtaagcaattgagaacatgcacagagtcagactacgggagcaaaggggtagaaataaggaatctttaacttagaagcggaagattgggaagaagaataaacagcaagaggcaggggatccaatctgggaagcgtgcagagagaaaggggcccagagcagaaagcttgcaggtggaaggaaggaggacaggcgggcaggaagccccaggcctgtccagagccccgccactgcaggaaggcactgaaggccgggagggcagctcagctcatctgttact

SEQ ID NO: 22397 - DNA, 1035 bp, Artificial sequence
  DNA replication origin
agccggtccgggcgaggatagcggtcctggctccgagggctcccggggtcccgggccggaggggcggcgcgcgcccgcgtccccgcagccagggctgggactcgggcctggctagggcgggggccctgggacgcccggcagttggaccggggcggggagctaatttgggatggggggcccgtcccaggcagtgagtcggtcccggacagccgtcggaccccgggggcgggctcttctcgggcggggtcctgtgctgggcggtgggctcatcccccgggtgggctcctcccaggcggggtcctgtgctgggcggtgggctcatcccccgggtgggctcctcccaggcggggtcctgtgctgggcggtgggctcgtccccggggtggacccctcccgggcggtgggcacggccctctggagggagcgcggcagctgcggcgtgggcgctggaacttgctggaagaccctgcgcagcagtgctgtgctctccagaagggacggtgagcgggggacgtagctgaggaccggcgaggcagagctccgaggcctggcgggctgcttggtcacagccctctggggatctgcagttcatttgactcgacacaaaggaactgcttttcttttacagaaataaaatggatatcaatccagtaccttttttgtctctggcctggccgaggagaccacgcagactcttatccggaaatagcattcggggcatttgatcaagacacactaataaacttgatagttttgtgcattttctttccctctgtttggaattctcattagatccacattttcctggacagttgtacagaggactaaaatagctttcctttagtgagcttgtactgtctactaggcactttggagccattatctcgtttactcctttcagcagctctgtgagataggtttcattaatccattttcagagtcaagtctagtctgctttccaaggctgcattctaagtagtgaagcctcaacttcatatttacctaaagcaggacaccacactcttcccctggcagc

SEQ ID NO: 22398 - DNA, 2018 bp, Artificial sequence
  DNA replication origin
tcaccgaaacagaataagcagatctagcagtgatgaggaattctctaccatcgtctattagtgacactcaagtagccatcgggtacacagctgcagtgcgctgatgagctttgaactgtaaatgggaagacacagtccatactcaagacaccaagtggagaacggggagcgctctgaagctgcctcctcgcatgtgcttgcagaagggcagcaggttcagtggtaccagcaagcagctgcccagcccgtgctgttcccgggagtgtgctggtggcagcttatgcactgggtacagcaccacccaggaggggcgaggctgcaccacccaggaggggcgaggctgcaccacccaggaggggcgaggctgcaccacccaggaggggtgaggctgcaccacccgggcctccaagacagggtggcatgtgtaggcagatggggcggtgggggggggggtgcagagaagcataatgtgcagacagggcctgctgaggaagaggacgcaggagggtggacgtgtttgtgcacgcgtgcacctgagcctaacaggtgagtctgtaaaggcagcttgggaccagctgagactgagggtggacttcaggctctcctaggaacacagcgattgaggtgtcttgaagcagggcagtaaatttaccagcttcttgatgaaacataactccagtgatgcagggatgatactgctaataaatgacagtggctgctaacatctcttgagcactgcccttgcagccagcacgatgctaagcactcaacgtggataacctcatgtagtcctggcagccccccaatgaggtagctatgtttttatacccacttaagagatgaagaaacctgagggtctcagagcagctcacacagctggtgagacactgagccagaattcacacccaagctgcggtggaatctgctcaactgtgttctcctgttcctgagggcaaactggagggggttcattgcgggtaggtgccatgaacaatcaagggcgaggggggaggtggactgagccgctcccagtgtggcacgacgggacaggatgaggcggcgactggaggtagaagggacaggacttggctgctgattccatgtggaggagctgctcacggtgccatatttccagcgcgcatgctccagtcactggctggaaaccagcaggcacgcgtggaggtgcagaggcaaggagttgaagtgtcctcagggaatctgggtgagccacagtaggaggtgtagtaagtgggacagggcggtcaccgggacaggggcaatgatggaagacggcgggagggaagccagaggcgtgaacagtgaggcccaggggccagccgagtgcctgagggctgcgggtcagagaagggggtcagagagacggaaaggagcatccccaggaggggccctcaacactgccaggccctgggacagggtccagtggaggtctgagggccgccgctgggacactgatgtggacaccctgcctacgtcccacggacaactagaacagagacctccgatagaccacgcggctttcactcagtggtgtctcctctttatgcagagagcatcagtgatgtcacgtttggagcaggggtcagttacatcgggacaccacggactccgtcgtcagccaaaggcaagttcttggtgtccttctgggctgatagatgcactgcctttgaggttctgggaaagctgaatgtgtttgtttgactcccttttagagaaaattgaaggccggagtcaaggaaatgacatcttatgtttatcactgcctgataaaccgtaagtttagcagtgttccttttgaggtggatgtttctgtcagggtttttctgagttccagaatgactgcacatgtcctttccctaggcccccacagcctcagcagtggaatgtgcggtctcccgccaggaataaagacactccagcctgcagcaggaggtccctccgaaagacccctctgaaaacagccaactaaacagcgcctcccaccagtgtccaggcaggca

SEQ ID NO: 22399 - DNA, 3888 bp, Artificial sequence
  DNA replication origin
ttgtgacatgagcttaggggagctgcacactcacttgtgacatgagcttgagggagccgcataatcacttgtgacatgagcttgggggagctgcacactcacttgtaaaataagcttaggggagctgtacactcacttgcgacatgagtttagggagcttcacactcacttgtgacatgagcttgggggagctgcacactcgtgaaatgaacttaggggaacttcacactcatgaaatgaccttaggggagctgaacactcacgtgtgacatgagcttgagggagctacatactcacttgtgacatgagcttagggggagctgcacactcacttgtgagatgagcttagggggaggggcacactcacttgtgacataagcttaggggagtggcatgctcacttgtgacacaaacttagggaagctgcacacccacttgtgagatgagcttagaggagctgcacacacttagattagctgagggggagcggcacactcacttgtgaaatgagcttgcgggagctgcacactcacttgtgagatgagcttaggggagcagcacactcacttgtgagatgagctgaggaggagctgcacacttgtgagatgagcttgggggagcggcacacttgtgagatgagcttaggggagcagcacgctcacttgtgagataagctgagggggagctgcacactcgcttgtgagatgaacttagggaagctgcacactcacttgtgacatgagcttaagtggaggggcacactcatgagcttgggaagggcgcactcgtgagataagcttcggggaaggggcacacttctgagatgagcttaggggaagaagcacactcgtgagatgagcttaggggagtggcacactcatgagatgagcttgggggagtggcacacttgtgagatgagcttacgggagcagcacactcacttgtgagatgagcttaggggagcagcacactcacttgtgagatgagcttgggggaggggcacactagtgagatgagcttgggggaggcgcacactcgtgagatgagcttaggggaggcccacactcgtgagatgagctcaggggagcagcatactcatttgtgagatgagcttgggggaggcgcacactcgtgagatgagcttaggggagctgcacactcacttgtgagatgagcttgggggaggtacacactcgtgagaggagcttaggggagatgcacactcacttgtgagatgagcttgggggaggcgcacactcgtgagatgagcttaggggagctgcacactcactagtgagatgagcttgggggaggggcacactcactagtgagatgagcttgggggagcagcacactcacttgtgagatgagcttgggggaggggcacactcagtgagatgagcttagggagagcagcacactcacttgtgagatgagcttgggggaggcgcacactcactagtgagatgagcttgggggagcagcacactcacttgtgagatgagcttgggggaggggcacactcactagtgagatgagcttgggggaggggcacactcactagtgagatgagcttgggggagcagcacactcacttgtgagatgagcttgggggaggggcacagtgagatgagcttagggagagcagcacactcacttgtgagatgagcttgggggaggcgcacactcgtgagatgagcttaggggagctgcacactcactagtgagatgagcttggagaggcacactcactagtgagatgagcttgggggagcagcacactcacttgtgagatgagcttgggggaggggcacactcactagtgagatgagcttgggggaggggcacactcactagtgagatgagcttgggggagcagcacactcacttgtgagatgagcttgggggaggggcacagtgagatgagcttagggagagcagcacactcacttgtgagatgagcttgggggaggcgcacactcgtgagatgagcttaggggagctgcacactcactagtgagatgagcttggagaggcacactcactagtgagatgagcttgggggagcagcacactcacttgtgagatgagcttgggggaggggcacactgagtgagatgagcttagggagagcagcacactcacttgtgagatgagcttgggggaggcgcacactcgtgagatgagcttgggggaggcgcacactcgtgagaggagcttaggggagctgcacactcacttgtgagatgagcttgggggaggcgcacactcatgagaggagcttaggggaggcgcacactcacttgtgagatgagcttgggggaggcgcacactcgtgagatgagcttaggggagctgcacactcactagtgagatgagcttaggggagctgcacactcactagtgagatgagcttaggggagctgcacactcactagtgagatgagcttgggggagctgcacactcactagtgagatgagcttgggggagctgcacactcactagtgagatgagcttgggggagctgcacactcacttgtgagatgagcttgggggaggggcacactcactagtgaggtgagcttgggggaggcgcacactcgtgagatgagcttagggagagcagcacactcgtgagatgagcttgggggaggcgcacactcgtgagatgagcttaggggagcagcacactcacttgtgagatgagcttgggggagcagcacactcacttgtgaaatgagcctgggggaggcgcacactcgtgagatgagcttgggggaggcgcacactcgtgagaggagcttaggggagctgcacactcacttgtgagatgagcttgggggaggcgcacactcgtgagaggagcttaggggaggcgcacactcacttgtgagatgagcttgggggaggcgcacactcgtgagatgagctcaggggagctgcacactcactagtgagatgagctcgggggagctgcacactcactagtgagatgagcttgggggaggggcacactcactagtgagatgagcttgggggaggggcacactagtgagatgagcttgggggagcagcacactcacttgtgagatgagcttgggggaggggcacactcactagtgaggtgagcttgggggaggcgcacactcgtgagatgagcttagggagagcagcacactcacttgtgagatgagcttgggggaggtgcacactcgtgagatgagcttaggggagcagcacactcacttgtgagatgagcttgggggagcagcacactcgtgagatgagcttgggggaggtgcacactcacttgtgagatgagcttgggggaggtgcacactcgtgagatgagcttaggggagcagcacactcacttgtgagaagatgatcttaggggagcaacacactcacttgtgagatgagcttcttctgagcttcctgcatgactacatttgccaaggccatgtcatcttcttccataaggaggtctttgtctggtttagatctcattgccaaaagcttgatctcctttgagctgaggacctcaaacgtgtctgagagtaactcactggcgtccaggtccaggggtaggatgccatcagcaaagcacgctgagagacagagagagagaaaaacgtgagcttctgagaaatgctctggcccagagaggaggtgtaattcccacaactggggggccatctgaggctgtcagggggtctgcaagggtgttttgtctggggcacagctgatgccagagaaggacaagatgacaggggtcttcctgcagtgccagggtctcccttactagaggcctgctgggccattatcaacacagcatttcatttgcaaacacacacattttctcccacacacactgggcttaccca

SEQ ID NO: 22400 - DNA, 1022 bp, Artificial sequence
  DNA replication origin
gcgtgcggcggacgacgccggtgattggttgagcgaatggaaacggctcggcgcggtggttggccagtgggaaattctgtacgttgtgattggtccacaggaacgactcggcgcgcgcgcgggagcgagctttgaaagttgagcacggcggcggcgagccggtgccctgggatcatggtggcgttgcggggccttggtagcggcctgcagccctggtgtccgctggatcttagactcggtgagcagatgcagccgggaggcccgggggccagggcgagggtcctatgcgtccccgacgatgcctaagcccgggccggggtgccggtgggggcggggtgggggcgcccggctgtcggcggtgcctggggtccccagggccgtgccacgccaggattgcggctagccaggtttcccgtgggggctcaagccggccaggccacccttagaataagcgaatgttggccagtctcttctagcgcctgtgcatctgttttctcggccttccccttcttcctgtgcgtgtcttcgtgcacctatctattcttacctattaagatggttttaaattgcaaatctctttcttccgccagacttatttcttgaacttcatgttcataggttccactggatgtctcacatgcagacatcatcaaacgtcacatgagtgaaaatgggattcccaaagcctgctaatggcaccatccaagccaccaacccaggagtcatggcatttctgcttcccctttcatgcccactaccactgtcctgcctctgaggtgtctcagggcagccccgctccattcctgatgctgctgccttcatcatagcctcgagcaattgcaggagtattttagctgctttctgatgttaactgtgccagcccatcccccacacttttgcagaacgacttttgaaaacacagctttgaatgtgtcaagcctgtacacctttaatgtttcccctttgtttcctaaataaatgaccacatccttggcatgctttataagagctgccattctctc

SEQ ID NO: 22401 - DNA, 1323 bp, Artificial sequence
  DNA replication origin
gctccagcgcatccgggctggagctcgcccgccccctcccccgcccggagccgccgaagcgcctcggtgcgttgcaccgccggaggctgggcagctcgcagcgctgctcggcgctggaccccacccggcaggcgcaggccacccacacccggctctgtgcggctgccccccgcagcattgcacggccgaccctcgcccgcccactgccaccggccgcgggactggctgggactggctcggccgagggcactgctcctcggtgcattgctgctcgggcgccgcagcccgcagccgccagcctcccccggccgtgcccctcccccgtggagccggctgtccgtcggcgcccactgcccggcggcagcggcggagccaggcagccccgcggcggccgagcgcgctcgcgcatcgggccctctggccttctttacctagggcagcccgcgccccggtgcgagggagcggtccttaccgagacccgcccggcccggcggtgcgatgagcttcttcggcttcgggcagagcgtggaggtggaaatccttctgaacgatgcagagagtaggaagcgggccgagcacaagacggaggacgggaagaaggagaaatatttcctcttctacgacggggagacggtctccgggaaggtgagccttgccctcaagaaccccaacaagcggctggagcaccagggcatcaagatcgagttcatcgggcagatcggtgagtcgacccccgggaccccctcccccagcgccgacagccggccggggagcagggtgattcagggcccagctcctccggcgaggcctgtcacagtcgcttgtcaactgcagtctgaggcctggggttcagctacaagtcccgcccgtgggcgactccccctgcgttactgtcctccctgccaaaagtgacagcgcgctgccagggagatggggacggcgagggcgggaggaagcgccctgctgtgcctcgtgggatgggcaccttgcctatgggttctccccattgtctccggcatgcactcggctttgcttcttgtccccaggatttctgggtgaggtgctctggccatagcctgcaggtgggtttgttagggggagaccgctctgccaatactggctttcccatcgcccggccatctgcaactgccagacgcaaagtgaggctcgtccaccgagccccacttcccagagcccgcaccaacccgtttttctctttagatgtggtgtgagagagctaaccagttctctcttacctcacctcagccctgaactacctatgcttgtacatgtttccagaaagaagacccataatcttcagtc

SEQ ID NO: 22402 - DNA, 1056 bp, Artificial sequence
  DNA replication origin
gagctgcggcggctatgctgtggagcggctgccggcgtttcggggcgcgcctcggctgcctgcccggcggtctccgggtcctcgtccagaccggccaccggagcttgacctcctgcatcgaccgtaaggatctcctggcgggcagtaggacaggtgtccagaaccccggcggacatatgtccgcgaggggctgcagtctccccgttccatccagtcaccccggcgtcagctccccttccggccagtcacccccccggcctggctccctactccggccggtcacccccggcctggctgccccctccggtcggtcaccaccatccgggtccccatctggcccgtcacccctgcccgggtcctcctccggccggtcacccccgccccggtcctcctccggccggtcacccccgccccggtcctcctccggccggtcaccccccgcaggttcccctccggccggtcatccccccgcaggttcccctccggcccgggtcctcctgcggccggtcaccctcggatgcttagagaagtgaagaaacttggggcttggttgttgttgggttggttggtttttaatcataacagtaggtcataaaagcagtgagaatataagaagctggctgggtgctgatggtgacaactgcacaagaactccaggtcatacaagatttgctcacacacaaagatttggtatcttaacacctctggctataagacacttttagtgttgaaactcatgcaggaaaaataattattattgccagtgggaaactctaccagagctgacaaacttgagtgtctttaggctctgaacagtaatttgaatgtagcgaggagtggtggagacccggccagtttgtgacttctctgccaagaatgtttataaacacttttttcttctgaaatatttttaaatttattttaaataaatggcagttttctttacaacagaataagtcccttagatatcagatctataaagtacagtaaggcatagaatactgttttcttctgaatgtcctaaaactcattcaagaggtgctgccctggcctagc

SEQ ID NO: 22403 - DNA, 1496 bp, Artificial sequence
  DNA replication origin
ggctcccgggcacgcgccggggtggtgggcagcccgggacggcagcggcgatccgtcacctgaggaggggcggggacttcatcgcggccaggccgaggcgccgagggtcccttgcggcttccgcccctctccgctggccccgacgccgcgctcgggccgggactcgagccccggttccgcggggcaggctcaggtctgcgcgctgcgcctgcagccgaggcagaaatccgtcccgaggcgcgggcgccgggtccgggtcccaaggatgcgcgtcgggctccctcccgcggggacagccgagctccgccggcgctccaggtgttcccgcagtgcgtccgggcgcggacgcctctctgccctcggaggggaagcgggagggcccttggggtaacgccccgacctcgggcttcctaacctgggtcgacagccggctggcacagggaggcctgcgcgggagaggggcggagagagcgcagcgcggggcacagcgggcggtctccgtgccgcgcgcgcgactggaaacggcgtgcagatcctaaaacgagggttccacagagggccacgaggggcaggagagagtccccggagaactctagctccccgacacggctacctcttggcaaacgagcgagaattggggcgcagagccttgggagggccgttccctcggcgggagcggcccgagcacagcctcacagcagatgcgagcgcggcgggcgctttggtgacgaagtagcgggacctgcaggaggcagaggcctggtggggccgtggacgccacgccgagctgcccagacccttccagaagacagtggggactattcaacggtttccagcagaaactaagccaggtgttcgttttacggagattgctcggctgcagggtggaggctggatgagaacaggcgtcctctcaggtaggcgctcgtggtggtaacgctgcccaggaggagggcacgggttccgggaagacttgcgaggttaaaccggcagctccggagaactgagcgcaagaggtcggtgacacagagaggagtccgggaggccgcatgtttcaggctgaagtcacttggcggggacgtttattgagatgcgaaacacaggaagggatagaggctgcgcagagggaaaaggcgatggactcggttttggaaacgctgatgtgaagtccctacgatgaaaaaagaaatcttccgatttctccctttgaagtctttgcttcttccgttgcaaagaacacagcctatgacatcaggttgaaaccaagaatgtagttctctgaaaatactgtgtgtgggggagggagtttatcttgtctcattccttacaaggatactttgctctccgacaccttagctccctgaaagtttcctagatcgtccatcttttcctcattttttcgactgcaagcaatgaactgttaattttttacagtttggttttacagccacacactttattcttctttgtcaagtttaaagtattctagggcttgt

SEQ ID NO: 22404 - DNA, 1176 bp, Artificial sequence
  DNA replication origin
aattagcctggtgtggtggcatgcacctgtggccccagctgttcaggaggctgaggcaggaggatcacctgagccagagaagtagaagctgccgtgagctaagatcgggccactgcactccagcctgagcaacaaacagaacaacaaactgtgtctcaaaaaaaaaaatttttttttgttttaaaaacatgcatgtatctgtaagtacatatttatctgtaagtgtgccttaagcttatgtcattaaactgagtgctcccaagggcgcctggtgttccttcattagacagacagaatcctgaggaaataacctcctcccttgagattctcccactaacccctatccaagtctttgatcacagagcaaactcagcatgagactaagtgacagctggacgcttaagcattaaatgtatgtgctggaaacgactgtgcggaaggtaagtcctcacgctgggcccccaaaatcggaggctcaggttcccggccaggatgcacttgtagggtaacgagatcctggaggtgaggggccggcactcacgtggtgacagtattgaagccacaggccttcagcttcagcaggcggtccctccagtactccctgggcacccggaaatagtggatggagcccccgaagatcaggaacttgtggccctccagtgtgaagtggggcttaccccgacctgtgctttcagttccaagtcccacagatcgattcttcagctccagaggggtcagatgagaccaattaaacctggagggggcgggcgagggaaagaaagtggaaagggagagaggattcgggagagggctcggaggcacggctgaaaccctagcgaaaagaagtttttgttagtaggacgtgttctgtgcatatgttagtaggacgtgttctgtgcatatgttagtaggacgtgttctgtgcatattcgcgatactattttctccaagaaaggagagatcgctcccctccctccccagggatgtagctctcaagcaaacctaggctgggacggatgcgctcttccaagcatgaagttctcttcctgcttaaaccgaggagcaaaacctgatgagataaatggcaggaaaaagatgcccgccattctcttccaggagagacacgggctgaaaggagaaaggacaacagtgacaaggggaaggttccggccccac

SEQ ID NO: 22405 - DNA, 1622 bp, Artificial sequence
  DNA replication origin
ccggcaggtgctgcgcgaagctctctctcacctgcggagcaccaggaagcccaagacgaccagcagcaggagtcccagcgtgcgggccggcctccgccggaggctccacgtggtcatcgcgtgttctctaagcgcggggacccgggttcccactccagtccgcactcagccgcgcgcgggagcctcgccgcggggggcggagccgcgcactggtcgcctgggcaaccggcccgccggcgctcattggctggggctcgcggctccgcgcctgcagccctaggcctcgcgcaagcgggggcggggctggccggggccggggcggggcctctgtcggggggggggcggggcggggctggtgggcggggacgaggtctcggtaggagagggggctggcgggggcggggctggcggggcggggccccggccgggggcggggcggggacaaggtctcggtaggggacgggtctggccggggcgggtccccagtgtcgtggagcggtgcagagtccgccgtctttctgctcgcgaggcgcaggcgggtgcgggaatgctgcgtacctgtcaaacgccgaggtaaagtcgcccctcgcagcgctacatcaggaagaacgtacaaaaggcgtccgcaaagcaggggcaaccaacagaatcttttaaaacaattcagattctgaagcaaacaactttttcaataacaaatcatcctgtgaaaagccaggattttgaagaattgtatctggacacatttcagtgtggttcatgtctgaggagggggggttccaaatattttctgtctttggtttctgcgagtcttactctggccttgactccaagggcttccaattttttattttaaaaaggtccatataaaactctcacattttaggaaaggaagaatatcattcttattctgaaacagaatgtatgtcccaaagaacatgatgtagtatttcggtgcaacttacactgtagcaatcacaaacccaactcctcccgggaacaaaattcagattttactgaaagaaactcgaggaagggcaacgttttccagagcatccgggtttgtcgaatgtctcccttgccgcatgctttgaattcatttcctaaacgggggcatagttttgaacttgtaaagccgacaggaaccaaatgaaattgcagatcttggaacaaagacacagacttgggtatgaagtgtcctttgtctagcgttaagcacatatttagtcaaggagcaaaagttaaatcaaagagaggcaaaaacaaacgaacaaacaagaggaaaaaaaccctggcagaactggggaggataagctgggcttggagcaatccgggtctgacttaagcaccgcaaacattcccagaggcgcgcagagggaggcccactcccgtggacgcgctccaagcccgctccttttctccattgggtaaggctatgattgcttgatggctatgaagtctgtgatggaaacatgttggtttaattggaatataccagctagccccgaagcgtgtggagaaattgtcaaaggctagcccctttgcctgcaggggaccatccgaaagacatgcaccccacattcatcctctcacttctggtcacgttgaacagtggcagaatc

SEQ ID NO: 22406 - DNA, 732 bp, Artificial sequence
  DNA replication origin
tgccctctggccccccctgtggctctgggtgggaatggggcactgccctctggcatgggccacgttgcatctcaccacaggacgaggaaaagcatgccatgttggaatttcagggacggaagctggcggggcagagatggccagggaacaggagagaacaggagggacatggtgggagtggtgggcgggcgcagggcaggcatccctgagtgccaggctgggtacgttgcagtcaggagtgcacaggaggatctgagcaggtcgcaggctggggttggagggtctgacagtgtgtggactctgaattgaggaggaaaggcaggcgtcagagagatcaccataagggccattgtgggtaaaaacttgacctggcccaggattaggggatggagccctaggccggggcagcagtggaaggagctgaggccccgctgatgcagggagaaggtggagtcaagggcagccctgaggttttcatgccgggaccatgacagaaagaagggggcttggatgagagctgcttccagaggaaagatggtggttggatctgaggttgtgtgttaggtcacaatgggacatgccagacaacaagaggtgtagcagctccgtgtgagagatggggaagctgaggccaagggaaatcaaaggacgccgtcaggggcctcgtgctggtgttttctcctctgacgatcccagaccctctcctctccacctgcctcttctttggaggtg

SEQ ID NO: 22407 - DNA, 1755 bp, Artificial sequence
  DNA replication origin
gcaccggcgcatccgccgccacctcggggactctgcgccggcccggtcggctcggctccggccgcgcgcccccctcgcccctctcgcccccgcgcccgctccccgctccccctccccgctccccctccccgccccccgccccccgcctccctgcccgcgccctccctcccgcgcgctcccagccttcggccgccgcctcgctgagcccagaacgagccgggccggggcggcggggccgggcggggcgggcgggcgcgcggaccccgcggctatgaagtggcccccgggggcccggagcccgacagtccccggggagggagccgcacgcggcccagggcagcggtctaggggcgccggggccggggcgtaggggccgttgcccgcgatggaccgcaccggagacgctccggactcgtcgccgcaggtcagtgctccccgcgcccccgcgggcgccccgccgcgcacagagcccctttctgcgtccccatcggtgcccacgccatgtcctcccgggcgcgcgctggggtgtgtgtgtgtgtgtgtgtgtgtgtgtgtgtgtgcgctgcgcgcgctgggggcagctggaaagggggccgagaaccgagctcgggctgggaggcgctgctgccgaggggctgcgaaacaaaacccggcacagcctgccctcgtcgaccgggattaggggaagagctggttctcagcagcttctaacaatcggcccgggctctcagtcgtcagttcccggccccctcagcaggtggtttctggtggccggatgaggagtcaggggtcagtcgtcccccacctccccacccctgctgcccaacagcgctctctggatcgctctctggctcctgggcactgccaagttaactctcttgagggggcccgagctctgcggggcgcgctgagggacccaggggtagcaagggtggcaaagggcccttgggaccttcggtgtagcaaggaggaaggaggcgcgaccagttcaccaccctcccatctgcacctgggctcaggtctgaggtcccaatccctccaaagtcagagcacacaacttccagaaaaaggaggctgagagttgaggcaggaaatagagaaggaagccaccaggtccgacagtgccagggtaaggaggtgacagccccgtaccaagcagctaaggtcaagaaccacccccacatgcacacacatgggagccttggccaacttccctgtccccttcctcccccagccaggcctagctgcatggattcttgtagaagctggagctgaaggactctggacatacaggaaggggacctttactgacagttgctagcccagtgcatgggcacctgcataggtggggtgcccaatggggcctagagcttgggctgtgtagcacgcactgttgaaaatgttggggtacggatgtcgtagggcctagcactgtgcaatgcctggatgtgtttgtgtggaaatgggaggcacatcactccctaagttactagggctgtggggcatgtggctgcacaggactgttgttctagggttttctaagatttgtcttctgtgcttatgtcgccctacctctgctggtagccactgcagagactgagacatttcctcccagagtctgctcagttggtgaccattaatggccttactggaccaaacatcaagccttccctttcttcccatggggtgaagaccctttcccagggtcttcagacagacttctcactctgcccagtccatgcccagcactgccaa

SEQ ID NO: 22408 - DNA, 883 bp, Artificial sequence
  DNA replication origin
aggcggcggagcaggggtggcgggcaggggccgagcgcacccccagatctcggctctcgagagttaaagctcggcccccgcctgcacccccattccaccccgcctccatcctggctgctcctggcgcccagcttggcagcctctctcaaagggtgattgtttccggccgggctgctgcaggagggcggggggcggcgctctgggaccgagaggccgagctgggaagccggtgggggatgcggctccttccttggctccaggcaccccggatgggaggtggccggtgggggcggacggtgccgtgccggggtacggggtctgctgccccgtggaagggcacctcgagccgccgcgcgtcagcctcaccccagcctccccttccgggccggtgcacccggcgttccggagagaggcccgggaggcctgcgtgggcggacgggcgcggggaggccgggggcagcgggatctccaggagtttcccgggcctctgccgcggtgtgttggtcggcgggggacggaggccagtgagtgggcgcgcacttggacgtatgtgggtgcactggtagggtgcctctgtggagctgtatattccagatactccttcagcttgtcggagactttgaagccatccttgcactcgttttagaggttggcatctcccggtgctcttggacacctgtattcgggccacacccgctgtgtcctcttcacagccccaggagaaggccacctcccatggcggggttcgcggcgggaccagggactgtcggtactttctctagggtctccctccttcccgggaaaccagttccagccccactgctaggcactgcttaaccagagctgtgcccccgtgctatgggctggggctgaggaccacggg

SEQ ID NO: 22409 - DNA, 1302 bp, Artificial sequence
  DNA replication origin
ggaaggatttccacagtcctgcagaggccaagcaggaagacaggggtgggagtgtggctgacccgggggatggtgtgtgtacacgtgtgtctgtgtgggtgcaggtgcttcaggtacatccgtgtgcaagcgtttacatgtgcacatgatgtatttcagagtgtgtgtgtgtgttcatgtgggtgaatctgcatgtgtagctgcctctatgagcatgttttgtgcctgcgtagatgtcagtacatttgtgtgtgtccatacacttgggatgttgccaaaacttcccaccaaaacgaatggcaggctgttgtctcttcactgagccttatcatgctaattttaatctcctattattgttttaaattggctctaaaaattaatactaaaaattctgtaaacagagcctggaactaagatgcaagacaggtcccttgaaagcggctttattatcacaattgttcctgccagaatgctgaggtaaagccgagaacccctgcagacagcatctccgagccacagcccagcaggacaagtcggaccacagcccacttagtccaaccctctgtttcattactgaaaccagccctgaggggaagtcttttgctagtgccttcagaatcggcctgaaacccaggcctcctcgtcgccatgtccctgagctctcttgagatcacccctcatgggtgtgtttccctgttggtaaaatgagggtctggaacgagacagtcttcacggtcatttctgtcctcccatttggtgattgtgtgactgcggctggctggcttagcagaggagggaggcaatgtgccctcctggacggcctggcccctccttggtgctctctggtacccccgcccatcctgcttctgcacctgcccttcccctcccttcagctggtgtggagtctaaggagaagcagagtatggagactaggaaaataccagagaacaccgacttaggaaaggtctcttagcagagtctaaaagagagggttgtagtaggggcagaagaaggcggagcaaggctggctgggattccactcattaagagaagggggaaatgctcctgtaccgcagcaggaggtactgaggttagattcagaggaagtttcttgccggcaaagggggctgttaagcacaacaatgaaagagcgcacgacaaggaggagcagttatccctagagatagtcactaaggacactttcacatgtctgtggcatgatacggacggtgaggtgccttcctcccctcaaaatcttgaccaaaggggctgattctggagtctctgccccctccccacctg

SEQ ID NO: 22410 - DNA, 1022 bp, Artificial sequence
  DNA replication origin
ctgtgtccctggtgttaagaacacatcctggcatgtagtgggggctcagtaaatattggaaggaaggatggatggatggatggatggacggatggatggatgggtggatggacggatgagtggatggatggatggatgagtggatggatggatggatggatggatggatggatggatgagtggatggatggatggatgagtggatggatggatggatggatggatggatgcatggatgagtggatggatggatggatggatggttggatggatggatgagtggatggatggacggatggacggatggacggatggatggatgggtggatgggtggatggatggatggatgggtggatggatggatggatggatggatggatggatggatgggtgggtgggtggatggatggatggatggatggatggatggatggatggacggatggacggatgggcggatggatggatggacggatggacggatgggtggatggatggatggacagatggacggatggacggatggatgagtggatggatggatggatggatggatggatggatggatgagtggatggatggatggatgagtggatggatggatggatagatagatccacccatctatcagtccatacatgatagatgcttgggggggatggacaccccccctcaccctgatgtgattattacccattgtatgccagtatcaaaataccccacacaccccgtaaatatctatacctactatgtacccacaaaaattaaatattaaaaagaaacggcagctccttcccatcccccatgccctggcatttcctgccctctggttctattgtcctttcctgatcaccacctgggatcctgtatctcttccttttgtatttgtttactgcacatctcctctcaccaaaatctaagctctatgagggagctttggtctgtcttggtctaactgtaactccactgcccacaatggtccctaaaaccaaaggggcactcaggcacatctgagaacgtc

SEQ ID NO: 22411 - DNA, 2111 bp, Artificial sequence
  DNA replication origin
aaagaggaggaagcaccgcatctctccatctgcctgcagccgcgtgagggcaagtgaggaggcagccgcctgcaaagcaggaaggtcccagcacacagaggctccgcagccctgggcctccagaaccatgcacaggtggatcctccgcagccctgggcctccagaaccatgcacaggtggatcctccgcagccctgggcctccagaaccatgcacaggtggatcctccgcagccctgggcctccagaaccatgcacaggtggatcctccgcagccctgggcctccagaaccatgcacaggtgcatctaagcctccctgcccaaggtgtgctcctccggcagcccaagcggactaagacagcagagaaacaagagattacacggtagagcagtgagttcttgggaggaacagaggagacagcaagcagaaatggagggcccagggccagggaaaggctggctacctcacatggggctcccaaggcggggtaggaggggatacccacatacagtcggtatgggagggtggcaaggtaacatgcggttgtcggggggtgctgttatgtcacctgggttgtcaggcagaggttgctgacatgtggctgtcaggagaagcattgccatgtcacatgggttgtcaagggagggttgctatgttacctagggttgtcaggcaaggagttgctatgtcagaagttgtctgaggaggggtggctgtgtgacctgaggttgtgaggggaggggtggctgtgtcacctgagattgtcaggtgaggggtggctgtgtggcctgaggttgtcaggggaggggtggctgtgtgacctgaagttgtcaggagaggggtggctgtgtgacctgaggttgtcaggggaggggtggctgtgtgacctgaagttgtcaggagaggggtggctgtgtgacctgaggttgtcaggggaggggtggctgtgtgacctgaggttgtcaggggaggggtggctgtgtgacctgaggttgtcagttgaagggtagctgtgtgacctgaggttgtcaggggaggggtggctgtgtgacctgaggttgtcaggggaggggtggctgtgtgacctgaggttgtcaggggaggggtggctgtgtcacctgaggtcagctgaagggttactgtgtgacctgagtttgtcaggggagagtctgctgtgtcacctgagactttaaaaggagaagttgttgtgtgaccttaggttgtcaggggaggagctgctgtgtgacctgaggttgtcacaagcggggtggctttgtcaccagaagctgtcagaggacgggttgccttcttgtggggttgtcatggcgtgtgttgctatgttgcctagggctgttcaagacatgaggtctaagaagaactttgaggttgttagcatcctgctcagtcatcccagctctagatccttctccgcgggtggtgggtgcaggttcttcctgtgcaggggaagtcagcgctggccacgtgacttactgtggcgtggactgtgcatggaatgaactgtgtctctcattgagtcagctccatgagacatacttcaggtggccgccccagccagctttgttgccaggacaaggggctcatggagctgagcccctagctggccagagagggacacatcgtgtaagggtgaatatggggtgtggttatgacagcataatgtctctgccatcctgaaaggaagggagggtcttcagtgcagagggaggagaaggagctccaggcagaaaggacagcaagtgccaaaaccgtggggcagaaacatgctggatatgtccaagggaaacacaaagccatgtggctggagtatagtggccgagggtacaggacagcagacactacctgaggccaggaaggccactgcaggatcttaactctgagagagaagccactggagggttttgagaaaagacttgcctcctaccgtattttaaagggcagctggaaagacatggaattcagcagcaccagccaggatacgtttaggaagcatttgggtaagggttatggaggctcagatcagggcagtagcaatggaggggaaaaattggattctaggagtttttgaaggtgattctgctgggatttctgga

SEQ ID NO: 22412 - DNA, 946 bp, Artificial sequence
  DNA replication origin
ctggagctgggccagaggcgagaggggctgagcagcagttccagcaagcaccgaggacatacgacaggacaggcacacccgtattcaaggagacacaggcagcacttgtgtctaacacatgcctgccattagcacccatgaccaacatcccagggcaagtgtacacgaactgcacccctgtgcacacagcagatccacacgaggacaagcttgcgctcctcttgatttataaacatgcttacccgaccgctcactcactgcctgtcccatcagccacactcctcatcagtgcctgtgctcctcagatgggtgccgcctccctctcgctctttctttttatgtcagcaaatgccaccacatccacaagaaagccacaatgcccatggctctgatccagtgtgtgtgatggtgcccacacagggagtggtcacaagtaccccagtgtttgtgtgtgtctgtgtgtgtgcttctgtgtttgcaggtgtctctgcatgtatgagtggatctgtgtgtctgtatctgtgtgtgtctctgtgtagtatgtatgcgtgcatgtgtctgtatgcgtgagtctgtgtgagtgttatctgtgtgtgtgcatgtgtctgtgtgtgtgtgagctggtctgtgcatgtgtgtgtctgtgggtgcgcctgtgtgtgaatggatctgtgcatgtgtgtctgtgtgagcaggtctgtgcatgtctctgtgtgagctggtctgtgggtgtgtgtgtgtgagctggtctgtgcacgtgtgtgtgagctggtctgcgtgtgtctgtgggtgtgcatgtgtgtgtgtgagctggtctgtgcgtgtctgtctgtgagctggtctgtgcatgtgtgtccgtgggtgtgcctgtgtgtgaatggatctatgcatgtgtgtctgtgggtgtgctggtctgtgcatgtgtgtgtccgtgggtgtgcatgcc

SEQ ID NO: 22413 - DNA, 846 bp, Artificial sequence
  DNA replication origin
ccagcctccccgcattcccagagcacctccccgtgtcagagccagaacatcccagaatggacaatgccagacagctcgtttctctccctccaacaataaacaagataaccacttgtcagtcctccccctggggccgccgatcaggaggaaaatccctcagcttcctgcaatggctgtgttcccccggccttctagcaatttcaggaagcatgaaagactttattcatcaggacccaaaaccaatctgccttttcctccagcttcatccatcaccatctttacctgctgctggggaggtgggaagggggaggaaggaatcacccaccttccttccatccccactctctgctggcctgcagccctccaaggcgctcctatcaattggatcaaaggtcactggcttagacagaagtgaccaggtgtttcccatgccttcggctattaggagccctgtggggactggagccggctgccctggggaatctgcaggtgcaagtgtgagtgcgggatgcaggaccctcagggcaggcactggagctgggccagaggcgagaggggctgagcagcagttccagcaagcaccgaggacatacgacaggacaggcacacccgtattcaaggagacacaggcagcacttgtgtctaacacatgcctgccattagcacccatgaccaacatcccagggcaagtgtacacgaactgcacccctgtgcacacagcagatccacacgaggacaagcttgcgctcctcttgatttataaacatgcttacccgaccgctcactcactgcctgtcccatcagccacactcctcatcagtgcctgtgctcctcagatgggtgccg

SEQ ID NO: 22414 - DNA, 1527 bp, Artificial sequence
  DNA replication origin
caagtcgccttcaccaagcgcttcctgcctgcagaataagcccagctgagcagtgcagaggagcctgagggagagggcccttgctagaactgccctggatacatcacgcaggtgcctccactgggacaggcaggcagccctcagccaggatggccggccttgggggtgagggcagctgtctgttcatggctgtcctgtgggagagagcagatgcagccttgtgaacaaatgagcctgtcacagttggcatccttgtgaaatcaaagtcagctgtactcactgagtgagctactttcttctgtgagtagtttattacagtttcctatactgtattattatactatatacaggataaaatatgtgtaacactatacattatgctgtactatgttacttatggcagcagtttctacggctttctactacatggaaggctgtaagccgggccaacagcgatcctgaccctgcaggtttcacagtcacactcacaactcattgtggaactgggtgtggggtggcctgagatgtatgttgcaccagagaaccatgggctttggaatctgtgtgagggagtcagggacgcctgtcggaggaggggagacgtgactggttggtcatggaaggctacagtttcgcagatggtgtcggtggagtttggggcagggcattctgagcctgggaaggtttggggtgaaggcccggaggctggcgcgtaggaggctaaagcagcagggaggtctggggagagtcaggtggggttgtgtcttccacgttgcaggccgtgctcacagatggtgaaagacgttgtggaaaagagagctcacgaacgaaaaaggttgagtcaagtcgctcggctgtgctgtgagtgtgggaggtgcccggctgtgctgtgggtgtgagaggtgcccggctgtgatgtgagtgtgggaggtgcccggctgtgctgtgggtgtgggaggtgcccggctgtgctgtgagtgtgggaggtgcccggctgtgctgtgggtgtgggaggtgcccggctgtgatgtgagtgtgggaggtgcccggctgtgctgtgggtgtgggaggtgcccggctgtgctgtgggtgtgggaggtgcccggctgtgctgtgggtgtgggaggtgcccggctgtgatgtgggtgtgggaggtgcccggctgtgctgtgggtgtgggaggtgcccggctgtgctgtgggtgtgggaggtgcccggctgtgatgtgggtgtgggaggtgcccggctgtgctgtgggtgtgggaggtgcccggctgtgatgtgagtgtgggaggtgcccggctgtgctgtgagtgtgggaggtgcccggctgtgctgtgagtgtgggaggtgctcggctgtgctgtgggtgtgggaggtgcccggctgtgctgtgggtgtgggaggtgcccggctgtgctgtgagtgtgagcccgagagccgcggagaacacgtggagctcttgcagtggcgaacacgtttcttcctaaaggagacacacagcaattttgctttccatgtccattc

SEQ ID NO: 22415 - DNA, 1242 bp, Artificial sequence
  DNA replication origin
accacccctctgctccagtgagagcccctgctgcccctgctgccctcatcctccccatccagccagggctcttttctcatccaatgccattggggtagaaatcagtcaataaataagaaaagtctttccccctttcaaaccaccactgtctggtggggtgtgcacgtgtctgaatgtgtctgtgaccagaaaacaaaccacaacctcatggaggtaaacacaagtcccctgcacagagcctcagctggcgacctccacagcccttggtggatggtgtgtgggtgatctgcagaagcaggccctgccctcggtggacggcgagtgggcgacctgccctcggtggacggcgagtgggcgacctgccctcggtggacggcgagtgggcgacctgccctcggtggacggcgtgtgggcgacctgccctcggtggacggcgtgtgggcgacctgccctctgtggacggcgagtgggcgacctgccctcggtggacggcgtgtgggcgacctgccctcggtggacggcgtgtgggtgaccttcatgtgaggagtgagtgcatgtgtgagggtgtgtggcagtgtgagcagaatgtgtgtggcataagacaagagtctcttactctcccactcaaagctgtaactttggtgtctaacacacaggaggagttaaccaatgcagggaatgaagaacggaatggatgaatgggcagtgcagtggcatagttaggatacccattttacagatgagcacactgaggcccgaagaattttgtaagtggcagagctggccctcagactaggaatcctggttcctagctcagtgttcctatgtctaccgcacctacaagctgcccttcagactaggaatcctggttcctaactcagtgtccctatgtctaccgcacctacaagctgcccctggtaacaacgacagtgtgaagtgggcagcagagccccgtgctgactcattcggcctttctggcctctgcccctagggaagagggacataaaaggttcccaggacttattcacccacttagaacatgggtggtctccagctagacaagaggaacggtgtggtgcttgccctgcaagggctgcaggctgtgtaggagcagagtcgtggagaggttcaggcacctgactggactccaggcccctccaaagccagagaaaaccccagtctctccagactttggtttcccaaactgtgcaatgaatcctgctatggcctgaatgtgtgtcg

SEQ ID NO: 22416 - DNA, 1122 bp, Artificial sequence
  DNA replication origin
tgtttacctccatgaggttgtggtttgttttctggtcacagacacattcagacacgtgcacaccccaccagacagtggtggtttgaaagggggaaagacttttcttatttattgactgatttctaccccaatggcattggatgagaaaagagccctggctggatggggaggatgagggcagcaggggcagcaggggctctcactggagcagaggggtggtctccccatccttcaggccttctcattggcgggcagggctcagcccttggggccacacagggaaagggttggaggagggagcagctctaggcgccaggtctgtgctcccgaaggacaaggatgcagtgctctgagagctggctgagcttcccacagctgcctgagctgcgccaagtgacacaggccaggcgctgagggtgggagctgactggggctgggccagggcagctcagcttcctatgcataggggcgctatgagcaacaatgacagccggggctagggaagtctggggatgtcagaggacagaggctgctctgccggaagtgtggaaaggggctggggcaccaggaaggtggtggctggtcatcccgggctacagaatgcagttgagtgtcctgaagagagacggcaggaagccggggctggagatgagcccctgataccagggtacctgtgcgtgttcgggtctcccagccaggaaccacaggagcagcggccaggtactgcctgtatcctgttcggtggtgctggggtgcacggccctggtccgggtttgagggtcagatggtgagccctcttgctctgcacgggcactcacaggaactccaggaaacctggaatcaatgtttcctccccatcatcacagccacctccaccttcaccgccacctcctcctccctaagcccagagacaggccacaaatgtaagggggaaaaacaaaccttattgatgccttctatgcagcaggcgttatacaaaccagttaccttcttcaacccttaccaaaaccatcctacccatttcacggaggagaaagctgtggtctggggccttgcccacggtcacacagctagtgaagagccccgccggagtccaggctcacatcctcaccttatcggcga

SEQ ID NO: 22417 - DNA, 1364 bp, Artificial sequence
  DNA replication origin
gatgtcttcgctcagatcgctggctctccacccccagacttctttatcttattttgctaaacaagatgagtttctgtcattgctggaagtaattgccttgttttttaatatatatcaaggcccaggttaacaactggacaatgcaatgcatttgttattccctctctctcctgtttattctagtgtgaaattgttttccaggtagtgattaattctgccaaagcttcctgcccttgctgggtaatttgctgtatttgggaagaagatgctaactgcgcggctctgccatcagaggtgtcgttactgttttgtcaaacactagctcctccattgtcttctgccaatcagccaagcctgtggtcctttattcatttcctgtttctgagttttctgtggggaggactgaagctgagtcttcgggggagactgtgtcaggaggctggggtgggctggagagggccccccagcggtggctccaaagcatctccgcagcgatggagaactggggttcgtgggcagagtggtgagcgacggagaactggggttcgtgggcagagtggtgagcgacggagaactggggttcgtgggcagagtggtgagcgacgcagagctggggttcatgggcagagtggtgagcgacggagaactggggttcgtgggcagagtggtgagcgacggagagctggggttcatgggcagagtggtgagcgacggagaactggggttcgtgggcagagtggtgagcgacggagagctggggttcgtgggcagagtggtgagcgacgcagagctggggttcgtgggcagagtggtgagcgacggagaactggggttcgtgagcagagtggtgagcgacggagagctggggttcatgggcagagtggtgagcgacggagaactggggttcgtgggcagagtggtgagcgacggagaactggggttcgtgggcagagtggtgagcgacggagaactggggttcgtgggcagagtggtgagtgacggagaactggggttcgtgagcagagtggtgagcgacgcagagctggggttcatgggcagagtggtgagcgacggagaactggggttcgtgggcagagtggtgagcgacgcagagctggggttcgtgggcagagtggtgagcgacggagaactggggttcgtgggcagagtggtgagcgacgcagagctggggttcatgggcagagtggtgagcgacggagaactggggttcgtgggcagagtggtgagcgacggagaactggggttcgtgggcagagtggttggctgccccactgtcagcctgttctgaaagtaggaatgaccctcagctgagctgagatgttgctggtggagactctaagact

SEQ ID NO: 22418 - DNA, 1509 bp, Artificial sequence
  DNA replication origin
tttggtgtgggtgatgtgtgtggtgtgggtgggtatggtgtgtgcagtgtgtgtgctgtgtgtggtgtgtatttgttgtgtttggtgtttatggtgtggatgtgtggtttgtgtggtgtgtagtgtttggtgcgagagtggtgtgtgtgggttatgtttggtgtgtagtgtgcatgtggtgtgcgaggtatgtggtgcgtgtggtgtgtagtgtgtgtagtttgtgtggtgtgtatttgttgtgtttgatgtgtgtggtgtggatgtgtggttgtgtggtgtgtggtgtatttggtgtgtgtgtggtgtcaatggtgtttatagtatgtgtttggtgtgtgcggtgtgtgtatgtggtgtttgtgggttgtgtgtggtatgtagtgtgtgtgggtgtggtgtgtggtgtgtggtatgtgtgatgcatggtgcgtgtgggttgtgtgtggtgtgtagtgtgtagcgtgtgtgatgtgggggggtgtagtgtgtgtggtgtgtggtatgtgtgatgcatggtgtgtgtagtgtgtatggtgtatgtggggtgtagtgtgtgtggaatgtgtgacgcatgatgtgggtgggttgtgtgtagtgtgtgtggtgtgtgtggagtgtagtgtgtgtggtgtgtgtgatgcatggtgtgtgtgggttgtgtgtggtgtgtagtgtgtagcgtgtgtgatgtggggggtgtagtgtgtgtggtgtgtgtagtgtgtggtgtgtgtagtgtgtagtgtgtatggtgtatgtggggtgtagtgtgtgtggtgtgtgtgatgcatgatgtgggtgggttgtgtgtagtgtgtagtgtgtgtgggtgtggtgtgtggtgtgtggtatgtgtgatgcatggtgcatgtgggttgtgtgtggtgtgtggtgtgtagcgtgtatgatgtgggggggtgtagtgtgtgtggtgtgtggtatgtgtgatgcatggtgtgtgtagtgtgtagtgtgtatggtgtatgtggggtgtagtgtgtgtggtatgtgtgatgcatgatgtgggtgggttgtgtgtagtgtgtagtgtgtggtgtgtgtgtggtgtgtgtgatgcatggtgtgtgtgggttgtgtgtggtgtgtagtgtgtgtacagtgtgtggtatggaggtgctgccgtgtggtgcatgtggtgtgtctgctgcatgtgtgtctggtgtgtgtgtctgtgttgtgctgtgtgtggtgcatgtgtggacggcttttgagcgtggttgtctgtgtgagcatgtttgaagacacgtatgagggtcatggaaggcacctttgcaccgtggccttgacagggactaggacgaggaggactcagaacaatgtcagtggtaccttcagaaaatccttttaccactgactctttatggcatcaataaaacggtgataaaagtcacacgtgcctcaagggtggtgctggagattaaaggatgtaggatgcataaaccctgccatcctatgatggggaaattgtcttctctgttgggcctt

SEQ ID NO: 22419 - DNA, 1571 bp, Artificial sequence
  DNA replication origin
agacggtggagtacacacacaactgcttcattcattcacattgttgatggacacttaggctttttccatatcttggctattgtgaatggggctgcaatgataccgatttcaagtcctttggatatgtacccataagtggtatttctggatcatatggtagttctagttctattcttaggtttttgaggtacctttgtactattttccataatggccataccaattcacattctccccagcagggttcccttttctccacatcgttactggcactttctgcctcttgtcttttttgtgctagccattctaacaggtgtgaggaaatatctcactgtggtacacacacacacacacacacacacacacacacactggaatattactcagtgataagagagatcttgccatttaagacaacacggatgaatctggagaacattgtgccaagtgaaataaggcaggcacagaaagacaaatgccacctgatctcacttacatgtagaacctaaaaagtccagctcatggaagcagagaggagaatgtggctgccaggggctgggcttgggggaaatgaggagatgctggtcatagagaggagaatgtggctgccaggggctgggcttgggggaaacggggagatgctggtcatagagaggagaatgtggctgccgggggctgggcttgggggaaacggggagatgctggtcatagagaggagaatgtggctgccgggggctgggcttgggggaaacggggagatgctggtcatagagaggagaatgtggctgccaggggctgggcttgggggaaacggggagatgctggtcatagagaggagaatgtggcttgccaggggctgggcctggcttgggggaaacggggagatgctggtcatagagaggagaatgtggctgccaggggctggcttgggggaaacggggagatgctggtcatagagaggagaatgtggctgccaggggctgggcttgggggaaacggggagatgctggtcatagagaggagaatgtggctgccaggggctgggcttgggggaaacggggagatgctggtcatagagaggagaatgtggctgccaggggctgggcttgggggaaacggggagatgctggtcatagagaggagaatgtggctgccgggggctgggcttgggggaaacggggagatgctggtcatagagaggagaatgtggctgccgggggctgggcttgggggaaacggggagatgctggtcatagagaggagaatgtggctgccgggggctgggcttgggggaaacggggagatgctggtcatagagaggagaatgtggctgccgggggctgggcttgggggaaacggggagatgctggtcatagagaggagaatgtggctgccgggggctgggcttgggggaaacggggagatgctggtcatagagaggagaatgtggctgccgggggctgggcttgggggaaacggggagatgctggtcaaaatgttcaaagtttcagtggtaagatgaatgggtcctggggctctaaagtacagctgggtggtgatggatgctttag

SEQ ID NO: 22420 - DNA, 2168 bp, Artificial sequence
  DNA replication origin
aatgtattactaactgtaaatatgcattctaaatttgaagctgctatgatgaccactgatccttttatcttttctaatgtcgtgtatattttctttagtcatatgattagacatttttgcatatttaattttattttgctataccccagcccccttcttatccatgaaaaatatcttcctagaccccagtgaatagctgaaattgtggatagtaccaaatcctatatatatattttttgtttgtttgtttgttttttcttatatatacatacctatgataaattttaatttataaattaggtacagtaacagattaaccataacaactaataataaaatagaacaattatgatagtgttttgtaacaaaccttatataaatatggtctttcttcacaaatatattattgtacttaactcacttttcttcttggagctgtcaatctgataacctagactgctgctatgaagagtagatatgctggacaaggaatgattcatattccatgagggacagagcaggacagcatgagattttatcatgctaccagaaaggcgtgcagtttagaacttgtaaattgtttatctctagaattttctatttaatatttttggatctcgttgaccacaggtaactgaaatcccagaaggaaaaacctcaagtacagggaactactgcattaggtttggcttaaatcaaactccatttactgatgagttgggcagttgggagagggagtgggtgtccatctaggaaagcgctctctcaggtcaggaccatgaatggaactgtgtgacgcttggttcatgtttattactgcttagaaaagtcttcgaagctcaatcgtaggaataatgtcaaccctaaccacagcagtaattcatacttcttctctttttgttggtattaactttattacttattttatggtataggccttatcgtaaatgtttttgttataaaacagatctcatccttttttggggtttgggaggtgggaacagtagaacatgaagatacataataagtcccatacaatagttaataataagtcaccaacaggattattcctaactccagccctccaaatgctggggcattgatgtatgtgtgcaggaatggtatcagactagacacagactggcatagagcctggcaaggtgaaggcaatgcaccttataaaacagttacagtaacatctattgcatacatgagaaccatttgcagcagattaaattcccttaagaaaggaggctactagacaaaccacctcaacaccaaagcagggtttggtcggcatctgacagcgctggggacggtggccagatgtgagctctgtggacagtggccagatgtgagcgcagcggacggtgaccagatgtgagcgctgcggacggtgaccagatgtgagcgcagcggacggtggccagatgtgagcactgcggacggtggccagatgtgagcgctgcggacggtgaccagatgtgagcgcagcggacggtggccagatgtgagcgctgcggacggtggccagatgtgagctctgcggacggtggccagatgtgagcgctgcggacggtggccagatgtgagcgctgcggacggtggccagatgtgagcgctgcggacggtgaccagatgtgagcgcagcggacggtggccagatgtgagcgctgcggacggtggccagatgtgagcgcagtggacggtggccagatgtgagcgctgcggacggtggccagatgtgagctctgcggatggtggccagatgtgagctctgcggacggtggccagatgtgagtgcagcagacggtggccagatgtgagcgctgcggacggtggccagatgtgagcgcagcggacggtggccagatgtgagtgctgcggacggtggccagatgtgagctctgtggacggtggccagatgtgagcgctgcggatggtggccagatgtgagcgcagcggacggtggccagatgtgagcgctgtggatggtgaccagatgtgagcgcagcggacggtggccagatgtgagctctgtggatggtgaccagatgtgagcgctgcggacggtggccagatgtgagcgctgcggacggtggccagatgtgagcgcagcggacggtggccagatgtgagtgctgcggacggtggccagatgtgactca

SEQ ID NO: 22421 - DNA, 1442 bp, Artificial sequence
  DNA replication origin
actctgacatcatctgaatcatgagcggctatgacaataatgccaggtttgctaaacctgccaggaccccaaaggccaggatgaaatttgaaattcaagctaagccttggacaaatgtcagctgccctgccaagtgccagagaagcctcccactggccatccccactcggcagttccactggatcacaatttgtcttttgtttgatttttggttttgtcttctacgttttactttaaaactttctgattttaagcctctgtgtcttggtaatgcagtaatttagaaaatgtaaagaagaagaaaatgatgtcagtgaaagctgaagcagttaaaatgtcagtaagccgggcagattttaatgtggggatggtgggagtccatgtgacctatgtggacaggggacaagtggcaggtcgagctcaccaccagccacccccagggccaccggcttggctggagtaagtgaaatccagaaaaggatggtgcagggagaaagaacagtccacggtgcagagagaaagaacagtccaaggtgcagggagaaagaacagtccatggtgcagggagaaagaacagtccacggtgcagggagaaagaacggtccacggtgcagggggaaagaacggtccacggtgcagggggaaagaacagtccacggtgcagggggaaagaacagtccacggtgcagagagaaagaacagtccacggtgaagggggaaagaacagtccacagtgaagggggaaagaacagtccacggtgcagggagaaagaacagtccacggtgcagggagaaagaacagtccacggtgcagggagaaagaacagtccacggtgcagggggaaagaacagtccacggtgcagggagaaagaacagtccacggtgcagggagaaagaacagtccacggtgcagggagaaagaacagtccacggtgcagggagaaagaacagtccacggtgcagagagaaagaacagtccacggtgcagagagaaagaacagtccacgctgcagggggaaagaacagtccacggtgcagggagaaagaacagtccacggtgcagagggaaagaacggtccacggtgcagagggaaagaacggtccacggtgcagggagaaagaacagtccacggtgcagggagaaagaacagtccacggtgcagagagaaagaacagtccacgctgcagggggaaagaacagtccacggtgcagggagaaagaacagtccacagtgcagggagaaagaacagtccacggtgaagggggaaagaacagtccacggtgcagagagaaagaacagtccacggtgcagggagaaagaacagtccacggtgaagggggaaagaacagtccacggtgcagagagaaagaacagtccatggtgcagggagaaagaacagtccacggtgcagagagaaagaacagtccacggtgcaggga

SEQ ID NO: 22422 - DNA, 982 bp, Artificial sequence
  DNA replication origin
tccccacttcctccagaagccacactcacccatcccacctggcttggtcctcatgtctatcccagaatccattaatggggccaggggactatgacacaaccacttggcttagactgaggagctctgtgggcagccccacctgaagctctgggactaagcctgcgagagagatggattccccaagggaaatggggccattgcttgagtaaaaaggaaatagttgctgaagagtaaaaccacttgcttactccacatagggcagactcctggaagaggggggcagggtagggaggtggatatgcaggttgccctggtggggtctggaaatgggggctgcaggcttggagggaggcctcagtgtggcttggaacgtggtgtatggtggtctgccgcgaaggccggcctgcacaggggtgggaggggggagcttctgcatgggaagcacagacagcgctgcctctcccttgcactcagctctcggggcatgagaggctgactttccgtgagcctgtgggccaggcctctttgaatggggctgagggagctttgccctggttcctttgtgtccccacggtgccacgggaggctccctggcagggtgtggggcaaggcagtgagtgaagagttgggatgagtgagttagggcccacggattactcaagacaggacttcacgttgattcaggagcgttagggagctgtgattggattttgagcagggcagggatgggacagaagagtttggggaaggttcctcaggcatccgtcacggaagggataagaagggagagagagtggatgccggggacacccagaagctgttattgtagtcaggatgcgacaggggtgaggctacagacaggggacttgcaagcagggagggcagggtgagacattcagaggaaacgacgacaggaaatggtgacagatagggaacgaggatgaagggaagggagagccagtgacgactggcagtggagtgg

SEQ ID NO: 22423 - DNA, 1236 bp, Artificial sequence
  DNA replication origin
ggctggccgggcgggggactgttccccccacctccctcccggacggggcggctggctgggcagaggggtcctcacttcccagtaggggcggccgggcagaggcgcccctcacctcccggacggggcggctggccaggcagggggctgatccccccacctccctcccggacggggcggctggccgggcggggggctgacccccccacctccctcccggacggggcggctggccgggcagaggggtcctcacttcccagtaggggcggccgggcagaggcgcccctcacctcccggacggggcggctggccaggcagggggctgatccccccacctccctcccggacggggcggctggccgggcggggggctcctcacttcccagtaggggcggccgggcagaggagcccctcacctcccggacggggcggctggccgggcggggggctgaccccccccacctccctcccggacggggtggctgccgggcggagacgctcctcacttcccagacggggtggttgccagacggaggggctcctcacttctcagacggggcggttgccaggcagagggtttcctcacttctcagacggagcggccgggcagagacactcctcacctcccagacagggttgcggcccagcagaggcgctcctcacatcccagacagggcggtggggcagaggtgctccccacatctcagacgatgggcggccgggcagagacgctcctcacttcctagatgggatggcggcggggaagaggggcttctcgcttcctagatgggatggcggccgggcagagacgctcctcactttccacactgggcagccaggcagaggggctcctcatatcccagacgatgggtggccaagcagagacgctcctcacttcccagacggggtggcggccgggcagaggctgcaatctcggctctttgggaggccaaggcaggcggctgggaggtggttgtagcgagccgagatcacgccactgcactccagcctgggcaccattgagcactgagtgaacgagactccatctgcaatcccggcacctcgggaggccgaggctggcggatcactcgcggttaggagctggagatcagcccggccaacacagcgaaaccccatctccaccaaaaaaaaacgaaaaccagtcaggcgtggcggcgcgcgcctgcaatcgcaggcactcggcaggctgaggcaggagaatcaggcagggaggttgca

SEQ ID NO: 22424 - DNA, 899 bp, Artificial sequence
  DNA replication origin
tgaggggcgcctctgcccggccgcccctactgggaagtgaggacccctctgcccggccagccgccccgtccgggagggaggtgggggggtcagccccccgcccggccagccgccccgtccgggagggaggtggggggatcagccccctgcctggccagccgccccgtccgggaggtgaggggcgcctctgcccggccgcccctactgggaagtgaggacccctctgcccagccagccgccccgtccgggagggaggtggggggaacagtcccccgcccggccagccgccctatccaggaggtgaggggcgcctctgcccggccgcccctactgggaagtgaggagcccctctgcctggccagccgccccgtccgggagggcggtgggggggtcagcccccctcccggccagccgccccatctgggaggtgaggggcacttctgccgggccgcccctactgggaagtgaggagcccctctgcccggccacgaccccgtctgggaggtgtgcccagcggctcattggggatgggccatgatgacaatggcggttttgtggaatagaaaggcgggaagggtggggaaaaaattgagaaatcggatggttgcggggtctgtgtggatagaagtagacatgggagacttttcattttgttctgtactaagaaaaattcttctgccttgggatcctgttgatctgtgaccttatccccaaccctgtgctctctgaaacatgtgctgtgtccactcagggttaaatggattaagggcggtgcaagatgtgctttgttaaacagatgcttgaaggcagcatgctcgttaagagtcatcaccactccctaatcttaagtacccagggacacaaacactgcggaaggccgcagggtcctctgcctagga

SEQ ID NO: 22425 - DNA, 1415 bp, Artificial sequence
  DNA replication origin
acgagcccgggcggaggctgggcttgcagcagctgctggtgctcccacaggctgcggttctcagcgctcagctcgtccagccgccgctccagctcgtcgatacgctctcgctgggtgtggatgaggctctgctggttctgcacgatggccgtgagctccttgaggtagagcacggcgcgcaccggattctccagcaggctctccatgccgcccgccgccgcctgcgccctgcctgcgcctgggctggcggcggggagcgcgagggcgcgggagcccagcagcccagcggtcggctcgcctccctctcccaccggcccagcctccctccccccgccggcgccgcgtcactgccaccccgaccttcacacacgcatcgcggggcggggcggctgcgcaaggccccacccccaccccaccccctacctccagacctccccaactcctcgcctccccacctcgctgcctcttggcgtcagcgaaggctctgctgcctgcagggcagagaggagagggaggaggccagcgagagggagcctctgtcggggcgtgggaggaaagcaagataacgcaggcgacccgagaaggacggtgaatctgactggccagactgggaagtaggcgaaggggaagcagcgatactgggaaggtgcggtgggacctgtaggagaagagaaacagaaaagaaaggaagagaaggggagaggccagcagagaggaagcagaaaaagggaaggtggggccaagaaagagaaatgtgctggaggacaggaaggcgtggggccctgaagggacgcgaattcttttttcccaggtccaggccttccagaggctggggttcatctagagacctgctgaggaggggccacactcgcctcttttgctcgcagcaatctattctgccaggggattccctggaacacaagaatcctggggctctaagggaccctaaagagcgtctggtcctgctccttccttcatccgtgacgaaacttgggatgggaaggctgttcatgctgggtttcctctgggagtgagacctcaagacaactgtggcagttcctgatagaaacactaaataaacgaggtcctctgtggcaagggctaacgcttccagaagcttctgaatagatcattctatttgacaaacagttataaaatgcacactattaccaaacactgtgctagatggtggtaagagaagcatgactagaatggaatgttaggctttttgaagcttataaataagtgggtgaaattggtcatgattaactttgacgtatgatagtggtggtgagtaatcaggcagaggtttgcccagagtgctataggagccagcagcttggagatccagggaggcttcttacaggaagtgacccttggtgtgggaagggttttccataaagggaagacagcat

SEQ ID NO: 22426 - DNA, 1844 bp, Artificial sequence
  DNA replication origin
ggcggcggcgggcggcatggagagcctgctggagaatccggtgcgcgccgtgctctacctcaaggagctcacggccatcgtgcagaaccagcagagcctcatccacacccagcgagagcgtatcgacgagctggagcggcggctggacgagctgagcgctgagaaccgcagcctgtgggagcaccagcagctgctgcaagcccagcctccgcccgggctcgtccccccgtcatcggccccgctgccggccgctccggccaccgctcctgccgccgccgccagggcccaggaacctctccaggaccagggacagcgctcagcagccgcgccgcatcccgcgcccgatcggccgccgcgtcagcaccacggacagctcctggagcagccccagcggggccctggcagcagggctcacacaccccagtcgccccacaagcatctggggacacaaggggccgtgactgacaaggagaaggagcgtcccccgagttgctgcgctgctgccggagccctccttcagcacaaatccccctccgccctcggcaagggcgtcctgagcaggagacctgagtgagcggggagaggagatgggcactgttgtggtgggagcaagggaagcaagtgggtgtgagggagagacggggacgttgggtgcgtaggagtctaaaggaccggagtgatgtggcctgaaggcgccagaagtgtgcaaaggagattttgggtaaatgagggaacgatatccctgcttgagaaggttttggggaatgctggagcaaaaaggagtaaccagaccattagtaggagcaaaggaggaaggaggtgggtgttaagcgattggtgatactgggaactgacagcatttaaacggggttaggctgggttgaagttcgagtgaagattaaactgtagaaaagagaaccattgaaggaatctttttaagtgagaaaaaatttggaaggaagtttgggtagtaaaagtatttgcatggagactgagatgtgagaaaagctgaaggcttggaaagaggcatgtgaagagctttaaaaaggctggggcccaggaagagtaggactggggtagaggggaatccaggaggccggggacaaacctgaaaagcaggagtgatgtgggaaaccaagggagctggaggcagaggaagagaaaatgtggctctttagctggtgaagtgggagccacagctaggagtggctcatttagggaagctttctcttctctgacctgattggacacccttcctctgaattcccgcagagccgaagaggtgcaagggaacatcccatcaaaccaatggaggactcaggcatggcttgaggactcagtctggttacagctttttcctccaactcaaggagggtttttcatacagggtgtttggccgttgttgaaagggagcaatgacatgggggacagttggcagatggagttggtattcagatgccatgcctgtttaaatctccctgttaaggccagcaactgcaaacccttttttcccggttatctggtgatcactgaaatcttgccttgggtcctgagagaaatgttaacctctcagttcctagaacttcaagctctttcttcactcaggaggtccatgaactaggaatatgggaagaagatatgaaagtgtctgggatgttctctcctctgtactggaaaggctgtggccatgtctgcttcttttctctgattaggcaagtgatggagaactaaacaaagaacagttcaagggaaattgtccctggtcagcacctgaccttgacaatggtgatgcataagggaatggggagggggaagtagagctgagaatctcatcttcatccagg

SEQ ID NO: 22427 - DNA, 1501 bp, Artificial sequence
  DNA replication origin
ggcccgaaggccgcggccccgatgctccccgggctggcggcgggcggtgccgcagcgccgaagccccttccgagccccctcgggccgggaacgcgggaggaggcggcgccctgcgccgggaggccccagacaccgtgggcgggcggctgtgcgcgggggttggggcgcggggaggcgggggcgcccgggccgcgcttcccttcgcgggtgactcagcagccgccttcctcagcggggcggcgggggcgcgcggaggctgtgggcacgcggcttccccgcgccggggtgcaggtcctcgccgccgcccccgcgaggaagtgcgaggctggacgctgggagggggcgcgtgggccgggagattccttctcgcctgccggctgccagccggcccgcccacgccgccgagatcccgactccacgttccctccccacgtaggagtcggggcagcgcacggaggcggaaaggctttccccaggctggcccggcgagggtcgggggcgcagggactgaggggacaccccaggggggccagctgcacccccgccctcccctcctgctgctcccgggttttacgcactcacggtcggagggagccggctggagatttctggggtcttagatgtggaagtccgtgcagaatttacctcgttctgccccagggcccccgggtacctgccaccttttgttcttgaaagggagagatgcccctctgctgagccagctggagcgtcctttctgtggctcttgccgtgtagaagtcttttttcgtatctaagctcggtccctcctgctgcggtgacccccagacagctctgcttcgccagactcggcgactgggtagagtgggcaagaaggaggaccaagaacgtccccactgagcaggaggggaaatcaaggcccagagaaggggaggggcttccttcaagcttatagctgggggtgtgtgagagaggtgctgacctcagtactcaggagttccggcttctaggtcagagtccagctgcttgaaaagataatattcctccctggtgctgcccagcgcagtgcctctacctgtctctggaaatccctttggccttctctgatgggttcttaccatgcgttaagtcgcatcaagactgtcggagatgccagatgatgccggttcggaagcatccagggtaaagaccgggctgtgcgcgggaaacacggaggctagacccaagcaggaaattcccacccgctttgcagagtttttgtagctgctgtttttaaataatcattggttgatttgatgcattgaatgaaaattgtggtagataggaatcattcatcaaggaagaaattgtggaactcccttgtctctctgcctgggatggggcgtgcattcctgattggaggcaggtggttggctggtttgacctggtgcatccaaagccctgagaggtcattggtaccaggccctggccacagctaggccgagatatcctgcagggaaaatcacactacagctttgtgtgt

SEQ ID NO: 22428 - DNA, 901 bp, Artificial sequence
  DNA replication origin
tgccccgactcctacgtggggagggaacgtggagtcgggatctcggcggcgtgggcgggccggctggcagccggcaggcgagaaggaatctcccggcccacgcgccccctcccagcgtccagcctcgcacttcctcgcgggggcggcggcgaggacctgcaccccggcgcggggaagccgcgtgcccacagcctccgcgcgcccccgccgccccgctgaggaaggcggctgctgagtcacccgcgaagggaagcgcggcccgggcgcccccgcctccccgcgccccaacccccgcgcacagccgcccgcccacggtgtctggggcctcccggcgcagggcgccgcctcctcccgcgttcccggcccgagggggctcggaaggggcttcggcgctgcggcaccgcccgccgccagcccggggagcatcggggccgcggccttcgggccgggtgctgggtgctgggtgcgcgcccctcctcggcctccacgggccgcagccggggctagtgtgatggtgcgagtagattgccttggagaagaaggggacattgaggcgggggcggctaggaggggtcggggatgaggacggtgacaccgaggtacaaattctactcagcatccacctttcctgtcttccttgtacccaagacacctcagcaaaaaaaaaaaataaatttaaaactcccagccttatcttggccttctcatgtttatgtttgtgttttatcgcatcacagtcttagaattcccagggctgtaggtctcctcagcctacggtgcggcataatagttctgagcagggccctgggtttgaatctcgactcagtcgttcactagctgtgtgatctcaagcaatgagagcctcgcgtttcccgttcgtaaaataaggaatacgaatggt

SEQ ID NO: 22429 - DNA, 1675 bp, Artificial sequence
  DNA replication origin
gtctggctcctcccccatcagtctggctcctcccctgtcagtcagtctggtttcccgctagctcagccagtaggaatcatggcctcctgaggatttctgggatcagcagttggcctccataggagaccccagtaaggaatccaaagtcagtgaatcaggtgtcaggacctttgttgtgtggactcagccagccacaggatctccctggccatcctcctctgcagtctggctaaggccggcccccactccagctccggggctgagcaagggtccctttcctgagcaagtgccttcactgcagcactgcagtggctgctcatctatctgatcagagatgtggagatgctgctcagcccagaggaaagtctgctccctcccagaaagacccagggccagaacagagcctcacccctcccgaagaggcagagaagcctcagccctaccgaggccaggacagccttccccagccacctgcagaggagcagctgggggctggtgtcaggggaactctgtcttggggctgggagccggacagggagtgattctcccaggagtgggaacacctgaaattgagcacatctggaagcgtgggtgtctgcaaagggaggctgaagggagggcgtcagcgatctggagtacagtggagcagctacggggctggcaaagccctgaaagccctgcgaagctggataaccagatagagttattatgggttctgctgtgccctggttccccaaacccccctaggaaggcaatgtatgtctgccagggtagttaggccctcaggtgggagctgggggtggtgcctcctcccagcagccagccaggaagcagcaactgcgtgccaggctctttctccccagaaaagatcgccccctggtcgttgcccctaccgaccgcctccctgctgccagctaatgacagggctttattctggggcgctgaatatgccagtaattgcagccctactttcgatcctgccgcctcccttccctttcaggctctcagtgacaatgacccggtagctggccagctgcctcccagcatagagcccatttgtctcaagggtgataatggggccaagatgaggaaggtgggcctctattagagtaatgggaggaggcggctgtgggagagggtggggctcaggagaaggaggtgggcttaggaggggaggtggagttcaggatggggaggcagggctcagaagacgaagtggggctcaagatggagaaggttggctcaggaggggaggcggggctcaggcaggagaggcggggctcaggaggggaggcggggctcggggggtaggtgggggctcaggaggggaggtgggactcaggagggagaggtggagttcggtggggaggcagggctcagggggaggtgggggctcaggaggggaggtggggctcaggagggagaggtggagttcaggggggaggcggggctcaggagggagaggtggagttcggtggggaggcagggctcaggggtaggtgggggctcaggaggggaggtgggactcaggagggagaggtggagttcggggggaggcagggctggggggaggtggggctcaggaggggaggcggggctcaggcaggagacgtgggactcaggtggggaggcaggactcaggagggagaggtggagttcatgaggggaggcggct

SEQ ID NO: 22430 - DNA, 891 bp, Artificial sequence
  DNA replication origin
gatggagaaggttggctcaggaggggaggcggggctcaggcaggagaggcggggctcaggaggggaggcggggctcggggggtaggtgggggctcaggaggggaggtgggactcaggagggagaggtggagttcggtggggaggcagggctcagggggaggtgggggctcaggaggggaggtggggctcaggagggagaggtggagttcaggggggaggcggggctcaggagggagaggtggagttcggtggggaggcagggctcaggggtaggtgggggctcaggaggggaggtgggactcaggagggagaggtggagttcggggggaggcagggctggggggaggtggggctcaggaggggaggcggggctcaggcaggagacgtgggactcaggtggggaggcaggactcaggagggagaggtggagttcatgaggggaggcggctcgggaggggaggcgggggctcgggaggggaggcggggctcaggagggggaagtgctaggcaggaaacagaacaacccctaggcctccagagcaagaagggatctgggtaggggtctaaggggcactctgagcctctgctaactgaactgactcactgctggtccttgcttcttccttctcaaccaccccatccttactccaagatggaagacatagtgaacacattatttattgaacgtgccagggacaacgtgctgggcactcttgatattttatctcacgtaattctgtgagatagatgttattcccatttacagataaggaatccaggatggagagaagttaggtatcttggccgagggaccactgctaattatttctggagctggacagtgaacccaggtccaactcctacacacaacgtcttttcaaagagctgctg

SEQ ID NO: 22431 - DNA, 852 bp, Artificial sequence
  DNA replication origin
tgaacagaaggcaacggtgctcggttgggggagagggcgacagggtgcgtgtggatgtgggggtcggggagagaagctaggcactctggcctgcctttcctgtggcaaggactggagggggtgtctttcacagtctcctctagggaggggctaccatggcagggatgagccctgggcacggagaagaacccgcacctggggaggcagctcagacagagggaaggggcagctatggccagggctcaggagcctctgcttagaagcagtatggcagagcggtgcatctgggctctgcctcttacgagctgtgtgaccctgagcaggtcactcagcctcattgcacctctgtttctccatctataaaatgggcacagtaacagtacctacctcacagggatactggcggctgaagttacttacaactctttaagctgtgcctgagtcatggtgactgctacatgtgttacctattgtaagtatcggtggcccggctccttgggcacaggctcaggtggctggggaagctgatctacactaagccagctcatctttagactgaccaaatgagtctggaggaggcagggtgcctggcctggcttgggcataagcctttccaggggggtggactccaggtgtgggggctgcggctgtgaagaggaggcttcctgccctgctgggtttagaaaacacctgctcctccctgacccatcctctgttccccgggagccacagcaggctgagccatggctgcagccctcctgcctactctaagaagacaccttgctgcctggagcagacatggtccagcctgctttgtagagttggttccctcagattgcttccttccccact

SEQ ID NO: 22432 - DNA, 1136 bp, Artificial sequence
  DNA replication origin
acaggtgctggggaaggggccagcagggagaacaggaagctggagggtaggcctcgtttgctcattcacttgtgccttcattcctatgttccttccctgctgagcagttcctaggtgcccaagactgtgcaaggtgcagggcggcaaagatgggcaaggacaggacagttcccagggcacagctccaggagcgctggctcttcacgtgggctatgcagcaccctggaggtgtcccgagcaccacctgctcaactccacacagccctgagaacaacatggtccatgctgttgagcggaacagctcccactcccagacagcacagaggaggcaacaggcaatgggtaaaagcacgtgcctcggctgcgacctgaagtatgagcagaagtcttccagatgcagcagatggggtcggggacaggtgaggagaatccccaggagaggaaacaaagccacacaaaagcccagaggtgagggtggcttgagattcgggacagcaaataggaacggctggaacccccatggggctgggactgtggcagggagcctggagaggcctctgtcctgcacaccgtgaggagccatcagaggctttcccgaggatcagcgcggtcagaggtgcactttaggaagatgattcagctgcaatgtggaggtgaggttggaagggacagagctcaaagaaggggaagcacaggaggtctcccggcgtgcaggcaagaggaaggatggcctggcctcctggggcaggggcactggggaaggcaagagagggtgggattcgggaactgttaagaggcagcatcagtggggcttggggctagagcagaggcgaaggaaggagaacagccaaggaaaaccgtcctggggatctggactggctgacagaggaggcttggcgggtcggtgggctggggagctaagattgtccaacacccctcccaggccatggaacacgggattcagtgtggctggcggaatcactgggttggaatatcaagtgttagatctcaaagagacctaaggcagagtcagttcctggcgccatgctgtatacccatcccatccccctttatgtcactaagtgatcatttcccgtctcttatccttccagcagcttcttcgccaggcactgcat

SEQ ID NO: 22433 - DNA, 1769 bp, Artificial sequence
  DNA replication origin
ccatcattcctcctggttcctggggtttagagggaagtgagcagagctgctccctggcctacaggcccagagaccccccactccctggggctgcctaccctcccgcacctctctctgctctctgacctggccctggttcagaacgggattggggtagacgggagggcctcgctgtcatggatggagctgacctgggccattactgagtccccaggtcctgccaggatgccagggtgggaggaaggatggagtgctgggttccaagccccggcctggacaagagtctggaatttgatttccctggggtcacaagagagaattcagtttagttcatgtctgcaaacacttattcagcctcagccacaggtctggcacagcactgggcacaagagatgcagagacagatgtcttgcctgtgatggacagtccgcagcgagagctctgagcagggggtggcactgagcattgagggtggggaggaaggtggcactgagcattgagggtggggaggaaggtgtaggggacagtgcaggttgggggcctggcaggcccaactctgggatcagtgggagttggttgataaatgggttaggacacacgatggtgaacccggaactgaattccagtgttattcagggagcagttgctccatgccagttaaggtgctcggtgctggacaggatgactaagacatatttgatgccgtgaataacttatgctctgttggagcctgggggagggaaagggagggaaggatgggttggagaaatgccacaaagattagtggaggagactgagtgtcaaagagaaattggggcccgaggcagggagaccccgtctgttcggggcattgagagggctgcatggaggagacacatttgagataggtctcgaagaagaggacatttctacctggaggaaaggggaggctgggagttgaggttggggagagcattgcaggctgggagagaacacaaatgagtccccaagcagggagcctcgtgggggcggtcgggggagagcaggcaggagctgctgagcaatgtggactttgtggagtaggactttgtggcccagccagattgttagggttggaaaaccaggaagaagcgtttttatctgtttggggcaatggttctcaaacaaagaaaagcctgtgttgacacctgctgtctgagagcttgggtctggttctgcagtgtaaggtgatggtgggagtaagaaggacacagagatagtaaggatgctgctggcatggtccaagtgggaagaaaaagagccctacgtggtgacattctggaaggatatcatggatgattgcaaaaggtataggggtggggggtcccaggagctacaggaggctgacaaacacagtggacagggcaaacgaaaaccccaggacaaggcaagtttcccaggctgggtgcttgtcaggccaataaggaagtcaacaagagctggtttgggtgaggtagggaaaacagtggcatagcctagatggacagaggatacacaggctgctggaaatgtgggtctaggatcaaggctaggtatggaggcttgagagtcattcccatcattgtcactgtcaccattaagcagctaccacttatgaagctcctgctctctgctgggtgctccatgaaataatttaatcctcacaagaagatacagggtcagcaggataaaccccacttaatagatatgaaaactgagagtcaaagatgttaaattcatccaagtccaatcagctgggatctggggctggc

SEQ ID NO: 22434 - DNA, 1172 bp, Artificial sequence
  DNA replication origin
caccgacagagccgtggaggaggagacggatatgttctggttggcgatctgcaccgtgacgtcccggaaagccatcatgagggtcccgctgtgggccgggggcaggccgggggtctccgcggcgtcatccccgggcccggggcccgcgctctccggcgcccgcccctcggcctccaggcctgggggccccgcggccgcctgcagggcctggtggagctggtaagcgccactctcccgcagggagcacatggtcttgaggctccacgtgctgagcgcgtcgtcgatggacttggccagggattgcacctgctcggtgaaggagtcctccagctcggtgagggtgcctgcgaaggtgggcggcagggagggcgagcgcaccagcggcagccccacgaggccgtagccctccatgagcgctttctcggccgccaggctctcggccgtgggtgaccgcaccttgcgcagggagatccgccgtggcaggcggctctccagaagcgagttgcggattttctcgaagttcttgctgagctggtattggcggaaggcggtttggatggtgcaagcggcgcgccgggacaccaggtgaccgccgtacttatgttctagcatttcaatctgcaaggacgaggacagagaggaggaagggctcagaggggaagggtggtcagcccttctgaggagtggtggagtcacccggccacactcgggtggggcccaggaatggacgggggcgggggggcgctcctgggcagctaaagtctgaaccgcctagaacgtcctggccacgtggcaagactcctagaggtgtaggacggaggggtccgttctggggactagtgatgtctcaagggccaggagggaggtgctgcatatggcgttcagatatcgatgctgtggcgggtattacaaaatgttcatggccgggcgcattagctcaggcctgcagtcctagcatcttgggaggctaaggagagaagattgcttgagctcaggagtttgcgaccaggctgggcaacatagctagaccttgtctctctcttgaaaaaaaaaaaaaaattaactgggtgtcctggtgcgcgcacgcctgtggtcctcagctactgggaaggctgaggtgggaggactgcttgagcccaaggagttggagattacagtgagctatgattgta

SEQ ID NO: 22435 - DNA, 892 bp, Artificial sequence
  DNA replication origin
ctccgcctccaaggacgccctgcaggccatgatcctgagcctgccgcgctaccactgcgagaacccagccagctgcaagtcgcccacgctctccaccgacaccctgcgcaagcggctctaccgcatcggcctcaacctcttcaacatgtaagtcagccccggcccccagcccggagtcctgggcgtcctgggagggagggaaggaggagggcaccttccctccaccaagcagggcgccaggtaacttcccacgtcatgccagggtcctccaggcaggcgcatctgtgccgtgcctgatccctgaggtcatgtttaggaagtacatattttattttaatcatcctgagtttattttaagaaagattaaaggaaaaaaataacacatcagacacatgctttcacaactgttacagcttaagatgaagctagggtttgaaaagtaagagaatgtaaaagaaaagacagtattaagtaaataacagtccaggccgtttgaggattacgcagcaatcattcgggtggatatgaagccagggaaaacgcattagctcccagggttggtgaaatgcgaggctgggtgggggagggaggagaggcgcctcgtaaagaatgccggctgagagcaggagaggggagggctacgaggaagagagagtgtgaagcaggcagaggcacaggagaaagagaacaggggagaaatgaccgaccgccatagctcagagaccccagcgagaccgggactggtcctgcaccgaatgtatacagccagtcccaagcagaggaaaggaagcacacctgcccctcccatggaaatgtcaggtccaggaggcaggcactcgcctccatcctccactcgccccttcataaccctgcgccaagagcacatctcccc

SEQ ID NO: 22436 - DNA, 1174 bp, Artificial sequence
  DNA replication origin
agccctcacagccctcgctcgctctcggcgcccactctggctgcgcttgaggagcccttcagccccccgctgcactgtgggagcccctttctgggctggccaaggccggagccggctccctcagcttgcagagaggtgtggagggagaggcgctggcgggaagcggggctgcgcgcggcgcttgcgggccagcgcgagttccgggtgggcgtgggctcggcgggccccacaatcggagcggcctgccggccccgccggcccggggcagtgaggggcttagcacctgggccagcagctgctgtgctcaatttctcgctgggccttagctgccttcccgtggggcagggctcggaacctgcagctcgccatgcctgagcctccctccccctccatgggctcctgtgcggcccgagcctccccgaccagcgccgccccctgctccagggcacccagtcccatcgaccacccaagggctgagaagtgcgggcgcacggaaccggactgggaggcagctccacctgtggccccagtgagggatccactgggtgaagccagctgggctcctgagtctggtggggactaggagaacctttatgtctagctcagggattgtaaatacaccaatcggcactctgtatctagctcaaggtttgtaaacacaccaatcagcaccctgtgtctagctcagggtttgtgaatgcaccaatccacactctgtatctagcttctctggtggggacttggagaacctttgtgtctagctcaggcgttgtaaacacaccaatcaaaaccctgtcaaaacggaccaatcagcgctctgtaaaatggaccaatcggctctctgtaaaatggaccaatcagcaggatgtgggtggggccaggtaagagaataaaagcaggctgccggaggccctagtggtaacccgctggggtcgcgttgtgtgcagtgggtgctgtgtgtgtggtttgttttttttttttttttttttttttttttttttttttttttttgctcttttgcagtaaatcttgctgctgctcactgtttgggtctactctgcctttatgaggtgtaacactcattgggaaaatctgcaggtttacttctgaaaccagcgagaccactgaaccatcgggaggaaaaaaaaactccagacgcgccgccttcagagtt

SEQ ID NO: 22437 - DNA, 1063 bp, Artificial sequence
  DNA replication origin
agcccagctggcttcacccagtggatccctcactggggccacaggtggagctgcctcccagtccggttccgtgcgcccgcacttctcagcccttgggtggtcgatgggactgggtgccctggagcagggggcggcgctggtcggggaggctcgggccgcacaggagcccatggagggggagggaggctcaggcatggcgagctgcaggttccgagccctgccccacgggaaggcagctaaggcccagcgagaaattgagcacagcagctgctggcccaggtgctaagcccctcactgccccgggccggcggggccggcaggccgctccgattgtggggcccgccgagcccacgcccacccggaactcgcgctggcccgcaagcgccgcgcgcagccccgcttcccgccagcgcctctccctccacacctctctgcaagctgagggagccggctccggccttggccagcccagaaaggggctcccacagtgcagcggggggctgaagggctcctcaagcgcagccagagtgggcgccgagagcgagcgagggctgtgagggctgggggcacgctgtcacctctcaaaagcaaacccaaatcacgaccccacagctgctccttacgcacgcacgtcgtatgcacacccacacacacacaggcgcgtgaactcatgtgcacacacaggcacacacacacacctgtactggtgctctgggcaggctggagagtgaaacagttgctccttgcccaggttgtggagccattatggctgggtccctgtgagaggtgaggttggcccgaagtccctttcccgcacccccctccccgttccctccatccccacccccatccagatccctttggactcatccagagaatgggagcgatggagggaggagctgtggacgctctcagccagggcagagagcttgcgggacaggctgtgcgctaaagccagggggtctggggcagcagagaggatggcgaattggtgcagggcgaaggaatctgaaagagggctgtgcggtccgcagagagcgaggcttgggagcccgacccaaag

SEQ ID NO: 22438 - DNA, 1245 bp, Artificial sequence
  DNA replication origin
tgtgagaggtgaggttggcccgaagtccctttcccgcacccccctccccgttccctccatccccacccccatccagatccctttggactcatccagagaatgggagcgatggagggaggagctgtggacgctctcagccagggcagagagcttgcgggacaggctgtgcgctaaagccagggggtctggggcagcagagaggatggcgaattggtgcagggcgaaggaatctgaaagagggctgtgcggtccgcagagagcgaggcttgggagcccgacccaaagcgtgccctccagggtgcagcaccgacgggtgccgcggcgtttgcaggcggggagaaggcggcgggaagtactggactagctgcgggcaggggccggctgaggcgcgcgcccgcgtgctaggggccccgggggagggcggcggggacgcggcgctactcccctctgccacccggcggccgcagacagcgctgcgccggcctcgcgtttttcgttttccgccagacccggcctcgtaactgagagcatctggctgaagccgttgctctccttctctttcccctgggcctccttctctccccactagccggtccaaggagcgagggcacaggtgcacagagcagtccagagggagacaaggggggcggtcagaagctaagagtacctgaggtggcataggcctgtcgaggacggaactcaccccagcctgacctgatttctcctgcagcccctgggcggggggtccaggtgacatctatatacgaatcacccccctcatcctggctggcttcccttgacccaggaaactgccctgaaattccctccccagccccagtccctctcctcccttcccttctgaacacaacagcacagaccttatccaaaccctgcctcctcctccaggaagccttccagccacagaagaggcatgtgggactcggtaggggtgtgggaagaggagtgggtgggaaacgggtggagccatgtgtggcagctaaggagggcacccccacacccgccccctgggacactctcacagactccgtgcattccgtgggggaataagaggtggcaaggacaagaacaaaaggatctgggaggacatcgggccaggtgatgatgggctgatggagaaattaccaaggcgggggcgctagtctggggagctcctcaccacctccaacagaggggtcctctcttcccccaccccaagcggcatagctcaacagaaacggagcaagg

SEQ ID NO: 22439 - DNA, 1196 bp, Artificial sequence
  DNA replication origin
cttggaatgctgcccccatgctgggctctctctcacttcaggcctcagatgacacttctccctccccttgttctatggtttctgcagtttcgttcacctatcacaatttgtagtggttgtgtttatttgtctgttcttaccaccagactgtaaacacagtgaaggctgggtccctgctgcttttgctcagcctcgtaccaatctccagcccttggcaccgtgtttaacacacagtaggtgtccagtaagtgcttgttaagcgcacaaatgagtaagtggcaataacccttgcagtcatttaatacagtccctctgggttctcccaaccacactgactcgtccgagtggctggcctgagggcctcagaggagccaaggagcagagctgcccaggagcccacgtggcttggctgccaggcaggttctgctacacttatactccccgtcgttgcttggattcaccagccaccgcagcccagcccctaacaggcaacatcccaggggctgaaatgatggatacctgtgttccaaaagttgttgcaggtcgtccagggcagctcagaagtgaaggagctgaacaggtagaagagagcccaggcaaggatgatgatgtagtagacattcaaatatgactcgatgaccacagatgccagaccaatgccttccagagtgggggagagatggggagggacaagagagatcaatgttagcaaaaaagtcacatagaagctgccagttgaggttacaagggtattgggtgctacacaaagagcaccattggggtttatccagtggcatgagaagccattcatagcatatttttctttcttttttcttttctttttttttttttttttttttttttgagatggagtcttgttctgttgtccaggctggagtgcagtggcacagtctcggctcactggaacctccacttcccgggttcaagcgatcctcccacctcagcctccggagtagctgggaccacagacagacccggctaattttaactttttttttgtagagacgggagaaggggagggtctcgctatgctgcccaggctggtctcgaactcccgggctcaggcgatcctcctgcctcagcctcccgaagtgctcactacttaacgaaggactgtggacctttcagaacagcctggctgaaaaatcaatgctgactatgaacaaaacctctcc

SEQ ID NO: 22440 - DNA, 1345 bp, Artificial sequence
  DNA replication origin
gcccgggcgtccgccgcgggggtgggcgtggcgctgcgcgggagggacccgcagacggcagagggtccgcggggagcgggcggggcgttgagagcgcgcacacagacacccaaaaaacacacaaacaagcggcccctgtgccgcggcggaacgcgctgtgctcgcggccgtccggcccgtccggcagccccgggtcagcccggtgaactaagcggacccgggatggccgagccgggggccggcgttctggtggggctgtctgggagaggggccggggcggcgctgggtggagaaggggctcgcgggggagcgcgggggcgcgcgggggcgcgcctcgagccagtacggcagctccgggagaggggagtgcggcgggcggagaggccggcagagggcggggagggcagcccggacctcccaccagcacagcgcggtgcacgcgcttcccgctgagatgccaggccctgccgcctctttgacttggaaaagaaggaaagagccacgacctctctcctctcgcattccagtgctccgtttgctcaccctgaccgtggcacccgcataagccgtctgtgtgttccagagaggccagccctgcatgtgctgtccgtgagcgtgcttggacctacgcataggacccagctgagcgggacatttacacgactgctggggtcgagggcagaacagggggaaactgtgttctggcggaggcacagcaccccgggagcacccagagcctgtgagtagagccataggtaagccaagcttcactcggctccagcccctcgcttctgcccctgcaggggtcccatggttgccccaagaggcatcagcaccaaactggcctcccccacctccccaccatcagtgctaagggtcccagcttgctcgggagccagtgtttccccaccaggctctctccggcccacccatgaagcctgattctgcacttggcgcaggatatgggagtgagcggatgggtgaagcagcggatgggtaggcagggagagaccatggggggatgcaggcaagatggcggccccatgaaggggaaggtgggggaggatacataccctggaagagggggcagatcttcctccaggctgtgacactcccttggctggtgtattggcccaacgccacctccaggaagaacaccgggatgccgcagacaaagaagaagatgaagtaggggatgaagaaggctcctgcagaagagagagaggcagggctgagccacacccgggctcttcctcagcctccatcctttcagaccctcctcccccaacaaacccgccctccaccatcctgttcttaatctccctcctgacactttccaagggcc

SEQ ID NO: 22441 - DNA, 648 bp, Artificial sequence
  DNA replication origin
tctgtgcagtcacttggaattcaggttctttgcttcgcagttgcagaaaacgccacgcactccttctccaagcagggcttgtcgtagggctcaaaggaggtaatgggtgtgagggtcctttccgtcacttggtgacacgtggtgtgaggtcatcaaactggagggaggtggctgagggggtgaggctctaacagcgcaggtgggactggcaggcagagagatgagaatgctgctggcttgggtcggggtcagggttgagggaaggaaggaaggagtacctcggccttagccagaggggctgaagcgacgggggtgggggtggggatgggggggtgtagggcagccgagtcagtgacctgcttccctagcctggaggggtgggcgctatatcttagagttcccagagaagaagacccaaaaggaagggagccctctcttgtctggaggccacacctgttagagaggaaaggcaagcagtgagagcctgggggcaagttgaacagggagagcagaagcagaggtggcgggagagttacagactatgcccagggctgcgggaaagcagcttgttaggcactgagcccaccaggctgcgcggggcctcagaccttgcccacatgaacacccaggtctcagatccacacacag

SEQ ID NO: 22442 - DNA, 1153 bp, Artificial sequence
  DNA replication origin
aggcggccgccgccagcgcgggctccaaccccccgagccgccgccccccggccgggccccgcgcccagggcgccccgcgtcccggcccagcgtctcagggctgcgccgaggccgtctctcccggccgctctccggcggggctcgggctcatgctccgggcgcgaggggtctccgggctgcgcgggcgcccagcaggtctctccgggagccgagcccggctcctcctccgcgcgtgtgttccgcgccgggctctcctccccacgcctctcccgtcgcaggctcgctgccgccctccctccctgcgcgcccgccctcactcgctgcccagaaggaggcttccccggcgcccgcccgcctgcctccgcccgcgcccccgccagccccggaccgggctccgggctctgggctctcctgctcgcggaacctggcccgcccccggccccgcccccgcccccgccccgggcacaggtgggctccgcccccgagaagccagggacgcgaagaggccattcggcttccctaggggagcgagaggtggggccagagaactggtgcctggtgcctcccccgactgggaacgggtgggatgaggagggggcgagtgatgatgcggactctgggtgaccgagggaaaccgagtcaccacccaggcgcctaacggtgtggttttaggcagaagcgaagtagaggctggtttgggcgacgcccaaggctttagcctcagagcctttcgtcgccaacagcaacgacccgactccctgcttgacgaaaccagtaggcgtgaaatatcacgggagccactggacgcttaacgcagacatagcttcgttttccagttgagatttgaagacctttcttcccagcctgaaccacatctccgagaggcgctggggaagtcgtacagcccccacggtgaaccccagcaagcagttttccccagactgggctggaatggctgtttgaagagagtaggtgtttgagggttccgaaaaagaattttaaaaagaaaagaaaagtattcactcttagagttgaaaagatcagcaagataagccaggcacagtggctcacggctgtcgtcccagcactttgagaggctgaggcaagaggatctcttgatctctggaggtcaaggctgcagtgagccgtgatt

SEQ ID NO: 22443 - DNA, 1041 bp, Artificial sequence
  DNA replication origin
ctgtatctggaactggtggcgtcggcccaggtcggcgggaaccccctgaaccggagtaagtagcacccaggggaggcgaagggcgcgggggtgggcggcggcggcggctcctgcgttggggggacccgcctctcatcccatcctcagacccgatttcccacccatttctccctcaggtgcccggcgtcgccccgcgcgtactcggggagagctgcgggcgggggaagccgcggggccgagcgcagaattcccgagcccgggcctgcccgccggccacgtgggtccggggcaccctgggggctcctcgcgtctcccctcggagagcgacccggagagaggctccccgcccgtcccgccgagacgctggcggagaccgggcccctccagccgctccgggcttgcggttcccggggaggaggtccgtggggtccacgcgcgagctagggattcgggtgcgggatgccctcggccgtccacacccaggcgcgcgctccagtccgcgcagcccaaactttgcccaccgccttctgtttggctcactccgtttcctctcctgctgcatcttctaggggggttcttttttaccatacctcggagagtcccgtctcttccccgcttcccatacgtcgctcctctcccagcctccgtcctcggctctttgaatctcccacctcctcgctgcgccctctttctcctgttcgggccgccccttctgccacttttctgaaccctgagcaaatctaccaaactccccagtttaaggagatgatggacagcacagtggaccgggcagcaggtagattcctacttctgtttttaacttagccaaagccacttaatatttccgtgcctcagtttcctcctaggaaaacaggagagcgtggtctctttgcctttttacatcaataggtatggctgtgcgaggtggttttcaacgtactgtggatgggcctaacaaagtaaaactgacagtgacaggggccgtaaaagatcctgtaatagttgggaaaagaaatggagaaactcccgttactaccaggt

SEQ ID NO: 22444 - DNA, 910 bp, Artificial sequence
  DNA replication origin
agacagggttttgatgtgggtggagcaaaggtgtatggcagggagtggtgtgaggtgaggctggaaaaggtaggtcagactccgtgtgctgggtgaggctctgttctgaagccttctgggaagcttcagaggttttttttcttctttttttcttttctttttttttgagacggagtctcgctctgtcgcccaggatggagtgcagtggtcggatctcggctcactgcaacctccgccttccgggttcacaccattctcctgcctcagcctcccgagcagctgggactacaggcacccaccaccgcgcccagctaattttttgtatttttagtagagatggggtttcaccatgttagccaggatggtctcgatctcctgacctcgtgatccgcccgcctcagcctcccaaagtgctgggattacaggcgtgagccaccgtgcccggcagcttcggaggttttaagcagcagagtgacttggtcagatccgagctttagaacgagagttctggaagcggtgaggactccgtgtgggggagaagctgagatccagttggaggctctgctgcggcccagtgagggcccggcagggccggtggatattcctgtgtgacccacacccctgcacgatgccctcccctctcccaagggttacttgctgtgtgtccttggggagtcagtttacctctctgagcttcaatgtcctcacccttaaaatgagagggttccaacagatatcttctccagcacttctgactttggaagtttcaaaaccaccattggccatagacatgctctggtgcttggagtgaccagtgcccctccctgggccttagtcactgctggacaatggagcgagtgggcagagggcagggctggtgtgctggagtcccacgtccctgccagataca

SEQ ID NO: 22445 - DNA, 2206 bp, Artificial sequence
  DNA replication origin
ggtgagggaggagacttcttttccaccccttcttccccgctgtcacaccagagatgctaacagtaatgagcagctgctggaggactcaatgaacaggctccaggagcagatgggagggaccggggttgagctggccttaccttgcccacactggccagcagctggaggcctgagacctggtcatcgaggctcagccagaactccgcgttgtcatctgcagcaatggcaaactggattttccctgggcagcggggagagtttccagatgagggcaaggagggcatcagcataaaagctggaggcttttgtgagtgtcttagcgattaaattcccttcagtgcttgatgctgtggcttccctctctgtaaagtgggggtttctacatcctgggagacagtgtgaagatggagaagacttatatggagagatgagctggttccaggctgcaaaccagggagcaaagcagcagcctgtgggagttggacaagaccgcaatatgactcaatttcccctctcttcctgagggtggactaacaggaagttagtccagtctacctataaccttatcttatgttctttgggtccgatgcagaactctagagcaggaagaaggatggggttttggggctggcctcaccatcagtaaaggggtgcaggtagccaaagatgcggaggccatagttggtccatttgggggacacagcaagcttcctcagggttgtgcgaatctatgccaagaaaggggaaggaaacagttacccagaagagggaaaaggaaacttcccgccaggattggcgggaagaccaggaggggactatgacaggagggaccagggctgtggctttgtgagtggagtgcaggctcaatttcagttcccatttgcctctttgtccaggagaccttgtacagtgcacaaccagcacaactgtacatggtggccctgggtacactatattgtgagccagagagcctgaaactgaaatgatgcaggggatgaaattgaaaggatccctaggaaggaaacaagggaactattatgggcagacaaaaagagagctcaagagataaaggagaaaatatggaccagaaaagatgtaaggaaagatgagagacagaagtgggcagaggaggcaggtgtggagggaggtgggcaaggcagccctcaggcactcacatgggggtacagtgggaaatgcaggttcctcctgagctgctggatagagctgccacaccagtcttcaaacacatgcaggttggcacggccccggaactgcagggcggagacgccagtggtgagtgagcgtgagcaccccatgcccgccccagatcctcagctccagggggatgagcatcccatgcccgccccagaccctcagctccaggaggatgagcaccccatgccctccccagagcctcagctccaggaggatgagcatcccacacccgccccagatcctcagctccaggaggatgagcaccccatgcccgtcccagctcctcagctccaggaagatgagcaccccatgcccgccccagctcctcagctctgggaagatgagcaccccatgcccgccccagctcctcagctccgggaagatgagcaccccatgcccgccccagctcctcagctccaggaggatgagcatcccacacccgccccagatcctcagctccaggaggatgagcaccccatgcccgtcccagctcctcagctccaggaagatgagcaccccatgcccgccccagctcctcagctccgggaagatgagcaccccatgcccatcccagctcctcagctccgggaagatgagcaccccatgcctgccccagctcctcagctctgggaggatgagcaccccatgcccatcccagctcctcagttccaggaggatgagcaccccatgcccgtcccagctcctcagctccaggaagatgagcaccccatgcccgccccagctcctcagctccgggaagatgagcaccccatgcccgccccagctcctcagctccaggaggatgagcaccccatgcccatcccagctcctcagttccaggaggatgagcaccccatgcccgtcccagctcctcagttccaggaggatgagcaccccatgcccgtcccagctcctcagctccaggaagatgagcaccccatgcccgccccagctcctcagctccgggaagatgagcaccccatgcccgccc

SEQ ID NO: 22446 - DNA, 1527 bp, Artificial sequence
  DNA replication origin
cacaggctgctgctttgctccctggtttgcagcctggaaccagctcatctctccatataagtcttctccatcttcacactgtctcccaggatgtagaaacccccactttacagagagggaagccacagcatcaagcactgaagggaatttaatcgctaagacactcacaaaagcctccagcttttatgctgatgccctccttgccctcatctggaaactctccccgctgcccagggaaaatccagtttgccattgctgcagatgacaacgcggagttctggctgagcctcgatgaccaggtctcaggcctccagctgctggccagtgtgggcaaggtaaggccagctcaaccccggtccctcccatctgctcctggagcctgttcattgagtcctccagcagctgctcattactgttagcatctctggtgtgacagcggggaagaaggggtggaaaagaagtctcctccctcacccctacccctctacaaagggataaactgaggatggggaggagtgaggagtggggaggagcgaggtgtggggaggagcgaggtgtggggaggagtgaggaatggggaggagcgaggtgtggggaggagcgaggagtggggaggagtgaggagtggggaggtgagaggagtggggaggtaagaggaatggggaggagcgaggagtggggaggagcgaggagtggggaggtgaggagtggggaggagcgaggagtggggaggtgagaggagtggggaggtgcgaggagtggggaggtgaggagtggggaggtgcgaggagtggggaggtgagaggagtggggaggtgcgaggagtggggaggtgagaggagtggggagatgagaggagtggggaggtgagaggagtggggaagagtgaggaatggggaggagtgaggagtagggaggagtgaagagtggggaggagttgggagttagggtggggagttgtgggaaagtggggagtgagaaggagggaaaagcgggaaggagtcgggaagagggaagaggaggggggaatgagaaagagggagcagtgagaagtgggcagggggtgtgagaggagggaggggggtgtgggaggaggggagtggggaggtggggagaggagtaaggagtggggaggtgggaggagtggggcagagagtgcggacagggaggagtggggagcgagtctgaggctggggaaggaccacagcgattcggcttgggacacccagcgcagcatctctggggccctctggccttggccgggtgctgactcgcgctgcaggtcatccggctgctccgggctcctggcaaggcgggctgcctcctgcgtgggcaacgctcactccttcactcccttctgttttctctcctacctctctcaccttcattccgcccgtcttcctccctttttctctcacttcttggttctccttcctggtctcgcactcaccgcctcgcgtgcttcctgttttctctgttcctccctcctcttctctcttccacacctctagactggaaaggagtgga

SEQ ID NO: 22447 - DNA, 1502 bp, Artificial sequence
  DNA replication origin
taagaaggggcctctccctcacaggtcagtctgaagtcacttgttctccaagcccttgctcaccccagggccctgacactcaagtccatccaacaccaggtgcctctttctctgggcacttggtgcccaggtaaaattttcagatattattgctgtttttaacattattcagtgaataacgtactctggtggtctgaaagggataaggggggattctgatttacggatttaatgtcagactgcataaaagcctcctctctctccttcggaagttttctagggtgctaggtggcagcaaccctgttctgtcaataggaccatctgaacccgtaggagctccttgctggacaatgccaaagtgcggctgcagtatgtggttaaaagtcccgtggagagttggtaatgaggaggtgggggtgaggagttggtaatgaggaggtgggggtgaggagttggtaatgaggtgggggtgaggagttggtaatgaggtgggggtgaggagttggtaatgaggtgggggtgaggagttggtaataaggtgggggtgaggagttggtaatgaggtgggggtgaggggggagtgttgagaaggcagtatgccactctggaaccccagaacagcattttaggactcagggcccagaggcgttttaggactatggaaacttaccacaggaagggctttagtaatcagttgtgcctgatctgtctattttacagaggaagaaactgaggctcagagaggcatataacctaccagcaggctttggttagtgatctgggttgacccagtgaaggtcagtctgacagcactgtggcccagggccctctcagtcatggcaccagagcctcgggctccaaggagactgcagttttggatcaggagccgaattgcctcttatcgcagaagttctgtctccatctgcagggaaaaggaggctcttggcctcccagggtagcaaaaggcaaacacacttggttaccgggagcccttgagaaggtggcaagagtggagaagagcaaacacccgactccctccatctctggctttggctctagactcagatggtttagagccaaggcctccaatggcctctcagagctctcagagagccctgttcaggtgcagaaaaactggtctcgtgtattctccatgggtccccacaaacaacagattatcagaaaggtcaggcttctttctgacaggggcagcaaaactaaatcccagaacttctaaaggtcacgtgccttgtggagaaatagttggggagtgaggtgcccgcaatttcttttgaggagagcagtggctagaaggaatggtccaggaggggggcagtttattgtcaggaccattggatggagtccagcaagtatttatcaggagttgatggtgtgtgcagccccaagctgggcacttggggtaggggatggagagtatgtttaggacttggcccctgcttacaaggtgcttgctggcaatataagattctcatatgtgattc

SEQ ID NO: 22448 - DNA, 1156 bp, Artificial sequence
  DNA replication origin
gagtctgaagcctccacacagcccgctcggatcccgccccccgccgcccggagcagccccaccccccaactcgctccggggcttttgcgcaggcgtgctagccccgaggcaccctgggacttatagtttacgggttggcggggatgaacgggacctagaagaaaagtgcctacgacttccgtgatgccttgcggttgctgtagcctaatgcctcgtgggagttgtagttttctttggaaaccgtcccttctgaaaggctgatgggagcgtcatcacgggtcgctcaaccccatcccgaagtccgcgcgagcttaggaaaatcattatttagggattaattgtggaagaaggaaaggaaggaaaaaaaaaaaaaaaagaagaggaacgagcgggcggggggtggggggggggatggaaagactcccatcatgctctgctaagctagagagctcttagggttgccatgcaatgaaaaatgatctgttgttcatctttaatggagagagcctcagtagtgttgagtgactgcagggctgtgagggtggaagggaagggcaaagcaggataaccggagcctgagctctgagtcggaggaggggaaaagaaactttgtgaagattgtgcatgaaattaatattgattaaacggattggaggaggagacacggaggattaccttccatcctcctcccctcatcaattaaggccacattctcagctcccggccgagacggatattctggctctcaaaaaagggctgccttactgaaatcggggatcctagtgaactctatctttgctttgtctgaaaaataataaaaggggggttgggggagcggtggattcaagaaaagataaggtctacggatctatgggtctttgaccacacttggggggctgggctgacttctgcctttgtagttggttgaaacttattttccacctttcttctgctggtggcttcgtgaaacaacaccccctctttctctagagctcctgaatgtccacatgcaatgtctacaaaggctctgggcccgggaaatgtggatccatgcggcttgccgccatggaatgtttttcttgaaagcatccttgtctgcctggacccctgtgctcttcgcaactactcaagatgtggaggggacgagcaccagggg

SEQ ID NO: 22449 - DNA, 1053 bp, Artificial sequence
  DNA replication origin
gttagcgccgcacggtccgcatccatcctgcggcgagcggcggccgggcgggcggtggcagcagaggcgccgcagtcatgaggggagggccaggggccggcaccgagtcgaggcggatgcggcggacgcggctcccactgccgccgctcgccgagctgggcgggctaggcccagagggcggcggcaccgcgagcacgggaccaggtccgacgcccgggcggtggcggccccggggcagaggagtgggaggggccgaggcgggcgagggaaggccgcggcccggctcccggtcactcgggcggccgcctcctcccacacgcgcccccagcgatggggaccggcctcacaggtcgcccatcgcccagaggcgaagggccggagcctcggagcctcggcgcctgaggagcgggcccccccttccccgaggcctccccgcccgccccaggcctggcaaacccgtctcctcccgggccggtgccgggggctgacggaggagggaacggcggggaggggagggccgctcaccgcggggcccgagctccgctgcttctctgaggcaagaggagaggagacctagaggactgggtgagggggaacagggagagaaaagagcagccacccccaccaggcgccttctgtcaccgaagatgggggtgcggagtggccgagagaggagccgcgtccacccgggaaactctccgcgctaaatggcgccgggagtctgaagcctccacacagcccgctcggatcccgccccccgccgcccggagcagccccaccccccaactcgctccggggcttttgcgcaggcgtgctagccccgaggcaccctgggacttatagtttacgggttggcggggatgaacgggacctagaagaaaagtgcctacgacttccgtgatgccttgcggttgctgtagcctaatgcctcgtgggagttgtagttttctttggaaaccgtcccttctgaaaggctgatgggagcgtcatcacgggtcgctcaaccccatcccgaagtccgcgcgagcttaggaaaatcattatttagggatt

SEQ ID NO: 22450 - DNA, 1550 bp, Artificial sequence
  DNA replication origin
ccgccaccgcccgggcgtcggacctggtcccgtgctcgcggtgccgccgccctctgggcctagcccgcccagctcggcgagcggcggcagtgggagccgcgtccgccgcatccgcctcgactcggtgccggcccctggccctcccctcatgactgcggcgcctctgctgccaccgcccgcccggccgccgctcgccgcaggatggatgcggaccgtgcggcgctaacccccgtggctcagctcccgaatcgcccgccttcgagccctcctcgtgagccgcagcagcctcggtgccagcccccgccgcagctgggcccagcggtccgcctgtccctcgttgcggcttgtcggtgctgagtgaggcgtcgtccgggtcggcgcgaacccgcccggccgcggttccctgcagacctctgcgcgggcggctcggcccttcacgcccttttcgttcacgaatccgagcccgctcgcctctctccagcgaaccgaccatgtctggcggcgccgcagagaagcagagcagcactcccggttccctgttcctctcgccgccggctcctgcccccaagaatggctccagctccgattcctccgtgggggagaaactgggagccgcggccgccgacgctgtgaccggcaggaccgaggagtacaggcgccgccgccacactatggacaaggacagccgtggggcggccgcgaccactaccaccactgagcaccgcttcttccgccggagcgtcatctgtgactccaatgccactgcactggagcttcccggccttcctctttccctgccccagcccagcatccccgcggctgtcccgcagagtgctccaccggagccccaccgggaagagaccgtgaccgccaccgccacttcccaggtagcccagcagcctccagccgctgccgcccctggggaacaggccgtcgcgggccctgccccctcgactgtccccagcagtaccagcaaagaccgcccagtgtcccagcctagccttgtggggagcaaagaggagccgccgccggcgagaagtggcagcggcggcggcagcgccaaggagccacaggaggaacggagccagcagcaggatgatatcgaagagctggagaccaaggccgtgggaatgtctaacgatggccgctttctcaagtttgacatcgaaatcggcagaggctcctttaagacggtctacaaaggtctggacactgaaaccaccgtggaagtcgcctggtgtgaactgcaggtaaagccccacctactttatttgacggtcctttggatcccaaatttggctcggcgaagccagttgatcgagttcacccttcacttggcattctctgttggactccgagtgggacggggaggccaacttttgaaaggggctgaaattaggagaatgtggagcatgtgcctaggtgttgggataggataagaattattggtagccagagggatttgctaccgggcagcggtggtgaaggtcatcttagtacaaacgaattgtctcctggtttagagtctggcaggaaacttggaatgagtg

SEQ ID NO: 22451 - DNA, 1022 bp, Artificial sequence
  DNA replication origin
tttgtcagaccacacttactttttgcatgtcaaataaaaaaaaattatcttccgatgtcccccttctcattttctattttgtatcacttttatttatcatcattttatggggtctcaggaagaagagacagtaaatacatgtgctcggttagctagctttaatcaaaaatcctaaacgtaggttttaaaaaagataactggagcagggcaggaaataatattttttgccagtgtggtggcaaaaaataaaaaacaaaaatctgaatctgtgttaggacagtatttccgtgtataacatagcgcttagcaacttaattctccagatccacatattttaaggacatgatgtatctcagacacctacttcaaacctcactttacagttaagtaagaccacaagtagaatgaattgcctgaggccacacaagtagacagtgggagaatgagaacagaaatatctattgactcctagttgaattttctcttaccttaccacactgctagggagtaacaagatgggcagatcacgagtcagatgagaaaggtcatgaaaaatagtcaaaggatgacttttcctgggtaaatagccggatgtccaagaaatgaaaggctggtctggcagcagcacatcgtctaacagttggtagtcatatgtgggaagtactgaagggggagatgacagcaggcccagaaactgcaatgatccaagtgcatgtcgatcctgggagggaacagttaagagtccgggcaggatgaaacagtagaaactggtgagtgaatgaatgtgaaggctgaggagcgactgcaatttgttaatgggattatgaggcagtataaagtggttaattacggtggcggaggtaagcaggagtaaaatgatggcttttaactcctctcaaggacaccgaaaattattttaataaacactggaaggctgggaataaatataattcacaccattcttactttcttggtttagagatagcttatctacatccttaaattaatggctgtagctaccc

SEQ ID NO: 22452 - DNA, 1558 bp, Artificial sequence
  DNA replication origin
gggagcccggggaggcgcgctgcgccccgcggcggggctgggggcggggctaggtgtctcgcgcagggggcggggcgcggtgacgtcgcgggcgcctgggccgtgctgtggcggcggcggcggcggtagtggcggcggcggcggtgcctgggcggcagcagcagcagtagcggcagccctgaggacggtgagacggccgcggcggcggcgacagcgcggaagtcgcgcgggacccagagcttcccccctgtcgctagtgctgaggctttcgcctttcctacccagcttcttgctcacggcccgggctgggctgggcagggcaacgcgcccccggggaggggcggagctgtaggtgaggcttcgcgaccccctccccctcctcggcagcccggggggtggggaggggcgggccccacccagaccaccggcgcccacccgcgggctccacccagccgggctccgggatcgggcgggagccgaggcggtagatgtggggatcctggggcgggaggtgggggagtggggactggggctctgggcacttggggagcggagggggggaggcttaggactagtgaagccgcggacgaggtagtggggagacggagaaattggggagccatgaggttggggtgcggtcagggtggatctttgggttaggtgagtgatgtaaaatgctgaagatgattcttttcttttcgatgaaatggtgagataaaagatgaagtgtatttcaaaaggacgatgagctgtgcatgttgcctttgaggcagttgcagaacctattttattgcactagatctcacgtttctactttagggttcgattctttttcttctggcggggtgggtggggggtcggagagggaagagaatccccttactttggctcaggtaaattgtgagcgtggatgtatctgaaagttttacaccgaagaagagggagatcttcggtttagacaacttcgttccggcagccaccatttgggtcgcattacgcttagctccttcaaggtggtgtcttccagttttttttccccccaatgcctaaaagatctctttataccacccttttacaggctttatcctggccccttgagagaaggccccaaactcaggtggttgctttggaaggcacattgctgaataatagttgcaggtggttgtggttgactgctttgggtggataaagtgaacaattggaatagttctgttggagctaattatatgaaaaatgcttaaatgttttaaagtacaaccgtcttttatagcgtgttgcttgctcagtacaccttgacttttagacattttgtgttcagtgctaaattgttgaaattttatttctcatttgcagttatgtttcttgcagtctttattaaaacactttaaaatgaaatggaactctttttttttggtaggctcctcaatttctgagaaatgttcttggagtcaagtgctttaaaaacattttgggggcaggtgtgtcactttgtatggaaatattagagtaagcagtgttcaatgttcttcacatcactctttcacaacttagcactgta

SEQ ID NO: 22453 - DNA, 1757 bp, Artificial sequence
  DNA replication origin
ggctcgggaggccgccgtcgatctcgccgggctgcgcgccctgctccggagcgcgggacccggggaagtttcggcccaagttggctgcggggcgggtggcggccgcggctcggagtgcagggcccggcgctgggcgagtggatcctgggggcgccgccgcctccgccccgcctcccgcgcctcctccccgcccccgacagccgcgccggccccggctcgctcctgcccaccagccgggccgcgacaccctcccgagggctcctcccaggcgctgggaccgcgacctccgcacctgcctcccgcccggctccctcggcccctaagcagagcggcccgggggcctcgccgcgggggtgcggacggggagtctccgccgcccggcccccttctcccggcgccgcacgcctgctgcccccttctcctggaactcgacccgatcctccgaagaaaccgcggctcttaccccggccagcagccccctcggggcgcccaaggagcccgtacccgcgccccgcgatcctggcacgagcgcccacctcggcgtctgcggggcccgaggctctgagaggggaagagagttatgtcctccgctttcttgctacgcgtcctcctttgaatcccccaaggaagtagagtgacccgggaactactttgccgcttcgcaaacccaggtcatccccctcgcagtcctgggcccttccctacagagcccagctcagaaagatccctgggtttgggaaaaatgaggcagaaaggtttcaaggagcaaacgtgttctctcaatactttcgtcatggatataggactaaataattctcctgatgttttatggagaaaatgaggcacaggaaagtctgacgaccaacccatagtcactgcaggggctaatagcttgagaaggtcactagagtccagggctcggccttagttcagatccaagtttaaatgcttttctggaagtcccatgtccttttgtaggtaacctcatagcacctctgggtgagctgcccaagagggtgtccaaggaggtgaagtgggtgagctaaggtcccagtggaggcaggagctgctggtccctgctccagacccaggtaacagggaccaaccgagagcagccagtaggatcccaggcctgccctccagcccctttgcttttacattctgaaaaacccagtctcttccctgaggaggaggtcgccctgctaaagaaattgccttcgaatgcagtacagtgaggggagggaaaatacaatagtaataatcaaaggctttgcctttttaaaattagtaaccaaacaaggtgacagcctccccctttcagtgggggaaggggcagcagggagggtcagggaatggatgggaccaggaacccaccacactgggcaggcaataaggagctattgtcctctggattttacaacaggtaagagctgttgtagcaaataccccactaattagagggcaaggtttccttggaactgtgctggcttgggccggaggtgcaccgtgacttttctcacctcaggtgcactgtgacttttctcacctcggagtgaatgaatggggtttatgagaccaggtccagcaaccataaatgcatggcctataattgttgtggggagcctgcctgctgctggagggaagctagttcaaggctttatcttggggacagatgatatgaggagagttggcctaaagcaagcaaaaaagctttgaatccgctttgccaaatttcaagcaggctcagtttctctctt

SEQ ID NO: 22454 - DNA, 1736 bp, Artificial sequence
  DNA replication origin
caggtaagcgccggccctcgcccccggggacggccccgccgccgccgccgccgccccggctgccgaacctcgcgcggctcctccgccttcccggccccgcggccgcgctgggtgtccgccgggtgggtctgcgcgccgcgggcgtcgggtcggggcgggccggggtcaggtcgggggaagggagtcgccccgggccggggcggcgaacaaagctggggaccgccgggccctcgcgcgggcaggcataggaggctccggggtcggcggcgcaggcggggcggcctctgagcttcgcgctcactctcccgggtctggtcgggcccagccccgaccctccgccgaggtctgcgccggcatcgaggaccccatctgggttactttacccgccggacgcgggtgggagcctgcgtttctgcccggaccgcgcaggtagagcccgagcgccgctcggctttgtgcttctccggtcgctccggcgctccacgtccccgccgtgggagaggcgggacgagacctcctccttcactttcttggagcctcggtggacgcgtagcccgcgctccagtcggagccgaacccccgggtatttgctgcagaccgctgggagaggcagttcggtttgcggggagcctgcccggccctgttttacagggagggaaactgaggtggccccggccctgcgttggttactcagctgaaggggtgtgtgtgtgtccggtgtcccctccacttcacccgggcccttcttcactgcttttgccacctggccacgttggcaacagcttccagttgctactcccctgggcagaggttcagcctggtacctggaggagaaaaactagggatcgtggaatcaaccccccagactgctccaggggccccggaatgtgcccagtcaccagagctgcgatgggacgtctgtgcccgtgccgtcagtgtggagccgaaaaccctggctcggcagggcaggggcagccgctagccagccaccagcactcgtccaggcacacgggggaagcctagggagccccctcctgtggctggcccctaaggcaacggagagcccaggcagcagcgggcacgccctcagaaggcctaaggaccctttcctgcacccagcctctcctgccatccgattaaccggcagaattcacttacgcaaaggcaagactccccatctcaggcacagacgagcggatgccagacctggagcttgcagccgcacccctgcctaggctcacacacacaggtcctggcaaacacaccgacctattagaggtggaagactgaggggtggttttcctccatctcaaaatagtgtctgttctcgctttgacacacaagattcgtggttataaatagcaagaaggaggaggtgtgtctccttggaaggatggcagtgctgaaagagacctcttaggcacccttgtgagaggagtgatggagctggcgtcttcatggtgatgacaagtccagcagtccaagggaagggtcacaattaaaaccagggctttttactaacagatgcaggtggcgcggacaacagggcaggacgtgaagggagtaaaggaacctaaagtgacaatggatgggtcaatacccaaaggcagtcaggagagacatctccccttccctttctttctcttcttaaagacagtcaggccaagggcgtgtgacactctgtgggatctgcctgccaggggagcaggagccaggctcggaggagctggctggtc

SEQ ID NO: 22455 - DNA, 1449 bp, Artificial sequence
  DNA replication origin
cagcacatacgttcaaccttgtcagctgaatgccaccccagccacgcacgactagggggtccttctagggacagcagtgatgtaaagaggatgtaacattgcggggccagaagtgccgataccggaggctcaggcagctgaggggcacagagatagcaatgggaggctgcacagtgttcattcaagccaggacttaaagggtgaggaagagttctccagtcaaacagagagggaagaacattctatgtccatgggtacaacatacataagtgcacagaagagtgaaatgaggccgggcctggtggctcacacctgtaatcccaacactttgggaggccaaggcgggcggatcacctgaggtcaagagtttgagaccagcctgaccaacatggagaaaccttgtctctactacaaataacacaattagctgggcgtggtggcgcatgcctgtaatcccagctactcaggaagctgaggcaggagaatcgcttgaacctgggaggtggaggttttggtgagctgagatcgcaccattgcactccagcctgggcaacaagagcgaaactccgtctcaaaaaaaagaaaaaaaaaaaaaagagtgaaatggttgtgtgtgaccagaataagaggctgcgattcaggaggatgagaactggcaggagatgtagcttggggtgtaattgggaccactgtaatggggttaggactttgttctttatgaaacaggaagtgagtggagactttgaaacaagatagtcatacgatcctatgacatttttaggatgaaatctctggggatagaatacagagatgatgaaacctgccccctgaaaaatgcagttttcgccagcgccccagtgattctcctgtgggtcatccagagagcttacctggaggaacagccatgtgggtggaggctggggtgagaggaggctggtggcagcggtgtggatggaggctggggtgggggaggctggcggcagtggtgtgggtggagcctggggtgaggggaggctggtggcagccgtgtgggtggaggctggggtgaggggaggctggcagcagcggtgtggatggaggctggggtgggggaggctggcagcagtggaggcacctcgggaggcagggacaaggatagcaactgagtgctggtaaaggccaccctgctaagtagccagaaagtttgcagaaccttcttttgagggatctgaagttcaagttctcaaatgctccagatcctcagtgttcaagaacctcaggaagcttcgcagtcctgcctcgtgcctgcttgaacagctggatgtgggcaggaggctgtgggagcgggccatgccagcagaatcccgccttactctggggacttactcttgtcacagcccctggtgtcctgagggtcatttcagtgtcatgtgagtattactgtggctattggaaaggatttggtacgag

SEQ ID NO: 22456 - DNA, 1905 bp, Artificial sequence
  DNA replication origin
tagaattccagggcttcagaaaaaaagtaaactaaaacgaggtagccagacatatatatgtatatatatatatatataatttatatatatataatatatagaatatattcagcagaaaaaaggaccatgatttcaaattttttccaaaaaaaaatttttaaacaggaaagaagattaagaacatgaaatgagcatgaatagcagagtactgtaagaggaggagtgatgagaagagactgggattagttacaaagtggaagggtgaaaaggcctttgtagctgggtttgctttttatacatttcaaaataaaaaccagatcacagtattcaaatgaaagctgaagtgaaagcagacattttcctcaactccccagggttgaaaagaccagtcactccccacccccatttccagtcacagcagtggggatacagtagctgaatcagtcctccaccccctgcaggggagtgggtgggtaagcagcagagtccatctctccatccgcggggaaaaggagctgggagtagggtagggtaggaaccccagctgcaaagagaatgggctggaagccgggagggggctggaggagggaggaggaaacgagcctgaggcttctgtcatagccccatctcatccgctgcaatgatctgtgcgtaagtgtgcgtgtgagtgtgtgggggcggtggtaatgggaggatgaacagggcgggacaaggggagctggtgctgccgccctcacctgaccttctcactgtccgtcatctgccagagtcccaggttgagtaccttgaggcacggcagctgcgtgatgcgctccaggccgcgcttggtgattcgggtgcagccgtacaggtctatgccggtgagttggctcaggtgctcagcgatcagctccaggcccttgtccgtgatgcgcacacactgtccaatgttgagcgtgcgcagcccgtgcatctgccgcaccatgcggttgatgccatcatcactgatgtggcaggagcagagggagagagacttgaggccatccagcccctgggctatgtaagccagactctggtctcccaccttgtcacagaacgaaacatccagccccgagaggcgcaggctgcccatggccagatgcatgatgcccgtgtcactgatgttgtcacaggagcgcaggttgaggctgcgcaggctgcccatgtgcgacaggtgcaggaggccagcgtccgagattcccccacagaagctgaggttgaggagcctcaggcccgtcagccctcgggagatgtgctttagagaaagatctgtgagcttctggcagtcctgtagcgtgagctgctccaggcccaggcagccctccgccgcgctgcgcgtcatgccggccaggtgcccgatgcccacatccgaaaggtggcggcagctgcggaggttaaggctcttgaggcgctgcagaccccaggcgatgagcagaaggccagtgttggtgatgttgctgcaacctcccagctccagcacctccaggcccttgaggtactgggctatgcggcccaggctgctgtcagtgatctgcttgcagaggctcaggttgagagcgcgcagggagccgatctcctgcacaaacgcgtggcccagcccgttgtcggtgaggttgtagcagccgctgaggttgaggctctcgatgttggccatgccctggatcacgtagctgaggctgcggcggaggctcaggatctgcacccggcggatgccccgggcctgcaggctggggaacagcgacgggttggcccggcgcaggtgcagcttggcctccaccccccgccacaccgacttgtggtaggcggcgtcccgccaggcggtgcacacctgcgccgcgcgccccttgtcccggacgtccaggtagccgaagatcatggccagcagct

SEQ ID NO: 22457 - DNA, 1143 bp, Artificial sequence
  DNA replication origin
aatagtggttgcttgggcaaaagttactctcctacactgaatatggaaccccttccaaatcttgttcaggtcctcaaagaatcaatgaaaccattttccctttctgataaatccgctggtcttgtatctagttgtgtggatccataaattaaaatacagaggatcattttctctgatccaaaaattcttggtttgggggtagttaaaatgaaacttctgaaattctatccttagtacggacatttaggacccaggggctacatcctagaatggaattgtgccctgcttccataaaacggttgataaaccaacagacacgactggattgtcttaaaccaagttcaactgtcattccattttaatcaaaaagtaaattggattcagcatatacgaatatattgactatcagtacaactgagccatacaactgatagtctaaggctgatgacaaggagaaagctcctaaaacaaggcttaggggaaggctgttcccctgtaagcaaagcggactgagggcattggtggcgcagcagcgttcagaagtagagggaagttttgatgtatcaagtaccgagggaaacacacacagcgtgtctggaaaccatcagaagatgctagaaggaagtagtcatggataattctagaaatttctagaacaccgactggagggggtcattgtttaagatgagtacagccgagtttctctccaatttaagacacaagactggagagaaaggcgtcgtagtaaacagccccaaccgggggagcagggggtgtgataatgaggcgttaaggggcattagggacagtaagaaaaggagagttggggtgacgattattgagcactgctataggaggcggctctcgcagggataatcaagggagaggggtgtgaaataagggtaacgaattgcaggggtaaactgtgggaaggggctgcgcagacttcaacagcaaagaaaaagaaggaacggggctggggcgtggcccagagagggaacggctcaataacgggctaccgggtgaaaagaagccgggtggggaggcgctctgctgacagctgccgctcccccgtggcgcccacagggttaaaaatcaggggccacgggaccaggccgaactcggtttccagggcaacggctc

SEQ ID NO: 22458 - DNA, 929 bp, Artificial sequence
  DNA replication origin
gagagtgtgtgggggtgtgtgagagtgtgtggggtgagtgtgtgggaggtgagagtgtgtgagagagtgtagggtgagtgtgtgtgagagtgagtgtgagagtgtgtggggtgagtgtgtgtgagtgtgtgggggtgagagagtgtgtgtgagagtgtgtgtgtgagtgtgtgagaaagtgtgtgtgtgagagtgtgtgggggagggtgtgtgtgtgtgagagtgagtgtatgtgagagacagagggtggtgtgtgtttgtgcctgtgtgagtgtgtgtactgcagggtagatatcctgatacctgtttcatgccttcaggcccacagctggctgtggcctcgcaggaccaggaatgcgtttgtgtgtaattatgtcaccctctagcggtgacttccctactagccctttatccttgaaaagcccactcgggtgtcggtgacctctcttcccagtgacagcccgggagcagaacttcggggagattctggcatggagggacagtgctgggaaaagcggggtgtggccgggcatgaagagagtgccagggcccgggaagagtgaaaagtacaactaggactaatgaggagtgcaccctgccgagcagaaggggaagcaggagcgggccaggcacagcgtctggagaggagggaagagaaggcgctctcaaggggaggctcttgcgtgtcaatttctgccaagtgccattttatgtctgtggggtgggacggttatcgcagctagagctctttccagaatgtcagcactgagggccgaagtgggcgtggagaagcagtttcaattctgttttccaagggaagtaggcacaggtttagaggctgcctggagctgcctaaattccaaacgttcaccaccgtggagtggactgctgacttggctgcttctgcctagcctggggctctgttccct

SEQ ID NO: 22459 - DNA, 887 bp, Artificial sequence
  DNA replication origin
ggctcgcatctgtctgccaggacagagagcgtcctgagggggctggtgtgtgtgttgtgtgtgtgtgtgtgcacgcgcgcgtgcatatgtgtgtatgggggagttcagtttcaggtaccacacatctggaagtcagagaaagaagccactgcacatgttagagccattttggggggcaatttttaaaaaaaaaaacatttttaatgggctgagagccgcctcgtggaaagcccggggcgggggatggagtagaaacagctgcgggagtgattcttgtctccatatatgtttataaggcactgagggcgggattagcagctcctgggaagtctggctctagttaccgtgtcagcctgtcctgggggcagtcacagccacagtgaccattagcaggcacccaggcctgtctttggctcggaaacggtggcccccaatgtagcctagtttgaacctaggaactgcaggaccagagagattccactggagcctgatggacgggtgacagaggtgagaggcactggtgtgagggacaagtgtcacaggcggggaggaagaactccgctatctggtggtggaaatgtgtgaggatcaaagtccccagggagagtaggtgttgcgggcggcagggtggtgggctgggcacgggctgggcataggctgggcaggaggcttcggggccgcggggaggaggctggagaagcaggagggcacgggcggccctagctctgcaaccccgggaaggactggtaggtggagttaaggatatttggacaaggaaacgctttgaagcttttctctcgtcctccctactcgggacctggtcgcctcccctccataaaaccattagctcctggtgccagccctatctctgctccatctctcgtggt

SEQ ID NO: 22460 - DNA, 1134 bp, Artificial sequence
  DNA replication origin
tcccggggagcctggggacgccgacgcgcgagagtggcgcagtgagccggggcgcgcggggctgcgctcgtcaggtccggggccccggggaggccgctgggggcgcgggtcacgcccagacgggggccccggaggaccgcgggggagccgcaggggccgtgtgtcccgaggcgcaggctcgctctagcagcactgacctgctgcgggtcccagggcctggggacaggggctctcgggggcggatagaggaacaggcgtgggttacagcaggcaggaggccaagaggcgggaggcccgggagccagcagggaagggctgtggcatctggaagatgcgtcctcagctcaggcatttgatgccagagctgccgcctggcgtcggcagtgtccccggtgcagctgctgggcaaggtactcggtgccgccctcgaggaccacggtgccgggaggggcaggggccgcctagggaggcaccacctcagccgccagagctttccgggcgggcggttcgcggcgtggcttgtacatttctcagagaagctgccttgagaaagtgaaaagtccttgatctgtacgcaggggttgggacttaggaaacccgctgagggtgagaagggcgcagatggagaggggagactcctccctgggtgcaggtaaatccaattcaccaaaatgttttaatcctacaaaggagagcctgagggtcagagaaataagtctctgggctggaatgagaggtaggcacgtgggggagtggataggatgggccccatttctttggatgttctgcagcaaggacaggtatgctttacaacagccgaagtggcctcccggctgccgaacggaggaacgccgcaagctccgctcttgaaattacttgttttcatttctctttgtggtttctcagctcattatttctttggaaattaggtcctgtgcagggttcccacagtttggggtaagagacagaagtcctagggtgggaagatgagcagtgggaggcggaggctggaaagaggccgagcttctttgtggggaacacgcagcacgtaagcatcagtgcaactttctccgcctcaccccggctcctggtctgcccttatccgctgagtttccacactgactctccatttct

SEQ ID NO: 22461 - DNA, 1540 bp, Artificial sequence
  DNA replication origin
ttttagttgagacgaaggtttcaccgtgttggccaggctggtctcgatctcctgacctcgtggtccgcccgccccggcctcccaaagggctgggattacgggctgagccaccgcgccgggccagggacttgttttcttccgggtggtttcgcagggctgagctggggcccagcggcggaagtaaaacagcagatttcagcccattataaagagacgtttccaagcgttagagctacgggaagcgaagccccctgccccaggggtgtcagcagagccgtggcgtgcgggtccgtcgggggagacggggggaaggacaggtccccgggagaggagagcgcacccgcttaccgccctggcctcattctgcaggcagccgagagaccgccttcacccacgcggtgagcgccgcgggcgtggtcaacgccatcagccgggcctgccgcgagggcgagctctccacctgcggctgcagccggacggcgcggcccaaggacctgccccgggactggctgtggggcggctgtggggacaacgtggagtacggctaccgcttcgccaaggagtttgtggatgcccgggagcgagagaagaactttgccaaaggatcagaggagcagggccgggtgctcatgaacctgcaaaacaacgaggccggtcgcagggtaagctgggcctccccggcctccccagcactgcagacctagggggctgttcccgggctgtgccaccagccgtggcctggccttcaaggaaacgggttagtctgaccgtgaagattcttacctacgattgcaaatttacatgtccacgttattgaacaaatccttttcaaaatgccccacttcccaatgggcatacgtgctttttcttttcttttcttcttttctttttacttactttattatttcacggttcctagaggacttaggtgcaatgtttggatcagaattccagacgtaaggattagagcagcgctcttgtcttggccacccctcctttgcaacttgaatagataatgcgatgggatgtttaggccgttagacctcatctagggtttatgctctgttaaaggctctggtaatagcagagtcgactttcaagaactgctgtcatacgtatccagaacccagtcaaaaaacacattcaaatactaatgacaaacacacttctgagctaggagattttagacataagtggaagtgtgagaagacagccatctgtttaaggctggaggaaacagcctccccagtctcatgtaatgtgactgtcttttaagcctcagtttcagcagaagcaaccatgcaggtttgaggggagctgggttcattgtatgtgcagagcacacctgggcggcagcttctgggcccctaggtggcatgctggaaagcgtgaaccctctctgcctgcaccttgttcctgaaaaccccccctctgagcacacatccagcctcctcttttctttgctgtcccccatcgtggctgcctctgccacacaagactggagggcctgccccgcaggaatctctgccttttgctgctt

SEQ ID NO: 22462 - DNA, 1733 bp, Artificial sequence
  DNA replication origin
ggcagagcaggccgcggccacagagggctggggctgggggcgacaggaagtccgggaggggagaggaagacagcggtggggccgcgaggccgggaatcaggaatctgggcaggggcaaattggcccaagtctgcagtgttctttagccagctctgcagtgggagaaaacaggagagggctggacagcgggcggtgcagcgggggaagggcgagaggatgcacgtgtgactcgctctgcgcccgcggaggtgcccgtccgctggcatggcccgcggggtggggagtcgctgcatacggcccctgaaggcagctcccggcgagggaggcggagccatttcccgagggcggagctgcggccccgccccccgcctcccgccgcctcccgcctccccccgccccccgccccccgccgcctcccgcctcctccctgccccgctccgagtccgccgcgaggccttcgaggggagagggaactcgaggctgctgctggggcggggttggggtgactggcagtgggagagccaggcaggggaggggcgaagaggaagtcagggagggcacatagctccgggagggccgtgctgaggcggagggcgcagcaagggtgggggtcgcagtgggctgcagggggatcgctgagcacggaggcttcaggtcccgaaggagcggtggcgcggtgacaggggcccgggcgcggctcagctcgctggcggatgaggggctgggaggaagacgtccatgcgccccgaacctcagtgctttgcagaagggccccagggtgggcggaggacagggaccaaaatgcagagaggatggtccggctggagagacgggtgggcggaggacagggaccaaaatgcagagaggatggtccggctggagagacgggtgggcggaggacagggaccaaaatgcagagaggatggtccggctggagagacgggtgggcggaggacagggaccaaaatgcagagaggatggtccggctggagagacgggtgggcggaggacagggaccaaaatgcagagaggatggtccggctggagagacgggtgggcggaggacagggaccaaaatgcagagaggatggtccggctggagagacgggtgggcggaggacagggaccaaaatgcagagaggatggtccggctggagagacgggtgggcggaggacagggaccaaaatgcagagaggatggtccggctggagagacgggtgggcggagggctgcaacagtggggtgtgaagaccctgagagcagcacctcccgcccgcatggggctgccaggaggcgaagagcctttacccagagggttttcaactgaatgacactgtcaaagaaaagccaggatccactaaggcaagaagtattaaaagtattttagggaaagtcatttaaagctctataacattgtattttcatggaatcttctagattcttcccctagaatcagagttagattttccattaagtgaatgaagctcaagtttcagggcctctccctcgccttctaaggccctgttcataattccgtatttgtaattatttaaactgccccaccctgattatataacttttaggtcccacaaaagcttagccagtctctgccttagaactccacgagttgggaggatgaacgaacttccacgttttgatttccaaacaatttccctacccttgcattgttaaaagataaacaggaataagtgttctggctgtgagtgaattt

SEQ ID NO: 22463 - DNA, 934 bp, Artificial sequence
  DNA replication origin
ttcccgcctccccctcctcacttcccgcctccccctcctcacttcccgcctccccctccccacttcccgcctccccctcctcacttcccgcctccccctcctcacttcccgcctccctcctgagaggtccgctgtcgggagagaggactcggtgtgtgctccgctcgccctccgcgagattccctcagggcacaagcagcgcttcctgaagctcggttagcccctcacccaccagctgcaaggacggggaccctgcctttcttatcgcgcatcgcccaggccctggccgggaggagggcctctaaccgggaggggctgcccgctcttccgtgccccgccccgcagcgcacctgcccgcgaacatgaggcagccgggggtccgctggggcagagtgcggagtgaaggggtgcactgggcactcagcgcggcccttgggaggcagggccgccccagcctgccctcctgtctgggaaggccgtccagaagcaggagccccggggaaaacaactggctggacggggcggccttcagtgtctctcccagcctgagagtcgcttcccaccacctgggcacgaacctgctctgcgatctccggcaagttcctgcgcctcctgtcggtaaaatgcagatcgtggcgtcttccctgtcccctgtgaggatcgtgagcctatgcgtgtgaggccaccaaatcccaattcgtatgaacgtgctggaagcaagggggtcagagcacttagcggctctctcctctggtggggagaaaacaatgattttcttaaggacacagtttgatggcggaggctcgagagcggctacagttggggccactggagagagagatggcctctggaagagggtgctgagttatgtagtggccgattcactgcaggctgcctgctagattgtaggcttgctgaaggcagcaccagttat

SEQ ID NO: 22464 - DNA, 1131 bp, Artificial sequence
  DNA replication origin
cgcctcctgtcggtaaaatgcagatcgtggcgtcttccctgtcccctgtgaggatcgtgagcctatgcgtgtgaggccaccaaatcccaattcgtatgaacgtgctggaagcaagggggtcagagcacttagcggctctctcctctggtggggagaaaacaatgattttcttaaggacacagtttgatggcggaggctcgagagcggctacagttggggccactggagagagagatggcctctggaagagggtgctgagttatgtagtggccgattcactgcaggctgcctgctagattgtaggcttgctgaaggcagcaccagttatctgtcgcactgttcgctacagaattgtccgcaccaagcacagcatggactctgttagcagtgcagcaaacatttgatgaaggaaggaaggagggaattaaaggaggaagaaaggaaaggagaaagataaaaaaggaagaaaggaggaagggaaggaaggaagaaaggaaggatggagggaaggagggaaggaaggaaggaggaaaacaggagggaaggagggaaaggagggaaggaggaaaacaggagggaaggagggaaggaaggaaggaggaaaacaggagggaaggaagggggaaaggaagggaggaaggaaggaaggaggctgcttaggggtaaaacgtctgtagggaggatgcagccgggccacgagctaatagaaggtgcagaatgtcaagctgctgagatggaccatggaaggcaagaagaatgagggaatgcccacccagtcctcaatgacaaataatgatcttgttttcttttgctttttcctcgatcttaatttttaatccccaatggctgaatgatggtgttctgtgcagacatttgtgttcgggtagagagaaggggaaagaatggctgggactggcccaccatggccttgggactggcccactatggccctgcccttacaaactagaggagagtaattaaatgaaaacgatgacaaggatgtacatgtaaaacatttaaaggctgggcacagtggctcacgcctgtaatcccagcacttccggaggccaaggcaggtgggtcacgaggtcagcagttcgagaccaggctggtcaacatggtgaaacccca

SEQ ID NO: 22465 - DNA, 1155 bp, Artificial sequence
  DNA replication origin
cagtcatctaattagcatacaaagatacctctatcattccaagggtcttagaggcacctgtgaaggaaccagggactaagaccaaacactataacaaaagatgcacctatcaccctaatcaggaaataacaagcgttttaggagcttgccaggaatcaggacaaagactaaataaagatctgtttcttattatatcacagtgtcacagggcataaacgcgaatgtttcccccgagaagcacaggcacaggtgtgttcattggcatccctatatgctcctgtctgcaggggcacagacccaggcacagagggtttggggatgaaaatccagcccaccctcgatccgcctcaacccgcacctctggatggaaggcgtggcaggagtctggtcgccggcggagcttctgggagcgcatccggtcacatttgacagaggcattatgtgcagaagccactgttaaggtcaatatctcaggaccggagcccattctgcagactggaaaaaggtctggaagaacctgctctggtgccaccagttgccctgcaagcagctttagggtcaggaggcagcaccggggcccagggaagggttagagaacaaataacggagccctgtggaggacacgggcggtgaaggaggctggccccgctgctcaaaatctgagccctacagacacctcctacagcccccgcccccaccgcacacatccccgagcattgcaggatatatttgacttctgtcgcctcctgcagcactggtgggaagatgctgcagtcacaggtggggtctgtcaccaggaggaggaggttactgttgggaatctgctgcaccacaaataccctgcagcaaagaaagggagtcgaggatggctccgtggcgaccacgagaagggcttctagggaaggaacttctggagactttagtgtggagttagggtggcagggaagcccggaaccatgaggcagggcgggtcggggcagctaagggaacgggcctggcagatggctcagtcctactggctttgctcacaagcctttgctgctgcatttcctttcctagcagactggagacagtgaggaagtccaaactgggccgctttggagagtgcagagttgctattaatatatgcagggacgacaggcgtaaatcaagacc

SEQ ID NO: 22466 - DNA, 970 bp, Artificial sequence
  DNA replication origin
ctccctgggacaaggacagtggactcaaccaaaggtggaggcgagtgcctcagccccgctctgcaggacccgagtccgttccctcccggagcctcctgaggtgggcacatggcagagcagggccctgccacacaggctgtctgcatggcccttctgttctcagggcctggctgtggcccccagggatagacctagaggcagggagcacaggtgtgagctaccttcccaggctcatgcagagtcctacaggagagcatgggtctccccagcttccaaatccagaagctcccagccagagctggaaacccagaggggacactagctggcgtgcagaaaactctcaccgagaggagcaagcccacagcggccagggctgtgagttttgtccccagggctgggcacagaagcctgcctgacaatggcagggttgagtggcgtccccagggtcacgcagtggaaggggctgcagcacctacgccccggcctgggactccaagtccagtgcgccttcactggggacactgacatctgtgtaggccagaccagggggaggagctccaggggacaggtaccccagagaagagaaattctgagcaggcagattgagggggatcatcttcaacttttgcaagatgcagctgctgacagagacagaggggacagtgtcctgtcactgacacctagtgactgtgaacaccccagagcagccccacccgatcgcggatgtgagtccagaaggagtctggagacacagcccgaactgccctgagcccaggggcagaggaagccccaagccaaggccagcagaagagaacgaagagcaagccagagagaggaccacagtggagatgaagagatgggataagctggggacagcccaggtggtgggaagttctggaaccccatggcaaaggttctaggaacacggaggaactgagcagagcccgctgaggcaagatggcctcctgca

SEQ ID NO: 22467 - DNA, 873 bp, Artificial sequence
  DNA replication origin
tgctgcccctgctcccagtggcagggcagcccactctctggtctctctgagggtggtgctggtggtggggggggggcaccctcacccttggacctaggtgcgagcggtgtgcactctctccttcccagccaatttctgccttcttgacggcgaccaggtggctgctgcaggagctggtgctgtgagtgggggtagacacggggctggtggagggctgcatgcgagggtggcttaggagggtgtccttgagcaggaggctgcaaggtctccaggacaacccacttgctaccagaccccggggaaggagggcacaatccctgggcatggacgccacctcttccctgcatgctgcccctgggagggacctcattgctcaaccagagccctcaagcagggaagagggtgtcctggaggagaggggatgggccgggggctgtcagggatactccagctccttgggaacccaagtcgggagggctcagaggtctccgagattcagtcctgtgtctgacaggttcctgctggagtggagtgtctggggctcctggtacgacagaggggccgagggtgagtgcacggagctgcagggccatgtgctgaagagcagtggcattttggtccactaacgtgagaccattccctgtggggtgggtgacagtggggataggtgaccctgaagcatcgttgttcacatctcaccctgcgtggccttctctcatcacatccctcactcctggctctgtgtgtgacatcatcttgggacaccgccactccatgtgccatcatcaccaccccatgacatcctgccctcatgtgccaccatgttttcctgtgccgtgtccaccctgtgctgggcttatgttccggccagcc

SEQ ID NO: 22468 - DNA, 756 bp, Artificial sequence
  DNA replication origin
gttctcacccaccttgggtgtctggccccagggccctaccttgaccatctccatcttctgctcagagccactgctctcagtcccactcccaggcaggcctctgggtctggctttggggcttcagagggactgctctggtagttgtgacacaacagtgcctctggcggagacagagagagcagcctgccccagcctcagcccctgacactgccgcttgatcaccagggatcctcagcagtgcagcaccaggatgagggcttgactcgtctcctggaggggcatgtccaaccccacccgagatgtctgacctgcaataggcatttcccagctagctcagctctgcagggcaggtgggaggtggggggatggggggtgctgggctgctggcctgtgctctgctgcccctgctcccagtggcagggcagcccactctctggtctctctgagggtggtgctggtggtggggggggggcaccctcacccttggacctaggtgcgagcggtgtgcactctctccttcccagccaatttctgccttcttgacggcgaccaggtggctgctgcaggagctggtgctgtgagtgggggtagacacggggctggtggagggctgcatgcgagggtggcttaggagggtgtccttgagcaggaggctgcaaggtctccaggacaacccacttgctaccagaccccggggaaggagggcacaatccctgggcatggacgccacctcttccctgcatgctgcccctggga

SEQ ID NO: 22469 - DNA, 1109 bp, Artificial sequence
  DNA replication origin
tgaccgcagccccctgccctccatccctctcgattcactcttgggctccctgcccttgcccagagtcaggcggcagcagcaagtgatgggggccgaggggctcggcgttgcaggagattgaggctgagggagcttgagggagatgaagggggcagctcagaagcccagagggacctgagggctctggggaagcagaggggaaaggagccagtagaacggacaggacgaggccaggcagagctgggaattctcagccagaagccgctgtcgtctctggcatctcttgccagccatcagggcctggaccccggaccttggacggtggatcgaggtggctctcccttttcagcggggaggcatgccagtggctttggagtggcgagaaggggtgactctgggtcgtgccctcagcactgggctggcaggggctggggaccagcgctgaggcccggcctgcaggctggggagctgaggggctgagaagtgtaggggccgggagggcatcctgagagcctcaaggcagtggagcatccaaggggagggagagggggtctcacacccaggggagcgtggtgagtccccagccccgacctggcccgacatcacacctacctgccgcgttgccgcccagaatttgcgctggaggaattccagcttcatttggacgcccgcggctacagggcagaaagagagagggcaaggccagggaagagacggggagagaaaaaaatagagtcaagttaaagagaggaggtgcttccgcaggaactgaggagagagaccgcagcggatgggaggactgagtcagagggcagagtgcaaactggggtttctggggagtgggaggggtgggggaagaacagagacggcagcctctctcgttcccactggaagaagagcgacagaaaatgcccagcagtgatgaggctcccattccagaaaacaacgagggcagattcatcctagatctctgggaactcaaggccggtggatgggacagctcagtctcccctttcccatagatgggaatatagaggccagagagacccacccttttgaccaaatcacgtgaccaagagtggcaccctggaattcagggccgttgccct

SEQ ID NO: 22470 - DNA, 1023 bp, Artificial sequence
  DNA replication origin
ggtacttgagattagggagtggtgatgacttttaacgagcatgctgccttcaagcatctgtttaacaaagcacatcttgcaccgcccttaatccatttaaccctgagtggacacagcacatgtttcagtgagcacagggttgggagtaaggtcacagatcaacaggatcccaagacagaggaatttttcttagtgcagaacaaaatgaaaagtctcccatgtctacttctttctacacagacacggcaaccatccgatttctcaatcttttccccacctttcccgcctttctattccacaaagccaccattgtcatcctggcccgttctcaatgagctgttgggcacacctcccagactgggtggtggccgggcagaggggctcctcacttcccagtaggggcggccgggcggagacgctcctcacttctcagacggggcggctgccgggcggaggggctcctcacttcccagacggggtcgcggccgggaagagacgctcctcacatcccagacggggcggtggggcagaggcgctccccacatctcagacgatgggcggccgggcagagacgctcctcacttcctagatgggatggcggccgggcagaggcgctcctcacttcccagactgggcagccagacagagaggctcctcacatcccagacgatgggcggccaggcggagacgctcctcacttcccagacggggtggtggccgggcagaggctgcaatctcggcactttgggaggccaaggcaggcggctgggaggtggaggttgtagcgagccgagatcacgccactgcactccagcctgggcaccattgagcactgagtgaaccagactccgtctgcaatcccggcacctcgggaggccgaggctggcggatcactcgcggttaggagctggagaccagcccggccaacacagcgaaaccccgtctccaccaaaaaaatatgaaaaccagtcaggcgtggcggcgcacgcctgcaatcgcaggcacttggcaggctgaggcagg

SEQ ID NO: 22471 - DNA, 991 bp, Artificial sequence
  DNA replication origin
ttttccagattgctgttgaacactcttggcgagtgcgcctcatttttccaattgggacataaagtccttaaggtaaagaattgttttatccttctttgtatcttccaaagtacttttcatgggacaggagcttcatgtgggcattcattgactggtttcatggtgtttgatggtttcattcattcattcattcatccattccacagccctttaatatgtgcatatcatgcagtgagaagggctaaagtgtgggcttggagatgctttgggataggaggaccagccccattcactggggacctgagtgccagggtccatcttcagtgcccctattatttccagagaagaatcccagaaggtcggggagatgcaactccatgtccttacctggatagatcctgaagaatccagttgcactgccaaaatattgccaggtcaacgttgggtctctctggaagttctccacgaagacagcattcaaggcttcagacatgtagactccatttaaaatatctgggtctgaagggtgagactatagattatgatcctgtagaacttctcaggaaaatggtgatcatgcccggtgagggtgcctggtgggcgtgtctggtgggcgtgtctggtaagcgtgcctggtgggtgtgcctggtgggcgtgtctggtggacggcctggtgggcgtgcctggtgggcgtgtctggtgggtgtgtctggtgggccagcctggtgagtatgcctggtgggtgtgcctggtgggcgtgtctggtgggtgtgctaggtgggcgtgcctggtgagtgtgcctgagctgagcgtgccggctacctttgttgtacacgttggtgggcagctgcacgctgctgatggaggtgttcaccggcaggttgctgaagtgagcattggactccaggaggaactcggcgcccagctccacgaagttgcccttctcgtccctctcgttgatcaggaccgagttgtaatagtcgaactgggg

SEQ ID NO: 22472 - DNA, 1377 bp, Artificial sequence
  DNA replication origin
gacagggcggcctggggctgcgcccagggctcatgggggatttaggcaggcagggcctggaaaagggcctttggtcacagcagaaagaaaacacagaaataagaaaacacgcccaggcgcggtggctcacgcctgtaatcccagcactttgggaggctgaggcgggtggatcacaaggtcaggagatcgagaccatcctggctaacacggtgaaaccccgtctctactaaaaaaatgcaaaaaatttagccgggcgtagtggcaggcgcttgtagtcccagctactcaggaggctgaggcaggagaatggcgtgaacccgggaggcggagcttgcagtgagccgagatcgcgccactgcactccagcctgggcgacagagcgagactccgtctcaaataaataaataaataaacaaataaataaacaaacaccaggttggttgaggaaacagtgggacctgggccctgtgtgtccagaggctggtgaggaaggcagtggtcttggacagttaggtgaggaggtggggggagccttgggtgtcagcgtaggagcctgagcctttctcagcagggaaaggcaggtgcagaaggcttgagcagggcagggacgcggctgggagtatgcgtggaaggccagcgcgggccacagtgtcgtgaggaggagccgggtgtggggtgcaggaacctggcgtgggagttggcgtggggatgtccgtgacgcagtccggcgtgggagttggcgtggggatgtccgtgacgcagtccggcgtgggagttggcgtggggatgtccataacgctgtccggcgtgggagttggcgtggggatgtccgtgaggcagtccggcgtgggagttggcgtggggatgtccgtgacgcagtccggcgtgggagttggcgtggggatgtccgtgacgcagtccggcgtgggagttggcgtggggatgtccgtgaggcagtccggcgtgggagttggcgtggggatgtccgtgacgcagtcctggggggtgttcaggtgtgaacccggtcgtgtggaggaaacggggccggggctccaccggaggcaatcctagcacgccctccaacaccgcgtgggagaggccgagggcagctgcgggactcggaacctgggccccgtctgaggccaaggctgcaggccccaagattgcgcaggctcggttctggggctctgggaccttcctggcctgcgagaagtggagggggctgatggggctttttgtctctacctgtccttgactccgcggctgcctgtctccactctgcctcggccgtgtcaacacacgctgcaccaagttggggactgaggcagcggtcaggacaactgtcatcaaacgtcggcctcacgcctctccgcgccg

SEQ ID NO: 22473 - DNA, 1518 bp, Artificial sequence
  DNA replication origin
ccggtcttaatggccggctagagaatcaaggttggaaggaggcagaaaggtgtagaaagggaagactgcggccaccaaaatccatttttttccccagttcctggacaagccacctcctgtgcgcatgagacgttctgtgggttcagaactgcttcccctttttggaatgtcaaaatacgcatttcctgccaaatgcttcggggagctgcgatgctgagataacccggctcctccaggctgcctcatctcagcgattatcctgaaggagcacccgcccttcaggtgtcccagaagctgcttgtcaggccaggaagacagcagccctgatgatcagttcttcctaaagccatccggctcctggggagaggcaggtgggactccagaactcacagagcttttgggaggagaaagaggaggccggagaagcaaagggctttacagcaagagagtggtcagtcgcagccactggggaaaagcccagagggagggcaggggcgggaggagtgggcagaggatggaggcccagcccgggaagaaagtgggaaagggtgaccgggtttttggggtggggttgaacgtgatgcttacgtttccagaggaatcttggcctgtccccacgcaggggacagggaggtgcctagaagcagcagccacaggagggccgaggtcttctgcacaaaggcccaggccacgggcattggctggaggggaatccagcggctgctggagctggggtttgcgaggaagttgggagttgcaggcatggtgggcctggggttggggaggggaaggagggcagagcagccacagaccatgagctctgtctgccttcctcccagaccccaggacgccccaggcctttgtcttccgtgccttggcgagcctggggtctccagcctctcagtcctgggtggggagggcttctctctgccccacagctgcagctcacagaagagtcgccccacctagcaagcaggcctcggagacagggactgggggagaggctgtggcaacatgaaaccctttaatccgctggcctctcctctaatcctctcctgacagcagggagggggtggcagggggtggggagctgcctcccaagattaccacaactgcagctggttccctcagggctatagtgcacccctctgctttaaagaggcagccccgttcctgtggaaccaccttctggacccaggaagggcttgctgtgactatggccagaggacagcagctgagtttgcacagtactctgattgacccacaaatctcttgttgaccctgaggtgggggtgtgtcctcatccctgcttggcagaggctcttgaggcccggggagtcccaggggcagagctgggactctggctggtgtttccaggcctggtgcctttgggacaggtcataggtcataggtgaagtcagtggacccacgcctccacatctcagctgctcgtgggcggggctggggacgcatttgctgtgcaactgatgaagcttcaggacccctgaatccacagac

SEQ ID NO: 22474 - DNA, 888 bp, Artificial sequence
  DNA replication origin
actggttctgatgaatcctcaaagcattttggggaaccacagctacaactaaattcagctggaggtttgtcctctcagtctgagccatgtgctcatttcagagtgtggggaaggaggggtaaggcggggaaggaggaggaggaggaggaggaaaaggttgaggaagaaaaagaggataggagaaggaggaagaagagggggaggaggaggaggaaggggaaggaggaggaagaagaggaggagaaggaagggggaggaggaggaggaggaagaggggaggaggaagagggggaagaagaaggggaggagtaagagggggaggaggaggaagagggggaggaagaggggaggaggaagagtgggatgaagagggggaggaagagggggaggaggaggaagagagggaggaggaggaagaagagggggagggagagggcgaggaggaagagggggagaaggaggaggagggggagaaggaggaggtggaggaggaggaagggggtgaggagcaggaggaggaggagacaaccagataggcatggggatggttccgtctgctcgggctcacttgtccactggcctggatccctcaggcctccatccttccatttcacagcctcagttcctctctggtggggcctccttgggtccccatgaagagactgctctccacgaacctttccttctctgcctgtctggccttccacttctccttttctcttgcccctcaatgcctccgttcccttctctcccacggtgcccagcaagccttcgttacctgcccactctgtccctggccctgtgcctggccccagggtccagaaccccttagcatgatggcagttttttgccctggaggagctcataggctgctgagaagacagacac

SEQ ID NO: 22475 - DNA, 1211 bp, Artificial sequence
  DNA replication origin
tcctaccgcacacacagctcaaaggctcgagcgcgtagaaaaacagctcttggagaaagaaacgggatgcagagggcaggcctgggcttgtcgttgccagtggcaacgatcctcagtgggcggggcgcggccatcgattagtgaggccttgcgtctgtcggcgggcaggagggtgggggtgactggagccggaaggcctcccgggccgtgtggtcgccgtgggttctcggttgcgaggcagctcgctcgttctgcgatctattgagagtggcttccaagagccccgtgcctatgtctgggagggagggaagatggcagccgtggcggcaggcggcctggtgggaaaggggcgcgacatcagcctagcggccctgcagcgccacgacccctatatcaaccgcatcgtggacgtggccagccaggtggctctgtacaccttcggccatcgggccaacgagtgggtgcgtgcggacgcggcggagcagtgcagcccagggttggggtggaggcggggggcgtcagactcaggacttgaggacccggtgagggggaggagacgttgacgccctggaagtgggtggatctggggactgaggccgaagttgtggagatggggtctcgggggtttgggggaaggaaggcggatctgtggagctacctggagttggggaaaagacttaaatctctaacgtacccaacgctgggagaccagaccgatcgggtacggcaccataagagccgaaggaaaggaaggacctgataccttatggccggaagaccgatgtgctcgagaaagtagagcagagttctgttacagtgaatctgtggctatgggggaggcagggacagcagacgaataaaagtgcagagttctgattttggaatgtcagtcttagatggggcaaagagaaatcaaaacttgatagaaggggagaaatctgcaagttgtaaacttaaggggaaacaccaagaaaagagccaacctcgtcaaataaaagacaaaatggggcagggtctaacacttagaaggaagctgatgctcttgggaagattattacacggcagcacaccaagttcgatattggaggtcatttgggagccaaattattttagtgctcttctcaaagcagagtcccagtaaatggtaatggaatgaaatttcattttcctcatagttagaatggggtagaagcctagaacactggaatcct

SEQ ID NO: 22476 - DNA, 2053 bp, Artificial sequence
  DNA replication origin
ggatcgcagtgaggattaaataagataaaggctgtaaagggcctatcacagtacctggcacagagcactcagtagtgttagctattattattattcctgcacttgtgtgtaaaggggatgcaaaccaattttactattcatttaaacaaattatcagctacagcagcctctgaaacacaggcctataatgcatcctaaagtaaatgcgaaatatttgaatttgtgtcatttctaattttctctattaagttgaaaattgagtatgaacacaccagaatggcaaagaggccagatttctcttgtaaccaacaaaattgagatcgctattaacattagaatgaagatgaccgaaacagcttaatacttctcccaggggcacttgcattttacactggggccagaaccactggacaaaggaaggaaacaggagtggtaaggtttcaggtaccaagggacggacagatgcattttcatagggggaattgcaacactcctgaaagtatctcaggcactcactcatttattcaatacatattatgtacttactatctgccagatactgctctaggcactggtgaacaaaatagatgagacacctgccttcatgggggttacattttagtggggggatacagacaataagcaataaagttaatgaataagtaaactatatagtatgttagacaggatttcagtaagagtaaggggagatagggagcgctgtgggggtctgtcagtactgaatcaggatgaggtcctggtgagcctcactgaacaggtgagatttgcggaaagccttgaagaagccgagggagtttgtgtttcaggcagtgggaatagctagagcaaaggccttacaatgtgcgtgtgtgttgaggggtcattcctggagtgtctggggcccagccaggaggctagtgtatcccgagtgagggggacagcagtaggagatgatgtaaggggatttgtactcagccattcctgtaggtcaccacaaggaccatggcttttactaagtgaaatgggtaaccatggatggttttgagcagaggagtgctgggatgtgatgttttaaatgggttactccgactgctgtattgagaaaataccagaggggagagggaaggtagaccagggggatcagccacaggagaaacctgggtgaaggatgctggttcagccccaggtggtggcagtgcaggaaatgagaagtggtcaggttctgaattcacctgaaggtagggtcaacaggatctcctgatggactagacgtggaatgatgagagaaaggagtcaagagtgactccaggattttgaactgagcaactagaagtatgggatggtcatcgactgcgatggggaaggctgtgtgaggaggagcaggctttgaagagatcaggaatccagtgtttggatgtattaggcttgaaatgtctatcagacggagtcagctgtagtctggaattcaggagagaggtctgggctggagatagacatttgatatagacagctgctgaaagccacgggaatggttagggtcacccagggaatgagggtggatgtggaggcgaggaggtcttatgtggaggcaggtagaggttttccccaagagggagttgtaggcccccctgaaagggatcacgaagccccactggaggggagcccggtcctgcagggggtgccgtggaacttgctgtggttgcagggagtgatggagggaagtgtttgcttctccgggaaggagaggtgctggatagattcctgccggagttgcagaaataattaagagaagtaggtaaggatatcctagtagaacacgtgctcggctgcctccaaggaattattaaacctgggtctaggaatctgttcagacatctgggcaccgctgcctcgcctaccaggctccgcctcgctgcccctcccgcttcccctcccctcctctatctgtcacttctacaaccgctctgattataattgatcaaacagaatcacggaatcacggctcatcttgccgttttgttcagtggcccgatccgaaacgagactctggtag

SEQ ID NO: 22477 - DNA, 900 bp, Artificial sequence
  DNA replication origin
acgtcatgcgggcggagggctcgctcgggcggcgctgccgcgggcgccgggagggggcccgacttcgggctccagtccgccgccgtgcgccccgcgccgtgcgcccggctccctgcgcgccgccgcagccacatctggaagcgttcagcgcgtctgcctccggcgcgccgggcgggcgggcgggcggcgcgggcaggggcgggcgcgggcgcggcggggctgggccggggggagtgagcgcggcgctctcgcgcgcccggtgtctccctctcgctgcctctgcagaaacagctcctgccagagcggcgctcggcgcggcgcggcgggcccggagcggcggcggcggctcttcctgcctccgcgcccaggagttgccggctccctttgacagcagagagccgggcaggggcctcaggaggactcgctgggagtgggcagaggcgcctcggcccctgccggcccaggcgggccccgcgcgccccccgcccctcctctccgcctcttctcgccctgcctctcccgatttattttttcaaatggtgtagccgccggaggtgcggtgctcagttcttggaaggggcccggatgtactgaggatgcgttacagtttcactcgaggaggcagtagtggaaaggagcagtttttggggtttgatgccataatgggaatcaggtaatcgtcggcggggaagaagaaacgctgcagaccacggcttcctcgaatcttgcgcgaaagccgccggcctcggaggagggattaatccagacccgccggggggtgttttcacatttcttcctcttcgtggctgctcctcctattaaaaccatttttggtccatggtcaatgagaatacgaggatgtacattccagaggaaaaccaccaaggtaaggctggaccc

SEQ ID NO: 22478 - DNA, 1208 bp, Artificial sequence
  DNA replication origin
tgatacttagggcaatactacagagctctcctcttcaatgctgcttagactgaggaggtgggtaaagcacgcagtctcagaacctggaggggagtcatcttgcatccccactcttcacaaataccaccctcttttgtgtctcactccttccctcctaaaccattcactagcccatcagctacagaagggagaggggatcaggtgagggatggggtcaacagtagagaaatccaaacatggatactgcccttgtgaccccaaagctctggctcaccctagaacccatgacccttgacaagattctttcttccaaaggaggccacaatccccaagctgccacccatgctggaaagcagagaagactggccccaaaatcggtttcaggatagatggagaccaggcaggctggatggcagcttctggctctaaagagtgaaggccctgtccccaaaaggtggagctgggagcaaacagagggaaaaagctggacaaaaagacctggagacaactccttccaccaggctggtcttcagaggatcactgggaagaacccagggaaggaacagagaccagcagtgacagataggctttcaggggaagagaagaggaagagtgcaaacagggaggctctgggaactgggagagaaaagggagagactacacccaaagagacagagcagtggcgagaagaaagagatgtcatgcctggaggttgccagaaagccccgctggaccaccctgtctgcaccccccgtccccaaaaccttaaatgctaagcaacgtccaagaaaacaacttgttaatatggggggagagcggtgagggagaaagtttccaggaagtagggagttacctgactgcctttcaccatcacagggggagctggtgacactcgcggccaaggatggagatgctcggaaaacactgggcaatagtatggagccgcgtgagccaggcacaccctttcatgatctccttcaaacacgaaacagcaaagcccacacaccgcccggctcctcgccgcttccatcctcaggtgctagcccacatgtgggtgcgaatgagaacacacgcggcgtgggcgcgctcggggtcaacagcagtggagaggtgggtgggtgtaggtgagcggcggaggagggagggagagaggaagaaggggacctacagagggggaaccagaggggcgcgctgggcttcacatctgc

SEQ ID NO: 22479 - DNA, 1360 bp, Artificial sequence
  DNA replication origin
ggtggtatggaaagatggaataaatggaggaagtgttatatggaggttgtgactgagccgtcccttgaagggtggatagaaatggggtggagaggagaggcgcacattcccaacagaaagggtgggatggcctgtaatgtattcacagggatgtgcgttggatttcaaaggagtagtgagttgagtttggctggagcaaggttttgcagggggaagaagtgggagagaaagttggaatggcaggaaggggataatgcgtggagcaccctgtattgggctgaagagtttgcatggcatttggtaggcaatggagggccgtttaaagtgtttgagtggagagagggtatactcagagctgctcttccaggcagcaggctagaggataaggtaggggagtcgaggctgcaggtagaggggcagttctgaggctgttgccactgtccaggcaagagagggaaggagtgattttcccagcagaaagccagagacaagggagccctgtgctgtgatctggatgggaagggtagaggttgtatttggaggcaagtagaagatgcccagcatgcacgcagaattagagttctgtctaagaaggtgctatttgaagctgtggaggtggagccattggggagagagagagcagagggaaggaacgatggagagctgaagacagacaggaggagggtaaaatggaggagacaatgacagagtagtcagggaggtagcgggagagccttactactgcagggtcttggggatcaaggcaggagagcatttccaggaggccgtcattgctgaatggagtcgtgaaagggaagatgggaactgagaagcccgctggattgaatgattgggctggagagtgggttcagagtgactgttgtcccgccgaactgtgcaatgatgaggcgtggtggttgtgaagcaggggcagcacatggggaccactctttcaagaattttggctgtgaataaaaggagaggggagggatttgttggcacatgagagattggaaatgcaagagaggggagcagatggggaagaaggcagtaggcagtggcgttggggatgggagtggaaggctcaaccccagcaaaggaggtagcactctgtcttcagaggcagacatgcagtaaagcaggggatgaggaaacgtagaggggcatggggggagctggaaaggaggacaggaggggcctcgggcaggggtgctgaatcctgggagggatgaggcagctggagtggggcctgagcttgaggagaccggaagagggaacggtcagtgggaaacactatgagacacccaaagaaatccacaagggtgcccaggtcccagaggcaccggccgaggtctggaag

SEQ ID NO: 22480 - DNA, 1157 bp, Artificial sequence
  DNA replication origin
tctccagggtgggcgcccagtggcttcaggacgccccagctgaggtggaaaccctccccggggtgggcgcccagtggcttcaggacgccccagctgaggtggaaaccctccccggggtgggcgcccagtggcttcaggacgcccagctgaggtggaaaccctccccggggtgggcgcccagtggcttcacgatgcccagctgaggtggaaaccctccccagggtgggcgcccagtggcttcaggatgcccagctgaggtggaaaccctccccggggtgggcgcccagtggcttcaggacgcccagctgaggtggaaaccctccccggggtgggcgcccagtggcttcacgatgcccagctgaggtggaaaccctccccggggtgggcgcccagtggcttcaggatgcccagctgaggtggaaaccctccccggggtgggcacccagtggcttcaggacgcccagctgaggtggaaaccctccccggggtgggcgcccagtggtttcccgatgcgcccgccgccatgccgcatctgactgcgcttcctcctacctgagctattttcacaccatttccagcagcattctgtcactctgccggtcctcctctcccccatcctgctacagacacagttcatgagaggtggggtgcccagaacaggccccatgaccacagcagtcaaatgtgctccaaaacaaggagaccgtgagggcgccaggagatctgcggctctctccccaacccaactgacgagtactccctcaaatacaactgtatcttttctgtcctacaacccacctgcctctgatgactacatgaaggctggagaaggcaaagagcctggagcacttcagaggcccaagccaatgggaaaagcggaaaagctacagcattcacacctgctagtgatccagtaaaccacacttgctctctgttatttatggggcagctggctgaaagaaggtaaagaaaggaaaaggaagcctcgtaaggaacgcctggaagcaaaccacctgcgatgaccacaaggccaacactgcttcggtgagaggaccctgatataacgcccttggcactcgagggctctcatattgacatcagagaccatagggaagaaaacaaactgacagacacacagctaagccacggccttcaac

SEQ ID NO: 22481 - DNA, 1117 bp, Artificial sequence
  DNA replication origin
gagatgcctgcccttctcctagctcctcacctcccttggtgtgtctcatcttcatgctaggcttgtgggaatctcagagggttacatagaaacactggaaatcagccacgggcagtggctcatgcctgtaattccagcactttgggaggcagaggcggatggatcacccgaggtcaggagttcaagacctgcctggccaacatggcaaaatcccatctctactaaaaatgcaaaaattaggctggtgtggtggcagaagcctataatcccagctacttgggaggcagaggcaggagaatcacttgaacccaggaggcgcaggttgcagtgagccaagatcgtgccactgcactccagcctgggcaacagagcgagaagaaagaaaaagaaagaaagaaagaaagagagagagaaggaaggaaggaaggaaggaaggaaggaaggaaggaagggagggagggagggagggagggagggaaggaaagggaaggaaggaaagggaagggagaggagaggaaggaagaaagagagagggagggagggaaagacaagaaaagaaagagaaagaaagaaagggagagaaacactggaaatcaggcagggaataatgagaagggatgctttcaagctgtctttgaggcaagatctgcttgaactggattctgtgtattttttatttatttaggaagttgctgtttaagttgaggtggagtgtctctctggctactttcactgcatatacaaacccagaggagaagacgaacaacgggagcagctacctgacagggatagaggcggcttgtatcgtcccctctcctggttgctaagcacccagaaattcacgagcagcctttgataggagagagttacaggcaaggagagatgctcatccacagaagggctctctgggtgttgggaaggcagcctgggtaaaaagtgctctccaagctggctgggaaaatctggatggaaaggaaaaggtgccctgttgctctgcaccttatgccatcagacacctattgattaagccgacctggccatgggtggaggggtcaccctccgtagactgatggccgatcccaccacaaatgctgagttctggaatcatgagaagttc

SEQ ID NO: 22482 - DNA, 931 bp, Artificial sequence
  DNA replication origin
ggagacagggtccatcccacgtgagccggcccggcctgctgtgagtccgcaggcacgggaatccacgcgcagaagaaggcttggagctgagctcaggggtggggactggagagggctgaactgctctgtataacaaaaacagggggcggtgggtgttaagagttgtttgggagcagcaaagtgggagaggtggaaagggcaagaaatataggaagacacagcagccaacctggcaaaaaggcctgaggggatttctcagcacagaagtttcagatattcaacattcacattactgtgatgtcagctccatcttcccaaaaacttgagtgcaggctgaaccaaaaaccgtgagagggagggagggggtgtgtgtgtgcgcgcccatgtgcgtgcatgtgtgtgtgtgtgtctgtgcctgagtgtgtatgtgtgtgcctgtatgtgtgagtgcgtgtatatgtgtgaacgtatgtgtgtgaatacatgtgtgcgtgcgtgtacacgtgtgcctgtgagtacatgtgtgcgtgtatgagtgtccatgtgtaggtgtgtgcctgtgtgagaccatgtgtgcatgtgtgtgcctgtgtgtacgtgtgcgcctgtgtatgcgagtacatgtgtgagtgcatgtgtgtgcctgtgtatgtgtgtgtgcatacgtgtgcctgtgtacgtgagatcatgtgcatgtatgtgcctgtggaggtgtgcctgtgtgtgagtgcatgtgtgtgcctgtgtgtacgtgtgtgcctgtatgagaccatgtgtgcatgtgcctgggtgtacgtgtgtgcctgtatgagtacatgtgcgtgtgtgtgcctgtttacatgtgtgcctgtgagtgcatgtgtgcctgagcgcatgtgtgtgagtgcatgtgtgtatgcttgagtacatgtgagtgcatgtgagtgaatgt

SEQ ID NO: 22483 - DNA, 1312 bp, Artificial sequence
  DNA replication origin
gggtgactgtcaccatcatcactgctgctatcggtgatttaaatacacacacacacacatctcttctttcattcagggaagtgtatttgattcattttcaagacaacattagaatacattccctattttagtagcttgaaactttctaccagatcccatcatagccaaaaagacatcctagtcagtgtttgctcttgggaataaagtgtccccaatgtcctcagaagaccttagatcagaaaacattcctattttcaacagtgatgaaattttcagatattccaatacggatgcagggtaagtcctggggaacactgtgctcctctgaggccagaaacccagtgactcctcccctcaggtgctccacggcagggtcaggactttggggagaaacgttcctgcatgggaagatggatcgagctgctggaacataagtgataacaaggaaagcagctcagataaggcccaaaacttctccagtcactgaaataccaggctcacagtggagagggtatgtaaacaagaatgtcacagagcaggaagggggaaggaaggaagataggcaaggagacccaagagcaaagtcatcaatgaaaaacatttggcagaaaatatccaagagaaagaacagtacatgaacagaaagggagaaacaaagctcaccagcagcacaaggtcaacgtgagtaagctatgtaatatggctgctcagaggagggggaagaggggacaatcaggaagaggagggggagcaggaaggggaaggggaagagcagggaggaggaggagagggaggaagagcacagaggaggaggaacgggaggaggcagaggaggtgtaggaggaggagggataggagcaggaggaggaggaggaggaggaggaggcagtggaggaggaacaaaaggagtagaaggaggaggaggaacacaggggggagcaggaggggaagaagaggagaggaacaggaggagaagcactaggaggaggagggagagtgggaggagccagaggaggagcaggaggaggaggacggggcaggtaatcttgggctgcatcagtgggaatccgctgactctaagaggaagcctcttactgcctggggtccagttggagctgaggtatcctgggtcaggaataaacactgaggttcacatgggagtggccaggactgagggagagggtgcagagacaaggatggctaacctcaaggaagataagtaagaagcacagaagcactgtcttcaataccaagacagacgtcctagggaagagaggacacgttcctcctctgaggacaaaatgaagagcag

SEQ ID NO: 22484 - DNA, 1558 bp, Artificial sequence
  DNA replication origin
gggtagcttatagagtttgtagaaaaggggggatggagaggaggaaaacccagtacagattttgagcctttctgagtgaatattcagctccttttctccaggtacactcattccatcatttcatctctggcactgtgccagcatggttccagggccaggggtgactctggctacctggcatgaacagtgccccacttttcccatctgtgactttttctgtcttctgccttgaatcagatatgccccaggtgccagggaaagaggagtatgtgcttgatggtctgtcaagtcaggtagaaagaaaattaacatctctaacagtgagtgattgagatggagtattttccaggagctagaatattatgtgtgtgtgtgtgcatatctcctggaaaaacagagaggaggagacgctcctgtagcctcaagagagctcagtttggtagtgaagacagcagatgtatgggcccattactattagcggggcaagttcttaggggtgtgagaaccaagagaacggttgattggtggaaagagcacaggatttggagttctgaagagcacgttgagctttgtcttttccttgctggctcacttgggcaagttccttaaactccaagctttagtttcagttttataatgtgggtagtccatttttacctcggcctcattgaaagaattaattagacactcagagtgcaggcttgatacaggcctcttccagggcctgggatgtattaattgctggtgctccctcagtggcagccttgatatgcacacctaggaatatatacatatgcgtttgtatatgtgtgtatgggttttaaaagtccgtccttcattcatcaaatatttatcgtgtatctgttctaggtgtcagggagttagcaataaataaaacaggcctgaatccctgcccacggggagcttacaatctagtagagagacaatgaataaaataagttaaacacactttgttgggtggcagtaggggctgtggagaaaggtaaagcaggggaatggggtgtgagtggaggtttacttttaaataagacgatgagggaaggcctccgcaggggatgcctgagcaccatctatgggaatgagggggtcagcagggtagactgacattcgagaggaacgcattccaggcagagggaattgcagttacagacactgacagacgaacggcctggcaggctcaagggcgagggagcggcatgagcagggtgggcgctggttgcaggtgaggggtcccgaggcgggcggagcagggcgttgcaggccacggtgagcacggcagcttttgcccggaaggaggccagagccattgcagattttgagcgggtgtggcgtggtctgacgcgggctatcccaggtgagcatggctgctgtatgggaggtgacgaggggtctgtcctgtgtgcgcgcccgcctggctccgcagtagctctgagaactgccttaagctccggcagcgattccctcaggttagaggcggaaggggaagaaggggcctggagaggtgtggttctcgtggtggcgcggccctcgctgactg

SEQ ID NO: 22485 - DNA, 1755 bp, Artificial sequence
  DNA replication origin
attctgacaattgtgccaggtaaagggggttctgaggtggctgggaggtgagctgatggagtccagctttccctctaatcacaaacaatgggaaaaaaacattaaactcaacattctggctctaccacctactagcagtaaggctttgtggaagattatctaagccctctgatctgtttgctcatctctatattggagatagtttttacccatcatgcagagttactgttaggattagaacagaaatgtccaggctccgactgttgctaatggcagctatggtggaggtgatgatggtggagataggggaggtggaaatggtggtaatggtgatgatgggggaggtggtgttggtggtggcaatgatggtaatggtagaggtagtttggatggtggtaatggggatggtggtaatggtgatagtggagatggtagaggtggtgatggtggtggtggggatggtgatgatggtggtggtggtaatggtggtggtaatgatggtggtgatgatggtggtgatggtggtggtaatggtggtggcggtggtgatgatggtgatagtagaggtagtagagatggtagtggtggtggcagtggagtggtggtggtggtgatggttgggatggtggtgataatgatggtgatgatggtggtggtggtggtaatggtagcggtatgatggtagtggtggtgagggtggtggtggtaatgatggtggtgatgatggtagtgatggtggtaatggtggtggcagtggtgatgatagtgatagtagaggtagtagtagggatggtggtaatggtgatagtggggatggtagtggtggtggtggtggggatggtgggataatgacggcgatggtgatggtggtggtggtggtggttgtgatggtggggatggtgatgataatgatggtgatggtggtggtggtaatgatagtggtaatgatggtggtggtggtggtggtggttgtggtgatggtggggatggtgatgataatgatgatggtggtggtaatgatggtggtggtggtgatggtggtcatggtagtcatggtggtggtggtgatggcggaaggaggtgatgttggaggtggacatggcaggcagatggggattgagaagtccagagcagggtggccactgagctgcatcgtggaggagtaggagttcttggaagtggagaaagtggcagggatgggaagggcatgaagaagaaagctgccggaaacagcctgcctggtttgggtgtggtgagcctttggtgtggctggagcacagaatgtggctggggaacggggagggtcagactgtgacagaccttgaaccatgctaaggaggctagatcccatttaagggcagaagggagccattgaaggctttcgagcagtaaaactccctaggtgtcaatgagcctggttaggaagctcttttaatatccaaacaacccatgatgggggcctgagtggggagaggccatggggtgaggcagaaagacaggatcctgttccctgggccaggtgttggtctaactcctgaaagaaggtgggcagttagtagagagttttaaggccactgctgcactttttccccatttgggaaattacatgctagcccacaggtcactaagcaaatgcccattgtccccaggagtaattcagccctgattggtaatatctgtcaccctctccactccattgcccccaaagaagaggtaatcaccatgagcacagtgagctccttggagagtttgggg

SEQ ID NO: 22486 - DNA, 946 bp, Artificial sequence
  DNA replication origin
gatggtgggtgagtggatgagtagatggatgatcagatagaagaatgagtgagtgggtgaacgaatgaatgggtagatggatagatggatggataaatgtataggtaggtaggtggatggatggatggatggatatatgtaggtgggtgggtggatggatggatggatggatggatggatggatgggtaggtgggtggatagatggatagctgaataaatggataggtgggtggatggatggatgggtgagtgggtggatgtatagatgggtggttggatggtgggtgggtatatatatgtatgtatgtgtgtgggtgggtggatggatggatggatggatgggtggatggataggtgggtgggtggatggatgagtgggtggttggatggatagaagaatgggtgagtgggtgggtgggtgggtggactgacggatgggtgcgtcagtgggtggatggatggatggatggacaggtaggtgaatgggtagatgaatggatgagtgggtggtgcataggtgggtgaatggatggatggatgaatgggtgggtggctggctggataggtggtgagtgggtgggtaggtggatagatgaatggatgggtgatgggtagaaagatagatgaatggatgggtgaatgggtggatagatggattgatgggtggatggacaggtgggtgaatggatggatgaatggatgagtagtgagtgggtgggtgggtgaatggatgaatggatgggtgagtgcatgaaaagatggatgaatagatgggtgaatgggtacatggatggatgaatggatgaattggtgggtgggtggatggatggatgggtgggcaggtgatggtgaatggaagtgtgaaagcaactagcacatatgaaagcacctgacacctaatggatacccaacttgtgtgtttccctttcctgtgctttctttccc

SEQ ID NO: 22487 - DNA, 1747 bp, Artificial sequence
  DNA replication origin
ttgtcatgaagatcaaatgagacagaagaagtaaagaccctttggaaaagccagcaaaggcacatgtccaggaagctggcaccactcacatcattttagtgggtggggtggctcttagggcctgtgatgtgaagctatgccagccgccatgggcgtccgtgtaaccatgtttgctcattctacagatatttatcacctttattgtcggtgctgaggacacagctgtgaacacaactaacaaaaattgttagcctcacgtaggttacattctcatgaggtaaggggtgataagcaaatgaacacatacacatacagaatggcagatggtgagaggtgatgtggggaaatggagcagggaagggtggatgaacggggagtgaggggatggcatcagcgggggccgaggaggtacgcaggcctgtgcagagagctgagccaaggggcgggccgaggaggtgcgcaggcctgtatgagagctgagccgagggggtgccgaggaagtgtgcaggcctgtatggagagctgagccgaggtgggggccaaggaggtgcgcaggcctgtgcagagagctgagccgagggcgttcagacagaaggagcaagtgccggccaccaccccacagtggggtgagcttggaatgttggaggaatagcaagggagtcactgtggagggctggtgaggagggagaggaggggagggtgaagggggtgagcttagggaggaaggaggcgtgagatcgcagggcctatgggactttggcgctcactctgggcaagtcagggaagccgtggagggtcctgagcagggcaggaacatgatccgacttggctgttcagagggccgtttgaatgccgtgttaggtccgggccatgataggggttgaggcagagactcctgcaggaggctgtcgccatcatccaggacggaggcgagggcggccagcgctgagctgagtgtgcaggtggtaagagacaaattcttgacatgtttggaaggtaaagctcataggattttctgatggattgtaatcaaagagtgagaaaaagaaataagtccaataaggcctgagaagctagaaggatgaggctagcatttaccaagctgagaaagactctgggaagactgtgagttctgccatgagtcttgctaagtgcaagatacttattatctattcagacaggagaggaacggagtcggcaggtagggatacaagtctgaggtttggaaaaaaggtctgggctggtgacacacagctgctggttactggaagatacatagattatatttaacaccaggaggctggacgtgataactagggagtgagtacagacagaggagaggtctcaggatctacccctggagcttcccaatgttaagagggtgagaagatgagacagaagtcagcaaaggattccaagaagaagaaacaagtgaatgaagggcagagctaagaaagagcagtgtgccaagggccaagggcaacggtggttcaaagacaaggagcgatcagctgtatccaaagctgccaacagatcatgtaacatggccctggaggacagagcactgggtgcggtaacggtgatcactgatggtctggacaggagatgttttggtgcagcagtggggaagaaagccccatcagagtggattcaagagagaatgggaggacaagaatcacagacaacaggtagaggcaactcttgaggagttttgctgaaatacagaaagagataacctatggctatg

SEQ ID NO: 22488 - DNA, 1157 bp, Artificial sequence
  DNA replication origin
cactctttgtagattgagaaaccgaggcaaagcacctggcagggcaacagagaagtcgcagcagggtcgggactctgagtgggccttgagctgctggcccaggcgtctttcaggggcacctgggaggatgccgggaagagagttgcttaactggggatgcagcagtcaaggggaaagaccgtccacactgggagatcaggagacaccgggggagagggtgggcctggcaggtgctaaggggcagggcggggctgggcgtgggacccaccctgttctaaattctgtttcttagaggcaagcctcctgcagtgtgaagggccccccgccaccccctgctgtctctggctgccctccagggtgctctgccccatctgcagagcacaaccccaggctgcctgggtgggaaggcggggagcgggtcctggggcttcctcccttctggggaggctgggagacctgggggcagcaaagatcagcagccctgagggttccctcaccattgccatcagagtccccttgcagaccgtgcaggaagcaagggtcctgcccacctgccaccaggtcactctgtgaccttaaggaagccatgtggccctctggcctcagggctcctctctgcagaatggaagctcagttgtactagcctagtcccctcccacccagacattcggattcaggaacagtgccatgagacacatacagcggacaaggtttgagtacttcctgtggcagtgaaagaagtgggagggaaagggcttagaagatgttgtagggaccatctccgatgggcgggcagggggaccaggcagcctccagcgctgtgtgaaggagaatgagggacggcctcaggggtggccccctgcacatgcccctgtcctcataagtagctttgtaagtgtcccctcatgttgtttaagggtatgtggcctgtaagacccctataagacaaaggggataaaaagcaagaggaagcaaaatagaaagtgaggggagaatgagggccaagtccaaggacatgagagggggtgagaacaggggtggagaggctgaaggtctgcaagcagtgagggtacagcctggtgcggtggggatgagcatgtgggagagggaaggggatgcagaggccagccagtccaggcccttcaagccccagatgc

SEQ ID NO: 22489 - DNA, 1213 bp, Artificial sequence
  DNA replication origin
tctttcactgccacaggaagtactcaaaccttgtccgctgtatgtgtctcatggcactgttcctgaatccgaatgtctgggtgggaggggactaggctagtacaactgagcttccattctgcagagaggagccctgaggccagagggccacatggcttccttaaggtcacagagtgacctggtggcaggtgggcaggacccttgcttcctgcacggtctgcaaggggactctgatggcaatggtgagggaaccctcagggctgctgatctttgctgcccccaggtctcccagcctccccagaagggaggaagccccaggacccgctccccgccttcccacccaggcagcctggggttgtgctctgcagatggggcagagcaccctggagggcagccagagacagcagggggtggcggggggcccttcacactgcaggaggcttgcctctaagaaacagaatttagaacagggtgggtcccacgcccagccccgccctgccccttagcacctgccaggcccaccctctcccccggtgtctcctgatctcccagtgtggacggtctttccccttgactgctgcatccccagttaagcaactctcttcccggcatcctcccaggtgcccctgaaagacgcctgggccagcagctcaaggcccactcagagtcccgaccctgctgcgacttctctgttgccctgccaggtgctttgcctcggtttctcaatctacaaagagtgagtgatgggggtgccatggataaggaggagattctacctgtgcagccctgtgagctcccagcatccgagacctcttggagagggaccctgtgggttggcaggagccaccgcaccagataggaagggaagaggcccgccatgcggcaaagtgagctgatggacacagtaagcacactcacaggttcccgcctctgctatagtggagtttcactgagaggttactgagtatcaacaacagtatgtggctgaactgggaacatctctattatttagtgttctagatacagcaggtaaaaagtcctcatggcaaagaatgcctgcagtcacacaggaacgtcacatgtgtgctaaggcacacacacattcctccagtcacgaactggtctctttttgatttgagaacaaaatgtaggaggcagtgataaatgttagggttacctccaactacaagcaatattcagcatccgttcaagg

SEQ ID NO: 22490 - DNA, 1024 bp, Artificial sequence
  DNA replication origin
aggaaggagcttttggggctgtttgaagtctgtgcagctctgcccgtgactaaagtcctggagagcagcatcagagagagggctgctgaccaaaaagcaggaggagagctgaaggtcacttgaaggacaacggctcatcctccctcccggagcgtcccgcctctgagcagacgccgcggccccagggcagccggcccgctcccgcgcgtccctatcgcaggcggtgtgagtggccgcacacgccgcaacgccagggggcgccgctcacccagattacggcgacagcccgcccggagcgcggcgccgctgcgggcccggagggttcaggaaggtgaacctcacccatgccaaagctgcaggtttccacccagacccacctccgccgccatggggttctaggctgggtggtgtgagcccgagcaggaccgcccggacctgaggggcgtgcccgtttggcactgtgctgcaggctgggggctgggggccgcaggggtggggggcagcagcaaaggatacagtttccacagatgaagaggatgatgaagtaaatacagactaacatccctggaaaagaggggccgccataagccatgatcccatcatacatcaccgaattccagtcctccccggtcaggatctgaatgacacattcccaccaataagggacacagcgttagaccaacagcaaacccaaaaccaccctgccctgccccactacgtcaacaaaattgtccaaaatttccctttcacttctttccctcctcctggcccccaattctcctccccaggggctctgagctattgaactgtccttagacaaaatgcctggctattggcataatattatttgaagggtgactaaaagggctttttggcccaaagatctctgactttccccacacatgcttgagctgaccgtcagccattcctgggggtaaggcgtcaggacccttttgcagttgtgtgtttgctgagacagccacaggctacaccagctttccccaaacattcgtcactggggcat

SEQ ID NO: 22491 - DNA, 1469 bp, Artificial sequence
  DNA replication origin
atcctccaccaccctcccagcgacagtgcgtggaatacgccctcaaggcccggcccctgcggaggtacatccccaagaaccagcaccagtacaaagtgtggtacgtggtcaactccacctacttcgagtacctgatgttcgtcctcatcctgctcaacaccatctgcctggccatgcaggtcagtcccaggaggagcacagccatggtgctgcagaagggagtgtgccatggggatggaaagtgtaacggagcggcaggcagctcagtgcatcgctttcctggtcaccaagggaggcatttggagaaagacgagtgttctctgtcaaggatgtgctcctctctgggccttacggaagaatccatggcaccctgggttgatcaatggagagaggggaggagatggagaagggagggttgagctgaatgcattcattgttggttgatcaatggagagaggggaggagatggagaacggagggatgagctggatgtgttcgttgttggttgatcaatggagagaggggaggagatggaggagggagggatgagctggatgcattccttgttggttgatcaatggagagaggggaggagatggagaagggagggatgagctggatgcgttcgtttttggttgatcaatggggagaggggaggagatggagaagggagggatgagctggatgcattccttgttggttgatcaatggagagaggggaggagatggagaagggagggatgagctggatgcgttcatttttggttgatcaatggagagaggggaggagatggagaacggagggatgagctggatgtgttcgttgttggttgatcaatggagaggggaggagatggaggagggagggatgagctggatgcattccttgttggttgatcaatggggagaggggaggagatggagaagggaggggaggagatggagaagggagggatgagctggatgcattcattgttggttgataagtggggagaggggaggagatggagaagggagggatgagctggacgcattcgttgtcggtaaggtgtggcgtgtggagggaggtgggttctgcatccacctgtcttcagggacagagcttgttcccaagctctcttgagtgccagagtctccataaagttgtcacggccaaccagggaaatgaacacagatgtgttcagagatggcagagcagggaagatcttggaggttctcctgagtcctcctgactgcccacggagaggtgggcggccctctgggggtttggttcaaggaaggtcttgctgaggcgagggccttcgagaaggctgggcaaaaggtggggaggaggagcgacctccctgccccgtgttcacagctcctcccctctcctgatgcagcactacggccagagctgcctgttcaaaatcgccatgaacatcctcaacatgctcttcactggcctcttcaccgtggagatgatcctg

SEQ ID NO: 22492 - DNA, 1289 bp, Artificial sequence
  DNA replication origin
ctgggagagggcaggcgccttcctcgcgccccgggaccctcgccgcctcctctccccgcctctgcagacgcagccgggcgccttcctcccggagggcggctcgcgcacccaggctccgcgtctggtcccaacagaaatgaatgaagacgctgttccggttaactccaggtcacgagaacagtgaggcacttctgaaacgaacccattaggaacattgaaacaaataaaaaaaagcccgcatctggcagcgcccactacaggctgctgacgtagaccctgctgtcctggagctcctcctcactcggtcgaccccgcgcgcgcacacagcccgcgtcctcttcgcccccggctcggtcctgccccgcgtccctgcagttcacaaagggtaagagggcgccattggggctctgtggggcgcccccgctgaggatgttgtcggccgcgctctccatctcctctatggtcatgtcgcaggcgtcggccagctcctgggtggtgacctcgatgaacttgggatcttgagcaaactgccccagtccttctgaaatcaagacctgaaggagcggggtgggagccatgaagaaccaaaggaacattactcctggagcccagctcttcccttgagggctagagcgagggggtatctggtaggtcacttggggaagtgtgcgtgtgtgcacgtgtacgtgtgtgtgttgggaggggcacccatggggaacaagtggagatggagcatctgccagaattagggatgtgcaggccagagaagttttggctggggtggtcaaacactgtcatcaaatatatgaagacttgcttatggcccagcacggtggctcacacctgtcacccagcactttgggaagcccaggcagaaggactgcttgagcccaggagttcgagaccaggcccaggcaacacagggaaacttcgtctctacaaaaaatttaagaataattagctgggtgtggtgatgcacacctgtgatcttagcaaggccagagactgaggtgggaggatcatttgaccccagcagcgccaggctgcactgagctgtgattgtaccactacactccagcctgggtgacagagcgagaccctgtctcaaaaaacaaccaaaacaaaaaccagagaaggtttggctctcagaggggccggggggttgccctgatgctgtatcagcagatcccagcctgcctctctcctttctgacacccactgaacctttatactattctttcagagaaaccattctccctggtgaaactgctgagacaggcccactgccc

SEQ ID NO: 22493 - DNA, 1506 bp, Artificial sequence
  DNA replication origin
ggggcaggcagggcgcaggcggcggtgggtggcatcgagagcctgctggaaaacccggtgcgcgccgtgctgtacctcaagggctctgggccatccatcgtgcagaaccagcagagcctcgtccacatccagcgccagcgcatcgacgagcaggagcggcggctggatgagctgagcgcggagaaccgcagcctgtgggagcaccagcagcagctgctgcaagcccacccttgtgcccgccatcgtcgttcccggtactggccttctgggccactgctctcaccgttgccactgggggccaggaacctctccaggaccagggacagcgctcacccgccgcgccacaccccgcgcccgagcagacgccgcttaagcaccacggacagctcctgacgcagccccagcctcctggcggccgggctcatacagcccaagcgccccaccagctcccgggacacttggggccgctacatacaagtagaaggaggggtcaccgactctcctgcagcccttcttcagtacaaatgccccgcgccctcggcaagggcgtcctgagcaggagacctgagtgagcggggaggagcagatgggcactgctgtggtgggagccagggaagaaagtgggtgtgagaaggaaacggggaaatagaatgcgcaggagtctaaaggaccggggtgatgtggcgtgaaggggtgagaagacgcttggggacaaaagcgtgacaggagatttggggatgacgaaggaacgatatctgtgcttgagaaagttttggagaatgttggagcaaaaaaggagtaaccagaccatcggtaggggcaaaggaggaaataaatgggttttaagcgactggggacgttgagaactggcggatttaaaggggactagactgtcaggaagtttgagtgaagactaaactgaagaaaagagaaccactgaaagatttttttaagttaggaaaaatttggaaggaagtttgggtagtaaaagtatttgaatggagagtgagatatgaaaatatggagactgggaaaaaggcatgtgaagggctttaacagggctggggcccaggaagaatggtactcgggtacagggtaattcaggaggcagaggacatagctgaaaagcaggagtgatgtgggaaagcaggggagctggaggcaggggaagagaaagtgtagctctttacatgttgcagtgggcatcacagccaggagtggctctttaggggaagctttctctgctctgaccagagggggcacctttcttctgaattcctgcagagctgaagccatgcaaggaagcatcccatcagactaatggaggactcaggtatagcttgaggacttggtctggttatagctttttccttcaactcaagaaggatttccatgcaaggtcattggccatcatggaaagggaatgatgatacaggggacagttggcggatggagttggtatttggatgacctgactgtttaaatcttcctgttaaggccagcagc

SEQ ID NO: 22494 - DNA, 1268 bp, Artificial sequence
  DNA replication origin
gtggcaacggtgagagcagtggcccagaaggccagtaccgggaacgacgatggcgggcacaagggtgggcttgcagcagctgctgctggtgctcccacaggctgcggttctccgcgctcagctcatccagccgccgctcctgctcgtcgatgcgctggcgctggatgtggacgaggctctgctggttctgcacgatggatggcccagagcccttgaggtacagcacggcgcgcaccgggttttccagcaggctctcgatgccacccaccgccgcctgcgccctgcctgcccctgggctggcgcctgggagcgcgagggcgcgggaacccagcagcccagcggtcctctcccacgggcccagcctccctcccgccgccagcgccgcgtcaccgccaccccgattgtcacacactcaccacggggagaggccgcggcccagagcaccccttcctgtctcttggtgtccagaggaggctctgcctcccgctgggcagagaggagagggaggaggccagcgagagggagcctgtgtcggggcgtgggagggaagcaggataacgcaggcgacccgagaaggagggtgaatctgactggcaagacgggaaagtaggcgaaggggaagaggtgatacagggaaggtgcggtggggccggtaggagaagagaagcagaaaaaaaaggaagagaaggggagaagctggcagagaggaagaagaaaaggggaaggtgggggcaaagaaagagagaaatgagctggagaagaggaaggcgtgggtccctgaaggggcgcaaattcttttcccaggcccaggccttccagcggctggaatccatctagagacccgctgaggagagcccacactcgcctcttgctcgcagcaatctattgttctggggaattccctggaacacaaggatcctggagctctaagcgaccttaaagagcatctggtcctgctccttccttcagccatgataaaacttggggtgggaagactgttcatgctgggttttctctgggagtgagacctcaggacggttttggctgtttctactaggaacacaaactaaataaaccaggccctctgtagcaagggctaattcttccagaaacttctgaataaatcattctatttgacaaacatttatgaactacaggaggaagtgactcttaaagtgagaaaagttttccagaaaggaagggcagcatgagcaaaagctcagagatactaatcagcatcaaccaaatcattcatttctataataatt

SEQ ID NO: 22495 - DNA, 970 bp, Artificial sequence
  DNA replication origin
gtgctgcgggcgcttcggaatttttttttctttttttttttttggttcttgcctccttctggctgcctgccccctcccccttctcctgggaccctcggactcgggatctccccggcggcctcccttggcccttcctccctccctcccatccccgcccgcttccctgtctaaccggattcttccagattcttctcgatcgatctcccgacatcactccaccagtccgctgcgcctgcggcggggtgtggggagcgcaggctgcgggatggcagtggcggcgccccctccccgggaccggccgtcaccacgggcggcgtggcctctctgctatgacccgcgtagacccttccctacttgggggaaagagggcaagggcgtgcgcggggagcggggagtgagtggacagcgctgccccgctgcagagagccggggaaagcgacctcgatttccccagatccgagaagccccggccaggcagcgatgcctcgctcagcgcctgcagatgctgcgagcagcggggttggcaaggcatggcccgcccagctcggaactcagatggggcacacactcaggggacccttcccggcggtaataaaactgccgtttccgcgaatgcttacaaagatgggttcccctcacgaaaaaagtcactcggttttcctaaaggcccacagaaggagtattttcttctcaatgtttgcttcccgagtgtttttcgacaggctgtggagcgcgcaggtgccggtgtcacctaagctatggtcgtgggacctagagagccatctagagaggggcctggttttgctcagcacctaaccccagtttagcatagtgcctggtgagtgatgtcccaatagttactggctgcatgaattttccttttttaaatttctttttccaagtcttggctgatttttttttcttttttttttttttttgagacagggtcttgctctgtcgcccaggctgc

SEQ ID NO: 22496 - DNA, 866 bp, Artificial sequence
  DNA replication origin
gctggggagcctggggcctcggcccgcgcacctaggccgcccccctgccgagcgcatggccggcctcggtgccttaaacgacgcagcccggtccgggacggcgatgccaccggcccccggcgggacggccgcgaggctgcaaaggcggccgcctcgacccgtgcccggccgcgggctccgggcgcggcggaagggcggcccgcggggccccgggttccgacgcctccgcaggccccgccgcccctcaccttcagcacgccttcgtcctgtttggggctgatgtccactccctccatgggcagcggcgccgactgcgccccgctctcggtcgccttcatctcctcggctgtcatctccgcgcggcgcgccgtttatccgggagctggtgccggcgcgagcgcactctgggccgcgggcgggggcgctacctgcggggcgtgcgggaggccgggcgcggcggcactgactgcggaccgcgaggaggcttgagcacctctgcacgcggcgcgagagctggggtaggtgggtcaggagcggctcggggagcgattggtcccgccccgccgcgagggaggggctgggaggagcgggagcgcagacagagggggcggggtgcagaactttctagagacggcgggactgagccggttcgggctcagtgctgcgggcgcttcggaatttttttttctttttttttttttggttcttgcctccttctggctgcctgccccctcccccttctcctgggaccctcggactcgggatctccccggcggcctcccttggcccttcctccctccctcccatccccgcccgcttccctgtctaaccggattcttccagattcttctcgatcgatctcccga

SEQ ID NO: 22497 - DNA, 1237 bp, Artificial sequence
  DNA replication origin
tccccagccggcagcgcccgggcccgggcagggggtcgggattgcagtgcccaccccggcgcgcgcggggcggcggagaggggcggggcgaggcgaccgccgcgggcacccgagccgcagcccggggccaggccgggcctcccacgccacgccgcccccgacctcgcggccccagcggagctgccagccgcgggccgcctcgttggtggcggtgccagggctcgcccacccgggcggtggaacacgggccaggacggggagcgactccccacagtgctttcctggcccttcggcctttgtgcgacgcaggcgcgacagggttccggcgccctcccggggtcccctgccgacgccgggacccagcgaggtccccactcgccgcgcggcgccccctccctcggccccggggaggccgggcgcggggcatgccgggagctgtagtcccctcccccctccgccgcctcccggagccagggctgcggggtgtggggcggggaggaggcgctctgctgtggagcctgccgccgagtgaccgctcgactacaaatagcctggggagctgcggggagggcatcttgacctgggccaggacaacctgccttgggtcggagcaggttccagggagaatcagagatggtgaattcccagcctgcgtcttatgccttctccccatccgctgctgcgtcctcatcctggcttcccaccgctgagctccgcgtgtgcggcacccacctcagggggcctttacctggtccagaagtgcatctgtctttgcaccagattattggggacctcaagcgtctgctccagcggctctcctgtggcatgtgacttccccttctcgctccagcgtcctgccgttttctacgagattgttattccaggaaagctcatttcccctttgatccatcattccttcccttttacctttctactcctcaaagcccctgtctattcttcgtggaagctttcccttggagggtaaccacacacctaccaggtggcgctaaagaagcctttacgtttctgggaaatactccagccctggactaactaccagaggaatactcagctcccaagtcagagtttaaggtcccatggagagcctccgggttcacctataacctggtttcttccttacctgttttgaactgtttctattctcttcactcatactcctctcgctctcctgtctccaaaccagaccttagtctgacgaccactggcatgaaggaag

SEQ ID NO: 22498 - DNA, 1252 bp, Artificial sequence
  DNA replication origin
acgccgcttccgcgcgtccccaaactctccctcggctcgcccacccacgcggcggggacccctccggcccctccccggccccacggccacttcttcccccacaagccggcctgcggtccgccttaccagcccgggccggacggggccgcagctcctggcagaccgcacagccttcgagcccggaatgccgagacaaggccggcgccgattggcgacgttccgtcacgtgaccttaacgctccgccggcgccaatttcaaacagcggaacaaactgaaagctccggtgccagaccccacccccggccccggcccgggaccccctcccctcccgggatcccccggggttcccaccccgcccgcaccgccggggacccggccggtccggcgcgagcccccgtccggggccctggctcggcccccaggttggaggagcccggagcccgccttcggagctacggcctaacggcggcggcgactgcagtctggaggtgagcgggatgcagcaatggagtcccaggcctggcctgggcacaggcggggagcaaggcctccgggcgcggaggtcagggcgtctagcagcagggcacgggccacgagtggagatttgggtcacacgggaagaatctgagccagggtgcaagttttttctgcgtccacctcctggccgtggccttctcactgcttaaagcgccccttggccttccctggaagtctgacctccgcaccctgcccgcggcctcgggagggctggggtggcctaccttcttaggccgactgtggctgagatgaagactgagattgtactacattgagtcaaagaccaacctgcatacacactcccctgctcccaggctgtctcaccactaggcaacaccgcctccatcttacttacccttttgcagggcccttttcctggttcttgagaatgtagcaagatttccccgctcaggatggggatgggtcggaggagccactctggaagtttcccgggcaagaaagtgttggcaataataataacgggctggtcaggaagtagaagagaaaattaagacttagatatcctgtggaaaaagaggaataatatctactgattgatgcggggagagagggaagcctggaaagatcggaggtgaaagtaaaactgagatttgaaggtagaggtgtggagggcctgtgaactctatgcagatgacaaatgtcaaaaaagtgcagttgcttttcagggagagaataagtgtcctaaaaaagaga

SEQ ID NO: 22499 - DNA, 1859 bp, Artificial sequence
  DNA replication origin
gccgttaggccgtagctccgaaggcgggctccgggctcctccaacctgggggccgagccagggccccggacgggggctcgcgccggaccggccgggtccccggcggtgcgggcggggtgggaaccccgggggatcccgggaggggagggggtcccgggccggggccgggggtggggtctggcaccggagctttcagtttgttccgctgtttgaaattggcgccggcggagcgttaaggtcacgtgacggaacgtcgccaatcggcgccggccttgtctcggcattccgggctcgaaggctgtgcggtctgccaggagctgcggccccgtccggcccgggctggtaaggcggaccgcaggccggcttgtgggggaagaagtggccgtggggccggggaggggccggaggggtccccgccgcgtgggtgggcgagccgagggagagtttggggacgcgcggaagcggcgtgacaggcccgggtccctgggcccgcttttcctgccgcgctggtcacgccaggcgacacgcccccgcttcccctcaggctcctctgctccccttttcaaagctcggctttagttgatttcctcactgggggaaatcgtaccccattttcccacagtgaacgatcgtctgctccccccgattagactaagttcctttgagggctgcgtattatctccgctttcttccatcttgaaaaaaaatgtcggcaccatgaaccctacctcagcgcgaaacctgtcttttgcccctcccgaagccaagccttcggatataatagaccgtagtgctttatttattgacttagtcaaccagtctagttgagcaactgctgtgcgccaggcaccgctaggccctgaagatacaatggcagacaaggttctttccttcccctgggctcacagcccaatcctggaagaggggcacagacattttaatcaaataaacaaatgtgggctgggcatagtggctcacgcctgtaatcccagcactttaggaggccgaggcgggtggatcacttgaggtcacgagttcgagaccagcctggcaacatagcgaaaccgcttctctactaaaaattagccgggcgtggtggtgcgtgcctgtagtcccagctactctggaggctgaggtggaaggatcacctgaggccgagaggtggaggctatggtaagccatgatcacaccactgcactccagcctgggcgacagagggagacaccgtctccaaaacaaacaaatgttgaattattgctgtaaattgaaacattagaggttaatgatactttgagtatttacaataacgagatcttgagaggtaggacaggaaaggcttttgtaatgagagcttggtgtgagatctgatgccttttacaaagaaaggagggaactcctctaagcagagggaatcaggcgtgcaaaggctggatggcaggaggaagcacagtgagtacaaaggctgagaaatatctgaggggtttgagctaatcgacctgaatggagtgtggtgtgagttgaagctggagccggaggaagcagagccttagccataccgagaagttttgtgcttatccaagaattaaaggaaaccagtcataagctttaagcagaagtgaatccaggtcagatttgcattttaaaaggtccctctatagcggggattgctagagtggattagggcagaacagttggatgttgcaatactccaggcaagaactgctggagcttgaaaaagggtggcagggagagagagagaggaagagaaagaaggagacagagagagtaaaaaaggggcattaagaaaacatgtttaagaggtaaagttgacagggcttgatggtgggttggatgggagg

SEQ ID NO: 22500 - DNA, 1539 bp, Artificial sequence
  DNA replication origin
gcggccctcccgccccctggcctcgagtgtgcgaggaggacgctggaatgcgcggaatgagggctggaatgagatgcgcgccgcggcgggagggagggagccggagggagtggcggcggggccaccggcacctcggggaggagactgcgccgcgcgcgggcgggcgaggggccgggccgccggggcggggcggggccgggccgggccggggcgggcggcgggggagggggccgagggacggcggggacccctccacccgggcctcggctgcggcccccacgcccactagcccttcgatctctccgctccgactgtttggctgctcgttgcgcgccccgcgccctcccctcctggcggggtcccgactccctttcccaggagccgagagccttcctcttcgccggggtggggctgtcccgggggcgggggggtggacggggcccagactcccgccccgccacccggcgtccctccgcacgagtccctgggaggccggggaaggggcgggctcccggcgcgcaggaagggctgctcccttcctgcggctcccaccaaaggacacttgctccggggaaccaggaagcaggaactcgcgggctccattcccagatccgctgccagtgccccctcgcttgccctccccggctttagctctttccgtttttctctcctgccccttgggcatctgtaaaaccgccactacgagtaaaccacatgggagaaagggcactcggtttgaagtccatgtggcatgccatgggacgccttctgggctcagtgactcaatgaatattcatctaagatgtgtgatgagtccagatactgtgaagatcaggatcagccgtcagcacctgccctcaaagagctcagagtttagctggggaggcctcggtgtatactgccatcggtgagagtctggacttcagacacacatgcccaggagtctcttattggggcaggaggtgctggaaacacgctgggctccttgtttggagacgcttaggacaaacgggcttaaagcagtgtgctggcaggtagcgccatcatctacctggccaggagactgaaaccaaaggacttttggctttttccaaaaatcaaatccaaccttttctggggcattatcacttagccttgtgttgggtggttgtctagatcttatctcccttgccaaacagaaacttccttgaagacagagtaatgtctgatttatcttatctttcacacagatccagcctggtgcctgggatagggaagtgcatgataaatgctgcataaatgaaaaacaattgctaccgtggaagatattgaaaggaaagtgctatcgatgccaaagttgtttccaagagaggtattccaaaagtgtttcaagcaatgactgagctaagcatccagtcctgcaaggtgaaggcgttgaagacgcagccctcatttgaatagatgaattgtggtattcttgttaaataatgaatcatatcaaggcttggtcacacctcatgcacatgaaaagaccaaaacgcaaggcagcatatcagcgcc

SEQ ID NO: 22501 - DNA, 1355 bp, Artificial sequence
  DNA replication origin
gccgcgtgctcggctgctcttttctttccgccgcccgcgttcccgccttggacctctgcgctccgacgcgctccgtcccgacctctggcttccctccgcgctccggcgctgctcgctgcccctctcccgcttccctcctgtccgccccgcgctcccctcctcgctcccggttgactcactcctccaggaatagggatccccgtgttttcccgtcagtcccattctgggaaaactcctccctccgcgcgctccgctccgctccgctgggcgcaccggggccggtcggcgcggggtgggcttggccccgcggccccgccttcactgcgccgcccgtcggccccggccggagcccggctctgcgcgctgacgccctgtcgtccccgcagaacgatcgccgcggccggaagagttggcgctcggggcggactccttggaactggcttagcgcacccatcccaccttcccgcaccctgggaccggtaaggctggggcgcggggacttggtaggactttgccggagggcaggagtctgcgcggtgcgtgcggagctccctcccgggacgagactgggaagagcgaggcacgtggaggcggcgcgactgaggctgctggaggcgaagcggctccaggggcgggtaaggggggtggacactcgggactttgggggaaagggaggccggtgtggaaaggaccggagaggcagaaccgagagcatcggcaacagaagagacccagcacccatgcctcttttctgctgggcccttttcgagcctggaagggagagacctggaggtaagcggactgcctgttttaagtgcaaaggcgatgcgaaagtcgggggacccctgcaaaaggtcctacacctcagggcttgggaagctgctgtgtttcctgatggggactagtggatcgatccagggagcagaactttcaaaccccaaagtgaacatttcccccgttgtgctgaggcacttgaggccccgcggactgactgcgtctgtgctgagtctgtgtgacacctgactgcgagtccccctcgctttgagtctctgtgtgggtgatgtctgttcacgtgtggctcaccttggcttccagtgggcgtatttgtttgtgttgaacgtgagtgacagagtgtgtgtatatgtctgcgtgagaaggggctgtctgaaagtgagtatctctgagtaggtgtgtgatgccacgtctcttgagtatgtgtttctcttcgaggatgttggttctggctaggactgttcttcctccctacatagccgtgggcaagagtcagtgtctctggttgcctgagtgcagggataatttgactgtggttttggagtgtgtggcctccaggctcc

SEQ ID NO: 22502 - DNA, 926 bp, Artificial sequence
  DNA replication origin
ggtgtggtggcaggcacctgtaatcccagctactccggaggctaaggcgggagagtcgcttgaactcaggaagtggaagttgcagtaagctgagatcatgccactgcactcccagcctgggtgacagagtgaggctctgtctcaagaaaaaaaaaaaaaaaaagaagtttgaagatgtcagagtgagaagggccctggcatcctgtcaccttggcctcctccaggtccccctctgacctttgcaggtgacgctggtcacccaggacactggacaccgaaggggacaggctggtatcccataggatatggagcagacacaggagactcctcagcttcctgcccgcttctcagaaccagagagaggctgggacagtgtaggggtggggctgggaccagagcaaccttggactaagggtcggttgggttaggaggggaggaggaacacaggacagggagggaggagcgtgacgctgactgggcgctgggacacggaaaggaagccagggaggagggaaagagggaagaggggtgacgtgaaggaggaaaggaggagtggggggaagggcagaagggaagatcggaaaggaacagggaacttgaattaagccccagcatggagtggggcaagactgccggaagcagaaacagagggagagggggtgaccagggagctggacaggcagaggccaggacctaccgtgtccgggtcctgctgctgctccaggaaggcagagaactccaacatccagagcttggagctggccacgctgcggccctgccatgggggtgccgggggcgcagagggcgatggggcgggccctgcaggagactcaaaccctgcacaaagtgagaaaggcacatggaacctggtcacggacacccgccctgcccgcaccctctgcaaggaccccaggcctcctcggaca

SEQ ID NO: 22503 - DNA, 831 bp, Artificial sequence
  DNA replication origin
ccagcctgaagggctgaggctgctagggctgtgcacagcctcagccctatctgctgagcgccacggggcctggagcgagggactgatgcgatgaagctcccttcctcccccagagccccgcaagtccagcagaggccacctgtctctggggccggtgagagggggcctttggtggccattaacgccgctctgcacattggaaatgccaggcagagccgggctgcaccgtggaggcagcagagtaccccaggccttcctcccatctcagcctgctcttccctttcagtccctgacatttctcccaggcacataccagcacatgacaatgaatctgagcccctccaggcccccacacccgggctgcggctgtctctgctcatctgtcagtcacccgatcccccacacctgttccaggcacagctgcccacccgcacgcacagctatgaatagggcggagggagggttgcaagggggcactcacagggcaggggaccggggcagctctcattttttcttaggccaagaagcgtagcttgttttgggtggttgctcagtgtggggggatatgagggtggacaggaaatgtcaggaaggagtatagctgcaggagaaggggtgaggctgtaattagaaggatccaggcactgaggacgagtcgaggtgctctggggcggttcgtccgtgtcgccggctggtgtgttccgggtttatgcagtgtgaacatgagttctggggctgattgtgggatctctctttctccccctgacccattgctcaaccctagcacttgcattctatttgttctcccgattataaattccctgagagcag

SEQ ID NO: 22504 - DNA, 1243 bp, Artificial sequence
  DNA replication origin
gagcctgcggggcggggcggcccgggggcggagcggggaggggcggggcggagcggggaggggcggggcggagaaggatcgcagggctgagcggggcgccagcgccagtgcccggcactgccccgggctgggtcccctgcgttagaggaaggggagcccggggacggggcacggggcccgcgaggcacgggtgctctctcggggttccggaagcctccctccccgccccgccgcccgcatgcccggaccggccgctcctccgaggtgctatgatcccgccttccccctgcggcgaacgggcctcttcccggggtaggggcggggaggtccgggcctggcagtgcgctctcctgggctctgcgcccacacggcacccaagggccttcctggcccaggcctcggctctctccctcgcgccaggctgcctggcctcgccaccccacccccacacctacgaaccccttccctggtgtttcgggcggactgtgcgagatgctgacagcgcgggtgtgtgttggagcctgcctgagacacctcccgcagaaagggccatgcctccccaggagctggcggcctccaagggcgactacagggcaccgtgtgcctgaggggtgcgctaaggcaggagaaactccagctaggcatgtctggcccgggcgctttttcaggcctggattttatgtgttttttgctttttgttttgttttgttttttcttgagacaaggactcactctgttgcccaggcaggagtgcagtggtgcgatcacggctcactgcagcctcgacttcccgggctcaagtgatcccgcctcagcctccagagtagttgggactgtaggcgcgcaccaccacgtccggcgaagtttttgattttttttgtacagacggtggtctccctgggcccaagctggtctcaaactcccgggctcaagccatcctcctgcctctgcctcccaaagtgctgggattataggcccggattcttaaagctagaaggcctaaacttgtttccaaagagcactaaaacgccatctcttctcatcattactgtcatcaaaaatgtcttctaggccaggtgtggtggctcacgcgtgtaatcccaggactttggggggcccaggtggaaggattgcttgagctcaggaactcaggaattcaagaacagcctgggcaacatagggaaaccccatctcaaaaaaaaaatgttttaattaaccgggtgtggtggcacacccctgtagt

SEQ ID NO: 22505 - DNA, 1590 bp, Artificial sequence
  DNA replication origin
cgtgccccgtccccgggctccccttcctctaacgcaggggacccagcccggggcagtgccgggcactggcgctggcgccccgctcagccctgcgatccttctccgccccgcccctccccgctccgccccgcccctccccgctccgcccccgggccgccccgccccgcaggctcgccattcccgggcaggccccgccccctgtttccgctggcggcggcggcggcggcggtgccggagcgcgagcagagcggagacccccaggtcctgcgggcgcggtgagtgcggcccgggcggcgggcggcgaggcgggtctcgagagcgtgcggagtcgcgcggccttgagccggcgccgggcgggctgggcacccccaggccgagacccgagaagggggagcggccgggggcgcccacgggaggcagtgtgggcagggcggcggtgggacgagaggacgaggaacagagtaggcgccgtgcgggaagcgggccgggaaggggagggtgggtgcggggcccgggcaccgagcgaagtggggtcctccaggggatggctccgaggaagaccgtttcagaaagggagtaacccggggccggcaagggtttccgactgtgtgaccccgtgcaccgcttgggacagtccatacaaggaccccagagagggccagggggccttcgggcagggctgggatatggcctgcagccccccggcacccgcgaccgctccctgggccactgctggaagatcagcactccgagtgacaggactctggcacatcccgaagttggagatctagcccatctgtgcattcaagtttgggacttcaaaaaactttcttgtggtttttaaaaaaagatccaaacaagaaaccggcttgttgttgtaagagcaatatttgtacttgtacatcttggaactggagtcttggatctcctccctctttgaaaaatatacgagtcactgcttcatcttcccccaaatgcctgttttgtctggggaagcttgggctagtatgggatcccctgagctacctttttctcgcatcaccaaaacggggggtaagaaggcaggggcttacctgccttacctggtaactcttagttcagagacccagtctctcattatgtgcgcgtgcccttctgacctgcagctgtccttttccctggggtgactcaggtatttcctcctccaggaagctttcctggactagtggagaaaactgaagactcatgcgaggatccctatatatacctgccagctcccttctctttactgaaaatagccacagagaatgttgaatatatgctttgctatagagatacgcagccagcttgccatcataagtaatggggaggggaggagagggattatggataatttcaaacaatagcctggacaaatcatttatatttagctaaggaatgcagccagagaggcagacaattacaccggcttcctaccctcggcttggtcctggcatggctgatgcagctgggctgtgggttggagggagaggattggggtagataaaacttgaagtgtaattcagttctactctcactcactgaagacgccctgtgtgcaagtccctgaac

SEQ ID NO: 22506 - DNA, 769 bp, Artificial sequence
  DNA replication origin
tgaggtagaggtctgggcttgcaattttccacttgtcttaatcctgggagattctaaacagctttgtttaaaaactggacatgcagattgcaaagacctgagtgaggaagagccattgggtcccccaggaaaacaattaggtttgaagccagagtttggatttgttcgaccattttgagtgctgtctgcagcatgtgggacctggaggcgcttacagcatcacccatggtgtgagtcactccaaattagcagccatttcaaattggcttccactgacttgctgctggggatgggtggggctgggggggaagctccaggcctggctgtcacccatcatccaggctgtggccggcagagaggggagggggctggaacaacctgtcttggctcagcctgcccccactgttggccagagaagctggagctggtggtctgtgaaggtctcctggacggagcagttcgtgcccgcagtgcagggagaacactggagaccatgcaattcagggcagggttggtggaactttttcttggcatccatttgagaaactcagaggggatcaggctgggccttgagggagggctgggatttagggagggaagagaagggtctctgaggggttgtaatgctggctgggagcttggttggggtggggacaggtgtggcctgcaggagagggtgagctgttctgtctggggcacctgacatactgcttggagcagctcaggcgcgggaggctggtggtgggagccagtgttggtctttgaacag

SEQ ID NO: 22507 - DNA, 892 bp, Artificial sequence
  DNA replication origin
tggaaagtgaggagcgtctccgcccggccgccatcccatctaggaagtgaggagcgcctcttcccagccgccatcacatctaggaagtgaggagcgtctctgcccggccgcccatcgtctgagatgtggggagcgcctctgccccgccgccccatctgggaagtgaggagcccctctgcctggccagccgccccgtccgggagggaggtggggggggtcagccctccgcccggccagccgccccgtctgggaggtgaggggcgcctctgcccggccgcccctactgggaagtgaggagcccctctgcccggccagccgccccgtccgggagggaggtgggggggggtcagtcccccgcccggccagccgccccgtccgggaggtgaggggcgcctctgcccggccgcccctactgggaagtgaggagcccctctgcccggccaccaccccgtctgggaggtgtacccaacagctcattgagaacgggccaggatgacaatggcggttttgtggaatagaaaggcgggaaaggtggggaaaagattgagaaatcggatggttgccgtgtctgtgtagaaagaagtagacatgggagacttttcattttgttctgcactaagaaaaattcctctgccttgggatcctgttgatctgtgaccttacccccaaccctgtgctctctgaaacatgtactgtgtccactcagggttgaatggattaagggcggtgcaagatgtgctttgttaaacagatgcttgaaggcagcatgctcgttaagagtcatcaccaatccctaatctcaagtaatcagggacacaaacactgcggaaggccgcagggtcctctgcctaggaaaaccagagacctttgttcacttgtttatctgctgacc

SEQ ID NO: 22508 - DNA, 1012 bp, Artificial sequence
  DNA replication origin
caccagttcctgcctcagaacacacttgccctcaatgtgactatgatgaaaatatattcactatttttgtcagcctcgtccgcggtagctgttgtctgcatgctgttttaggtcaactaatattttactgaggattcttatgttggttatctttccattcctcacgtgcttatctgtatgggatttgctcacttatgctttagctgaacactcattgaacacttctggtgtgcaggcaggctctaggaaccagggactcagtggtgaatcggactggacgtgcccacctggggacctcaaaggtccctaaactgggactgcaagttggcctgggggatgctgctgggagaaatcattttggggtctttgtctctgtagggctccccaccatgccatgcacgaacatgtattcctagacactgctcctgttgtctcttggctgtgactttgggaagtggctgggatgaggcagccaccagcctcaaaggactagcacctggagagtgggaaagtgggcttagggcttgtgtttctggtcccagcctctgcttggttcacactaagtgtcctcagcctcatcccacagatatttgaagggctcctctggccaagcactgctcccggctctggggctgcaggagtgaggaaaaatccctgccctcaagagctcatatgttggtggaggagacagacaatgaaaattggtgtatatcaggaggtggcaaatgctatggaggacagtaaagcagggcgggacgggaggatgaggcggggtcagggagccgtgaaggcgttactgaggagctggcatttcaggagagactggaagacagggagggagtgaacctgtgaacatcttggggtggtgcctcctggggcagcgggagtaggaggtgggagcacatgaggcctgttcaaggctggtacagctggaggggagtgagcaaggggaaggtcatgggatttggattatctaggccatcttaggggctttagctcttatggcagaaga

SEQ ID NO: 22509 - DNA, 1059 bp, Artificial sequence
  DNA replication origin
tatctgtaaggaattaagtcctggagtggaaagcgtgcatttagtaatgctgtagcggttgacctggccctgacattttatgttgtttagtgtttcccaggggtagctccaggggagtctcggaatttggtggttggtaccaaggaaacttgtagggatttttagtcgacactgaaggacttctctcatcgaacaagatacgggccagtttgggtgttgttgaaatctggaggagagtcatgtgtggtgcgaaacaggtcacagtaggatcatgcactggcccgggatggacgggaaatagaaagcctggcactggccacggatcagctgagaagtgctgccctctgcatcccaggcctgcagaggagtccctgcagggaagttcagagggtttcttaggagcagctgaagggatttttagatttggtatggggtggtgaggaggcgtttggggttcgatgatgaatgcccaaggaaagttcaggatttcttgggggaattggaatgaggaagatttgtagtttggtgtgggaagtcaaagggtagtttggagtttgaggtaggaggactcagggatgtttggggtgtgggggcccacagggaaggctcagggagggcacagaatgctgtgaggttcctgggaaagcccaggggaagagtgggttcaggagtgtggaccaggggaggtttggaggtgacagtgggaggctgaggagagatttggggttttacttgccaggtggaagggcgtttggatgtgtctagattaaggaccaagggtgttttgggttattggagaaggctgaagggaaggctgggtggggaagggctgtgggaagtgttggggttcatagtaggggagggagggggaatttttgggttccatgcatggggccagaggggagccgtgagattcagttgacgaggaccacggggctttgaggtcctcgccaaaggagaggtttgagttttgcctttcccagggttagctcagcttccacagtctctgtcggctctcaaataccccgtgtcaggaggaagtctaaaggaatcttaacc

SEQ ID NO: 22510 - DNA, 905 bp, Artificial sequence
  DNA replication origin
cctcccacttgataaagtagtttcccagacactgcctcatctgtccctcatggtcacacttaaccccattatactgatgaggaaacagaggcatgctcacattcattcattcattcattcattcaagacatgtgtcctgcactcagggagctgtcagtgtctccccgggttccacagcactggggtggcctgctctgtgccctgccaggctcctgcggtactactgtgcttgctgtgtgttcatctctgcaggaagcagacagagcggcagggggaatatgcattcatggagggatgggggctgcaccagggtgctagtcaggtacccgggcctgggtggcagaggaagggagggggcagcatcagtgcccagggtgtgtccctgctgtgtccggctggccgtggcttcgggctggcatttcctctggcagcagtgtgggggaggggaagagcaggtgtgccctggcgcctggcctggctgggatgtggaagcgcctcttggggccggagcttgggggatgagtgacgtgcagccacctggacacattgggcctcacggagcccagccacattctcagagctccaggctggacatctgagccccccggtggtttctgtagatggctggatctggtgggtgactccagagagggcctccagagaggactcatggtggtgatctatcaaggtgaatacctcccagataggccgagggcagtgttagagggtgtccgatacatacactgaggtgagtatgtgtggtgaaggtgggggtgaggctcgggggctctgtgcattgtgggagggactcagtttctctttagtttcctaagtgtgcaccatgtatggggctgcgctggttgccgcagaggagcgcgggtgagctctccccgcttggagcttct

SEQ ID NO: 22511 - DNA, 857 bp, Artificial sequence
  DNA replication origin
gacatctgagccccccggtggtttctgtagatggctggatctggtgggtgactccagagagggcctccagagaggactcatggtggtgatctatcaaggtgaatacctcccagataggccgagggcagtgttagagggtgtccgatacatacactgaggtgagtatgtgtggtgaaggtgggggtgaggctcgggggctctgtgcattgtgggagggactcagtttctctttagtttcctaagtgtgcaccatgtatggggctgcgctggttgccgcagaggagcgcgggtgagctctccccgcttggagcttctagtcttgtacaaaggaaaagcatttatgcaaatagctgtcatgcaatgcagagtaaaatcagtgtccaaaagagatgactagaacaagaagagtgcctcttcattttgggggatctttcttggaggatgtggcatttgagatgaaccttgaaacatctcctcaaggctgagcaggatgggggaggcttcggaggtggagggcaggtgcatgcaggcacaggggtgggctgcaccttgaggggctggtgttgctggaagcagagggcacagctctgggatttgtggggaagaaggctgacagagtaccatgtagaagggccccagtgacaagcttgagtatttgtgtttaaatccctggggaagtttttgagctgatggcatgtgccaagctctgccttgggccagtactagtggcagcatgtggcagggtgactacagagggagagggtgcagggagcctggtcaggagactggcagacaggaggcagcccagtcacgtgtgactgggttacaacaggaacagacctgggctggagcaacct

SEQ ID NO: 22512 - DNA, 1791 bp, Artificial sequence
  DNA replication origin
cgaccgggacaccacactttgcaaatgatgaggattagaagacttgcgggtggggagcccacctctcttttctgctacccttccagtcgctcaggaagagagtactgagagcacccgagggcaagagccacattttaccaggttctgtaaccccatcccctaccacagggcttggcctctgggaggtgctcaatagggatggctggatggaagaattcatgtcctacctggggcggtgggtgtgaaaagtcctccctggatcccagcaggtattcatgtcacacctagaactgtgtgctaaaccctgggccaggccctcgaagaaacagatatgagaagtggggctccctgcccttcagggagccacaatccagttaggaagacaggagggcattaatcaccaaggcagcacaaatgggcagacacagagctaccacaacaggcatggccatggtgggagggggacatgaattccagccagagggacttccagaccctcatcacagagctgtggtagtgacctgtgctgatggtgacctgtgctggtggtggcctgtgctggtggtgacctgtgctggtgtgacctgtgctggtggtgagctgtgctggtgtgacctgtgctggtggtggcctgtgctggtggtggcctgtgctggtggtgagctgtgctggtggtggcctgtgctggtggtgagctgtgctggtggtggcctgtgctggtggtgacctgtgctggtggtggcctgtgctggtggtgagctgtgctggtggtgagctgtgctggtggtggcctgtgctggtggtgacctgtgctggtgtgacctgtgctggtggtggcctgtgctggtggtgacctgtgctggtggtggcctgtgctggtggtggcctgtgctggtgtgacctgtgctggtggtggcctgtgctggtgacctgtgctggtggtggcctgtgctggtggtggcctgtgctggtgtgacctgtgctggtggtgagctgtgctggtgtgacctgtgctggtggtgacctgtgctggtggtggcctgtgctggtggtggcctgtgctggtacggtgagctgtgctggtggtggcctgtgctgatggtgctggtggtggcctgtgctggtggtgagctgtgctggtggtggcctgtgctggtggtgagctgtgctggtggtgacctgtgctggtggtgacctgtgctggtggtgacctgtgctggtggtggcctgtgctggtggtgagctgtgctggtggtggcctgtgctggtggtgacctgtgctggtggtggcctgtgctggtggtggcctgtgctggtggtgagctgtgctggtggtgacctgtgctggtggtggcctgtgctggtgacctgtgctggtggtggcctgtgctggtggtgacctgtgctggtggtggcctgtgctgatggtgacctgtgctggtggtggcctgtgctggtgacctgtgctggtggtggcctgtgctggtggtgacctgtgctggtggtgacctgtgctggtgtgacctgtgctggtggtgacctgtgctggtggtggcctgtgctggtgacctgtgctggtggtggcctgtgctggtggtgacctgtgctggtggtggcctgtgctgatggtgacctgtgctggtggtggcctgtgctggtgacctgtgctggtggtggcctgtgctggtggtgacctgtgctggtggtgacctgtgctggtgtgacctgtgctggtggtgacctgtgctggtggtgacttgtgctggtgaacctgcagcctcactggctccc

SEQ ID NO: 22513 - DNA, 1204 bp, Artificial sequence
  DNA replication origin
ttgggaaagccactaggcagggtgcagggctctgctcctggtgcagcatgtgctagtgtggccagcataccccacatccctgccctggcagctccacccagcctgtgactgccctgcctctggcctccccacctccaggccctgcaggaaggagtgaggccagcaggacacggctttccaggtgaggcagtgtggggagtaggcaggttgaagggctagctaggtcatctaggggaagagccactcctacctgtcccaccccatgcatttcccagaggggacagcaaagcgagggcttctgagcactggtggggatcctgcccagaatgcaggcatcccaggggacccgggttttcagccttgtcccaggtttgggagctgggagggagcagagggcccaaatatcaccctcctgtggtccccggcacccccgtgcctggtgagggtccttctcctgccaaggctctggctgtgagggctcagaaatggaggggagggggctgagggtccccgcctaggtggggagccatggtctaaggcacttggtgcatttgcaggggctggacacagaggagggggcatctgtggccctagtggagctggtgctaatgctgcaggcctggcaggtggatgtggcgcctgtccttcgaagggcagttggcaggggacgcagttgaccatgagtaaaaatgtcgctggagcctcggtgcaagcagcagatgagacccatcctgcaggtggagagggcaaaggagcaaagagagatcagaactccctgaggctgtcagccatcagggctctggagcagtgctgctcatgcccagtgcacatgtgagtcccctggggcctggagaaagggcagcttcccgcttaggttggggtggggcctgcggttccacacttctaacaagctcccaggtgatgcccgtgaaagtgggggagccgcactccaagaactactgtccaagagcagggtgtcacacactttaatggacataaaccacccggggacccccttattacaagtttgcaggcctgggtgggggcctaagggtcttcgttcctaacaagctccccgtcgatgctgtgggtctgtggtcctagggcttctccagaaatggcctagtttaatgagatcccgagtgagtatttctgctccctcatcagagctgtctgaagccgccttcttctctgggaaacggcc

SEQ ID NO: 22514 - DNA, 1494 bp, Artificial sequence
  DNA replication origin
gtacccctcactccacttaattcgctccgcgtgctctgaatcacagaaaggcaaacttgctaacaaagaggcggcccgcccgcgtgcggggttcccgggcgcgtcccgctggccaggtgaggacggcgggcactgggcaccgcagcggggcgcggggcgggctggaggcgcgcggacactcccccggccggcaaggaaggggcgggccgaggcgcgggccgtgtgccgctgggtggccctgcgagccgccgctctccgcctctctaggctcagcttccatcaccgcgtggcggagcccgtgtccgggccaggtgagcgcgggcggctgcggcgggagaagcgcgcccgcgtggggtggggcgccgggggcgggggagggaggctgggggtcccggcaaggcgccgccacctccgccgcccgcagtccctgatggaccgtggcggggccggcgggcagggggacgctggctgcggataggggtggggcaggcatcccgggggagtcgcggcgcgtgggagcacgcgttggtgtgtgcaggggcccgcagcagggggtccttaaccacacgcctgagtccgccttctgcacttgtgccttgggaagagctctgggcctctgggggccgtgtgccctcccgggacatggctgtccctcttcaaaatgtcactctcttcgcccaccctgaattccagtagctgcctcttgtgcacaagcatagccgacaggctcaaactcggcttagctagatgtggacaggtcgtggctgcctgccccacgcaacacagagtctgctaaatgcaggcacctgctgtgtgtggtgcacgttgttcccagtgggtcaggctgcctgtacagggaggtcctgtgttccctgggcacgtctgtgcatttgtggcaacatgattatgcaggccctgtcacctgtttgtgtgcccatccctgcacatgcagctggctggctcctatgaaaggaggagggtctggaggttttggggtgtatagctttcctaggcgatatgtgcagtgttaacgtgtgcattggctggaaagtgtgaaagggaggcggctcaattgggttcggccggacagcatcttaacataggtctcagctgctgtgtgtacaggaatagtgtcccaggggtctgcagtgtgtggcaagtattctgaggtggggttgtgagaagaggcggcttctgaaaaaagtcctaagtgcactctggggcatcgggtgtatgcaggcggagggtggggtggcaggagaatgagggtggtattaggccagggtgtgttcgatttgggggcagcttgtagtggaaagcagcagctggagtctggagacctggatttgaattggaacttagtggttgtcactgtgtcattcgctttgttgcctggaaaggtcgtctggggctcagttactctgtgtgcaaaatgggactgataatcactggcttatctcccaaggaggctggaagctcccattggtcaatgcc

SEQ ID NO: 22515 - DNA, 1630 bp, Artificial sequence
  DNA replication origin
tccctcccccgcccccggcgccccaccccacgcgggcgcgcttctcccgccgcagccgcccgcgctcacctggcccggacacgggctccgccacgcggtgatggaagctgagcctagagaggcggagagcggcggctcgcagggccacccagcggcacacggcccgcgcctcggcccgccccttccttgccggccgggggagtgtccgcgcgcctccagcccgccccgcgccccgctgcggtgcccagtgcccgccgtcctcacctggccagcgggacgcgcccgggaaccccgcacgcgggcgggccgcctctttgttagcaagtttgcctttctgtgattcagagcacgcggagcgaattaagtggagtgaggggtactgtgcgactgtctgcgggaaacctgcggggagcgcgggaagggatggacttgatgagccgcggcgcagcggctttcaaacctccccgcgctccgcagcccccagcccccgccctacccgccctctcagatccctctgtctcctgcctaggtcggcccctgggagaggttggctcctgggggttcccagggactttagggacaaggtttgatgacatagagcttccccacgcccccttcctcccctcccctcatcctccgccccgcgactcccatcactgccctgtccctctcagggtcctggggaccatcggccctgcattccctgggctcagggagaatcaagattcttcctaatctggagcaaaaagagtagacggtagggcccagctgtccctgcctgcacccagtggaggtgcaaagctgtccctaagtgggtctgtcctagcagtggggcgtgcattgtgggttatttcccagagcaacggtggccttgtgcttatccaaccatgttcttttgaaacttgactgcagcgagccgggttatccatataccaggttgctaggtcagggaggccgctactggggggcagggaacgcgaagcacgccactgtgccccagagcaccagtgctctcaatgccgcagctgaccgctgggaaaggcttcgcacagggccatgcgggaaggagatgacagccacagtcccctgagatgaagacctgaatgcagaagctgccgcgaaggagtccccagagcttgctgtgcgcggtgcaggaggaggagtgtgctgggggtgagggggtaaaaacctgaagtctggaggagacctggagtgatgtgaggttgagtttcgtgtggggcaagccgggtttgagaagcaggccaccttcttccaggggcacacatccagcaaatgcagtgggaatgacctgtggttcttaggagagaggctgaggcaagagatgcgatttttggaatcatctggaaagaagttgggctgacaagagaagaaatggagcgagagggtagaaaagatagagagaacagggctgaagacagaagctgtctaaggaggggaaggagcccatgagagaaacaatgtgggagggtcgggactgtgcagagtgaaagaactcaggagaagagggatgttcagtgggggcctgggctacagagacaccaggaaggaggtgcccaagaaaacaggtttagatttggaaatcaggagatctctgggggctttcaagaga

SEQ ID NO: 22516 - DNA, 1030 bp, Artificial sequence
  DNA replication origin
tgctggaaacacagaagctaaagacagggagtttatagcctagtgggggacaatctaatacagcatcagcaggagtagagatcagtgagcctgggggacctcttggagcacttgggaagagtttcaagccagaagctggggcagtgccaggcaggtgtgctggaggtgaggctgttcgactctggagagatgagaggagttagccaggagttagacatttgaggctttagagacaaggaatatccatatcctgcagggccttgtgtgtcatgctaaggaatttagatttggttttgaaggcaatggctagcccttagacagaggagtgacatagatttttgttctagaaatacccttttgcatttcagagaatgggctgggaggaggcaagactgagaccagtgagaaagttacagcagtggtttgacttgaccagggtgggggcctgatccaaagcagtgagagtgggcacagagagagagagagagatcagtagcagagagggcaccaaactgcagttactagcacttggggactatttcaatgtggggccgaaggcagaacaaagatgcagaatgacttccagaaggcagaggcctccagataggcatggcagatgatgttcactgtgatgaggagcgtgggaggtcaggatcaaggagtcagagggggaagagccaagtgtgagacctggggacatgcatgtttcagagttggtggaggggagggacctggagaggatgaaaaaccacaagggaatggcatcccagagatcaaggaaagatgggattccaagaaggagaggtacgtagtgtcaaaggctgcagtcaagcaaggtaagggctgaaaaatgttacatatcaaaggagaagctcccttctagagacattggccagaactgtttcctcagagagtctgagccaagggttgtgaactgaatagggggtgagcaaatggagaaatgtatagtgtagtcttccaagaagcttgtcttgaaagagaaggtgagatatggtgtggcatcgcaggg

SEQ ID NO: 22517 - DNA, 838 bp, Artificial sequence
  DNA replication origin
cggctgcggggacggagagctcgggaaccgactcgagcttgaagggtaaagctgaggcagcggcaggagacggtcaaggcactgcagggggcagacctggccccaggattacccaccccagctctgcacaaagccgggacccgggagccctcacggagcccagaggagagggcaggggagcgcggctgcccggggtttgggacttgggggcgggagaagggagcagcgggtggcaggagagggtgatggggtgagagtgactgttttgcattttcaagagggaggggacctgagacatgaacttcccccccaccccccaccaacacacacacacacacacacacacacacacacacacacacacacacacacacacacaggaggaggccggcagaagcgagcgggatgaaactggggaaagtttggcactcggcgctgagcggcggcggcggcgcggtggtccgggtgggcggcggggtctccgagagcccctgctcgctcgcctccttacctcggtgctctcggccgcgttctccgccattttcctcctcaggagcaggcagcgggaggagtgtttcatgcccataagagccggcaagggtttggtgataccgagatagtagaggaggagagagagctggtgtcgctttaaaagagagagcgagaggatgggagaaaaaaaaaaatccaacccagcccctcagctggagcgtcggccggcacagtcagccacagcggagtctgttctgcagtctccactttcttttattttcctcccttctcatctgctccggattccttcacacggtttcaagttcttctcgtgcccccgaccccc

SEQ ID NO: 22518 - DNA, 744 bp, Artificial sequence
  DNA replication origin
aaggcgggggccgagaacacaatttgcggagctagagcgacctcctcaaaagcccttgcgggacgggtggctgcagacccatttctcactgcagccggcggcgcgcagcccccacagtccgcgcaggctcggctgctgcaggggcggacgctgtccctggtgctgaaggtggccgcggcccgtgtgccctgccgggtttagctacccagaggcggctctgatatctgaggattgcagacttctctctggcccagatctgggccggagggtctgtaggaggtgcccgagtcctcctgccggctcggcccccgcggccgggggctctccgcgcggctgcggggacggagagctcgggaaccgactcgagcttgaagggtaaagctgaggcagcggcaggagacggtcaaggcactgcagggggcagacctggccccaggattacccaccccagctctgcacaaagccgggacccgggagccctcacggagcccagaggagagggcaggggagcgcggctgcccggggtttgggacttgggggcgggagaagggagcagcgggtggcaggagagggtgatggggtgagagtgactgttttgcattttcaagagggaggggacctgagacatgaacttcccccccaccccccaccaacacacacacacacacacacacacacacacacacacacacacacacacacacacacaggaggaggccggcagaagcgagcgggatgaaactg

SEQ ID NO: 22519 - DNA, 957 bp, Artificial sequence
  DNA replication origin
gaatgtggagggatctggtccggtaagaacagagaagtgaccaccattgactttggccacatggaggttaccagcgctcttaacaagcacaggctcaatgtggggctgggagagaaatccagttagaataggttcaggaaagactgtgaggcaaggaccagaaatgatggaatagaaaaatggaacagtagctgtaaaggaaggtggcattaagggaagaagtttttttaaaaaaaaaataggagatatgaaaacgtgtatgtgattcactggtgtagtagagggacagagaaagattgcaggtgcaggaaaaagtaaattcagcagcaaagaccttgagaaggtaaggtgtgtgtgtcaggggtggcttttgccctgcccagtggaggggtggtctttgccttgcacaggtggaggggtggtctttgccttgcacaggtggtggggtggtctttgccttgcacaggtggagaggcggcctttgccttggggcagggacagttcagccatagaagtgggggaaagtggggagtgtgggtccagatggaggtgccagtggtgggaagcccttgttttgctgctttcatttgcttagtgaagaatgagacagttgcatgccaaaaagagagaaggtgaagggaggtgagtcctggaatgagagggaaggagggagggcagcagataggctgggggagtgaggattgctgcgatgtgtctgatgcctgtagagatgtgtgaccatagaggctcagtgagtcccatccttgctgttgtgtgatctttctcttaccactctcaggagctcgagtgcgattggagtagaaggttgccgggatcagggctttgctgggagcatgcagcagagggagggggagctggaagttgatgacagtgatgggccgtgggatctaagctgggccaggaaggaagcggagaaggatggtggtggttgtgaca

SEQ ID NO: 22520 - DNA, 1237 bp, Artificial sequence
  DNA replication origin
cttccttggattgggtttcaatgtatgcctgcatctcaatgatcctcattcctactcatatgccaaattttctttttgtcacatcagccatctcagcccagttcagaaccctttctggagaggtagtgctattgaaggcactctggctttttgagttgtcagagttcttgcactgatcctttctcatctttgtgggctgatgtttctttagtctttgaagttgctgacctttggatttttttttccttttatcctattcgatgacctggagggtttgattgtggtatgaggtgggttcagctgactggcttcatttctggaagattttagggggccaatgctcagctcccaactcctggactgtgtgctctaactctaggggacctgtatcaggccctggttttttttctctggctcctcaaggttaggaatccacgctgggggtgggggtggggttgggggtgaggtgcttctggaccattggtcactatgttccagtgggtggtgtcagccagccaaagcattttgtagtgtggtggcagtgggatctgtccttctttgtacgtgccaacagcagcagtggcagcagcatggtggggtgcacacttattggctgcagcagggtgccagtgggtgctagagtgcctgcctctgtgtgggtgttcagtacagtaatgaaggcagcatggcttgggggccagaggcccctgtgggcaactgtgtgcatagttgtgctggtggtggtggtagcatgggggtgaggcactggctagtgcaagtctacgtgcactctctccatcaccacagtcatgggtgatcactcagggcagggaaaggttttgctgttctctgtgcctagtttcacttctgtggcagtgttggcatcagagtggggcactggtgagggtgtggctggctggctctgtgccccccaacgctccaactgcaatggtggtccagcagaagagggaggcagagtgcactctggccacagcagtggcagaacagggtgcatgcacacgtgcgtgctggcagggcaaggaaggcaaaacctgcctgcacacacatgcaccggcaaagcaatgcgggggctgccgtgggcctgggggaagctgcaacgtgaggagggagcaggcaggctggcacatggccttacgggctgccctactggagctctctgccagtcagccacaagtctaccagcacaggagctatgatgcgggcccccaggacacct

SEQ ID NO: 22521 - DNA, 1066 bp, Artificial sequence
  DNA replication origin
agccgccccgccctcgccacccagcctccctggcggcctcaggtcgcgcctgcaggcccggaccccaccgcttggcgcgcgcacgtcccggagggcgtccagggggcgccgcttcccgttcagctccgctgaggggctggtccagcccgcgcggctcggagcggaaagagtcgggcggagcaggcggctgcttgacagctgagagccgagcgggcggcgcgggcaggtccacgggaagcctacacgcccaaggtaacgtggaggaaggttgagggtgggcggccggggcggccggggggcggcgcttcctgcctgctcctccggctgcgaagtgtgagcgcgtgtctgccgcacatggaactcgcagagggcctggatggaggctgtgtgcccttgggggggaacagctggctcccctgccacccccaggcctggcctggcccttgctcccctccctgtcactcggtaacgggactggaggagagccgagaagcactagggttttggtcaggaaaggaccttaggaaccctccagcctcatccagcctcttcatttcacagatgaggaaactgaggctcagaatggtaaagtgacttgcccaaggtctcaagtctaagaaccaaaactcctaccttgcaggtcagtgctactaggagccctggccacgcaggcagcatccacaactgttgccatgccgagaaacaaagaaccgagacagacagtcagaaagacacagagagagaacctcccagagcaaaggaaggaggtcaggaagtgggcggctgctggggcttggcttccgccctggcccccgcgtgtgctggcctggctgtgtggctcagaggcgttgtgctgactctgtccgtgtgtgtgtgtgtccgtgtgtgtgtgtgtctgtgtgtgtgtgtccgtgtgtgtgtgtgtgtgtccgtgtgtgtgcgagtgtgtgtctgtgcacccatgcatgcacgggatgcagcgaatgtaccctgccacgtgggaaagccctctgagttcatttatctgtttacacagtgtgcttaggaacctgccctgtttggctct

SEQ ID NO: 22522 - DNA, 1166 bp, Artificial sequence
  DNA replication origin
acgtagctggcaagttggagcactgagattcaaacccagggctttggcctccagagtctgtgcactaaccactgtaatacctctgagactgtaaggggcaaatgaatgacaacgcattgatttagaagtgaaaggcgatctaaacgtgcaagtattaacactattaaaaacaacaataacaatggtaggtacctccgatgcctctgaccttatctctctggtcacagttttctgctctgtaaaatgggtgggcaggctttacactggataatctctgaggccccttccacttctcagattctgataatgaaatgtccttctttcctcacataaggctgagagaaggtcaagccaccagcttgcagaccttgggagttgacacagggaagcatacccaggacagagccagaaaagccaaggcacgcagtagggacacaccagagggcaggcctcagagcccctgacagccttctgaaactctggcagggtggagggaggttgtgggctagtggctggctgggctgcaaggagaagaaaggactccacagagtaatttataacagctgctcagtaagtgctaatttgtttctctccaccttggaataggacttagcgcgtgtgagagggggatgctactacataaaccagtaccagaaagatgggcttgccaggaaagaactggggcactctgcaggggcagtgtctggggaagggttctccaaaaaggtgacatttcagaggggcctggatggatgagtaggatttcaacaggcagagatgaaaggggagggtgttccaggcaaaaagaagaactcccagcagccatgaagaacagctggtgtttggcaacagctagtgtgtccagagcgaaagtgttgtgtgtgtgtgagggagagagggtgaggctggaaaattaggttgtggccggagagggcagggtgggccttgccttgtgcgctaagctgaggggttatcctgcagccggagcacctcgggaggcctttgaagatttactcagtgctttattaacaaatacgtattgggtttttggtgttttgttttgtttttaacgattcatgcccacagtagaatatatagaagagtcagaaaagtataaagaataaggatcccctttagtttctgctcccagaggtaacagccggagt

SEQ ID NO: 22523 - DNA, 2166 bp, Artificial sequence
  DNA replication origin
cagacacctgagatggagggataaccagaggtgaagaaaatgtcggcggtccaatcactggctgtagcatttgaccattaacactagcctcagtctgcataggaaagtgggcatcagtacaggtacaatcactttaattctgggcggcaggagcctctttgaaccagggattatgaagataaacagggacagggacctttgggtacatcctgcaggctgccaggtaggcctggtgcagagggtacaggtaagaatgtggggcccacacaggacaactgtatgccttcacaccaagattgaagaagaatcgaagaatattcttatctttaggtaggtcctccccagtctgacacagtgaagaaggtggtacaatggctcgatctcccttttcattacaaggaaacccaggatagagtgggtcttgataaaggctcaatgtctgaggcaaaggcatcaagggctggttaactgcctgtattgacacaggaactggagagggtgttaaatgagtttgggatacagcagaatcaggtccaggggtcaaagtctgtgtcactgaccgaccaggaattggagcagggacacctgttggtccaaaagttgtaggttcacttggccaggctggcacagtggctggtaaagaaggcactgcaggagttagatgtacctctggagaaactagaaggggagctggatttgacaaagacacatgttctgctggcttttgttctgcaggagaagggcactctaacttctttgactttgatggtgatgaaactgttgcatatttatcatcagtaatattctccaatatgcttggttcgggtcttttatccaactatgtccatgaatagagtctttgtcttttcgttcttctgtatccattctccgcctgcttccttttctatcacttacgtgtgatgattttctctggacacatggattgctactctgagaagtagcaatagttagattctcgacttgtgtgatcagaatcctcaactctttcacgatcaggttttcttatgatctgtgaaggtgtccggctaagatttttgtgctcactggagaatttctgagactgtgaccctgaagaatgactagagaactcacgttgtcttactcctgaaggatgctgcagtcgaggaggtagtgctaatggggcttttattggcttgcttggattctttggccctctgtaatccatatcagaatggaaattttgtccagaagtggaaggttttttcatcttcttccctgacactgtgttccagctttctgggggaggtgccttgaggttctttgatgtgtactttcccagttcttcaaccaaaactggtccattctcagaatgaactccttgaacgtctgcattcaaaaattttccattgtgatccaacctaacttgacatttgtctccaacttcatattgtaagccagcagcaatggaataatcacgtttttgctgagcttgtttagactccagccaaatttcatattccacatttctatagactgcaggattgagtgacttaagaacctttctagccaaaggcaggctagtagagttcccattgttcttcagctgctcgttgcctgacaaaggtttaaatccattcacatcagcagcagcaacagcagttttactcttgcagctgtcatcctctgaatctgatatttcactgttgtcttcatcagctacttccaacgtgtctagttccatcacaattttactaacatcagttttaaataccttctcatacagcaattcataaaggagagactgacacatagcagagctttctttatactttacgggatacacaatatcataatgatttccatttgaaaaacacagtaacaccttttcaggaaaattattttcagttacttgtgaaggagaaacattaggttccagattagttataaaatctttcctgtacataagagaaagggcacttatttccatttgtcctacccattcctgtggattttccaagcgctttaaatatccttcaaatgatcctcctataatcgcttcaaatttctctctgttctctcgaagacagtgaatacaggccattctgacttcaacatggcgagactgagagtgcaatacctgctccgccacggcccggaacaggcacgacccgtccttggcgacca

SEQ ID NO: 22524 - DNA, 1062 bp, Artificial sequence
  DNA replication origin
attctggaaaggaaatctcttgtttacgattgtgctgcttagcttataatagatacaccataaatatttgttgaatgaataaaggaatagaactttcattggtatggaaagagtcctgaagggcaggggcaaaaccacagcatctaaagtgctaaagccatctgttctagcaatttatttgctatttcttggaaggcctattattttataatccaatttcctgacagaagtagaagcccataggttctaacacctttggctatttgaacctaggtaagttatctaacctgtctcaacttccaccaccttatctgttaaatgggtatgataattctttacttacctggggataatttaactgttctgatggggtacaaaatagaagtggcctctgtcctttctagtggaagagatagtaagcaaataaaattagaaaattacagcttttaacataggcatgatggaaaaccgcagggtgtcacgtgggagtagcagtgggacctcattcagattggggcacagggaaggcttcactagtaaaatgccatttatgcggagacctgaaggatgagttaggaattggccaagagatagtgaaggaaacagcacgcgcaaaggcctgaggcaggaaaaagctgggggagaggggcagtaatttcaagcagcccagaaagaccactgggataaagctggatggagagggacagagatgctcagaggtactaaggtgggggaatgacatgatgccatttacatgttgagaaaagcacttgggccgctgcgtggaaaatcgtttggggctgaagtataagaactggatctcggttcttacaagaacctgaatcttagcgccaaggactctaatgatcctgctcaaacctctcatttgaaacacgagaaaaaaaccccaaaacaccagaactacaattgtgagaagccttggccaggatcgcacgttaatctggttgtaatgtagctgtgaactagggtctctgactgctcttccgcgatttatgagcccgtgcccccctccccccgctgccttctgcaatggtggagtgg

SEQ ID NO: 22525 - DNA, 1175 bp, Artificial sequence
  DNA replication origin
caatcgccggccgcgcccggaggccgcgccgccaggaggccgcggacgcgtgctcgcatgcctgtggtatttgctcagaggggcatgaccacttcgggcaagcctttaaatgtgagtcagctttcggccgatccctgggaaaaattccttcggtgttgtcaggcagggttcgctagctgcagctttttttttttttttttaaacaattcaaaagggataatcccgctgaatggggaaaggcattcggaccccgtctccccggaggagaggccgtgggcagtgccgggggccaggcctccccgactctgggcggccccgaggggctggttttctggagggtcagggcacctgccctttcttccctgcgccctctccccaacttcagcagggcacaaagggccggggggcacgtagaccgcggggcgagcagtgccccctggagttgtgcccggtcccggcctccctttctcccctctctccgcgcttctgctcctggacccggcctggggaagccgagcggttctaggtcatctctccacctccctaagcttcagtttcctcatgggcgaaggggaaggcggacagtagaggaagtgagctggcctgggagtgtggaaacttggcgtgttctcccagcttagtcttactaacgtgcttgggcaagccccttctgcactcccggcctcagtttccccatctgtaagatgagagagccggtctggaagagtccatgagtgtagtgacatcaggcgatcgcggtaccccttcctggggcctgtgggcgcggggtggataaagccctgtgacttgcccgcctgctcctgcacaactccatagctgctcccccaggccacccagcttcccctcccaacgtcatcttagagacgcccagtaggcaggattgggagcaccaaggggaaagaagaccaaaaaaggccgagggctgagggaagtgagttgggactggaggggtttatgtgcaatttgattttaaacgaacatcttgtgcagaagaagaggcaatttggcacctgttactggtgggttaatagcttaggcactcttggtaatggggatacaatactgtgaagaccagattagccgactgtggcagcaaattatgagttgaccggaggctgggtgcggtgactcgttcctgtaatcccagcactttg

SEQ ID NO: 22526 - DNA, 1120 bp, Artificial sequence
  DNA replication origin
cccggcgccctctgcattcatggagacccgcaagttcgggcgcttcccgcgtggcaggctcgcctcttgaagttcccctgtccacttccccttccgattactgactgttcccgagcgtgaagctcgccatcgaatccaatccccggtggttttgcagactctcacacgtggggtggggcgtgagagggtgcggaggttggcaggaatgtctctaggaggcttggactggaaactgagttttcccttttggtcgccactccagccatgtgttaaaaccctaatgtcttgttaaaatgcactccacctagcacgcgggaaaacgcatgttgccttctaggcaaaagtgcacactttctttcagtgtagacttcggtttcaagaaaaagcgcaagagcctgtgctctggctttgaagtccaaactgatcaccgtggcgcgggggtggggggcggcgggagggggtagattgttggttcttccttatctccttttcacccttcacggaaaaaaaaatacatatatatatatcccatgtaggactggtgataaactttagcgaacgccagttttattggacttttattctttttccggccggctccccaccctctacgctagcgttttggagtttcggttggaaagtgtacaaagcctggaggtggagggtgcagcagggtgttgggtgtttataggcacttttctgcaggagcctgcagcactaagcacacatactcccaagcttacctggaggatgcctcccagccaggtgattccgcggtcggctcaaggcccgggagcagcgcgagttcgagtcccgccttctccgcgcaggggcgcctaggccaggtggggagcgggtagtgactgagttcaggctcagaaatgggagccactgccttcccctcggctcccccaaagagtggagctgtgtttgtgtttctccgtggagggatggacggtcaatcaaaaccgaaaacccgactggcaaaatgcgaggggacacataaatccgaggggacacataggaggcacatcaagaggaaggagggagtgcaggcaaagtagaaaaatgcggacaaggagaagaggaaaacgtcgggaagcggagagcacgggggagc

SEQ ID NO: 22527 - DNA, 1582 bp, Artificial sequence
  DNA replication origin
gccagagcacaggctcttgcgctttttcttgaaaccgaagtctacactgaaagaaagtgtgcacttttgcctagaaggcaacatgcgttttcccgcgtgctaggtggagtgcattttaacaagacattagggttttaacacatggctggagtggcgaccaaaagggaaaactcagtttccagtccaagcctcctagagacattcctgccaacctccgcaccctctcacgccccaccccacgtgtgagagtctgcaaaaccaccggggattggattcgatggcgagcttcacgctcgggaacagtcagtaatcggaaggggaagtggacaggggaacttcaagaggcgagcctgccacgcgggaagcgcccgaacttgcgggtctccatgaatgcagagggcgccgggaagggggggcatccggccgcgaccctctctgcccctcccattcgctgcccccctccccgctggaatttctctgtaaagcaagacggagtagggggagggggagagggaaggggcgagagggccctcggctcactcccgagacgtgaggactcgccacccaggcattctcctcggggtgggctgggccccgggacgaccacccgcttcttcctcgcccccgctgcccccacttcgggagacccagagctctggatgcctttccccggagaagggggggtgtgcggagtcggggtggaagagaccttgctcgcagagctatatcaagtgatgtccagaggctgggagccccggcggcctctgtcccttgcctgtcgggttagatttatactttaaaaatacctcccgccctccctccttctctcgcctctccccgctgcaactttctttgatccgctcaaaggtggcttaggtgaaattggagtaattcccttatgggggtcttaaaatgtaagtgaatgtccttatccggggtgactcaaaagcttaagtcgggaagcccaacgtgactaaaaccaataggtgattgttcggggccgactgtgtgcgggtgtacacggtattcggcccgggtgtcatccgcggcgctggactgtttcattttgagtttgcaacttgggtttttcagcgagctttttttcttcctgaaagctaatggcttccacagcaattagacattttcctcgcccgccccttccctcccctttctttacatataggagatgggatactcattcccgctgctattgataaggtcggaggcggccgggcctctccccagctttcgcccgccccagcgcccgctctccctccgccctcccttggcttccttttgatgtagtggggaacgcgtcctactaaaaaaaaaaaaaaaaaaaaaaaaaaaaagtaatctgcccggtaacaatcagcgcgcagtagcaggagccccagagctattggctatgcaaatagagggaggggagacggcgccccaaactcttcctcacccttttaaagcgatatcccctcctttcccccccaccaccccttccgccccaccctcgtttaaagaggctggctccggggcctgagttaatcgcttgcacctctagtttattcgctcccctcctccgcct

SEQ ID NO: 22528 - DNA, 815 bp, Artificial sequence
  DNA replication origin
gaaacagcttcgaagttatcaggaacacagacttcagggacatgacctttatctctgggtatgcgaggttgctattttctaaaatcaccccctcccttatttttcacttaagggacctatttctaaattgtctgaggtcaccccatcttcagataatctaccctacattcctggatcttaaatacaagggcaggaggattaggatccgttttgaagaagccaaagttggagggtcgtattttggcgtgctacacctacagaatgagtgaaattagagggcagaaataggagtcggtagttttttgtgggttgccctgtccggggcccctggcatgcagggctggatggagggagaggggtggggggtggcgggggaccgcgtttgaagttgggtcgggccagctgctgttctccttaataacgagaggggaaaaggagggagggagggagagattgaaaggaggaggggaggaccgggaggggaggaaaggggaggaggaaccagagcggggagcgcggggagagggaggagagctaactgcccagccagcttgcgtcaccgcttcagagcggagaagagcgagcaggggagagcgagaccagttttaaggggaggaccggtgcgagtgaggcagccccgaggctctgctcgcccaccacccaatcctcgcctcccttctgctccaccttctctctctgccctcacctctcccccgaaaaccccctatttagccaaaggaaggaggtcaggggaacgctctcccctccccttccaaaaaacaaaaacagaaaaacctttttccaggccggggaaa

SEQ ID NO: 22529 - DNA, 1040 bp, Artificial sequence
  DNA replication origin
caaaacggggagtcggagaagtgcgcagcagccgcggcagctccgcgacgctccctttggctactccttcgcgcactctaactcactcactcttttttggatttcgtcatcttttcaaaaaatcaataaaaatattctggaggctccgggggtccacttcttggtctcatccggatccccagatcctcctctatcattcccgacaattggaaaaaatgtctgggggggtccctgcggcccaggggccgcttttgggggggcgggtgaggagaggtggggaagagagggggagggaggagaggaggaagagcgccgcagcctcggcagctggagtcggagcagggggggatggtttcaaaaaataattaaaaatcgaggaaatatcctagaaaagcccttttggcgtgaaaaccccaaagaagagccaggcttcccgaaacagaggtttcgggtgccagaaaggtctgtattccgacccctggggctttggatcccgggaggaaacttgaaggggtgagcgccgcggcgggagtgtccggctgcggcccacaaggacagaaactagggaacgcggtgacgagcgaggggaaagacgggagcagagagccctggaaagaggcacggggggctcccacctctccttcaggggtgacccggtatcccccctacacacaccccctcccccccttcctaccccacccaaatctccgcaccgaggaagctggaaaaccaaactgtaagtaatcttcgtgaggtggggggtgggggagagggcacgattagaagtggggtggccgggataatggggtgcgagggtaagcgggcgacgtttcccagcctttccaaagggagtttgcaaagcaacatggcgaaaccacggcaggtccagagctgtgcatacgtgggcacacggctcgctgggcaaagacttggagtgaggggcaagaagcggttcttttgggttcccctgaaacacgcgtttcttcaatgggacttccggggctcccgaattccccgtttctctccttctccctcctccc

SEQ ID NO: 22530 - DNA, 847 bp, Artificial sequence
  DNA replication origin
ttgccgagccggagggaggcgcatctggcgcttcggtaccagcggcagccgggggtccggagcggctggaggagcgcagtgggaactgggaagagctagcccggctggagggcggacctctgcgtccgggagccgggtctcaggcaccgctgggggcgaagccacgcgtcttttcgggcagccaatttcacacgcgcctgtgtgcggttccgggcatcccagtaagctctagcacccgggcgcgggtaacgggaagcgcagaaccaaatccccagcgcccaggtcacctccccagacccagccttgcagggaccagggctttagggctcacggacccaacggccaggtcagaccgcgaaccgggaggagcgcgggccccaccctaaagagggcgcagccgggagctggggagcgggtgccgcgctccagagattgtgtcgtgggcgccgtcctagtggcggggagcgcacctccgagggggcatgagatcggagaaatcccttacgctggcggcgccgggggaggtccgtgggccggagggagagcaacaggatgcgggagacttcccggaggccggcgggggcgggggctgctgtagtagcgagcggctggtgatcaatatctccgggctgcgctttgagacacaattgcgcaccctgtcgctgtttccggacacgctgctcggagaccctggccggcgagtccgcttcttcgaccccctgaggaacgagtacttcttcgaccgcaaccggcccagcttcgacgccatcctctactactaccagtctgggggccgcctgcggaggccggtcaacgtgcccctggacattttcctggaggagatccg

SEQ ID NO: 22531 - DNA, 1679 bp, Artificial sequence
  DNA replication origin
ccttacgctggcggcgccgggggaggtccgtgggccggagggagagcaacaggatgcgggagacttcccggaggccggcgggggcgggggctgctgtagtagcgagcggctggtgatcaatatctccgggctgcgctttgagacacaattgcgcaccctgtcgctgtttccggacacgctgctcggagaccctggccggcgagtccgcttcttcgaccccctgaggaacgagtacttcttcgaccgcaaccggcccagcttcgacgccatcctctactactaccagtctgggggccgcctgcggaggccggtcaacgtgcccctggacattttcctggaggagatccgcttctaccagctgggggacgaggccctggcggccttccgggaggacgagggctgcctgcccgaaggtggcgaggacgagaagccgctgccctcccagcccttccagcgccaggtgtggctgctctttgagtacccagagagctctgggccggccaggggcatcgccatcgtctccgtgttggtcattctcatctccatagtcatcttttgcctggagaccttaccccagttccgtgtagatggtcgaggtggaaacaatggtggtgtgagtcgagtctccccagtttccagggggagtcaggaggaagaggaggatgaagacgattcctacacatttcatcatggcatcacccctggggaaatggggaccgggggctcctcctcactcagtactcttgggggctccttctttacagaccccttctttctggtggagacgctgtgcattgtctggttcacttttgagctcctggtgcgcttctccgcctgccctagcaagccggccttcttccggaacatcatgaacatcattgacttggtggctatcttcccctacttcatcaccctgggcactgagctggtgcagcagcaggagcagcaaccagccagtggaggaggcggccagaatgggcagcaggccatgtccctggccatcctccgagtcatccgcctggtccgggtgttccgcatcttcaagctctcccgccactccaaggggctgcagatcctgggcaagaccttgcaggcctccatgagggagctggggctgctcatcttcttcctcttcatcggggtcatcctcttctccagtgccgtctacttcgcagaggctgacgatgacgattcgctttttcccagcatcccggatgccttctggtgggcagtggttacaatgaccacggtaggttacggggacatgtaccccatgactgtggggggaaagatcgtgggctcgctgtgtgccatcgctggggtcctcaccattgccctgcctgtgcccgtcatcgtctccaacttcaactacttctaccaccgggagacggagcaggaggagcaaggccagtatacccacgtcacttgtgggcagcctgcgccggacctgagggcaactgacaacggacttggcaagcctgacttccccgaggctaaccgggaacggagacccagctaccttcctacaccacatcgggcctatgcagagaaaagaatgctcacggaggtctgacccatgcaggcagggcctgcaggaggggagcactgagctaacagtctcttaggcttccttctcatttccactactcactctagcttcagttgacttcttgactctc

SEQ ID NO: 22532 - DNA, 906 bp, Artificial sequence
  DNA replication origin
gcggccgccgcagcagcatccgagacgcgccgggcaaactcgccgccctggtccactcgtccgacgcccctctcagttggacaatcgctttacggagcagctacggcgaaaatgttccttccctacccccattctcaccggttgccagcaacctggagacgccgtcctctctccggtgcagggagttccggaggatgcggggcggaaaagcaaaataccaccctctctcgaagctccgaggcaaatgacgataaacagcactctcgccccctcctaacactatgggagcccttgattcgatcccgaaggaggcgggcgggcgagagcctggatctacatggctctccagttcccttcgctctccgcaccccagcgcggacctcgccaaggctacgcggcgcgccaggagcccttaggagcttggagtggagcagggtgcgtgcggcggcgggtccgctcggtccatttctgggcgctgcaagatcagcagaaacctgagaaagcgcctggaataccgagcagcgattggcccacccgggcgtgggttggggagggcgggggagggcaggagcgaggaggtggatggaaaatatgagggggtggtttggaagagagcggggttgtcattcagttcccacccttgccagcacagctttttcctctcctaccagaaaagccgaccgctaactctacttcccctgtggcccgccgccccgcccacgaacggcccctagcggctcgcgaccttccccgggaatttcacattggaaatggtcaggtccgacgcaatgcaggcggtggtgtttctggcaaaactcctccgacgggtttgcttttgtgcagtcccacagtaaccctcttcgatcgcactgctctgcgccccatcccgctcctcccccaagaagg

SEQ ID NO: 22533 - DNA, 1223 bp, Artificial sequence
  DNA replication origin
gatccaggctctcgcccgcccgcctccttcgggatcgaatcaagggctcccatagtgttaggagggggcgagagtgctgtttatcgtcatttgcctcggagcttcgagagagggtggtattttgcttttccgccccgcatcctccggaactccctgcaccggagagaggacggcgtctccaggttgctggcaaccggtgagaatgggggtagggaaggaacattttcgccgtagctgctccgtaaagcgattgtccaactgagaggggcgtcggacgagtggaccagggcggcgagtttgcccggcgcgtctcggatgctgctgcggcggccgccgcggctcccgccagggcactgcaaagacgacctgccgcattcccactcgggctctccgctgactcagcaccgcccctgcgccaagccagccggccaggtagggggttccccagctcggggatgcagaagcgggggttggggggaccgggtgggggaggccgggggtgcggggatgctgtccgggaccctgagcttcccccggcgtctctcggcgcttttccgatctctagtttaacgaagttgtaaacagatcggctgttgggcattggggaaagtgggatggaagagccccaaacttggatttccgggtgtctgcgtgtcgtctgtccgtgtgtgtgtgatagccctagcaaacgtccagtgctttctcaagctagaggtctgtgttcttcggtgtctgtaggtccgtcccatctgaatgcttctgattttctacccccgtatcactttctatttctctgcagcgtgcatcgatcgccctggtgggagcttagaaggcggcaggcgaagaggggtaggaggggggagagccgaggagaagcagagagggtggcaggcgtggggatctgccgagccggcactgcaccgggtcctaggaaggctctcggaggggaggggaggccagggcgacccccgaagcaatggcccagtccgctagaacggcactgcgttaaggcacctgggatcaggaagaaatatctaaacaacaacaacagaaaaccaacaaacccccaaacccaaacccaaccctctgcaaaaagctgcacccggcccgcaggcgagggggattccaaactgagtgaaaggcagggtggaggggaaggcagcgagaggcaaagtcgcagatctcccgacctgctcgtgttgaagcacctccccctgggcgtg

SEQ ID NO: 22534 - DNA, 1281 bp, Artificial sequence
  DNA replication origin
tgtggcctggccgcagcctgcccgggcctcatcgcctcctctgacggtcatggcaccgccgttctccaggggcaccagggcgatctccatggcgcgggagcagagggcatgctgcgccccagctgaccggctcccgcgccccctactcacgctccgcgggcgcctggcgtcaggctccgctccagcggtcggccggcccctctctggggagagctggggttgctggcgcgatcccctcgcttggccctgacgtcaagaagccgctgccctgctctctgcctctctctcttctggcagcccgttaccaagcagccgaaaagcctccttccagcagatgcaaccttcagccgcccctctctggctgcgccgcgcttggcctccaccctcggcgcctcccccgccttcccctcctctccccctcctcccgcttcccctcccgggtctcgtggcagcgggtgtctccccggagggcgcagctggggcccctagcaagggaaaggaggggctgagaagggtgcagcccagcggagggagggaaggagtggggaggatggaggaacaggttgtaccgacagcgctgaaattcccagggcaaccagatgagaatagctctggatttcagttcacctgggaacccgctggaagccgagtggactccaggaggaacgaagtgccttgggctaaagggacgaggctttgagctgagtcggagtatgagagacagagacgggagacaccagtcctttttattttggagaaataacggtatttctttgggaaggattacagaagggaggggggccacgtagttacggaccttgaaatacatgtatcaatggagaagcatctctcttcccgtcttcctacagatccacaaaaatgtacaagggggttggaaccctgcaggattcccatgccctagcctgtttccagtacagacctggtggcagcccaggcaagcagcctagtcaggagatgagctgtctggtctcaacccagcagaacccctccacccgctccaacgaatcccatttgcaaaaaccacagcagggaaggggagaagcgatttttacaatcctggtgagggctaatcctgcctggtgaatcttggaccgagcaactgcatctaggtccatgaaggagactgagggtggaggtggcttatgagagggagccagggaggttgtccaatctccaaggctggagcattcccaagaatggaataataacaaccaatacttacttggctctcattatgcaccagcccactctcagcacttt

SEQ ID NO: 22535 - DNA, 1060 bp, Artificial sequence
  DNA replication origin
gtcagcctctgcgaagtagacggcactggagaagaggatgaccccgatgaagaggaagaagatgagcagccccagctccctcatggaggcctgcaaggtcttgcccaggatctgcagccccttggagtggcgggagagcttgaagatgcggaacacccggaccaggcggatgactcggaggatggccagggacatggcctgctgcccattctggccgcctcctccaccccctggctgctgctctgccagttcggtgcccagggtgatgaagtaggggaagatggccaccacatcgatgatgttcatgatgttccgggagaaccctgccttgctggggcaggcgaagaagcgcacgagcagctcgaaggtgaaccagatgacgcacgtggtctccacgatgaagaaggggtcggccagggtcctgggcaggagcggtgccaccgtagggccagagggcggggccatgaccccgctgccgttggccccaggggcgggcgcgggaggctggtggggcgccggagggtggcggagcagctcacgttcatccctgaactcaggcagggtctccaagcagaaggtgatgatggagatgaggataaccaagaccgagacgatggcgatggcccgcgcggacccagagctctccggatactcgaagataagccacacctggcgctggaactcgttgcggggcaggggcttctcctcttctttaatgaagccctcatcctcgcggaagcgctccatggcctcgtcccccagctggtagaagcgtatctcgtccgcgaacacgtccagggagacgttgaccggcctccgcaggcggcccccggactggtagtagtagaggataccgtcgaagctgggccggttgcggtcgaagaagtactcgttcctcagggggtcgaagtagcgcaggcgcttggcggggtcccccaggagtgtgttggggaactgcgccagggtgcccagctgcgtctcaaagcgcagcccggagatgttgatgtggacgcgctggtggtgcagggacgccgtgcccagagcctggtcctccaccgtg

SEQ ID NO: 22536 - DNA, 1448 bp, Artificial sequence
  DNA replication origin
gaacgagtacttcttcgaccgcaaccggcccagcttcgacggtatcctctactactaccagtccgggggccgcctgcggaggccggtcaacgtctccctggacgtgttcgcggacgagatacgcttctaccagctgggggacgaggccatggagcgcttccgcgaggatgagggcttcattaaagaagaggagaagcccctgccccgcaacgagttccagcgccaggtgtggcttatcttcgagtatccggagagctctgggtccgcgcgggccatcgccatcgtctcggtcttggttatcctcatctccatcatcaccttctgcttggagaccctgcctgagttcagggatgaacgtgagctgctccgccaccctccggcgccccaccagcctcccgcgcccgcccctggggccaacggcagcggggtcatggccccgccctctggccctacggtggcaccgctcctgcccaggaccctggccgaccccttcttcatcgtggagaccacgtgcgtcatctggttcaccttcgagctgctcgtgcgcttcttcgcctgccccagcaaggcagggttctcccggaacatcatgaacatcatcgatgtggtggccatcttcccctacttcatcaccctgggcaccgaactggcagagcagcagccagggggtggaggaggcggccagaatgggcagcaggccatgtccctggccatcctccgagtcatccgcctggtccgggtgttccgcatcttcaagctctcccgccactccaaggggctgcagatcctgggcaagaccttgcaggcctccatgagggagctggggctgctcatcttcttcctcttcatcggggtcatcctcttctccagtgccgtctacttcgcagaggctgacaaccagggaacccatttctctagcatccctgacgccttctggtgggcagtggtcaccatgaccactgtgggctacggggacatgaggcccatcactgttgggggcaagatcgtgggctcgctgtgtgccatcgccggggtcctcaccattgccctgcctgtgcccgtcatcgtctccaacttcaactacttctaccaccgggaaacggatcacgaggagccggcagtccttaaggaagagcagggcactcagagccaggggccggggctggacagaggagtccagcggaaggtcagcgggagcaggggatccttctgcaaggctggggggaccctggagaatgcagacagtgcccgaaggggcagctgccccctagagaagtgtaacgtcaaggccaagagcaacgtggacttgcggaggtccctttatgccctctgcctggacaccagccgggaaacagatttgtgaaaggagattcaggcagactggtggcagtggagtagggaatgggaggcttgctgaacatggatatctacattataccgcagagtat

SEQ ID NO: 22537 - DNA, 762 bp, Artificial sequence
  DNA replication origin
aaagctctggggcaatgggacagttcggtccgtcgtgggacctttaaactccgacctggctggctgcgcgggtgcccaggtctcccggcctcccacgccaccgctcaaagtccgagaacaggctggacgataccgcaaggagatcccctgggatggccgggcccgggtgcccgccgctccccggaggggtcccagatgtgcgggctgcgtacggagctccaacatctgcgcaaaggcccagggtggggtggccaccgggtgggcgctggccaagaggagcccggggcgcgaggtcttttctgaaaaaaccctttcggggaactccaacgcaggtacgcggcgcgtggcagtgagtcccaactcccaaaactggaacgcgaggttccgggtcctgagctgcgcgtcccctccccccagcccacgcccgggccagagtggtgctggggcgagctgagaatcaggctcagcggccggcagagtgcagggcgtgtgcaggggagctgccgcggcacctccccgcccggagttctgtctgccacccccttttgttataggatgcgctaggagctttctcggaggagcaggcgggtcggttgggagtggtgggtggttgattctgttgaatctctttcctgctctttcgtcgtccccatttcccctcttctgcccccaccctttccaatccaggtcccttaaacctgatcactttcccagattgagggaagcttcttgggcagccgagggacaagaggggaggaggtg

SEQ ID NO: 22538 - DNA, 926 bp, Artificial sequence
  DNA replication origin
accactcccaaccgacccgcctgctcctccgagaaagctcctagcgcatcctataacaaaagggggtggcagacagaactccgggcggggaggtgccgcggcagctcccctgcacacgccctgcactctgccggccgctgagcctgattctcagctcgccccagcaccactctggcccgggcgtgggctggggggaggggacgcgcagctcaggacccggaacctcgcgttccagttttgggagttgggactcactgccacgcgccgcgtacctgcgttggagttccccgaaagggttttttcagaaaagacctcgcgccccgggctcctcttggccagcgcccacccggtggccaccccaccctgggcctttgcgcagatgttggagctccgtacgcagcccgcacatctgggacccctccggggagcggcgggcacccgggcccggccatcccaggggatctccttgcggtatcgtccagcctgttctcggactttgagcggtggcgtgggaggccgggagacctgggcacccgcgcagccagccaggtcggagtttaaaggtcccacgacggaccgaactgtcccattgccccagagctttactcagtggtggatgctcctgatgaaatttgggacgcttgggagttgaaggttagggacaggaggggcgagggccgagggcatgggatgggggagtaggattctgcttgttgctctccgcgggagtgggtgcgcgtccaggaggcgctgcttctttgcgggagtttggctgctgcgttcattcgtcgtctgcgcttcagatgcacggcactgagacccttgcgtccgacggtgtcggggctgtggactagaaaggatcccttttgctggaatcgaggctggggtgggattgccggtgggggaaacaccgaaaagatcgtctg

SEQ ID NO: 22539 - DNA, 1250 bp, Artificial sequence
  DNA replication origin
tgagtccgaatggaggttgctcccgggagcgccgggctcagagctagagagctcgggagactgtgcgcctgtggacttgtttatgtgtgtgaagaggcgggggcgagggcctgctgagaggggaggggagcctggaaggggtgggtgtttctcctggagcctgatgtttgtaactcagctgattatggagtgcactgagcgacctgctttttaaataaagaggtgcccgctcctaccccgcaaaacagcgaacgaggagaacatggaagcgctctgtcctaaacgtcaggatgggagaaagttgtaacatagaggagacttttccagaggtcctgttttcacaacactcagaagttctccagcgtactcagcctgcctcccgcctgccctcaattcctttttgacatgtcacacaaagaaagctgaaaggtagaatgtggaggataaactccaaccccctctgccttgggcgcaaacacacagacttaggtatcgtgttaggaggtaagggggttggaaaataatgcaggctccggtagacagtgttgaagggagatagaaagtctggggtatttcccctagggagagtgtgtgggattttgtgttggtgaggactggagtgtagctggacttagagggtttggttgtgtgtgaatgggatatgcttatctatggagtgagattgtgaccattgagtgagtggtcagggagggatggggatgtttttccaaagtgtgtgtgtgtgtgtgtgtgtgtgtgtgtgtgtaggggaaggtggcaaaagagctggagtcctatccctctttggtgcctgggaggtgtgtgtttctggggagtctgtcggatgggcatctgtgtgcttagcgggagacaagagcttgcaggaacataggtgtagctaatgcgaaatctgtgcctatgaagggtgtcagagcaggaggagaggtgcagcctgttgaagacagatggcttgtgcatgcctgcacaaacacatggagtgggtgtggtgtaggagggcggctgtgtgtgtgagggaaaggtggatgcatgtggaaggttgggcgcctgaggattaccaaagggatgtgtgtggggggtgggggaagattatctgaggagcacggggtttgaacttcatgagggtgcactgggaaatttggctggaatggcactggggcatgtagggggtagaaaagtgtgagctcagatcctctttatggaaagacaaagcatttgcagggaaggacacc

SEQ ID NO: 22540 - DNA, 1364 bp, Artificial sequence
  DNA replication origin
gggcatgtgcacttccattcacattagagactgctccaccctgccaccatctccaaagccagtgacctccctgcactaacctacatttctttctactgccagggaagtgaacatgcgggtgctatcaatgcagcaggtggccaagacccagcaccatgggaaagacgaaggcacgggcactcagtatcacacagcgcttcctggctcaggaagaggctctcagaacaggccgtgatcacactggccacctgtaccttgtcccaagaggggtggcagtgcctggcaccctggccaacacaggctgggacaggagggctacaagcgacaggccagtacccgtcttgtgggaaacaagtcaggcagtgtgtgtgtgtgcgcgctcgtgtacgcatgagcacacaacatgtgtctatgtgtgtctgtgtgtgagtgtgcattgtatgtctctatgtatgtagtgcctgtgtatgactgcagatgtgtctgtgtgtagtgtgtgtatgcatgcatgtatgcctgcgagtgtgtctgtgtgtagtgtgtgtatgcatgcatgtatgcctgcgagtgtgtctgtttctctgtgtgtgtgtgtgctgtgtgcatatctacgtgtgtgtggtgtctgtgtaagcccgtgggtgtgtctgtgtgttgtgtatatgtatgcatgtgtgatgtctgtgtatgtttttgtgtgtgcatgtgcatgtgtgtagtatgcatgtgtgtgcatgtgtctctgtatgagtgtggtgtatatgtctaggtgtgagtgtgtctctgtatggtgtgcatatgtgtgtggtgttattctgtgtgtgtgtgtggtgtgtgcgtgtggtgttattctgcttgtgtggtgtatgtctatacatgtgtgtgcatgtgtgtattctgtgagtatatctgtatgtgtgcatgtatgtgtatgtctgtgtgtctgtatgtgtgtgtggtgttattctgtgtggtgcatgtatgtatgtgtgtgtgtgcatatatgtattctgtgaatgtgtctgtgtgtgtgcatgtgtgtgtggtattctgtgtatctgtggtgtgcatgtatgtgtggtgttattctgtgtgtgtctgtgctgcatgtatgtctgtgtatgtgtgcatgtaggtgtggtgttgttattctgtgtgcatctgtttggtgtgtgtgtctgcgtgtgtatgtacatgtgtgcgtggtgtgctgggcaagggatgctgagaaggggagatgccaaaaagcagaagggatcaagagcctgcgtctactcccagcctcccctttggccactgtgagtccctgggcaagtctgtttttcactcccagtccggcatcaaattgctcctccagcaagggc

SEQ ID NO: 22541 - DNA, 1416 bp, Artificial sequence
  DNA replication origin
aatatcactgtaagatttctctactaggtgacttgaaatggaggactcagattcctcatttggtagagaaatgtctagctgctgtgctccaaaaggagggttatagccacgtgacctctaagggttcccctcatttcctctctctagaacctaagaataagaagggactctcttagacctagatctgcccaacagcccctcttccttcttctgtccccacgtcccctcctgtccccatcgcaaccaaggaaggatcatttccaggaagcacaaggatgctatgagaagcaagtgccctgagtaaagcctcttagaggggatagaagaaggagagacaactgctaggtgcatgccccactcagagcaaattctaatttgcttcagtcaagtcaagacttcttcaagaaagaagacttccttcttaggactctttctgtaaaggaagctgttcaggtcctatttcctccgcaggacagagaatgggcactggctatgaaggactaaatagaaaacgtagggagagaaaacagcaggtggaaggctccctgaaaaaataagctgtgctggactacacacacacacacacacacacacacacacacacacacacacacgcatgcacagggagggaggcaggaaggagggggtaagaggaggggaggagaggcacaggaggaaaggggaggggaagtgggggcctctggcttgggcagtgctttgcaagcagtgtgaatgacactccagtggcttgctaatgggtggcagatgtgtccaggtatggatgttttcagacctctggggggtacctggggtgtgctggtggcagactcagctctttatcctggtaggcttcaaaaaataccagtaattgccctatgggccgtgttgtgaaaaagaagcccttggtaaggaagggagaaaggtggcgttctctgggtagaggaaggctgtgtgtgtttgggtgtgtgtgggtgtggggagaggagaggttagatgggaaaaacactctgtgtgaggcccctcttctgctgcagggtgggggtggggagcggcagaaacaccagcctccaggactaagtagggactactatcgtgtaactgggaaaacctggacatgacatcacccctctccaacaatgtagacattttcacttcccatttctctgggattgtcactgccagatagtaagggcctagaaaatgtggtgtgagattcttttccccaaaaatcacttttgcagtgaagaccagtgatgaaagtattgatgaggctggggaggtgagggtattgaggagtgagtgaatgtgtgtgtgtgtgtgtgtgtacgtgtgtgtgtatttggggttgggattgggagacggactaggggaaaaaaaacaatggcaaaaacatcctttgtttagggtcttgtggga

SEQ ID NO: 22542 - DNA, 951 bp, Artificial sequence
  DNA replication origin
tggttcccctcctgcaagcctgagcaactgtcttctctgctatggtggctctgagtctctcccttgtgcctggagcttcatctggttgcccaggtgacctctcaggtggctgcagaggcagctgggtttcaaaccagtaataaacagggaaacacccacggggagaggccggtccctcccctgcttcatcgtgttctctctcctcctcttctttccacctccccacctctggagtggaagacagcagaagtcagttccctgctgctgtctttgaaagggccctcaccagtggctggagaggaggatgtggggctgtgaatagtgcctggtgaattcccgtgggtgggagggtaggggtcgggtctggtgactagaaattggtctttgttccaatggatccagagaacctgcctgtgagtattctgtgtttaaatatatagtgtatctgcaggcagaggtgcagatctgcaaggaggtgagcgtgtgtgggccatggtgcctgtggaagggggtgtgtgtgttagagcgcactcgggtagatacgcgtgtacacaggccccttcacctgtatggtgcaggagtgctggtgcagggagacaagggtagaggtggctgcgtgtgcatctgcaggtgcttgcatgtgtgtgtgcaggcgtgggcgtgtggttctgtgtgtggaggcaggagtgcggttgtgaggggtttgctgctgcaggtacagtctgtgtgtgagtgtgtgtgtgcatggatgctggagcatgtgtgaaggcaccgatgcccagactgtcaacaggtgggtggagggcctcgcaagctggcatgacagattaacttaggccattcggtccttttactgggggcactgggggcctttgggcctgagaggcttgcttctgagtccgtttccctgagcccagagcatagatcagcctcctctgtttctcacccctt

SEQ ID NO: 22543 - DNA, 1570 bp, Artificial sequence
  DNA replication origin
accatcctggctaacacagtgaaaccgtgtctctactaaaaatacaaaaaattagccgggcgtggtggcgggcgcctgtagtcccagctactcgggaggctgaggtaggagaatggtgtgaacccgggaggtggagcttgcagtgagccgagactgcgccactgcactccagcctgggcgacagagcgagactccatctcaaaaaaaaaaaagaagaacgaatgaaaagaaagaaagaaagaaaagaaagaaaggaaggaaggaaggaaggaaggaaggaaggaaggaaggaaggaagaaaggagtgagggagggagtgagggagggagggagggagggagggagggaaggaaggaagtgacgtaggtaggtagggagggagggagggagggagggagggaaggaaggaagtgacgtagggagggagggaggaggacagctggacattatgtgcctctgggtgtgatgcacatggcacccttgatcaggtattcttgcctccctactgcattgaccttgaatgtaatgaatcccctgggtctaacttctagtctactggaaatacaggggatagaggaacacattatgcaataccataaggtggctgctagtcaaatccagaattcatgacattctacaggacaaatgacccagcttccccaacaaatcaaaggcataaaaatggggagtggcattactatagattaaagacacacaagaaacattaatagaaaaacagcaaggcaggaggggtgggcaggaagacgagaaggagaacagagatataagaaagcagcagcagcaactgtagcctcctagacttgttcccgcttctccaaaactgcgtgcttagaatccctgagctggaagagcgtccagaggggaagagaggtcttaagcattccagacaaataaagatctgttccagccctaacaggctccaaggagagatgactgcagcttgtctgtcattcatgtcaggactcccctcaatgcagcagctataactatgctcaggtcttcctgctgcagttctggctcatttcagttctcactccgccactttcgcgcccttcactttcccactccatcaattaaatctttaatgatagctaatcttggtggctctttcacctataagactgctgtttgtaatgaaaatctgtaccattcgttgacactttattatattcagtttatagactattgtcatatatactaacaagggcatacataggaacttcatcttaacatttctcccatagcacctagcacagtgccaattctgttagaacatagtagttgcttagtaaatattggatgggcagatggatggatgaatggatgggtggatagatggataaactgacagcaataaataaatgagtaaactattaactgctcgtagccaggtgtggtggtgtgcacttgtaatctcacctactcgtgaggcagaggtgggaggatcacttgagcccaggagtccaagaccagcctaggcaacatagcaagacctcatctcaacatgtatgtataactattaactgatctctaaataatccatgcaatc

SEQ ID NO: 22544 - DNA, 905 bp, Artificial sequence
  DNA replication origin
cacctctggggttcaagcgattctcttgcctcatcctcccgagtagctgggattacaggcacctgccaccacgccccgctaatttttgtattttagtagagacggggtttcgccatgtcaggctggtctcgaactcctgacctcaaatgatctgcccgcctcggcctcccagagtgctgggattataggcatgagccaccacgcccagcctggaggattgttttgaggtggagcagaagtctagggactaaacgcacaaggtgtactccacaatccccaaggtaagtcctctggcatgaacgcatgctatatgaaggaagactaagactggagggaagttgggatgaggttcaggggtcttcagaagtgagggggtgagcactgatgctggagcagtaggaatggggcccctggaaggttcttagcagggagcaaataggatccaagagtaacttcagggggtgggttttgggagctgcatgaggtatgatggcagggagagcatctgcaggaaaatgttgacgttgaccgataagaaggtagcgaggccttggatcaagcgatagcagtagaaatggagagtggaagccagaagccagagacgctgggaaagcagatggactagtgggatgtttgagaggaggaggggctgttgcagatggccctggagttctgaacttgaatgcctgtgaggacagtgacgcaagaacagcaagagggccctctggaggtagagggcaagtgatggctttggttttggccttaatgactttgagttaccatcttggtgaacaaatggaatcaacagcttgaaatgggtctggaaggtgagtgagaggttggggtggagagaaagacgtacatggaggtgacagtttcagccatgagagtagcgaggatcccta

SEQ ID NO: 22545 - DNA, 1697 bp, Artificial sequence
  DNA replication origin
ggtcgatgggactaggtgccagtggagcagcgggcggtgctcgtcggggagggtccggccgcacaggagcccacggaagaggggggtctcaggcatggcgggctgcaggtcctgagccctgccccgcggggaggcagctaagacccggcgagaaatcgagcgcagcgccggtgggccggcactgcttagggacccagtacaccctccgcagctgcaggcccaggtgtaagcccctcgttgcccggggccggcagggctggccggctgctccgagtgcagggcccgccaagcccacgcccaccctgaactccagctggcccgcaagctctgcgcgcagccccggttcccgctcgcgccactccctccacacctccctgcaagctgaaggagccggctccggccttcgccggcccagaaaggggctcccacagtgcagcggtgggctgaaggcctcaagtgccgccaaagtgggagcccaggcagaggaggcgccgagagcgagcaagggctgtgaggactgccagcacgctgtcacctctcaatatcaggtctcttctcaagtggcacctgtcgcagaggccctccggggctattctgcataaataccacccactcttgtcacttgctgtcccccttacattactttattctcttgctagcccttatcaccatctgatttatatttgctttcttgttttttggctttttccctccattaagtgtaagctctttgtgtgtcttgtctggcaatctgtacctccactttcgacagcaatgccagcaagcacacagccggggctcagtagacgcttataggacgctgagtggcgtgtgctggatgtgctgctgtgcagagcccagaagccaagctgcccctgcatggcgttcagaggagggatggctggacctgatactcggagagtgacggggagggagtgcttggcctgggtctgctcagatggccgccgggccagccaggccattgctctgacctcagttctggagagttcggattggtggcaagggaaagggcaggagctgaggaatggatggttccattaatcatggaactttgcccagaggggtcagaggagtaaggcaggggatagagggagagatagcattagacagaaggttctggtggcaggggaggggctgggggggagaaaagggatcggggtgtgggttctggctcagccttttccagactttgtggctgctgctgcagtcccagagtctactggggccccgctgtctgcttcctggcctggctgtttgtttatttggccagtagtttgggcagccgtgggcctctcttgctgacctccaggggaggagttaagtacatactgcctctcaggtgcagcaactaaaaccgtacaggaaatgttgaggtgccagtcagcaagagggccagtcctgggcttcccctgccagggccccctaggagcagatacccacccccactctttctcatccccagctcctgtgggagtgaagtgggcttcctgtgctttccaacggaaactttacttggttctcttcacagccagcattgattcattctcttagttggcaaatacttgttaagtactccatgctaccaacgagctaggaatacagacaatcttggtgtagaaaaattcatctttaatgttcatagccttcctggtcagcacccattcctcctctcactc

SEQ ID NO: 22546 - DNA, 1557 bp, Artificial sequence
  DNA replication origin
gagcccctttctgggctggccaaggccggagccggctccttcagcttgcagggaggtgtggagggagaggcgcgagcgggaaccggggctgtgagcggcgcttgcgggccagctggagttccaggtgggcgtgggcttggcgggccccgcactcagagcagccggcccgccctgcgggccccgggcaatgaggggcttagcacccgggccggcggctgcggagggtgtactgggtctcccagcagtgctggcccacccgcgctgcgctcgatttcttactgggccttagctgccttctcgcggcgcagggctcgggacctgcagcccaccatgcctgagcctcccacccactccgtgggctcctgtgcggccgagcctccccgatgagcgccgccccctgctccacggtgccaagtcccatcaaccacccaagggctgaggagtgtgggcgcagggcgcggcactggcaggtagctccacctgcagcgctggtgcgggatccactgggtgaagccagctggggtcctgagtctggtggggatgtggagaacctttatgtctagctcagggattgtaaatacaccaatcggtactctgtatctggctcaaggtttgtaaacacaccaatcagcaccctgtgtctagctcaggatttgtgaatgcaccaattgacactctgtatctagctgctctggtggggccttggagaacctttgtgtcgatactctgtatctaactaatctggtggggaggaggagaacctttgtgtctagctcagggattgtaaacgcaccaatcagcgccctgtcaaaacagaccactgggctctaccaatcagcaggacgtgggtggggccagataagagaataaaagcaggctgcgtgagccagcagtagcaacccgctcgggtctcctttcacgtggtggaagctttgttctttcacgctttgggtctgcactgcttttatgagcagtaacactcaccacgaaggtctgcagcttcactcctgaagccagtgagactatgagcccactgggagaaacgaataactcctagacttgctgccttaagagctgtaacactcaacgcgaaggtctgcagtttcactccttaagccagcaagaccacaaacccaccagaaggaagaaactccaaacacatctgaacgtcagaaaaaacaaacttcagacgcgccaccttaagagttgtaacactcacctcaccgcgagggtccgtggcttcattcttgaagtcagtgagaccaaggacctaccaattccagacacaccctgggccccctttttttctttctctacactttgtctctgtgtctcttttccaagtctcgttccacctaatgagaagtgcccacaggtgtggaggagcaacccatcccttcaggcaggtgcctgtaatcccagctactcaggaggctgacgcaggagaattgcctaaacccaggaagcggaggttgcagtgagctgagatggtgctattgcattccagcctgggcgacacagcaagactccttccccataaataaatactctccagct

SEQ ID NO: 22547 - DNA, 1001 bp, Artificial sequence
  DNA replication origin
tgattacaaaagcaagatacagtcattacagaaacaaccgaaataccaagaagtgaaaggaacagacctcaaaattctgctcaccagaaacagccactgttagcacattgctgttatttgcctgtttattatcagtagacttgtctcattggttcaaaaacatttttcagtatctattagggtatttcattaggggtaggagctgaaaaacatggattagtccttgtttctgctcagggaccagtgtgggaggagacaggcagccagacaatggtttgagggtgataggtgcagttacggggagaggcttgggggctaagaggctaaggagaggcctctgacccagactgggagatgatgctgcagaaccacagggaaagttgccgccaagggagaatcctgggcaaaggctggggcaggggctgtccgggctctgggctggagcctggagtcacggggtagtttgtgggaaggtgagaaagagccttgtgctcctggactttgcactctgagcattaggggccaccgaaaggttcaagcaggggaatggttggatctgctgtgttttcagaggttctctgcctgtgttttaggtagttgggtgggggaaggccggaggggcaggtaggaagccccttgaggaccaggaccattgttggcatctccagtccttggctcagtgctttacgggattgcatggaacatggagatgttgtatttggggagacgcaatcaggtaatatgaggggagcagtggtagatgaaagttgagctgaggaccaggtgcaaatctgctaggaggctgtggagtagttcaggtgagagaagaatgaatgaaggcggggcaatgggataaagcctagagaaggcagggcaaaaccccatgaggtgtcaggccgggaaggggagggagagatcagaggcagagcagcagaagctagtaacaagtaggggcacagggcacatccccacgtcaatctgagtccgagaggctccccaga

SEQ ID NO: 22548 - DNA, 1205 bp, Artificial sequence
  DNA replication origin
ttgtctggctgcctgtctcctcccacactggtccctgagcagaaacaaggactaatccatgtttttcagctcctacccctaatgaaataccctaatagatactgaaaaatgtttttgaaccaatgagacaagtctactgataataaacaggcaaataacagcaatgtgctaacagtggctgtttctggtgagcagaattttgaggtctgttcctttcacttcttggtatttcggttgtttctgtaatgactgtatcttgcttttgtaatcataaaggacagtaaaggaaacttcattttgaaaataatacaaagggattcggggacttcaaaagaaggtgactctcctcgtccactccagagaatcaggaaaggagtgtttaaagacccacagaattcctacaagtgacgttgggggggggccagccagccagggcgcatgccggccagcgagtggggtgggctctgggtccgggagaagtcagatcagtgctctgtacagggccttgagggcaagacgaggaatttcgacttaggtccttgaatctggagagctacagaaagtttgtgagctcaggagaagcgctccgagctcggcatctggagcagttcaaggcagcagcgagcaagtccaaagacgcaggagggagggtggggtggaggagtagagagaaaacagaagccgtctacagaccctttttccctctggggcaactaaacctcaagtgcaggaagcgcttggggactgcccagccctcagctgtgttattattcggtgataggtatttgctaattacttccaaaagcctcccatctgtcatcccacccagactgcgcgcttctaattcctcctaccccacatgctgtgcccaatgaaaagtatggtcagcgagcgaaggtttgcaaggagacagacgagggcgaaattaagccaggcggcttccctttaaatcctcgcaaagcagaagggcccctcactctggcagcaggccttggccaaggggcctttagccctgacgacccggggaagagtctcccaaagcagaacgcccggtccggcgcccagaccaaacgcgggggaaccggaagggcgaggcctccacgtaagtccgcggtaaaagtggcagggagtggctgcctgcaaagaccccaagacggcttgaagaaggagtgggtggcgggtgggggttagggcgactaggcggg

SEQ ID NO: 22549 - DNA, 926 bp, Artificial sequence
  DNA replication origin
gctctgtctctgcgatcctgggtaaatcaccccatctctcttcctctgctgcctcactatgaataagagagctggactgcatgatcttcaaaagtcattccaaacatttccagtgtgagtgatttctgtttcagactacataggtcatcagctgcacctaggctggggccaggcatagggggttctgaatacgagtggggtggcaggctgaggacagtacggacagattgcaggccagcaggccacagacagagtagataccagtggccctgtgagcctcgcatcagcttcctgcatatgccatggggcagatgggggtagggaggcacactgtggcagtctgtgtttccctgcagtcccaaacctggatgcagtctaggcagacagctgaggactaaccaacacaccagccgggagagactgtacctgggaggggagaggaaaactcccaaagttcaagggtgggtgaggccagctgccttcccgcatacttttctgctgccagggattggtgaaagaaagaagctaagcgtggcagctgggtggttgctggggtgggtggcaacacaggaggaggggtgcccacggccagcagggtctttttaaagcaagtcaagggttgggaaggagcacacctatatgccgtcctcactggggtgtgtgttatggtgactgatgcactgggggaagtcagtctctgcaaattggaaaaactgttcaaccaccccttcagctctggggaggagtgaatcttagaagatttccctaaggaggcttgtggggacctcagtgaccagctccagggggaataagtgcatttgtttcttttctactttttttgagacagggctcactaggtcacccaggctaagtgcagtggtgcaatcatgactcaccgcagccttgacctcccaggctcatgccat

SEQ ID NO: 22550 - DNA, 940 bp, Artificial sequence
  DNA replication origin
cggggcggggcaccccggctgcgcttccgcgcgtggccgcgagggggcgcggcaggacggggctgccagggcggccgcgggtgagtcagggcggcgccaggatgagtcagccctccgtgggcttaccgcgccccctccgcccctggcttccccgcccggccgcgccctggccgccggctcgccctgaccctcggggatcccaggctctgcgccgccctgcgccctcccgggactcccctgccgccaggagaccgcgcctcccgggaacacagggcagggcgcgcgggcctgggccaggccgttcccgcgggccctcccgtcgctcctttcctggggccgggcgtggcttccctcccagagcgggtttcggggccggccccggctcggcccggattcgagggacagctctgccaaggcccggccatgggcggccgccgcgggggaaatgtgccccctggctaacacgtggggagaaagccctctccgttcttgggtgtaccccggtgtttcggcctcttctcagagcaaatcaggaaaaaataggaactcctgggtgggtccccgcttggcaggttgaagaaggtgtcctgacaggatctggctcagaagccgagtgtgttaaagctgcagaaaacttgccaaacctgggccaccggcctcaccttggagatcccgcccacggacggacgcagggactctccaaaagtcccagaactcacaagtcagctctgctgggcctcccactcacaaggtgcatgcaaagtgcctaaaatagtgcctggcgtatagtcagcgctccactaagattgcattttacagatacaggtgaccctgagcaacagggcgttcaactgcgagagtacgtttattcgagaattttctgctgtctctgggacagcaagaccaaccctcctctccctcctccccctcttcctcagct

SEQ ID NO: 22551 - DNA, 1219 bp, Artificial sequence
  DNA replication origin
ccgggaggcgcggtctcctggcggcaggggagtcccgggagggcgcagggcggcgcagagcctgggatccccgagggtcagggcgagccggcggccagggcgcggccgggcggggaagccaggggcggagggggcgcggtaagcccacggagggctgactcatcctggcgccgccctgactcacccgcggccgccctggcagccccgtcctgccgcgccccctcgcggccacgcgcggaagcgcagccggggtgccccgccccgccccgtccgcgccctcctcggagcgccgagctggctttgagctctggcgagaaagcgccaatcggcggcaacccgggaatccaaggacatatggggtgcattggagtatttttccattttcttgtagataatgaggtctcgctctgtcgcccaggctggagcgcagtggcgcgatgtcggctcactgcaacctccacgtcccaggctcaagcgatcctcccgcctctgcctcctgggtagctgggaccacaggggcgcgccgccacacccgactaattgtttcgttttttgtagaggccgggtattgcggtgttgtccaggctggtctggaacttctggcctcagcccatccttcggtctcggctcccaaagcgctgggattataggcatgagccactgcccccgcgcccacttctgcttctaaaaaatgagtttcagggccctctcctggtaccccaagccaaggccaagtgggaactggaagctggaacagcccaactacccacccagcctgcagaggagagaccagaaatagcccttagcttccagggagatggcgagtgacctgatcctgcgcctggtcggcaggcccttgagagcagtggcctcctctgtcttgctctccacccgatcctgacttgtaagccccgtttgcccgcatagtcccacaatgtacgaaatgaatggatggatgaggggctctggggtgcaagggagaaggaagcaggcagaaaagccttcctcatcggggggcttcctcctccactgtcatccgcaagggactaaggtcctgaatgtgagtgcccagcagatccatgcctggccccagcaccctgactcacagccctctgcctgggacagttacccatttctccttcccggtggagctgggtcctgagatggtggcaaattcactggcgttgaacagagactggactaacgagggtgaccagca

SEQ ID NO: 22552 - DNA, 930 bp, Artificial sequence
  DNA replication origin
ccgcgcggatgaggaggctgcctagaataatgagaggagtgggtgcagagcaagacgggagccaggggccgagcaggaggccagaggaagacagcgacgaggagagagcgctggaatgggatgccctgaaaggatgttcatgagggggtgcggtgggggtgggggtggggcgtaacttctggaagcagccatgtggagcctggaggacaccaacctcatttcctgcccctaaggtgtgtggggaatgtgagaataagatcaaggctagatttgaggaagaattttctgaccccataggatatgaggcatgaagactggccactaaaggaacgctaggaagtatctcttttctttccggggaggtttaggaccagaactgactcccacccccactccttcacttccttctcctccagtcttttggaggtctgttaggcactgcctggcatcctttggtctaggtttcgttcactgaacaaacctattgagccccaggagctggccattctaggaactggagacacagcaggaacaaaacagaaggaggagttcacctcccagcagagggtttgtttaggtttgttcttggtgcaaagctatccaaagggagagttactcatgggtgctggaattgggatgtggagtgagttcagagagtgagtcactcttgctgcctaggggtggggaaaggtggagtggcagtggccggaaatggaaaaaggccagaacttggtgtttgaggactggggctgtgtggccttgagcaaatcatttgtttttcctgttgctgacctggaaagcagggaagagtccctcattccccacattgctgtggaattaaatgaatgtgttgctcaaataactaagagctatgcaaatgatccttatgccattccttaagtcttcactcccttctcctagtatgggcac

SEQ ID NO: 22553 - DNA, 794 bp, Artificial sequence
  DNA replication origin
ccttgcggtggctgctaaaatagatgctgtggggccaggcgcgatggctcacgcctgtaatcccaacactttgggaggccgaggcgggcggatcacaaggtcgggagatggagaccagcctggccaatatggtgaaaccccgactctactaaaaatacaaaaattagctgggcatggtgacgggcgcctgtagtcccagctacttgggaggctgaggcgggagaatcgcttgaacctgggaggtggaggttgcagtgagccaagacagcactactgcactccagcctgggcaacagagtgaaactccatctcaaaaaaaaaaaaaaaaaaaaagaaagaaaaagaaaaagatgctgtggaaggactgacacatgctgggcattgcatgaaaggaccatactttattttctttatttttaaaatttattttttaaaaagaaaatagagacaatatcttgctgtgtggcccaggatggactccaactcctgggttcaagcgatcctcctgcttcggtttccccaccttttcacttctccaaatcatggcacctcgtctgacagaagcactggatatttgagatagaagtgtcctgtggatgtgtggtcattataatctcacaaccatgaaacccaagaccctgtagttggcaggtggcaggtctgaggctcccagcccctcaccctgactgtggtctatttcctgccaatgaactcaacagtgattgatacggctccttacttcttcagagcatcctgaagttcaggaaacactttcagaagcagaatctccttga

SEQ ID NO: 22554 - DNA, 969 bp, Artificial sequence
  DNA replication origin
agccagccccgatgcccagcctgggactgggatcgagcggcccgcgggagccgggcagcgcgggtccgggcgaggagggcggggaccgggctggcccctccctaccgccagcaccgctcggggcagaggggcagaggggcggggccctggggaccgagcagcccccgccctcacgcagccaccgccttccccggagaggacagctcacgtggcggtgccctcctttccccttttcggtcgcacctgaactcgacacccgccggccgagcgggagggctgggaccgcgcgccctccactccgggccagacccccgcgaggcgctgcagtaatgagggctgagtaaggggcggggcgccgccgggggaggcggcgagggtgacaacctgtggcaggcacccctctctcctgctggtcgcggcgagtggccggccgtccggtcctccccctgcctcggcctagacccctaagcaggcagggagcccgcctgccagctggaggggcagggggccccgtcgctgtgtggagtccaaagtgtgagccttatctctcagaggaccggctggcctgcctggtggaaggtgatactggaaggctatcctggactttgcctttgctccagggataggcagctgaggcctgacccgcacttctcctatgacctaagactcaggtgggggcaccctcccagttcacctgcaaataagcccactcccggctacaccagggtcacccagcccttgcggtggctgctaaaatagatgctgtggggccaggcgcgatggctcacgcctgtaatcccaacactttgggaggccgaggcgggcggatcacaaggtcgggagatggagaccagcctggccaatatggtgaaaccccgactctactaaaaatacaaaaattagctgggcatggtgacgggcgcctgtagtcccagctacttgggaggctgaggcgggagaatcgcttga

SEQ ID NO: 22555 - DNA, 1661 bp, Artificial sequence
  DNA replication origin
cgccccgccccttactcagccctcattactgcagcgcctcgcgggggtctggcccggagtggagggcgcgcggtcccagccctcccgctcggccggcgggtgtcgagttcaggtgcgaccgaaaaggggaaaggagggcaccgccacgtgagctgtcctctccggggaaggcggtggctgcgtgagggcgggggctgctcggtccccagggccccgcccctctgcccctctgccccgagcggtgctggcggtagggaggggccagcccggtccccgccctcctcgcccggacccgcgctgcccggctcccgcgggccgctcgatcccagtcccaggctgggcatcggggctggctggcatcgccggggagccgacggcgacggggagccccgcgggcggggagggcggcgcagggcagcgggtgcggtgacacctgtgggcacaggtgagcggcgggagggctacgcggcccgggggcggggcggccgggacccggggcctggaagccggggcgaaggggaaggaaggcctggcctcccgaaggcgggaggaggggagccgggggctgggctgagacaggaccctgggtagggagcagtgcgagggagacagcgccctcagagggaggactattgggaggcggcaggagggacagcgaacgtttcctcctctgctcctgaatcggaggaaggtaagggagggctgaggcaggacctcaggcccacccggtcggggcacaaacacctgcgcagccttcttgagcccaccgccccttaggaggcctctcctcttccaggccctgcccactcgagggcgggccctccctccaggtttaggggggagggatggagccccacgcctggcccccagctccatggtggtattcccagagtctggggaggaccaaatatatagcccgaaactggagaaactctaattctatttggctggtctctaagggcagtggccggacagctggccccactcacctccctgtctgtggtcaggagggttcaggtaggagatgggcaagcctttcagtaaaggccagacagtaaagattagagacttcgcggcctacaccgtctgtcccaactagcaagaagcagtcacaggttattaggagaccagcagaagaggatggattccaacaaaactgtgtttatggacactgaatttgaatatcatgtaatatttacttgtcccaaaatattggtggcttttttgcagggggggcagcagttgtttcaactatgtaaatatgtaaaggcttacaggctgtacaaaaactggtggcagactgggctgtctccagccacccccactcccagcccaccccacccaccatggcctccctccagctttttcccaagctttatatggggaaggggatggggttatatctaggtgcaaggagaaccctcccacctgggtgtatccagaaagcccgagacctgtctgtgacccttgttcccatttgagaccagtgcaggagcttgtaccccaaatatgcacacatgtgagagaggaggtacatctccaaggggcttcctacccaatatgtacctggacctaccctactcccaccaagtcatagatgaggcagccatgttccccccaacaagtgaccaagcccttggccctctcctcccccactatac

SEQ ID NO: 22556 - DNA, 999 bp, Artificial sequence
  DNA replication origin
gcccttcggcgggaccctcgcctcaccttctccaccctggaactccgggacatccctctgcgtccccaccctcccgacccccaagctcctcaacgccgaagcgcccccgaactgccggaaggaatcctaaaaggaggcagtcttccccaggaagacccaccaacctggtctgaggaagaagatggggcctccgagcgagggaatgtggtggtggaaacactccacagggcccggcttcggggccagcttccctcctccccaacccatgctgactctgccggggaaagcccctgggagtcctcaggggaggaggaagaagaggggcctctgttcctgaaagctggccacacatccctgcgcccaatgcgggctgaggacatgctcagagagatccgggaggagctggccagccaaaggattgagggggccgaggagccccgggacagcaggccacggaagctgactcgggcccagctgcagaggatgcgggggccccacatcattcagctggacacccctctgtccgcatcgtaagtgctggagggaagctggcctgggagggggcagacggggatgtctgtatggtggtggggtgtagtatagaaagagggcaaagcaggaacaggggctgaggcaggaagggctctccgcctcactcttcacctgaccctcacccgttgccactgaatgtcgcctaacaccccctcctgtcttttcagagaggtatgaggaatgcagaggacctttggcatgcatctctcccagaggagatctctccccagtagtgctggtcaccctccggcatctgtgactctacctcaaggaccacatttcccaaaggaagcctggcccaggcaccctgcctcctgctctgtttggggatcaagaactgtaaatttatgtatcataggtgcacctgagccccacagaaagttgtgcataaaaatgactgccctggctgggcatggctgcctgtaatcccagcactttgggaggctg

SEQ ID NO: 22557 - DNA, 982 bp, Artificial sequence
  DNA replication origin
ctgcctgcgcgaggcgcaatacagcatgctggcgacctggaggcggcgcacgccgcggcgcgaggccacgctggagctgctgggacgcgtgctccgcgacatggacctgctgggctgcctggaggacatcgaggaggcgctttgcggccccgccgccctcccgcccgcgcccagtcttctcagatgaggctgcgcccctgcgggcagctctaaggaccgtcctgcgagatcgccttccaaccccacttttttctggaaaggaggggtcctgcaggggcaagcaggagctagcagccgcctacttggtgctaacccctcgatgtacatagcttttctcagctgcctgcgcgccgccgacagtcagcgctgtgcgcgcggagagaggtgcgccgtgggctcaagagcctgagtgggtggtttgcgaggatgagggacgctatgcctcatgcccgttttgggtgtcctcaccagcaaggctgctcgggggcccctggttcgtccctgagcctttttcacagtgcataagcagttttttttgtttttgttttgttttgttttgtttttaaatcaatcatgttacactaatagaaacttggcactcctgtgccctctgcctggacaagcacatagcaagctgaactgtcctaaggcaggggcgagcacggaacaatggggccttcagctggagctgtggacttttgtacatacactaaaattctgaagttaaagctctgctcttggagacagtggtctgtcgggatgggaggtgggggcagaggcccagatcctgaggggtgagatgggaaaagccctgcactagggccaggtagcccatcaccatcacgccaagtgacagaggagtagcaggttcttgttctgaacaccgtcatctgttgcccaagctggagtgcgctcactgcagcctccaacccttgggctcatggggtcctcccgcctcagcctccggacacaggcacaccac

SEQ ID NO: 22558 - DNA, 1631 bp, Artificial sequence
  DNA replication origin
gtccttagagctgcccgcaggggcgcagcctcatctgagaagactgggcgcgggcgggagggcggcggggccgcaaagcgcctcctcgatgtcctccaggcagcccagcaggtccatgtcgcggagcacgcgtcccagcagctccagcgtggcctcgcgccgcggcgtgcgccgcctccaggtcgccagcatgctgtattgcgcctcgcgcaggcagcgcccgttctgcagctccagccgatcgatctcgtggtcgctcagccctaggcgccgcacgaattccttccagcgcaacgggggcacgttctccaccacggcgtacagcgtcgcggggtcatcagctgcggggacgcgggccggtgagcctcgggcggcaaccccaggccccgccccgcatcccgcgccctccgcctctcgtggtcccctctgggagcgcctcccgcgctcccccggccctcccccagcctcctcgtctccagccgcgggagaaactcactgtctaggctctgtggcttgtgggcgctgtcctcccacttctgaagggggttggggatggggtcggaggcgagggctgtcgcaaggatggggtcagccccctgatagggtggtgccacctctctgcggggagccgcaaagttgggacagtcaccgggggtataggtggagctggaggtgaaggtggaactgggcacgggactgaagcccagggtgggggtgaagcctggagtgggactgaagcttgggtttggggccaggggcttagtagtagttccttcaagctccccctgaaagagagaaggtggcgcagcattagtgcggcagcgaaaaccagccccggccctctttattctacgtgggggttgggacttagagggaatgaggcgagcccccggaaagtgaaggatgattccaggggatctgagcattaggcaattataaggaatggtcagggacatttgggagtaactctctcatttcatctcacctctttttcaggtgtcgatttcccacaaactgaggaaaaagaaagaaagcatcataaatttcacttcctctctcagccctggcaccctggactcagctggcagtggggacttgtggtgacatgcctcagggcctatgtggccccagggacgagagagctactgatgcagctcgacatctccccagccatccagggccaccttctgcccagagtccccagcggtatgaactgaggggacactcctcacctccctccacacatgtccatcgcacccacccatgtcctccctcacccccaccagctccctctccctcccaaagcccccactcaccaatggagtagagcttggacttccaccgttggtagcgatacattaaaccaatgaagaggagggataaaaggcaaagaccaaagaaaatgaccaggggcaacagcactgtggtgcctgcagacaaagcaggtgttggtcagaggagcgggcagaggggggccgcagggatagatggatgggtgggatggatggacgggtgggggcaagaagagggagagggcaggtgagcatgggcaccaggtcacttctcctcacctgagtcctcagtgcccttaacattctcaatctggggtaggcacaacttcgtgcactcca

SEQ ID NO: 22559 - DNA, 780 bp, Artificial sequence
  DNA replication origin
tctcaaccctcaactgtcaccccaaggcacttgggacgtcctggacagaccgagtcccgggaagccccagcactgccgctgccacactgccctgagcccaaatgggggagtgagaggccatagctgtctggcatgggcctctccaccgtgcctgacctgctgctgccactggtgagaccagggacaaagggaagagtgggctggtgggcgaggcaccttccggctggcgtgggccctctccgggagggggccgagcctctcctgcccgggcctggtcctggcgccagcctcaggcctgcaggtcctaacctcagccactgccagtgtggggttccccattcatccgccttttggagtaggggctgcgctgaggcaggggaatgggagaagtttgaaagggagagagtaaaaggaagccctggcccctgacagcggtggaagtttgtgggcggccaagggaatgtgggcaggagataggcccagggtggggcagatttggcggggaaaagaagggagtgggagtaggaagattagtgctcggggagtccagacggttctgaattctgtccctccggtcagctggctggcctggagggtgttgggccgtggggaggcgaggctgcctgtggaacttggtggagcacaccctgtagggcaggattttggcggctggtgaagtgggggagtgagttgaggagtggggatgggctggtgtggtgggtttgggatgctcatggtgggaggtatttgagaatgggctgggacactggatggggcagg

SEQ ID NO: 22560 - DNA, 1195 bp, Artificial sequence
  DNA replication origin
tttctgtttagtggtcaattctcttagctctaggtgtcaactcaaaggctctgcctcctgctataggaatttctagtatcacggggtcatggagggagagattttttttttttttttttttttgagacagagtcttgcactgttgcccaggctggagtgcagtggtgggatcttggctcactgcaagctccgcctcccgggttcatgccattctcctgcctcagcctccagagtagctgggactacaggcgcccaccaccatgcccggctaatttatcatacttttttagtagagacggggtttcgccgtgttagccaggatggtctcaatctcctgacctcgtgatccaccatcctcggcctcccaaagtgctgggattataggcgtgagccaccgcgcccggccattccgtcttatcttatgccaaaaaagaggagcagtagaccttttgggagagtgaaggtggggccctatggaacccagcctcctctggaggccttgtcacaggtttgtgtgtgtgggatcaagggctgggagcccaggctgtgctcagtgggggggctcatcagtgaggccaggcaggagggaggcgcgtagggtggcaggagggaggtgcgtagggtggcaggagggaggtgcgtagggtggcaggagggaggtgagtagggtggcaggagggaggcgtgtagggtggcagcatggaggaggaagccgggcacagagatggcatgggggctccccaggggagaggagtgtggccagagaagtgacaaccagattgaagttggtgatgagagagagggaggggcaggaggcagaagggacttgagccagcctggggaaggagtggaaagggaggcccagccaggatgtggtggaaataactccaggcaagtgggggatctggattcttcctgtgtgaccttgagaaaggcaaattcgctttcctgggctcctggctcctctgtgtcttcctgatagtcgatggtctcttcactttgtgtcactgagtattttctcacttaaccccccaagagcttcatgcggtaggcagatctagtgttatgcccattttacagataaggaactcagactgagagtcagaaaggctgggtcacttaccccgagttacacagacagaaagtgtgtggctggaacaccaggccctacatctcagagaggttctggcttggg

SEQ ID NO: 22561 - DNA, 1814 bp, Artificial sequence
  DNA replication origin
tttagggtaaaatcctgaaatattttcaaatgaaatgatatgatgtctgggatttacttcaaaataataatgagggatttgaagagtgtgtgcgttggtgggggagggggtatacagaataaatgaaactgacagtgagttgaagctgggtaaggagtatatgggagactcccaatattactttttctcttttggtatattatcttgcatgtggaatttccacagtaaaaagtaaaaagaagagagagaaaaaaggacctagggtcgctacacacacattcctttacgcgtttaagagctcagcagggactctcatcccagcccccagcgctagggccctggaaggctcagcagccccgcgcagtgcatgctgttctgatacttctgccctttccagccatctttggcccatctgtacggtgagctgcctgcaccaggtgaggggagagagcctcacagagtgaaatgcctacagcctaggcaggtcctttcccccttttgtgacctctcctccccatgcacacttcccatcacctgcacctgtccagacatcagacctgaagttagacagaccagtgtaaggacgagtgctgaacagagtccttcagggagggggatagtgcccaagtgacctatctcaagagaggttagcccctcatcccaagggagacatccctgagccacaaggagttggcaggactgctggaatgagttgggacctagacatcaggagacccagattgtagctggctctgcggtggactggctctgtgatgtggccatcactcatttattccataaatacctattgggcacatggtatgtgccagactctgctaagcatggggaacacagacttgaagattcagcctgggccatggtggcactcacagcctggtgggaagcaaacaagacagccaggtacagagggcagtcttcacggggactgtgcaacctagggcagaggttgccttccagagcctcagtgaagcctcaaggacaggtgggagttaggaagacggaaacttggggaccagagaaccacgtgtaaaagggggcagctgcaagtaactccacgggtgggtggggtgttgggttgagggagatgggaggatgaaacagggcaggaacgagaccaggccaccctggaatcccggttcccttatgtatcacccttagcctccctctccatgcttaaggtgagggggctggactgcgtgggctctcagctttctccagttctaaggggtttgaaggttcatgggcaaagaagccagagcagagggactgagtgcccaggtccagcctgctggccccaggactcccctccgcatatcctccccctctctttgggagggaggttccctgaggacagggagcagggcaagctgcacagctctcaagggtctcctaggtgacctgtgcccactcctgtgcggattgggctgggttggtagcgtggggggctggctgatttgctagtcccttgtaatttgtctgaaaaactcccacagtagggcaggacaacgggggaggaacccgggcatctgccagccggttctcctcggtctcagagctgcttctgcggccttgcagtccccgcgccctgccctctccatgactgcccgtcctgggcccctcgctttccagatcccgcacccagctgtcccttgcgctctctggaactccctctgctctccctgcgaggcttgtccaagggctgaccccgggcccgccgcccttccctcggctgggccagggctgtccgcagtccgctctcccgatcgggcttccgaagaagggaggaggccggt

SEQ ID NO: 22562 - DNA, 1597 bp, Artificial sequence
  DNA replication origin
cgctctcccgatcgggcttccgaagaagggaggaggccggttccggccccgcggccctcacgtgctttcccggccgcccctcccgccccgcatcgaggcagacaagcctgttcctcttccctgggctgcgattgcgacaggccggcctggctcccagcgctccctgtccccgccccgcggccagctcgctccactcccacttcctgagctccgccatgggagccctggaggcccggcctggccgctcccggccctggggtgcacatcggccctgagtcccgtcccaggctctgggctcgggcagccgccgccaccgctgcccaggacgtcgggcctcctgccttcctcccaggcccccacgttgctggccgcctggccgagtggccgccatgctcctgccttgggccacctctgcccccggcctggcctgggggcctctggtgctgggcctcttcgggctcctggcagcatcgcagccccaggcggtgaggaaggggcctggtaggagtgggcgagggtgggcaagagggatctgggcagccgtcgctccattccctctgccctcccaagctgacccctgactaattcttctctcctcttctccatctccctttgaaggtgcctccatatgcgtcggagaaccagacctgcagggaccaggaaaaggaatactatgagccccagcaccgcatctgctgctcccgctgcccgccaggtgagaggcaatggcaggacgaacctgggcctcggaagtgggtcacgggggctccagccccctcgcggcctcagagggaaggtgggcactgtcccccaggaaaactggctgctggagacgagcgtgggaaaccctggacatcacgtggaggagatgggactggccctccccactgggcctcctctttccttacctcactgagagggagccggagggccactggcaggatgatggggggccagagagaccgagggaaaggccagggtcacactacaggcagcggaggtgagggtggagcctcgtctcctgaggctctactgctccactcacgttctaggcacctatgtctcagctaaatgtagccgcatccgggacacagtttgtgccacatgtgccgagaattcctacaacgagcactggaactacctgaccatctgccagctgtgccgcccctgtgacccaggtgagtggggatgtgcctgcgggggggctggatcccctggagcttggcccctccctgagccctcccgtctccccgccagtgatgggcctcgaggagattgccccctgcacaagcaaacggaagacccagtgccgctgccagccgggaatgttctgtgctgcctgggccctcgagtgtacacactgcgagctactttctgactgcccgcctggcactgaagccgagctcaaaggtcagaggtccctgaggggctggatgtgaaaaggaggctgggtgccagggatctcaagtgggagcagggaatatggtactgtgtccacggcgaccccccagatccttggcttaaaattcctcttctcattccatgcagaggctcacagaagggttctggagggacatggaactgggacaggtgcagg

SEQ ID NO: 22563 - DNA, 866 bp, Artificial sequence
  DNA replication origin
taataaagaggtgtttggtctagttaatggattgtgtgaaaaaaaaaaacggattgtgtaatgttggtaagcccaaaatgatgacaatagtagttatcattacatctcagtgtgggatgtgttccttgacatagtattacagtatatataattttaaaagtgtgtgtgtgtgtgtgtgtgtgtgtgtgtgtaaactagcctagagatactccaattttttctgtaaggaactttcttcttgcccaattctgggagggaagtgttcatcttttccccattttttttaagatgtggagcattaaggcattttcagaggcgccccccccgtgtccctcagccctggtccctcacctgacatctctgggggcagtggctctaatggatttttgcaggttgtgtcggactgggcagtgcctggagctgcctccaccagaccttggttctcacacctgcagaggaaaaaaagatgatgaccttttcacgccctggcccaccagtgtcccgactccactgggcaggcggggaggctgaaagtggtgagtcgagtccgtggtgtcaaggataggcgctgggggttgttagcagctgaggcttctcagagggtggaaggagcttgggtggggctgcactcacctggtgtggggctggcagcgggcgctgggggaggaggtattctggaagtgcccggccttgcaggggacgcagtggttgttacccttcccaacttcatctggcaagagaaaggcaggccagccagggtgaatgggcaaaagggaggggccctttgccggcctgtgagtttcctttaagcctcaggatgcccatccaccccattgcgtagctctcacctttcccaagctctgctt

SEQ ID NO: 22564 - DNA, 1143 bp, Artificial sequence
  DNA replication origin
atgaataggaggggtgagcaactgtgtgtccatcacctttttgtcaaagaagcaggagtcagtgggctacgtgcttcatgagcaggagaggcggaaactaaggaaggctcatgtgttggaggaagcatgtttgaagagcagcaggtctcacagagtttgctctttaatactctccccagcacacggaaggggaagggggtggaggttgctgctatgagagagaaaaaaaaaacagccacaatagagattctgccttcaaaggttggcttgccacctgaagcagccactgcccagggggtgcaaagaagagacagcagcgcccagcttggaggtgctaactccagaggccagcatcagcaactgggcacagaaaggagccgcctgggcagggaccatggcacggccacatccctggtggctgtgcgttctggggaccctggtggggctctcagctactccagcccccaagagctgcccagagaggcactactgggctcagggaaagctgtgctgccagatgtgtgagccaggtaagagggggccttggtaagggccaggtgagtggcgaaagagagaggactggggttaatacagtaaataggcgcagggtgagactgagctcaagcaaggagggaaatcctgcagctgtggggaggcaccaccttgaagagggcagagaaccagcccttctcaggccttgatcccttaccctctcctcccaggaacattcctcgtgaaggactgtgaccagcatagaaaggctgctcagtgtgatccttgcataccgggggtctccttctctcctgaccaccacacccggccccactgtgagagctgtcggcactgtaactctggtgaggtgggcaagggtgtgtaggtggggacgatggacaagcatctgggggagcaaggctggtgacgggtttgggggtgcaaggaggatgacggggccaaagctttggccttcttcaaggctcacagcaagtggagccaatgctgggaaatgcggcaccctaggtggggcatgaattaacgtgggcagacatctagtattccaggaaagggataaatagaatttgagggattggtgagaacgggtctatggataggatcaagacaataaaatgagagaagtggctctat

SEQ ID NO: 22565 - DNA, 929 bp, Artificial sequence
  DNA replication origin
gtgaccccgtctaggaggtgaggagcgtctctgcctggctgccccgtctgagaagtgaggagcccctccgcccggcagctgccccatctgagaagtgaggagcccctccgcccggcagccaccctgtctgagaagtgaggagcgtctccgcctggccgcccatcatctgggatgtgaggagcccctctgcccggctgcccagtctgggaagtgaggagcacctcttcccggccgccatcccgtctaggaagtgaggagcgtctctgcccggccgcccatcgtctgagatgtggggagcgcctctgcccgcccgtgaccccgtctaggaggtgaggagcgtctctgcctggcagccaccccgtccgggagggaggtggggggtcagcccccgcccggccagccgccccgtccgggagggaggtgggggtcgcctctgcccggccaccccttctgggaagtgaggagcccctctacccggccaccaccccgtctgggaggtgtacccaacaactcattgagaacgggccattatgacgatggcggttttgtggaatagaaaagggggaaaggtggggaaaagatagagaaatcagattgttgctgtgtctgtgtagaaagaagtagacttgggagacttcattttgttctgtactgggaggggttcttctgccttgggatgctgttgagctgtgaccttgcccccagccctgtgctctctgcggcctgtgctgtgtccactcagggttaaatggattaagggcggtgcaagatgtgctttgttaaacagatgcttgaaggcagcatgctccttaagagtcatcaccacttcctaatctcaagtacccagggacacaaacactgcggaaggccgcagggtcctctgcctaggaaaaccagagacctttgttcacttgtttatctgctgacct

SEQ ID NO: 22566 - DNA, 1327 bp, Artificial sequence
  DNA replication origin
cacatcttgcaccgcccttaatccatttaaccctgagtggacacagcacaggccgcagagagcacagggctgggggcaaggtcacagctcaacagcatcccaaggcagaagaacccctcccagtacagaacaaaatgaagtctcccaagtctacttctttctacacagacacagcaacaatctgatttctctatcttttccccacctttcccccttttctattccacaaaaccgccatcgtcataatggcccgttctcaatgagttgttgggtacacctcccagacggggtggtggccgggtagaggggctcctcacttcccagaaggggtggccgggcagaggcgacccccacctccctcccggacggggcggctggccgggcgggggctgaccccccacctccctcccggacggggtggctgccaggcagagacgctcctcacctcctagacggggtcacgggcgggcagaggcgctccccacatctcagacgatgggcggccgggcagagacgctcctcacttcctagacgggatggcggccgggaagaggtgctcctcacttcccagactgggcagccgggcagaggggctcctcacatcccagatgatgggcggccaggcggagacgctcctcacttctcagacagggtggctgccgggcggaggggctcctcacttctcagatggggcagctgccgggcggaggggctcctcacttctcagacggggcagccaggcagagacgctcctcacctcctagacggggtcacggccaggcagaggcgctccccaaatctcagacgatgggcggccgggcagagacgctcctcacttcctagacgggatggcggccgggaagaggtgctcctcacttcccagactgggcagccgggcagaggggctcctcacatcccagacgatgggcggccaggcggagacgctcctcacttcccagacggggtggcggctgggcagaggctgcaatctcggcactttgggaggccaaggcaggcggctgggaggtggaggttgtagctagccgagatcatgccactgcactccagcctgggcaacattgagcactgagtgaacaagacttggtctgcaatcccggcacctcgcgaggccttctgagtagctggtactacgggcgcctgccaccatgcctggctaatttttgtatttttagtagagacggggtttcaccatattggccaggctgatctcgaactcctgacctcagatgatctgccagcctcagcctcccaaagtgcgggattacaggcgcgagtcttgtatttcttttaaaatcaatctcacaca

SEQ ID NO: 22567 - DNA, 2060 bp, Artificial sequence
  DNA replication origin
tccccatggtgtctgagcgatgtggctcggctgcgcggagggagagaacagtgagcgcctagtggccccggccgacacacacgcctcccctcccctcccccaccaggcctccatgcccagcccgcgccgcatcacgtcctccgcccgcccctgcaatgcggaggccgcccgggcccaccccgcagcggcgcgaacacatccggcctgcgcccgcccctgccgccttcaggccgtccctagcctcccgggtttctctccgcccgtcttcacctggcgacgcaaaagaagatgcggctgactgtcgaacaggaggagcagagagcgaagcgggaggctgcgggctcaatttatagaaaccgggggcgcggcggcaggcggtgactcggaccccgcctcccgccaggctcagccagtcccagcccaaggtcttgaggcctgagctacgtgcgcccgtaaaaccgctagtagccgggccctactttctccccgcttttttttttccgcagccgcctggttcaactgggcacgcaccgagcgtgtgggccccgacgtaggggggaagggactgagattggcccgatgggaggtgatcggtgctggttcccaggactggactgtgggcagcaggacactagggagtcaaggacggggacccttacacgcttggatgaaacaggaggactttgggaacgactgagatggggaattggagccggagcccagcaccgctcgcggctgcacgcggcctgccccctcccctttctttctttcaaaggctgagaggcgggaaagttggggaacttctcctcgaggctctgcggtagtgacaccggactgctcaggcaaaggcctaggaggggcccatgggcctcgggcgggggcccgtggttccttcccagcccccacttccccctccccatctcctggctcctggcatctctgggaccgaggcctgggctgggcactgggcactgggcactgggggcctggagaggaaggaggctcgggaggcggcttgagggggagggggaggtttctgcacggaaggtcacgatgtcctgcagccctgtagcctggacctgataattagggcagacaatcccggccctgtgtgcaccagcggctctctccgggctggggccccaggcggaggacaggatggctggtgggggcccagaggcctcccacaaaggcactcctggaaacctgtgggctgtgctgcctagggagagagacagtgtgcctttcattccatccagcctggggcgaagagcgggacgtgagggcggaagtccctccccgccctgggacgtgcaggcgagccaggagccagggactccctttcactggctgcgccgggggatattgagggcagggtgagtcaagaagagggaaaaagtgggaaaagaggtcttgggcacacggtgggaacaggtcccctgccccctcccacaggggatccattcttctggtaggagggcagagggccaggtttgtgagtgtgggatgggagggtgctgaacacttgtaaggaagggggtggggtggggtggccttggcccatcagcaggtgcatgggagggggatcccgggcctctttgctggcccagcataacctgacaccagccccctgcccttctagctaaaagccggttgctaagtttagcctgcctggtgataatctttgcttaaaaagcacccacaggactccagtccctgaccctgcctttctgggattgcctttcctgctgggacccagagccaggctgtgtcctcgtctggctgccactggcatggttggtgcgggcttttcacaatgaccacccagagcagagtagcaagagcaaggcaagaaggtccctaatggtgaaaggggtggggtgggggagtggaggaagccccacctctgactcagctattcctgcaaccaggaccgttaaccctttctcattgagagcattaagagcacctccatgctcctgcaccacccaagcgtgatcttcccctctgcctcatgcttgtcatttttcattactgtcttctccccgcaaagagggagc

SEQ ID NO: 22568 - DNA, 1518 bp, Artificial sequence
  DNA replication origin
gtcttccactcactcctggaagatggtgatgggatttccattgatgacaagcttcccgttctcagccttgacggtgccatggaatttgccatgggtggaatcatattggaacatgtaaacctgggggaatacgtgagggtatgaaggggctgcccatcagccaggtggctcctcccacaccagctttggggctcaccatgtagcactcaccatgtagttgaggtcaatgaaggggtcattgatggcaacaatatccactttaccagagttaaaagcagccctggtgaccaggcgcccaatacgaccaaatctaagagacaagaggcaagaaggcatgaggaggggaggctcctccagaatatgtgagcagccctaggccacctccccattaagagggcgaatgcagcatctccttacccccaggagggcccaagaggttgaattttatctcccttgagcttccctgccaggctggcctggcttaaggcatggctgcaactgaaggctccagggctgcccaacacccccagtcatacgaagcccttccaggagaagcggccatgtggggcactgccacccacagtctgggcacaagctttgtacatggtattcaccaccccactatgccaccccaggaatgcttgctgctgcctagctcagctgcaccctttagggagaaaacgcttgtacactcagcatcatcaaactcaaagggcaggagtaaaggtcagaaattaactggacagggcaagcccaccccttctctaagtccctcctacaaaagggacagagactggggcgggtgggaagaggggaagctgtattttaaccccctagtcccagggctttgatttgccaagttgcctgtccttcctagctcttttccagaaatcaggagtgggagcacaggtaagtgcatgtgtgtggggagaagggatgggagagagccccagcccaggcccccagctacagaaaggtcagcagctatatttaacctcagaccagggtgcggtgggagatctggtttccggaagacggaatggggagaagggcaggttccccgaggcgcccagacacccaatcctcccggtgacatttacagcctggcctttggggtcgggtcaacgctaggctggcaggggaagggcggggccgtgaggtgagccggcgctgcaggaaggggccaccaccagaggggccattttgcggtggaaatgtccttttccaactacccatgactcagcttctcccggcttggcaccatgccacagccaccacacctctgcggggaggggacacaagaggacctccataaacccacttctttgatttaccagagaataatctaggaaaagcatcacccggaggagaaatcgggccagctagcctcgctccacctgacttccccgccacacgcgactccacccatcgaggcaggagcgcagggttagtcaccggcaggctttcctaacggctgcccattcatttccttcccggttgcaacatggcggccgctct

SEQ ID NO: 22569 - DNA, 717 bp, Artificial sequence
  DNA replication origin
aggcagagccagagggccctgaggccgggagcagaggttacctctccctgggcctctgcagctgccatggcatagcctgagaaatcctcccaaagcagcagggtctcctcagtctcctcccaagtcaggctgtcacagtcgtcctcaaaatcatactccctcctagagacagggaacccgggtgtcagggcgggcggggcctcgtcctggcgggggactggggagctccggcctcctgggctgctgtggcgtcggtgctgcgggagcacggcctgcggactcacagctggttgagcatgcgctgcatctcctcgttgatgctgagggctgtgctctcctcctcatccccatcgggctggcggggcccctcactctccgacagggaggtgtcctcctcgacggcagccttgcgctcccgcttccgcccccccatggatgggaccttaatgggagacaagtgcagagactacagagacgaggccgggtgcatgaggagaaagggcgggagcgggaggccgggcagagagggtgggaatgggggagaagcatgaaccagtaggaagggggggcagacagagagaaaagtcacagttacaatgacaggaacagaaacacggacagtcaccaagggccagacacacagcgggggtcagggctgcaaaccgagaaggcagaacaagaagaaatcgagaagaagagcagtcagacaaggaagga

SEQ ID NO: 22570 - DNA, 1766 bp, Artificial sequence
  DNA replication origin
ggccctgctgcctactcgccgcccgggccgggcccggccccgcctgccgccatggccctccgcaatgacctgggctccaacatcaacgtgctcaagaccctgaacctccggttccgctgcttcctggccaaggtgcatgagctggagcgccggaaccggctgttggagaagcaactgcagcaagcgctggaggagggtaagcagggccggcggggcctgggtcgtcgcgaccaggcagtgcagaccggcttcgtcagccccatccggcccctggggctgcagctgggcgcccggccggccgctgtctgcagcccttcggcgcgcgtgctgggctcgcccgcgcgctccccggccggccccctcgcgccctccgcggccagcctctcgtcgtcctccacctccacctccaccacctattcctcgtcggcccgcttcatgcccggcaccatctggtcgttctcgcacgcccgccggctcgggccgggactggagcccactctggtgcaagggcctggcttgtcgtgggtgcacccggatggggtgggcgtccagatcgacaccatcacgcccgagatccgcgctctctacaacgtgctggccaaagtgaagcgggagcgggacgagtacaagcggaggtagggattgggaaagggggacaggtctctctgtgtcataccactcacaacgggccgcgagttggtgtgggttccgaagaatcaggggtgaaaagaatgagagtaaagtttgtgctgtgtaatgaggagcttggaagcaattggatgcagggagactagaatccgcagagaatgcagaagccctgctcgtgacaggaagaaggacgctgggagcggaacacggggggattcctacttttccggcttgtctctgccatccaggcttaactgcgggttttgtgcggtgtgaaagggactggggctctgccctaccggtctcagccctggggcaggttagggatataaacttcaaaagtaggaggcaaggatatagcgtaaatttgggagactaaattgagtgaaactggaaggggctggtgagggaggggctgtaccttgcaacgagtgattctttcacaccccaaggtttcccaaagaatattgatggaaaccaggtacctgctgtggtttcataggaaaagctccgggacctcaagccattgcttgagtaggtcaacaaactgggaaaagaaagagtgaagggaattcactagggtgagggtggagagcagggctgacaggggaatcttggcagtataaagcgccagtggggagggagagtggagagccagcaggggactgagcagggagaagctgggatatgggccctccctaggaccgcgaggccgcggggcgggcccggtgcattctgtggatgaagatttggctgtctgagaggagcccggccccaaggggcaagggaaagggatgtgatgccaggagtgctggctgtataccaagtggattccttagatggctgataaccaagccgataggacaggagtgagagcagaggtagtgtcttgcagactccaacccaagccttgaggagggagcgggtgactgacaggctttggtttggcggcctcccctctcatctcagctattatgaccccttgtgggcgggcctgggaactacctatgcagcccagtgtggcggagattcagcactgggtgaggattggccgaatgttctaggaaatgaccgctgggtctaggggcgaccttcagggatctccaccctgctggagt

SEQ ID NO: 22571 - DNA, 1921 bp, Artificial sequence
  DNA replication origin
ccaccttccaggttcaagcgattcttgtgcctcagactcccaagtagctaggattacaggtgtgtaccaccatccctggctaatttttgtatttttagtagagatggtttcaccatgtgggctaggctggtcttgaactcctggcctcaagcaatccacttgccttggcctcccaaagtgctggaattacaggtgtgagccaccacgcctggcctataggcagtgatcttttaatacaaggttcaactaggacttgagtaaaggccaagttatattaagtaatgggaatttaggtaatctgctcttaggcactgacctaattgtgtggagctcctgcccaggaaatggcaattctcatattttaatatgagaatattaaaatatggtgataaggcccattttctgacaccatctgtttaattttaaccccaggaaattctgaaacagccacacctacaaatgtagacttgcctcaggtcatccccaagtctgagaacagcagccagccagccaagaaagccaagggggctgcaaagacaaagcagcagctgcagaaacagcaacatcccaagaaggcctccttccagaagctgaatggcatctccaaaggggcagactcagaattgtccactgtaccttctgtcacaaagacccaagcttcctccagcttccaggatagcagtcagccagctggaaaagccgaagggatcagggagccaaaggtgactgggaagctaaagcaacgatcacctaaattacagtcctccaagaaagttgctttcctcaggcagaatgcccctcccaagggcacagacacacaaacaccggctgtgttatccccatccaagactcaggccaccctgaaacctaaggaccatcatcagccccttggaagggccaagggggttgagaagcagcagttgccagagcagccttttgagaaagctgccttccagaaacagaatgatacccccaaggggcctcagcctcccactgtgtctcccatccgttccagccgccccccaccagcaaagaggaagaaatctcagtccaggggcaacagccagctgctgctatcttagatggttgaaaactagacgggtggctcactgccattgtcaccaggttggaactcttgcctctgtgaggatgccttctctactgtgcatacccatgaaatttaatacacattttaaaacctctggccactgagtatttttgagggaactgggtgctgcctttgccgctttaagggtaaagatgggaggtgggactgggatcttctgaggagagggaatggttgggtgctactgagaaataaggtcagttttaggctcctgcatccttgggttttcccaggaagggaaagccctggagtcagagctaggggtgattgaactccggggagaggagggcaatagaagtgtaggggaaggcggggcacactagctcatgcctgtaatcccagcactttctgggaggccaaggcgggtggatcacctgaggtcaggtgttcgagaccagcctggctaacatggcgaaacctcgtctctactaaaaatacaaaaaatcagccgggtgtggtggcgggtgcctgtaatcccagctactcgggagactgaagcaggagaatcgcttgaacctgggaggctgaggttgcagtgagccaagatcgcgccactgcactccagcccgggcgacagtgagactcggtctcaaaaaaaaaaaaagtcgtgtaggggagatgggcttgccaccagaacccatggggtactggaggtcctgggctttacgccaccccggctggagtccaggcggtggctcccctcatcacagggctcggcctcagacccggaaaggtccagggtccggcctccaattggagcctgtcattggcttcccctcggcccgccccctgacc

SEQ ID NO: 22572 - DNA, 2172 bp, Artificial sequence
  DNA replication origin
ggtggggggcggaaagagcgggtgggtgtgggggagggggacagtgcgcgtcactgactgttctgtgtttctcccccctcccccgcacagtgactcgggccagtgtagaggtcctcaggccgccggcaggagcagctgggccaattccctggccgggagcggaaggggatggcgtcgggcctgggctccccgtccccctgctcggcgggcagtgaggaggaggatatggatgcacttttgaacaacagcctgcccccaccccacccaggtaacatcttccccaagggcccatggcgggaaggagacatctggggctctcccgagtgactcctctggtgaggcagggctgtgttgctccgctgtctctgtgcagagccggaggtggagggtatccgaagggagtggttcccttctgcggagctctggtgtgaggggggtggaagccatgtgcctcctgggcacggagatgccagcttgctgcactctgtcttgaggaatgctctgcagttcccagttgagggagctctctgggctggcaggcattacctggtatgtgggtcctcggaggaatgcaggtagctgggacccctggaggcttgtggtggtggtggtggaggggggcgttgaggattctgtttgaaagaccagccgggcatctgtgctagtaggatcctgtggttgctgctgtggaaaggaaagagggagtgctggttacactctatctgattatttttagcttctgatcggttaccggttttctgtgctgtctgaactgtgtgaagtttgaatcgcgctcctcagcaggatctggagtgcttaaagcagccaggcagattgctggaatgttttgagtggggaagtgatgggggctcggggaggatgtaatagcctagtgaagaggggcaaaagaagggagggcactcctcctcctggtgagtggacatagttttggcttttttcctagtggcttctgtctctatgaggtagcctgcggtttaggctggcagtgtgaagtgtctgtgtaggtgtgctaggggttacgctatctgtgttttggggtggcttcatgaactggccaaacccgtatggttgtaaccaccctgtctgattgggggaactgttgtctatcctcaaatgatggttgatgtcatgcccctaagcagatgtctttctcttctgtgtcctttttcagagcccctagctgtgtcacctactcatctccttgaccttcatgttttctagtttaatttttttttctacatgtcatttcttcattccttctgcttctagttttcttctcattctggagcctgctgatcctgtttttgtttctcatccagcatcattcacttctgccttctctcttcttagcttcagtggaagttgaggtggtctgggagagatgctttcacatttggcactttttaagttggaattcttcacttcaacctgaggccatttaggagaggggttagtgttgtcatggagtctgggctgttgggatgagaaacttggtttcatccttgtgtagagtagggggcagatttccatgcccttgcccaaggtgagggcggagttgtggtgctggtaaggggaccctgtccttctgagaggggcatgagaaacagtagtgctgcctaaacattctgggttccacgtcttggcctcccattggccacttgggctggggctgcctttcatgttgaccgggagctgcgcaggagctgtgaactctgtcctgagctgtagcatgacccactttttccacttgccacaccccattcctgtccctttcctaaatcttctctatatctcagtaagtttgcggtttgccatttcagcatattatttgcctgagaagtttggggggctccatgtgcatggaaggatgtcccctttgcctccatgggttgtctttgtctccacttccagcttttatgggggtggtgagatgtagctgatgggggttgggggttgacttggggattggtggggaaaagtccttaagaaaatgattctttctggtgaaatccaggctgatgttgcattcccaagggggaatgggaggggcgttcttgtgcctggtcttattctgggctgagaagcagggaggctgatggtgctttgtccagcctaatgtctcattccctagtatctgtctagctcaggaag

SEQ ID NO: 22573 - DNA, 1810 bp, Artificial sequence
  DNA replication origin
ggatttcagtattaggaatgctggatggatgaacattgctttccaagaaaaatcccctagtaagtagggaacagataggagatcatgttgactatggtctatacccataaatcctttaagtatcatcttccagcctctagaaggaccacgataaatcttattgggatatgttctctcttggaaccagtgggattttattttctgtaacaggaaattgggaaacagtgctcagcagttctcccttggcaccattctgtcgtgtatcatagtttgcttggttgcttatgctttttgaagggaggccccctggtcttccttgattctccatggtgcggagctcggccttgctaggtactctgtcaacacaggttgaatgaacatgagtagtggtgagtagcgggagggcaggccttcactcttggtgtgtatagagcaggaacctgagttcacatcgtgatgggatgtccatccccaggaatggcctgggggtgttggtgaaagatccctgacctggggatgtggtgagggggaggattgctagaatgttgagagatagtctttggatgggagttggtaattattatgggatgctgtagggtgaattagacttcatgtaaatgtttcatctgtcagcttggtattttggttggttggtgttcctcaaaacttaggagctggaggtaagcatctggaaaatacctagattttggtgggactgggtggggccctaggtgggctcccagcccccgagtgtctggaaatgatggtatgagggaagctggggtcccagacatcaggaggctttttgccaggatactactttggcccagaaagggattaaggtgtgtgcaagtgggggcggggacaaggaagcgtgggtagcctgcctggccctccctgctctgggtgttagaatagactgacagcgcctggagatgggggtgggaagaatatgaatattatgggatgcctggctcgaagggtataggggtggtagagtggagatgaagcattatgggatgtgacactgggttgtgttgggagtattatggtatgtttggttgaccacgggctccttgcaattattatgggatgtcaggatgtgggtaggagagtaaaattattatgggatagctttccagtgttagaggaaaagagattagatgtccatctgtggggcgacagtagggctgttgatcattatgggttatctttttgatagaggaggggtacttactataggctgtggagctagaagagggaaggctgggggtgatgtgagcctctagaccctggcctgcagggactgagggcagctctagggggttagttattatgggatgtcagtatagaaagtgggagactgattattacgggatgtgtgtgggaggaggccgagtgtccgttgttgtagtatgggggggggtgagtttctgactattatgggatatcaaactgggggtggatgaaggatggttattatgggatgtctgtgggggatggggctgaatattatgggatatgaggcataagtgctgcgaggggtgcttattatgggatggccatggggagggaggggtgatgaattattatgggatgttagcattaggtccaagagtgaagaagaagttggcaaaggatgtctattatgggatgtctaagagggttagttgcaaaaggtctgcaatattttgagatgtcagcagtctctggcatatgtgtatgaaatgtgggggggcagggtgtgtgtgtgttgtgtgtgtgtgtgtgtgtgtgtgtgtgtgtgtgtgtgtgtgtgttgggggggggg

SEQ ID NO: 22574 - DNA, 1862 bp, Artificial sequence
  DNA replication origin
agggcccaggcaggcacggggtggggctgggagaggggcccagggcaggagggcgggagaaagcctgggagggaaagcgccgaccagggagggaggagggacagggagggaggcctgcggcgctgacacagcctcgatgtgtggaactggctggggtttggcccacaggtcaggcgtctggcagtattatgggatggagaggccttaggagacagggagagtattatgggctggaacagccttaggagactggggaatattatgggttggtgaggcccggctccaactggaggcgggaggaaggggtgcggggcgggaagggggggtggtggtggaagggagtattatgggctggaggcctcctgcgaccagaggcaagagtattatgggctggcaaggccttcggtggccagaggggggagcagcgggggatggcaccggctgcatgtgactgagggggggccaagttggggggggtggtgagtgggggtgggggagcttattatgggatagctctttgtacctactgcggggactgcttctccagaagatattatgggatgtcgtgtgtgggagggggagtggggctggggggattattatgggatggtggtgcagaatggggagggcctgaggagctcttctccagcccccccacctcctcaacccttactcgcctaccatcctttctaaggtcaccgtcctctctcagactccccaagaggaacacctgaaacccatctccctacacacacagactttgggcacctcaacccatcccgggcttctcccctaactagcagccacctccggggtgctgaggagaaaagtagcccctggcgaatggggagaaagccctaaagcagggtggtggtggccagtggatcacaccttccacctgcacgacggcctcctctgcaccctagccccttataccaccgtccttccccttctccctgcatcccacaaagtgggggccctggatctttctcccctcccccctcccctccatttcctctccagctccctccacagccgtaaccagtaaaacaggcggccagctattatgggatggctgctcccagcagctctgcagggagggggcggtcaccgcggaatgtctcttgtgggtggctattatgggatggccgcctctctttttttgggggggtaaggctagcgaggaggattattatgggatgtgccctgcacagctgggtggggctgtccaggagaggtgaaactctagggaggggtggggagggggagggaaggaagagggagggaaggagctggggagggtagggtgagccctggagtcggacctgaggcctggcaggagtaactggctggagaggtttctttggtgacagctgtttgaaggggcccctggggcaggctccagcgagccaaatctgaaccctggacacctgggtcctttaaacagcttgtgcgctacagggttgccctgtgagtccggggcctgcagagctgcactgcaaatgagaactgagatgttctggccgggtggcataccaaagggagtagtagtcatggatggcgatagtacccgtctcccttccatctttgtcttcctgggtttgagcctggggaccatagctcaggttgggggattgtgcacggagcactttgcttaggttggggggttgtgcacggagcactttgcttaggttggggggttgtgcacggagcgctttgctaccttgcagtcacacccaaaaaacagatagtaggttgcctcctgagatacaaacacctggcatgtcacccccaagccccacgtgatctgcatcctgtctagcctttggagtgcactgtcactgtggctttgcttccctcgt

SEQ ID NO: 22575 - DNA, 1152 bp, Artificial sequence
  DNA replication origin
atactgtagagttttccagaggcttcatgaagtgtgtgtggtgacattattgctcccatggctaatgtaatgtgtgcatgtgtatttattttaaaaatgtattcgctttaatttctagtatggtaagtatcaaaagaacaaaatataagcaaagctctttgagatcctcaatttctaagagtggggtctgagaccaaaaagtttgagaaccagtgctttagtagaaagaattttatccttactctggacaaaggagagagagggagagagagagaagaggagaagagagaggagaggagaggagagagaagagagaaacgagagagagagaaaaagaaagaatattaaggacctaaaatggaggaggcctggaaaaggggatgtgatggaagaaaggataacctaaaaagggtttggacttggatgttgttgagggggaaactctaagttagttttgccttgccccaactatcccatgctggatgccaagtctaaattgtcacaagtcactatgcgagaaagaatgtagttctgtccataggaactcttgtattaggcctcagtggtgagcaggggaagcctaggccgaaatgaaagggggtggcatccatgagcctagacagaagtcagcagatgaacaggcatctcagtagctttgtccaccaaacctggtgctcttcagctctcaggcccctgtggcggtttagatccagaatgcccattttctgttccatctaaccagcttttagcagtttaatgccctgcccacccaaaggcatttcgtcctcttctgccctctgcacgggtgggctctctgcatcacttcccaccgctggagaaggggtgctctgcgtgctcacagtttaaagaagccatttccagcagcactgccttccctgggccctggcttccacactttgtactcttctgcgttgctaagctggaattgccacccaaaggtccaagtgcccagcccaccttcttgtgtgtacaccctgtaagcctcccagaacgagaggcgttgggagtcgggcacggacagcgcaatggcatgtgtgttcagagggcggaatcctggggacactgtgtgaaggaagacagagagtgggagtcggagggtcggagcagcccctgactggcggcatccggcct

SEQ ID NO: 22576 - DNA, 1486 bp, Artificial sequence
  DNA replication origin
tggcgccggccagcagcaccatcaccatcagcaccccgcgcacgcgatcgcgggcaggcacgctggccgccaccagcttgctccgcagcagcccgtagaccgccagcgtgctgttgtagggcacgaagcacagcaggaagatgacgaggttagccagcaggaggcgcacggtcttccgccgccgctggctctgcgtggcgtcggggcgcgccagcgtccagaagactcggcccgacgagtagaccaccgccgccaggggcagcaggaagcccagcgcctcggccagcagcacgaggggcagcagcctgcctttccacagctcgtcgctgaagctctcgaagcataggcgcacctcgaggtcccggtagcggcaacgcgagggcctgtgcacgcgggcggcgggcacggcaaacaccaggatgagcgcccacacgcccaggcagagcagccgcgccacgcggggccgccgcaggtggcgcagtcgcagcgggtgcacgatggcggcgtagcggtccacgttgatgagcatcaggaagatgcagctgccgtacatgttcatctggaagatggcgcccgtcgtctggcacaggaggtcggggaagggccagtggtgcagtgcgtagtaggagagacgaacgggcagcgagagggtgaagagcaggtcgctggccgccaggttacacatgtacacgctcaccaccgagtgcacgcgcagcgcgcgcaggaagacccagagggctagcgcgttgagggggagcccggcagccagcaccaagctgtagaccaccaagtgcaggcggtgggtaggtcggtagtcaggacacgggagaacagaactgttggttgaggagctgttggctaacatcgtgccaaagtgggattgggagctaggctggggatgccatggagcacaccagaatcatggcatggcattcacctccggggctggggcctagaggctgtacagacatggtcccaaaacaagcagagggaggtcatgggaatgtgggctatggctgcagggacagatggctgccaagggttgggtgcgtttggtcacagcttcatcagcagcagagacctggaataggaaggcaagccggaagttatacagagacagggctgcacacacaaatgtttagctccactggcaggccttctgaatcttttctcagcctcaagtctgccattgggctagaataggttcctacggcaggactatatagtatagtgttaaacacccaggtttgaaggcagggactcggatgcctaggtttaaatcttggttttgctaacttgcctagttgtgtgacttcaaaaaaattaatcttggctgggtgcaatggcttacacctgtaatcctggcactttgggaggccaaggcagaccaattgcttgaacctaggagttggggaccagcctgggcaacacggcgaaaccccatctctacaaaaaaatacagggccaggtgcagtggctcacacct

SEQ ID NO: 22577 - DNA, 1545 bp, Artificial sequence
  DNA replication origin
gacagagtttcaccgtgttagccaggatggtctcgatctcctgacctcatgatctgcctgcctcggcctcccaaagtgctgggattacaggcgtgagccaccgcactcgtccctgttgttgtttttttttgagacacagtcttgctctgccactcaggatagggtgcagtggcatgatctcggcttactgcaacctttgcctcccgggttcaagcaattctcctgcctcagcctcccgagtagctgggattacaggcgcccatcaccaagcccggctattttttttttttttttttgtatttttagtagaaacggggtttcaccatgttggccaggctggtctcgaactcctgacttcaggtgatctgcccatctcgggctcccaaagtgctgagattacaggcatgagccaccatgcccagtctcttctctacttttcttgcagtaacagaattgttcaatctgaatatccaaggtgagactgtattcatatataatctgggtaaatgactggcaaaatggcagggaaggaggagctaaggatgactctcctggaacccttcctcaactccccactgctgccgcctctcccttggccctggggcaccaaatccaacctttgtcctgggcctcaccttggcatagtagacgtggttggagcaacggtagtgagtgaactggcagaaagactcaaaccaggaggcataagggaggttggagcagacagcacctgagaaagggcaggggtggagaagatgaacccgtggggagcttggggtggggctgtgggcaatggactccacgccatggggagggtggagagtacgagctcatggtgtggtgccagccatgcccttccccgcctcacatgagcacaggggtttttgccctgaggtttgggtgaacactctgggtgcctcggtttcccccctagtctggccctcaccatcgggcactaagccgtggttttcatattggtccagctggacgagtgtgggattccggcagccgtgggttgcacggagacggcaggtagtctctgccttccaggttggagtcagcagtgcgaagaagcgttcgtattcggtaggagagagagggctgcctggagtggaggcctgagtcgaatcctgggctgcggcaggtgccagaggcaggagcagcactgcggagcgggcgaacggatgatggaaggaccgaaccccaaaacccgctccgagaccaggacagacagacccagactggcaaattaggaacggggtgagggttatccctgctgaccagggcggggggagtctagagacagaggcaaaggtccggccgcgggcggggggagatgggagtatcccaggacctagggagccgacccagcgcgaccaccatgaggaagcgatccagaaaccgtaaaagcagagctctcgggagggagaggactagcccggggagagtctgttggagcaggtgtaaacctctcacccttcaggagtgagggaaggaagccagcggctggcttcctcatggccggagaagatccgcccgcgtccc

SEQ ID NO: 22578 - DNA, 1409 bp, Artificial sequence
  DNA replication origin
ttggggggagggaggggggcgtggaggaactggggttcgcgggagcacgagctgcagcaccacttccgggtgagtgcaaggggagggcagcaaggagggggggccacccactacctcgcgcccccgccctgcgggtgtctcgcgcgcgttccgtgcgtgtgagtgtgtgggtctgtctcgctccagaagtgcgtgcccgcgcgctgcgccttgcgctttttcccctccctcgccccttcctggtcctcccaccctcctcggctccctcctttcccagcaaacgccgcccctcccgcgccctggctcaggctctggcgccgccgcagccgtcgccgcccggtgagtctcgcgccgctacagccggcgcgcgccaagctgcttgctcctcccccctccccttttccttgggcaggcggggaagggggggtccacgatgtgactgtgtgtgtgtccgtcccggaaccggaagtggttgtggaggagcgggcgatgggaaggaatgggggggtttagggggcgggtgcctgtctggtgggtggcagagttcagctccctggaggggaaggagggacgtcccaaggaagggtctttgagaaaggggtaggggacgacatcaggagaaggctcccaggaactgtctcaggggagcgaaggttttgaggggacagctggggtctccagtagatagaccacggtgcaggctgagggaggtacttcttggcacaaggcctcgggtaggcagggggcgaagtcctcgaagaagtggggggaaggctagaggaagtggctgggcctgaactggcactgtgcctgccacaaggtcttgtgcatcccccagccctcagctttgccttctgaagccactcctcaggggcacagaccctcctcctcctccatctctaatgttctctgacccctggttacctgtggcctgggaacgaacaaggaccagtctctgagcctaggagtgaaacccaaacgctggtgatagaattcgtcttagtttctgggaattggatttatttctcttgtatccacgtagagggtagcactagactgctgttattatatccacccgtctttggattgctggctggggggtctgcctgccttccagactgactgctgacaaataattcctgaggttctccacagttctctggtggctgcaccctgcctggcccctgtaacctagacaatttgtttacagaaagttcaggagccctggaaaggagaaggaataagacggcaggaggaagagagagagagggtaagatgatttttgggttaatggcttttctggttttgggggagaaggggtcacaaccaaatggggcgtgtgtgtgtttcacaatgtgatagaatacttaaagtaatagcaattgtaatgctgagattgttgtggagag

SEQ ID NO: 22579 - DNA, 995 bp, Artificial sequence
  DNA replication origin
acgcacttctggagcgagacagacccacacactcacacgcacggaacgcgcgcgagacacccgcagggcgggggcgcgaggtagtgggtggccccccctccttgctgccctccccttgcactcacccggaagtggtgctgcagctcgtgctcccgcgaaccccagttcctccacgcccccctccctccccccaacaggctcagagaagagctctgcggagagaaggcgggagcgccggaaacgaaaaggggggagggagggaaatagcaatgtagggggggcgctaatggagaaagaggggcgtgcagaagccgagtcacttccgggagtggctggaacacttccggcgccgctagcgctgcgagatattcagggcagaagttacgataactcggggcggaaatagcttctgcccagcgactgggaagaggggatgtgacgctatagcggaagtgaaggcgggttccgctaggggcaaaagctgaaaccggaggactccggccctgagcttccggaagggacatctggggaaggtgggggggtggaaacgcgacaggttcatgaattatccatcaaggtaggagaggaggtgtgggttcttcagatgctgggaccccgtttctcttccctctggatgttgaataagctgatgtaggaaattaccattattttttctgatacccccaagaatgtctcaatgctttgaatatgcgggaaaggactaggacgtatccttgtttttcggaggtccctacttaggtccagttagaaactctcccagccatcaaaatctgtctctctgacacatcccttactttactttggtcttttcttgttgcccatacccacatctctatccccttaccctgttttacttaaatatagcacttattactgcctgatttattgtttgctgtccacctctcccaactaaaatattggctacaggacagcgaggactgaattgttcgttgctgtatcctcatatcctggca

SEQ ID NO: 22580 - DNA, 801 bp, Artificial sequence
  DNA replication origin
ggcagcctaggtggagttagggaggcccaaagggaggctgggaagggaggactggctcagggggctctgaagtccagagaatggcacacacacagacagccaggacagacaagacaaaagggactgtaggagaaagggaagggcaaatgggagtccctttctcatgtagtgcagcaggcgactccccaaaacccatctgtcagaaaacagattttagcagtgggctgggggtgaagtctggggcctcactaccccattcccaagggggagccctcagggtgatgccggcatccttggagtaggatggggagacagagaaacaaatggtgtggaatgggacgagaccatgaccgatgagggcccaaggagcccccagctcacctcccacccacctctggagcagcacgcaggggctgcggaaacgaggtgggtgggtgttcatgagggagagagtgagcacgccgcacaccaccacaacatcaggccgggaaacgcacatgagaggtaaagtgtgcaggaaacgctgaccactgagtgagctgagcacagaatgtgggaaggagagagtgcaaatgtgagacgagagaacatgagagtcagctgagcggagcggtatggacggggagagggtgcaggagcgtgtgcaaatggcctgtgaaggtggaggtgagtgtgcaaggctttcatgtgagtgcacaagggtggggacagggacccgaagtcacagatatgtgaggcccccacctgcaggagggcgagcagataggattgcccgtggggctggggagtgttccgggtggt

SEQ ID NO: 22581 - DNA, 1129 bp, Artificial sequence
  DNA replication origin
tcttcacccagcctccccatccgtcatatccctcccagcctttcccactcaccttccccacggcccccgaacaggaatggccgcagggtggcaggtgcctctccaaggataagcccatctccatcacctcgcatggagtctgagttggggtgtggggttgcgagcccatgaggggctgcaaaaccatagtccagaaatccgggattggcagagttggggtcccctccatcctctcgagacacggtgggaccccacacgatagcccaggggtattgggatgagggcggcccctcctcaaagcctgatggggtggctgggggtgcagtgccaggcaggacttgccgacgtgatcttgggacccgaggagatcggcttggtggaggtgctcgctcccacacgcacacatgacgtggggccgaggggcctcccctggcacacggggggcgggctggggctggtggggttcgaggggaggatgaagagccctgagcaggcggtgggaggggcagcaacagcagtggccagagagggaggaggtgggacagcagcagcgcaggcctgcaagaagggagagagcgtggctgagacacaggcctactgtgggcctatgtgagggagggacaggttcacaccagaaacctccaggtttccctgtgaaagcaggtgggccttgggaagactcgcctcatttcccatcttccaaaggaggatggccctcaggatgggaaggctctggatgggtctaggaaggaaggagtcatggccccagggaatgtggtctccaggctccctctgctgggccaaacttaccacatcctggactccatgtctgaggtcttcctcagctgtgacccagattttcagcctttactgggagaaaaagggggccgtcacaccccagccctgccctgtgtacttccccagctaattcatccaccaattctacccgcatctgccctcccaggccacccagctgccagctatgcggctgcacccaggattcactggttgttagcatccttttgggggaaaaactccagcgtggttgcctgaccagactccagccccatctacaacttctcaggtccctgttacctctccaccccagggtctactctggcttctctga

SEQ ID NO: 22582 - DNA, 1328 bp, Artificial sequence
  DNA replication origin
gtttaatcatccaagtgcataggtgccctctgaagggaggtggagtcaggaagaaaccaccccctcaaatgtggctctcctgggtaaagaatcctgggaaaatcgggatggttggttttgaaagagaaagggtgtgttctcagagctgagggtggtggatccaggaggggcaggctccccagagggagtgaagataggatacccgtttcctgtggattctgggtctaaatctgcccaatgggccagacgcagtggctcacgcctgtaatcctagcactttgggaagccaaggcgggtggatcacctgagatcaggagttcgagactagcttggccaacatagtgaaaccccgtgtctactaaaaatacaaaaattagccgggggtagtggtgggcgcctgcaatcccagctattcagagggctgaggcagaagaatcccttgaacctgggaggcggaggttgcagtgagctgagatcacaccattgcactccagtctgggcaacaagagcgagactccgactcaaaaaataaaataaataaatctgcccattgaatcttcccagagaacaacaagggaacaagatgggaaagtcacgggaagggcgtggggaagcaggcagtgggagagatgggaaggggtgaagggctgggagatggaaggctggttaagagtgagagaggagaaatgtgaagaggaagctggcctggagtgcagggtgagagagagcaggcagtcctgaaaaagagagaactgggaagagaggaggagagtgggtacagaagactcgaactgtggaggatgccgaagggaggaaaggatgagagaaaaggtcagggaggggaaacggagaggatgaaggggtcacaggtgcaggggaagaaggggcaggaggagaaggagagagcggtccaggcaggacagccagaggagtggagagtaaggggatgggagaaaaggggggaaagcccaggatggggagaaaggaagtggggaaggagagaacataaatgcttaaggaaaaatgacacgaggaacgggctgggaagcagaggcgggagcagcaaagatggaggagttcggaattgctcccccaaatgtaaagggatgtggagataccgaaagacatagggatgggggcatggtgggaagaagggagagagaggggaaaggaagaaagctagagggagggagcgaggcgtgtagagcgaaccagtgaagcggagaagggctcccagggcgcatctgtggccagctgactctaggactatcgcccctccgcctgtgcatccccacccccagccagcgccaacccagtccctgggcccc

SEQ ID NO: 22583 - DNA, 1604 bp, Artificial sequence
  DNA replication origin
ggtacaggctggtgggcttctccttacaaggagttcagatttattccaagtgtaatgaaaaaccactcgaatattttaagcagagaagagcatgacatgcttttgatttttaaaatattatcaatataggaaaaactagtttgtaaagacaagggcagaagcagggaccagtgaggaagctattatgataatctggatgagacatgatggcttagaccaagactatagcaataaagatagaaggagatgaattcgggatatattttggacgcagagcccacaggacttgttggtgaattagatacagggagagaatcagtgaaaaaaaggggaagggagggatgtttcctagatttttagcctgaacaactagtagttgtgaagcctcaggatggggatcactgggagaaaaatggattgggggtgggggaattcaagacatctattttagtcaagttagctttgcatggctattagacatccaagtggagatgtcaagtaggctgtcggataaatgagtctggcgctctggatataaatttaggactcactgacatttacatagtatttaagccctgggaccggatgagatcactggacagagaatgtggaaagagagaatggccaaggactaagccctaggaggctccaacatttagaggtcacccgaggaagactaagaacagtcagtgaggttggagggaaatgaggagagtgtggtgtcctggaagtgccctgaggaaaaacagcgtagtgtggtagagagggatgggatccaggtggtgggagaaggggcaggagaggctacttttgatagagacattagggaaggcctcccagaaggcgttggatctaagtgagactggaatgaaaacagtaagtcattgtgaaaagccagggaaatgtattactgagggaacagcaagtgcaaaggccctgaggcaggttaaacctgtctccaaccaggaaatccaccaggtcccatgtggctgaagcatagaaatctttaggaaaggcaatcagagagccacctaagagccaggttatatagggtcttgtaagtcacagcacggagtctaggtattccagtgctggaaaagcccaggaatttcgacgtgatccacttaatgcatggtagcagggccagagtgaaataggggatcaagctgtggggataatccaaagatggtgcaaggtccttcctccccagtcctttcctccaccccttgcccccagccttgacctcaggcactttctacagcgggcaaaaccaagttgggggacaggcagtggtgactcacgcctgtaatcccagcactccgggaagctgagcgggaaggatcgcttgagcccaggcgttcgagaccgggctgggcaacacagcgagacctcatctctacaaaacacaatacaaaagaacaaagttgggaatgcagagcattgagtgactcagaatctcagaaactgactgaggcgaccatgggtgtccctggagttggggtgaaggaggtggggagactgccatcagaacccagggaagcggacggtcgctggaccctgccagcctcttcagccctccacctgggacatagcctggcttgact

SEQ ID NO: 22584 - DNA, 1148 bp, Artificial sequence
  DNA replication origin
gagcgggaaccggggctgcgtggggcgcttgcgggccagctggagttccgggtggccgtgggcttggtgggccccgcactcggagcaatgagggacttagcacccgggccagcagctgcggagggtgtactgggtcccccagcagtgccggcccactggcggtgcgctcaatttctcacggagccttagctgccttcctgcggggcagggctcgggacctgcagcccgccatgcctgagcctcccacccactccgtgggttcctgtgcagcccgagcctccccaatgagcgccgccccctgctccatggcgcccagtcccatcgaccactcaagggctgaggagtgggcgcagggcactgggactggcaggcagctccacctgcagccccagcgtgggatcctctaggtgaagccagctgggctcctgagtctggtggggacgtggagagtctttatgtgtagctcagggattgtaaacacaccaatcagcaccctgtgtttagctcaaggtttgtgagtgcaccaatcgacactgtatctagctgctctggtggggccttggagaacctttgtgtccatattctgtatctaactaatctgatggggacgtggagaacctttgtatctagctcagggattgtaaatgcaccaatcagcaccctgtcaaaacaggccactgggctctaccaatcagcaggatgtgggtggggctggataagagaataaaagcaggctgcctgagccagcattggcaacacgctctggtctcctttgacattgtggaggctttgttctttcactctgcaataaatcttgctgctgctcagtttttgggtgcgcgttgctcttatgagctgtaacacgcactgcgaagatctgcagcttctctcctgagccccgccagaccatgagcccaccgtgaggaacgaacaactccagacgcactgcgttaagagctgtaacactcaccgtgaaggtctgtagcttcacttctgagccaacgagaccacgaacccacgggaaggaagaaactctgaacacatctgaacatcgggaggcacagactccagacgcaccaccttaagagctgtaacactcaccgccagggtccacggcttcattcttgaagtcagtgagaccaagaacc

SEQ ID NO: 22585 - DNA, 1678 bp, Artificial sequence
  DNA replication origin
agcccttgggtggtcgatgggactgggcgccgtggacagggggcggcgctcgtcggggaggctcgggctgcacaggagcccatggagggggtgggaggctcaggcatggcgggctgcaggtcccgagccctgccccgcgggaaggcagctaaggcccggcgagaaatcgagcgcagcgccggtgggctagcactgctgggggactcagtacaccctccgcagccactggcccgggtgctaagtcccccattgcccggggctggcagggctggccggctcctccgagtgcagggcgcaccaagcccacacccacccggaactccagctggcccgcaagcgccccacgcagccccggttcccgctcatgcctctccctccacacctccctgcaagctgagggagtgggctccagccttggccagcccagaaaggggctcccacagtgcagtgggggggctgaagggctcctcaaatgccaccaaagtgggagcccaggcaggggaggtgccgagatcaagcgaaggctctgaggactgccagcacgctgtcccctctcagtggcgggtgcctgtaatcctagctactggagaggctgaggcaggagaatcacttgaacctgggaggccgaggttgcagtgagccgagatcgtgccactacaatccagcttaggcaaaaagagcgagactccatctcaaaaaacaaacaaacggccgggcgcggtggctcacgcctgtaatcccagcactttgggaggccgaggtgagtggatcacaaggtcaggagatcaagaccaccctggctaacacggtgaaaccccggctctactagaaatacaaaaaattagccgggcgtggtggtgggtgcctgtagtcccagctacttgggaggctgtggcaggagcgtggcatgaacccgggaggcagagcttgcagtcagctgagatcatgccactgcactccagcctgggcgtgagactccgtctccaaaaaaaaaaaaaaaccaaaaaaaataaaacaaaaaaacaggaacagacggggcgctgtggctcctgcctgtaatcccagcactgggaggacgaggtgggcggatcacttgaggtcaggagttcaagaccagcctggccaacagtgaaaccctgtctctaaaaaaaatacaaataaattagcttgaacctgggaggcggagattgcagtgagccaagacggcgccactgcactccaccctgggcgacagagtaagaccctgtttcaaacataaacaaaaaaagaacacaaaaattttctgactaggaggaggatagagagtgttgtgggtatttttggtggtgttgtttttgttttttgagacagggtctcactctatcgtctaggctgaagtgtggaggcacgatctcggctcactgcagcctcaacctgccaggctcaggtgatcctctcacctccggtcagcctcccgagtagctgggactacaggtgtatgccaccacttccagctgttttttgtattttttgtagagttgaagtctcccaattttgcctaggctggtctcaaactcctgacctcatgcaatcctcctgcctttgtggctgactgcaacaaatactacttgagaccatcattacaacagttactactgttactacttgagactgtcattacgagactgaatgaagggac

SEQ ID NO: 22586 - DNA, 1916 bp, Artificial sequence
  DNA replication origin
cccttcttcgtgcccaggggacccctctcggcctcaggctctgctcccctgagcttggcccatggccccggcgcccctgggactcggccccagccatctcaccacccgcgccagggggcggggctcccacggcccggccccgggtgggcgggtctatcgtgacgtcacttccgcccgggcctggccgaggttcgggctccgttggccgagggggccgtacggaggtggcagctgtgggaggaggcggcgtggaaggccgaggagctcaagcccggaccaatccccacgttccgggccgcgaccctgaccctgcagcgtaccgggaagcgaaaccggccggatgggccgctgagcccgaatcgggcactggtgaggctcgggcagagctggcagccccggacgggagcgggcccacggggctgcagggtctgggagcccgggatgcggggtggggagaggagaggctcaggcctacctctcctgctcgcctggcggggaggcgggagctagaggagtcgcagacaggcgcggggggcttagtgaggcccgcctgggggaggcctgagtgtaaggagggggcggggtgactggggtcattaatggggcggaggacctgcacttggcattctcatctagaacggtgtcgtcggcgggaggaggggagagtatgctaccggccagagctttgggaagaggatggctctgagtgggggagggaaaaaccgagagggttggaaaaattttccatggccctaattgagaaagaggtttgaagagcccttccctccctagagggttgtgtggaacacctggagtagggtctccctggagtttagggggtcagttacaggatttggaaaggacagtgctctgagagtccccacactgagtgggtgtgcaaaaccctggccacctccaagtatctgagcttccatatctttccagtgtggagccccctggagctgagatcaggatgttccgcttcatgagggacgtggagcctgaggatcccatgttcctgatgtgagtattccctccccctcaagctctcccactccaggtctctgagcagttcaggcagacatcggggttcccattgctaggaatggttggaactggctggatacctagctcctacctagcaggaagtaggcatcggtgccactgttgctctgtgcgtatttttttgcagggtggtggagggattgacagtttggcgcttctgccatccatactatgtgctcactccacagggatccctttgctattcaccgtcagcatatgagccgtatgttgtcaggtggctttggatatagccccttcctcagcatcacagatggcaacatgccagggaccaggcctgccagccgccggatgcagcaggtaatgatgctgagacacacctgagacccaaagaaaggttggaggttagttaggaaagcacttaattttcttgcactacagccaactgagcaagtgaaatgctctaggagttggggaaagggtcaggaaaaagggctttgtgactcccttttgagaggatggaaaaaaattgaggccatgggcctggtttgggattgtaaagagataggatgtggtctctaatttctgttcctcatgtgttcctgtaggctggagctgtctccccctttgggatgctgggaatggtgagtctttatctccctgtgtccttccatctcagacacactctctacccttagatattattcccaaatgtgcctcttaggaatagtttcatgagtaaccccagaatcttctctttttatggcattcacaaagctctgagcctgttgggtactaggagccctgtgggttaaaggtgttaaactcttgttgggaggccgagatgggtgatcacttgcagtcagaagttcgagaccagactggccaacatg

SEQ ID NO: 22587 - DNA, 1175 bp, Artificial sequence
  DNA replication origin
tggggattggtccgggcttgagctcctcggccttccacgccgcctcctcccacagctgccacctccgtacggccccctcggccaacggagcccgaacctcggccaggcccgggcggaagtgacgtcacgatagacccgcccacccggggccgggccgtgggagccccgccccctggcgcgggtggtgagatggctggggccgagtcccaggggcgccggggccatgggccaagctcaggggagcagagcctgaggccgagaggggtcccctgggcacgaagaaggggagctcattagtaacctcgatttgggttctgtggactggaagaggctcccataaggcaggggaggagaaggagaagaggaatccattcttcgggagggaccgggttggaggttgaacctgggggcgcagtgcagcacgttctctctccctcctcaaggggaaactggaggacgaggggcagatgccccttggggagaggcgggcgctctgtgggcgacgaggcggggcggatccctggggggagctttaagccgactctactggagaagcagtctaccctagagggaggatgggcagttttcctgcgggggaggcgcttgggcctgtccccgcttgaggaggagcgttcctggcagggcggagtccccggagtgacgcagaggaggtgaaactctccagcccagatctagttcgggcttcagaaagtcggatggggcagaggatccaggttggggggttggccgccagatggcgctcctcggccaggctggaaccggaggcccttgagaactcgcgttggagagggacctggaccctcccccgttacccatctgtgaagggttggactggggaaaggctacagttctgaatctattagtttaatgccactctccccttccttttactctaattcttgtgtcctcaagagctcccagtcctgcactgacctttcttggttgctttcttaggtcaaaggtctaaagtttgggggaacaaaggagtggagagctcagttaacctggatcacccaggggaggagctaaaacggggcccagaagacctgcctccaaggccagagactgatactttgacatactaaatgtcttgcataaaatctggctctgctggagagaagggccttcccctttggggtcagggcatttggact

SEQ ID NO: 22588 - DNA, 819 bp, Artificial sequence
  DNA replication origin
gattcccattctctgcctctccatctctctggaattttccactgcagctgcctctgctcccagacacccctccctgggcaaaattcccggctccctccgcctccccttccctaatcacacctcattcccacccccagccctgaggcccagcccacagtccggcccacagcccacgctaaccctggtggtcccagttagagaagtgggaggccaggtcccttatggaagggtgagagggagtgtcccagcctctctttagggcggggagaagggacactggaggggctggtcccctgtggggctggagttgggggagtggccctcctcacatccccatataaggcagggcaagcagttaggcttctggattggctgattcaaatgagcattccacctggcaacagggtttctattggctatcaggaaaaataggaggaaggtggatggaggttgttggtggcggtgattggaggggggagaggagtggaggtgaccggagtggggggcggttaccagggcaacagggtaagagcccagcagggtgtccgagacagcaggcggggctgggaggtggagtggagggaagaggaaaggaaggcgggagggagaggaaagagcctgatggggagggagcgagactgggagactgggttgttggttgggcgggggggggagtagcaaaggatcgaggagagggagataaatgaagcaagaggagtacagagatggagacggtgagagacggctgaagacatcagccagtgagtcagagaaacagattgagagagggacatggaaagatctcagaaaagatggaca

SEQ ID NO: 22589 - DNA, 1675 bp, Artificial sequence
  DNA replication origin
gggagaggaaagagcctgatggggagggagcgagactgggagactgggttgttggttgggcgggggggggagtagcaaaggatcgaggagagggagataaatgaagcaagaggagtacagagatggagacggtgagagacggctgaagacatcagccagtgagtcagagaaacagattgagagagggacatggaaagatctcagaaaagatggacagagtccggcaaggaaaaatcctgggtggggccccaagatttttgaggagactgagactgaaatattgatagaaaagtcagaaagagaaactgggaggcgtgtacatcaagggaccaaaagatggtgtatttaagcactcaaacacaaaataatgataatgatcatcaacgtagttttttattaataaaatgaaaataataagatgaggaataatgataatgacagacaaatatgggagtgcacgcacaccaaaggtctttttccaaaccccagccttccactctgtccaccttcctgacctttaatacacaacccagcccctgttcccttctgaaatcccaagcttttcaaaatgactcaaagataccgagattgagggcgaggagctgaggatgtgtggaatagggtggggctggaactccagacctggacctgtattatatttgcaaaggaggcaaatataacccagaaaggctagggaagatggcagcagaggaatgagaaaagctgaaggatggaaaatgtaaaaaatgaggacagaaagaggagttgaggaaagccagccaagaatagagggccaggtgcctgactcagataagacaagagcagggttgtctgggaaagatagggaaagagaccagaggtggaagggcagaagagagtcagtgaggagtggagaagaggtgagagaagaatgggagcgattcgagttataattggttgtgaaggaggggtctaggtacagatgactgaggacggatgaagagaaatagaaggaccaggcgaataaaagtgaggtgagacgggcgaataagagaggtagaagatggaagagagctggaagacagcaaaggagaccagggggcctgactccccccggctcacagcacggggccaggaagggaggcacccggcaagggtcacaagtgtcaatctggcgggacagaaggctgggccgccctttctgccctcccatccctcctcaaggccatccagagaatgtggatggaggatgagagggggaaatccggcgtggtgtggaaggagcgcccgaaccctcttcctcttctttaagcttttggtttctcaaatacctgccctatcttcccatctgctcccctcaccccaccccttggcaaaatcccagggctttttttggggtcagtaggattctggccacctctccagtccgcccccaaaagccagactccacattcgcaggcagtaggttgggatttggaaaggtgcctccccgcaggaaccccaccccttcccacctcctcgccccactctttctccgcggccgtcagtctctccatttccccctcctggtctcgtcctccctcccgactccctagctctccctcccctcgctttcatcctcctatccccacctctccaacctcctctttcatccccctcccctctcctctcctccccgctcccgcctgccccaccc

SEQ ID NO: 22590 - DNA, 996 bp, Artificial sequence
  DNA replication origin
gcccctccccgcggcccgaccgtcgctcgcttctctccccggacggcggccgcctctgttttctcgttccctcccctcagctggctttcagctttcttttctcttcatcgtccccttcccgcatacacactgaaagaatctcgaattcctaaaaattagaagcggggcaggactagccttcgaaaaagccgaggctgggcattgcatggcattgcgtcgagctgtcctcgccctcatcagctcccttccccggccccatccgttcgcccttgcctctcttccagccttcctctaatttccccagggaacctgcggagtgtcgctttgggaaattaacgcggccggggtttgggggctgggagccctatcttgtgtgtgtatgtgtatggcggggggggggggcgcggtggttgctgaggggccgtcacacaggtctcccggaggcccgcggagtgaaacggggggagccaatgggattaacggcggtgggagaggggctgtgtgcgatctgccaaggtgcgcccgtgtggccctccggcgggctgtgcggtggcatgtgacttcactgagtaggtgtctttgtatgtctgaaatccagcgagtgtgtgggactgcccgtgtcagttacatgtgtgcatgtggagacgtagatgttctggagccatgttgtcgctttgtgagtgctgagtggctccgctgtgctcccgtgctgtctcaagagtgtggaccagaatggcccaacgctgggccatgtgtctcccatcgcgtgggtgctcctctctaactgtgtctgtgcatggctgtcggccggtgtcggtgtgtgtgcctgtgttgagtaaatgaggccagagggctgcttagcagaagacctagggcccaggtcacatattctcctggaaaagggatcatggaaggacagtgaccagaaggacagaacaggggaggagagggcccggccccttgaactttggtctctggtattctccctccctgcat

SEQ ID NO: 22591 - DNA, 958 bp, Artificial sequence
  DNA replication origin
tgtgcctgtgttgagtaaatgaggccagagggctgcttagcagaagacctagggcccaggtcacatattctcctggaaaagggatcatggaaggacagtgaccagaaggacagaacaggggaggagagggcccggccccttgaactttggtctctggtattctccctccctgcatcagcccagatgggaaagtcaggccagggccatacagacttttggtgctggggcccccagagagaagctgaccagctctttgctctcctggcccaggacgtagggaagagccccctaggtagtggaaatgccatactgaccttgtggcacagaaatgaagacctcacggtggggtggaagggcaccctctctggagtgagagtgaagagttctgagctacccttaaagggagaagggaattgagtgccccccagggcagccgttctgcaccaggctcctctcctatcccctatcctgttccagaaaggacccccccgcccagggtgatctcacacaggagacttccattcacatggaatcagatacacagcgtggcacaccaacaccagatcagatcacacaaggacacctaccgtgttacactgtgcctgccaaggagtgggtggggagagcactggaatctgaattgggaggctagtgtagtgtccagaagggactcagatgtgccatatcagcacaggacgtcaacctatgcctgctaggatcttggggtgaaggagaggggctggctggtgggagggtctcctagactggtccctccctcttctccattcctatcccaccccagtcacagaccttgtttgttgctctctccttgtttcccacgcctgctactcttcccctccttgttttctcttctacttcacctacatttccaccgtaaatggctacttccactacacccatgcatacaccatgggaggcagggatagaggaaactact

SEQ ID NO: 22592 - DNA, 921 bp, Artificial sequence
  DNA replication origin
cagatacacagcgtggcacaccaacaccagatcagatcacacaaggacacctaccgtgttacactgtgcctgccaaggagtgggtggggagagcactggaatctgaattgggaggctagtgtagtgtccagaagggactcagatgtgccatatcagcacaggacgtcaacctatgcctgctaggatcttggggtgaaggagaggggctggctggtgggagggtctcctagactggtccctccctcttctccattcctatcccaccccagtcacagaccttgtttgttgctctctccttgtttcccacgcctgctactcttcccctccttgttttctcttctacttcacctacatttccaccgtaaatggctacttccactacacccatgcatacaccatgggaggcagggatagaggaaactacttgaactgttttggggcggggagggcagaaagtgggaggggtgctgggaatgtgctaaggtgtagtgtttggccaagtaggggcctgaggattagggagacacagatggagagaaacaaagaccttagaagctgaaggggaagctgggagggatgcccaggagagagagtcctcaggaaaaggccccagaggtagacaaaaggcagagctgggcgggcagtggcggggcaggcaagggaggcggagggacacaggagggggcggggcactgaggctgcaagcagatggagaggatttgctttgctgagctgaactcttcagccagtgaggtttgggagaacttgatgggggtggggatcattaccctggttgcccgctcctgcttcttcatccctttcccacctcaccttgggtcttggggaaggaggtgtttggtctcaaccccttcatggccctaatgtaaggaccctagggcccctattctgtctctaagctgt

SEQ ID NO: 22593 - DNA, 1703 bp, Artificial sequence
  DNA replication origin
ttcctgtttctgggctgtttctctgtgcctggttcagcacaatagagctggtagctttccactgggctcagcagtgtctaggtcttgtgtgggttagcagggaagtgtgtattgctggggaggagcatccctgagaatccaaaacaggacataagtcagctctcagaagagctgggctccaggccacccctggagggctgatcttgtcttcttgagtcgtgggtggtaggagtgtgctgctgcttttgtatcaaagggaagggtcctggcagaatgggaggtcagccaccctcctccctctctacccttttgtcgcactgactggagcccccgggaaagcaggagacaggttaaaaacagaagcgcgaccatttctttattaaattatacaaaaagggaggggaggggggcagctgtggggctcggccccaaccccggccccaccccggcctggcgctgtctgagaagaggggatctgagggagatccagggatcaggcaggatagggatggggcaggacatgaggctgggggatgcagaggttaggtgggagaggctaccggaggaagaatgaggctggtaggggagggagaaagagagcaaagagagagaggagcaattgggggccagctggagagctcagatggagcaggtcaggaggtggaacaatggcagagtgagggtggagggcgcagtgtctggagaggcggaaatgagaaggctggggagaaagaagagggtggcagctctggtgcagggcccagagcagggagccaggtgaagagtggctggacttggctgcccccacccccacctccaggcccagagaggcctcccaaccccagcctgttggcaggggctcacgccgatgccccattttctgtcttctgccgtttgggatccgcttcatcctgtggagagggagagaatgggggagctgtaaaatgggaggggagacctccccctgtcccggtcctgttccagcccccacccctgccacacagggatctgggtccaaatccaaagggcgcccagcccggctgcatccctgacagcccctcaggcccagcaacccagcccaaacctcctcttcggcagctctcttcagcgcgggcccttcatcatcctcttcttcttcttcctcatctgaggagccagaaatgggtcattggggaagggcaggaagctctggcagagcccccgtggtcgccctcagccctgcttcaggtcttcaaacccaccctgactctgctctcctttgagcccagactttgccagcccagcctcccctgcccctccccaccttcttcttccccttcatcttcctcctctccatcctcggcagtttcttcttcttcctcctcagccccgttctcctcctcctgtggggaccaggagagggagtagcctcaggctggctgcatgccttgcccaccatcaccaccaatgggactggagcctgggtgataaaagggcttgggatgggccacagggtggggcagcaagggtgacagggctcaggggaacggcaggacccagcaccctcggaaggaaagcagaggaaggatgagatgattgggagggaagatggtagggcagatgtggtcctctcccccacccctccacacctccaccacttctttctttcgctctttccggcttgccttctcctccaccttctccttcttctccttcaggtcctg

SEQ ID NO: 22594 - DNA, 2115 bp, Artificial sequence
  DNA replication origin
cctgagtttgatctctgttaggagatttctaagatttctgcatttctccatctccgcatggcccttgccttctcctcttagttcggaacctctggactggaggatgcttctgagggcatggggacctgagttggagtggggaggggtgttgactcatcaacagcatcatttctcccaggagacgcccgtaactcatccaaggtcaggactacacactgtcacgcacacaggtacactcacagcttttatcttcacgctccctaaccttggcaaattgtacaatttctttgaagctcagtttcctcatctgtacaatggggaaaagcattagatttcatgaattactataagtaaagtgtccaatacagtgcttagcacgtaatgaagcctcaatacaatgtagttattctccatgccccacaaagctggcatgcctagcctcagacctaccattttttggggtgcagtaaggcttcctgtccaccatgttcccagggacattgtactgatgggtggaaaggcaggtctaaaggggtcacgaagttctgggaggttaagggaacgaggaaggagattgagcaacaaggaaagagcttgccaagaaggaggtgtgaatattgggactgaggaggcagcttagagatgggcaagggggcagttccaggcagaaatggttcgtggaggcagaaggtccctgggagagggagcagtctggagggtggggcaggggcgaggagggggaggtggggagacccaggactgaggaagtaaacaaggggagcgccaccacagaggtggagaggtggagggtgctgctgctgggaatcaaccccctcagactttccactgcgaagcgaaaccgtaagccctggggtgcggggggcgggccgggaggaggggaagtggggaaggtggagggaaggccgggcacaggggtgaaggcccagagaccagcagaacggcatcccagccacgacggccactttgctctgtctgctctccgccacggccctgctctgttccctgggacacccccgcccccacctcctcaggctgcctgatctgcccagctttccagctttcctctggattccggcctctggtcatccctccccaccctctctccaaggccctctcctggtctcccttcttctagaaccccttcctccacctccctctctgcagaacttctcctttaccccccaccccccaccactgccccctttccttttctgacctccttttggagggctcagcgctgcccagaccataggagagatgtgggaggctcagttcctgggcttgctgtttctgcagccgctttgggtggctccaggtaaaacggggatggcgggagggttgacctccagccccacaggaggggaccagcagggatctctgtggccacaaaggtcctgaggtccttagctctgtggattcttctaatcccttttttgggcagtccttccaccccgaaagcctctctgggcagagaagaaacagaaacccaagttcttcctgcaccctgtttctccctcgggaaacacccaggctccttctctacccctgcctctcggctcacgccccctccccttggcctctcttttgctcacctagtgaagcctctccagccaggggctgaggtcccggtggtgtgggcccaggagggggctcctgcccagctcccctgcagccccacaatccccctccaggatctcagccttctgcgaagagcaggggtcacttggcagcatcagccagacaggtatgcaccccaaacttgggcaacaggacctccgaatccagcactcaaccccacacccgtgccggtcctctgtcccctgccctgaggtgtcactccctctgaagccagtgacccagtctccctgccctcgcttgcaccgttcctgcccttgctctgcaatcagcgaccctcacgccagcatcccttctctccagaagtggatgcggccagtccaacagaggggtcgggcgtgaggggacggttggtggtcaagagaactcttggggcgggctttctcatcctcaacgggtggctgcctgcatcctcccgggcttcctacccctggagcttctcaactccattctctttcc

SEQ ID NO: 22595 - DNA, 1564 bp, Artificial sequence
  DNA replication origin
tattatgggggtgagaaaagtgggggccgagatgggcaggctctggaacttgtgcccagtggcctggcatcacagggtgggtttgcctagtctttgccctgccagcccttcctccctgtcctttctaccctgggagggcagctactcctttcccacctgaggctgacctgtgatgattgccaatgtgacagtggcattgagctgctgttcctgcagatggatatggcaggtgtaggtcccagcctgggcctggctcacatcctctagtcgaagggtaaagtcgccattgtctccagtcaccaggaggtcagggcctcccccaggaggagtccacttggcagtgaggaaagaccgggtccccacaccagcaggcaggcggcagggcagccccaccctggaacctgctccagcgtacactgtcaagggagttgggggctccagacctgaagagaaaagaaaacccaaagttaaagctgggtgctgcagtggggagggagtgctggggctgcaaggaagggaggcagaagaattcaggagatggtctggctcataagagtgctaaggagcagaataaggtgatgagctgaggaggctcagaaacccagcaagtgggcttagccggaaggagagggaaggccggcaatgacgctggaaggccacgggagaagcaagaaggggtgatggcagctgtgaggctgccagcaatataaaggggtcgaacagtgagacccacagcaatgacgtaggccactcgctgccgagaacctggtttggggacccatagttaggggaggtgacaaggggggcaggaaggagttgtggtcaaatgtgaagcagagtgggggagttacccagaacagtgaggttatacatgatggagacgttgaagccatctctgtaggtgaggatgcagccccagggcccagagtccatggggctgacttggggcaggaagaggaagctttccgctaagtggtgatggggggactcccggacagggactcggccctggccccggttccggaaccaatgcacagaggctgggcggtcagggcggctgaaggagcagttcaaaatgacccagtcggaggctctgagagatcctggggggctggcagtcactgtgcaaggataaagaagacttcatcagcccactggaaacaatttcccaacacagcagggctgccaagccggaagctcctggaaacaggcacctggctttagacttgtcttctcctctcccacatcaccctctccccatctcagcttccagcacctggaggtgcataaagtggatccccaagactccccaggaccactttccccgtccctggcctggagtttacttggcatcagccacccttgccgttttcctggcctggaaccccgcgaagcccaccccctgagctacagatatctgaaatgaatcactttagccccatgctctccccccctccccctccctctgggcactcccgcgtgggtgggagaaggggagctcgggggtgacacaatctctccacagggccccccatacacgtgcttcgggggcaccttccactcc

SEQ ID NO: 22596 - DNA, 664 bp, Artificial sequence
  DNA replication origin
aggcctgccgcagccggcccagtgacctccgttggggtgtgacaagcagtgaccactgggtggcagtgtgttctcatgcctgggaccagaaaagcctccaagggctgaggaacgtggggggtggggcagaggtaggagccccagccggctgcccagagaggtttccagaccggatctcctggaagacttgacaaggcagtcctctgcgcgccgcgcgtgtgtgtgtgtgtgtgtgtgtgtgcgtgtgcgcgcgcgcgtgtgtgtgcatgtgtgtgtgcacgtgcgcgcgagcatatgtgcgcatctgctgcagccggagggccaaggacaagtgctgaagtgcagctgagtgtggggtggggtggacccaaaggacaaaaatatcaaggaaaccagggcagccagcgcactgtgggtggaaggtgggtggaaggacggaggagagagctgcggaggcaaggggcaagggctttttcgggggagcttcagagaaatgattacccaggagagagaaagagagagtgagcgcaagagagagagagaccaagaaagaaacacgaagcagccagaaacagaaaaggggaaggtgagggaggctggctggggaaagtaggttaggaggctagggtgggagaagggagccctcagaggctggggagagacg

SEQ ID NO: 22597 - DNA, 1088 bp, Artificial sequence
  DNA replication origin
gagtgggcagagggagctgggccaaaatcagttcccatatacaggatctcctggtagaggactcaggggtttgagggccttgtggggaccaggtgtggggttactcacccttcggtgccggcacctgacacagaagaagatgcctagcccaatgaaaagcaggaggccggcgacgccccccagcacaatcagggccattggctgcaccggggtggaccatgtgggcagaactgcaagggagagaaatgtgctcaatgcaccgccctcctccacgggccaggggactgaggactgccctgcaatccctcctggccagtctctggtttgaccctggggttgggggagaggggaggggtgcctgggggctctcaaaggccgccagtgctggggaatcggttttatgtttgggcatatccatatccagggcactctggagagagagaagctgtggtctggctcctgggctgtgtgtgtgagtgcatgtgtgtgtgcatgtgtgagtgtgtgcatgtgtgtgcgtgtgtgaatggtgtgaatgtgtgtgtgtgcgcgcgtgtgcgcgtgtgagtccatgtgtgaatgtgtgtgcgtgtgtgcatgtgtgtgaatgtgtgcctgtgtgcgtgtatgaatgtgtgtgcgtgactgcatgcatgtgcgcgcgcgtgtgtgcacatgtgtgaataatgcgtgtgcggatgtgagtgtataagtgtgtgagtgtacgtgtacgacagtgtgtgggtgagagtatgtgcgtgaatgtgtaagtgtgtgtgtgcatgcatgtgtgagtacatgtgtgtgtatgagtgtgtgacagtgtgtgagtgcatgggtgtgagtacatggggtgagagtgtgggtgtgagtgtggatgtgtgtgtagtgtgtgtatgagtgtgtgcgagtgtgtgagtgatgtgtgtgcgtgtgtgagagtgtatgggagtgtgtgcatgtgtgtgagagtgtatgtgtgtgagtgtgtgtgtaagtgcgtctggatttggagaaaagccaggagccagggaggggggctctcggtcaggtggaccccatccctaggctgtagacctgagggagtg

SEQ ID NO: 22598 - DNA, 834 bp, Artificial sequence
  DNA replication origin
ccggcaccgaagggtgagtaaccccacacctggtccccacaaggccctcaaacccctgagtcctctaccaggagatcctgtatatgggaactgattttggcccagctccctctgcccactcgtaagttcccttgctgccctgtcccagatcccactcaagggagagacaggaaggagcagagagttaattccaggatagatggcctgggccatgtaactgcttctcctgtcgcagcttcccccactccccccaccaaggggcacctcccttctggaggcctgggaccctcgtgactccctttcttgtccctggacagcgccaagcagagcggatgtctcagatcaagagactcctcagtgagaagaagacctgccagtgtcctcagtaaggatctgggaggaggggttgagagaggggaaagggggagggggagggagttagagaggagggggaggaaggggagcaaaggggggcaggaagggaggatggagaggaggaaggagttgaggaggaagagctgggaggggtggaggtgaggagatgggggctaaaggggtgtggtggagaggatagaggggtgggaaaagatggccaggagctagaaggaggcagaagtgggaggatggagctgaaggagcagcaggccaggaaaggccctgctggaaagccactggagctgtgctgcgctggaaaggccattggaggtgctagaacgcaaaggggttgcagtggggacagacctgctccccttcttctttgttcctgcagccggtttcagaagacatgtagccccatttgaggcacgaggccaggcagatcccacttgcagcctc

SEQ ID NO: 22599 - DNA, 896 bp, Artificial sequence
  DNA replication origin
tccccctccaggttctccagggcagaaacagcaggtggctggggaggaggggccggcctaggggagaggaggcagcttgagggggaaagggaggcaacacaggggacggggcaggcaggggtcgtcttacctctctccggctgcgcccagcactgccatggagaccgcactcccgacgcggctctctcgggctcccgctgcctgccggctccagctcgcccgccctcctccctccttccctctctccctccctcccttcccccgggcctccctcctccccctcagtcccggcctcccaggctcagcccacggctcactcggtctctgcccctctcactctccaggaccctctctcccggggtcgtcctgccagtgagcccaggccagagggaaggcaggacagctttgtggggggcgggggggggcgggaaacgagtgcagggtggggaactggacggtggtgactcggggaggaggggcaaggaaggcgctgagagggagggcggtgaggaggatggctgggaaccggcttcattggtgaaatggttcatgtcctgcccccaccccttcccgttttcaacacgaacacaagctccaagaggcagctggtgttgttggggactgaggagctagctgttcggggaggaggaagcgtgtgtcactgtgtgtatctgtgtgagggctgggccttgggtttgggagtgagggggcttgtggtgcacactggggctgcttgtggagttgggggtggttgtgcacaagctaaaaggatgtgggcgcatgcatgcacacagacacacacactctgcctcctcctcctggaacacaaacacatatgttggggatacaatttgcacacacatgttacagtttctcatagtcctttttctctgcca

SEQ ID NO: 22600 - DNA, 822 bp, Artificial sequence
  DNA replication origin
tcttccgggaggagatcaccaccttcatcgatgagacacctctgccttctccgactgcctcaccagggcactctcctcgtcggccccggccactgggcctctcaccccgccgactctcccttgggtcccctgagagcagagccgttggacttcctttgggactaagcgcagggagacgctgctccctgacggggggtgaagaaagtgcaagggcttggggaggatcctggggcccaggcaaccccatctttccccagctgaccctgtgagcccaagcaggcctgctgaactcagaggagaaagcctgagtgagtaacacctcattctggccgagagtagggcagctgcctccagactctggggagacgggcgctagatttggggctcagaaggccctgctctctcccatccaagtgaccagatgccctactcagcttccatcacccctagcaatatgtattaaagtctgaagtgttgccatggaaacctcagtgtccagtgtactgcggtggaaaggggcttggagggtggagtggctcacaggggacacgacagagcaggggcagcagacagaggcacagaaggacacatggagaaatgatcacatgctccaccaggcagcctcgcacagggaaggctgggaggagcatatcctgctgggggcggggcttgaggacacacatcttcgttggttggggtatgaaggatctctgttcagatttgttgaggtggttttagagcgtggctccagccccagtgcccaactctccttctaacctcaaatccatgcaggggctcactttatgggcaggaaaggttttg

SEQ ID NO: 22601 - DNA, 769 bp, Artificial sequence
  DNA replication origin
ccacgcgaagccgcgccgcgcccccggggcccagcctccgtgctgcgcactgggtcaggcagtctgcgcggcggagcgctgcacggagaagctgtcgctcccaggacccctgcgtgggtcccggcccggagtcgggctccggggccccgagaagcacggcggggagcgcggcgcccggatcggccgcgcagctcgccccgcaatccagccgcacccggcccagcgccgcctggctccgcagcgcctcccgcagcagcgccacggccggcgcccaagccccggccgcgtaggcgcgcagcccgtcagcgtagagcaagtcgggggcctgcgggggcgcccccggggacagctgggtcaggccggggggctcaggggaccccgggggaggcagcagcagcagtagcagcagcggccggaggagccggagcatgatgtcggagccgccggcagccgaggggaaatgcgggagccgagagggagggagaggaaaggggggaaggggagggagggggaggaaggagagatggagaggcggagggagagggagaaataatgagggaggccgagagagagagagagagagaagatggggctgagacccgatggtgggagaggcccatgtgaaaagatggagagagaagagtgctgagtggacaaagctggtctagtgtggaataagagggagaaactgggaggaggagggcaaaaggcgggaactggagcaggcctgggcatccatgaaggatgacttcagccccagcggtgactt

SEQ ID NO: 22602 - DNA, 1492 bp, Artificial sequence
  DNA replication origin
ttgctctacgctgacgggctgcgcgcctacgcggccggggcttgggcgccggccgtggcgctgctgcgggaggcgctgcggagccaggcggcgctgggccgggtgcggctggattgcggggcgagctgcgcggccgatccgggcgccgcgctccccgccgtgcttctcggggccccggagcccgactccgggccgggacccacgcaggggtcctgggagcgacagcttctccgtgcagcgctccgccgcgcagactgcctgacccagtgcgcagcacggaggctgggccccgggggcgcggcgcggcttcgcgtggggagcgcgctccgggacgccttccgccgtcgggagccctacaactacctgcagagggcctattaccaggtggggagcgggccgggcagctccgagggtcccagccctcaccacgacgctgtcctactttgcgttgcccaggagtaggcggaatgctgttgcccgggccccgcacggggctggggagcgtaccgcgggcctctgcgtaggagctggctaagcgaccgcgaggacctcttgagatcgcagaggagcagccgagggggagtgcgagcagaatgggaatggggcggggaggtcgtgaggtgggacgggagcagatcgaagatggagggacagggccgcctcttcctaggaatgaagcggaggcggtgggggcgaaaccggctctcggacgggaagtgtgcgtgggtgtgtgtgtgtgtcgggggtggtggtgagtgtgaaccttcgcttggggcaggaggtagcttcggaaaggaaggagcagacggaggcaaggttggggtcctccgaggccagacctctgcgggcggggaggggacagcacgccgcagccgccggtaccgcagcagttgcctacgtggctggggaagcggggcgccggttgtactcacctcagctcagggtcctagagacctgcgggttttgctggtcgctgaggtctcccccacttccccacctcacttaagccatcacttccacctggtctcccaaattgaggtcctgaagtcctgagacccatgtcccacccaactccgacgtctttagatcccctttccctcggtgccagccttctgagagtcccaacgttctggcctctaggggatctgcagttcgggcggtgggcggttctgattggccagtcttccatgaggctctggggcacccagagtgtgtgtctggggtagggtggggaggctggccagggggcagaggtctgccccccgtcccagggctctgatgccctcctcccttcgcctcctcagttgaagaagctggatctggcagctgcggcagcacacaccttctttgtagcaaaccccatgcacctgcagatgcgggaggacatggctaagtacagacgaatgtcgggagttcggccccagagcttccgggacctggagacgcccccacactgggtgagaatcccagcaccacccctgtcttgccacca

SEQ ID NO: 22603 - DNA, 726 bp, Artificial sequence
  DNA replication origin
cagagcttccgggacctggagacgcccccacactgggtgagaatcccagcaccacccctgtcttgccaccagccttttcctggctggatacacaggcctcactaaactgtgcgttgtgctgcttgagcatacagatggggtaatgatcctcagcgaccctggctgggagtccttctctaggacttcgtttccttcctggatgatcactgaaatctgatgttctaacattatgattctgaggcccacccttattcttctccacggtgaagagggacatggagtccttgccccaaatgagaccaacacccctctcctctctacctcccagtttggcaacccctggatcttaggtgactgactgctcccttccccaacaggcagcctatgacactggcctggagctactggggcgccaggaggcaggactggcactgcccaggctagaggaggctcttcaggggagcctggcccagatggagagctgccgtgctgactgtgaggggcctgaggagcagcagggggctgaagaagaggaggatggggctgcgagccaggggggcctctatgaggccattgcaggtaagggtcccgtgtgtgagggggtgggtcggtgcccagggaggggcatgaacaagctgaatggcttatgggtttcctctgcaggacactggattcaggtcctgcagtgccggcaacgctgtgtgggggaaacagccacacgccctg

SEQ ID NO: 22604 - DNA, 661 bp, Artificial sequence
  DNA replication origin
ttcttctccacggtgaagagggacatggagtccttgccccaaatgagaccaacacccctctcctctctacctcccagtttggcaacccctggatcttaggtgactgactgctcccttccccaacaggcagcctatgacactggcctggagctactggggcgccaggaggcaggactggcactgcccaggctagaggaggctcttcaggggagcctggcccagatggagagctgccgtgctgactgtgaggggcctgaggagcagcagggggctgaagaagaggaggatggggctgcgagccaggggggcctctatgaggccattgcaggtaagggtcccgtgtgtgagggggtgggtcggtgcccagggaggggcatgaacaagctgaatggcttatgggtttcctctgcaggacactggattcaggtcctgcagtgccggcaacgctgtgtgggggaaacagccacacgccctggtcgcagcttccctgtcccagacttccttcccaaccagctgaggcggctacatgaggcccatgctcagggtcagttggggaagggtggaaacggggagtgaagatttgcctctgctgctatcctgagctccatctctctatccctcccatctgtctctggatttgtagtttcactgtcagggctgc

SEQ ID NO: 22605 - DNA, 792 bp, Artificial sequence
  DNA replication origin
gccggctctagggcactgcctgggtgctccatgctccttgaacctggcaccatgccccccggttcctctgttcaacgttccccctcagcagcttcagagcatctggacttaaactggaaagggtgtagggggtgggagtgtgtgtgagtgtgtgggtgtgtgtatgcatgagtttgggggctggtggcaggcaggagtgaagtaaaggcaagagagacggggctgagggctggaatcggaactccaggctgccgtggggagcagggagtggagacggaagtcagatgctggacttggagtcctttgggtgactagagtgctcgggtaagaggccagcggggggtgggggtccaggttacttctcaggtctatttgtttgatttggggctacctcccaggtgagcgtggagaggggattacctctctgggtccgaggccaggtctcggctctcccagctgggcctggtactggttcagagccctcttggcagcctcatcctccgggtagaagagcaggacactcaggacattttctatagcctgggacagattgcccactggagagggagcgacaaggtcaggggttgggggatgaatacttagagcacattgatccttggggcagaggcagtgctggagaaggtggtctccagaggccagacagctaactccaagagcccccttcccactggcagacaagttcagctgccggttctttcaaacactggtgcaaacataccttagctggagagttcaaagaagagcaagaggggggaaaataaaggaaggtga

SEQ ID NO: 22606 - DNA, 1298 bp, Artificial sequence
  DNA replication origin
ccaggctgtgcttctgcccttcgtgcccacaccagactccaagacacagggaaacgactgggtggctgcaccctctccccagctaggccctccaagtttgaggtcctttgcgtccagccccagcctgcctgagccctgcctgcgccccagcccaggagagcagagcccaggccagctccctcttacttgggctctggctggacctcggccgggtttccagctccggttcctgggagcctccttactccctcagctgcgacgcccgcgcccgcccgtcacctgcccaggctctgctgccagaggagctggcctggcctggcctggccccgaccggcggggggttgggggggcctgacagggaagggtagagccaaccacaacgtcaggcaaatgaaatcagctggcaggggtggggggaaggggtggggggagggagggaggtgtacggattccagagagacttgggcccagccgggaggagggttgggggcaggagtgtggggccatagagaggggcagcccccaccacaagccctgagagaggagggggtgaaggggtgcttccctggtcagtctctgcaggcagagataagagcatcaggccccacaggattagagcaaagctgtgaggattaagggttggggtttgggaggggtgcaaaggagcagacaactacagctccagtggcccccctggtcccggcccccatccatggtgatgatcttggcagtcagggccacttagcaaccaggccaggaggtgggatataagggtgatagatggccccattgtcagtacctcaaactgtgctcctcagctcagggtggtggggaagagggtttggtgagtatgggagggtacaggcaggagctgagattagaaaggactgatctggataatccttcttctcgacaaaccccaaccagctgcctctgggtctgatcctgttgggggagaaaggtacaggggacccacagagaaggatggacaggtctgcccctattgtgggcgggcaacggatttcaagtggagggaaggcccgcacgctgctcccaggctggggtctggccccctccttgccctctcgaggctgtgaaagcaggggtcagagagaaagcaggcggccctaagtctcagcaaagctcagagagggaagacagggcttacacttggaggcctaaggagcagctgccaggggcttgggtcatttgcatgaggggagcaggtggctgagatttccctgacaaatcacaggctccaggcgccccgcctctgggaggcccaaagacacctgtct

SEQ ID NO: 22607 - DNA, 1537 bp, Artificial sequence
  DNA replication origin
agaacctcaaatactatctggcccttgccagaaaaagtttaccaaccccctgcctccctggaatgggtggagggtggttgtaaaggtactggaggatctgaagacataatagggtccgtgacccttgtgaggttgtgaagctcccttaaggcacatggtggctgggctgtggatttggggtatgggcagagagtgtggagagcacttccaggggccatgtctgagagactacatgatgccactttgaatgcccagtttgttcatccttttctgttttccccacttccccagatgggtgatctacaatgaccagaaagtgtgtgcctccgagaagccgcccaaggacctgggctacatctacttctaccagagagtggccagctaagagcctgcctcaccccttaccaatgagggcaggggaagaccacctggcatgagggagaggggctgagggatggacttcagcccctctgctctgtaccctttttccttttgtccccggcagcagggaagaagctggaggccgtgggagaatggctgggcagagcagaggggcagcgatagactctggggatggagcaggacggggacgggaggggccggccacctgtctgtaaggagactttgttgcttcccctgcccccggaatccacagtgctctgcttctctgtgtcgccccgcccagccccctggtgtggagggaggggtctcgtttgtgcgcgtgggtgtagctttgtgcatcctctcccagtggagcgatcacctgtgcctcccctccccctttgtttgcccctgtgtggttggtcaaggagggatgtgagggaaatagggaccccccgacttgccctcctgcctcagtctttcccccaccctgtctcttccttgtccttctctggaaaatgccaaaatacacgatgtgaataaaagtacaacggctaaattgtgtcctgtttgataccttgggggagaggcttaccttcctggggttagcaggagggcgcttaagaaaactcctaactctggccgcctccctgccaaagtcaagtctccacttttcactggttctagagctctaggaaaattggggttgggtggggaggtggagtagagtgactaaatgccgacacaaagccaaggaaagatggagtgaagaacccttccctctctttattcacacaggagtggaggatttcccaaatgtccctaactggctagctggcttcaggctgggactcagtccctgcagttcctgccaggccttgccagccggggcgagggttgggatgatcctggcggcctatgcctgtgtgggctgcccctcccgctgtgaaccctgcatttgtcccgcaagttttcactcaggtagactccctgggtacaagggtgcctgctcagcagtcgggcatgagctgctccgatgggcgaaggaggttgtctatcccacagttggagaggggccctctctgccccagtgggcgatctgggctacggccaagttgccaccagctagttccgcttgaaaaccacttctggcccc

SEQ ID NO: 22608 - DNA, 1619 bp, Artificial sequence
  DNA replication origin
cggccgacaccggtaagccctcgccgaggaggggtctggccgggccggggccggggccggggcaggagtggcagcgccctctcccgaggccccgaggccccgaggccggtatccgcgcggacctgatgcagggctgtgggacgagggccgctggggtccgggcaggggcctcgcagccgcagccccgtcggtgcgtcgagggggcagggcggagcacatgatgccccttggactatggggcaggtaaggacgttttgggtctcctggaggaaggtggccccggggcgcgcactggggctgtgcccgccaggcgacggggttaggagcggagcccgaggctctgcgggagaccgggggaggctgggccgcgtgggcttcccgctccctgcgccctggcctcccgcgccgtgcgccgccgcacgtagccccagactcctccccttcctcgccggcgtccgcgtccccgcgccgagctgctcgggctccctgagccccagatctgaccccttcccttcggcaacctgaacgactcccgccttccacggaagggaccgagcccgtgccaaacaggctgagcgatttgggagtgaggagccatcctaccgctttccccaacctggaaacagcaaagcgcaaggcctctgagtcagttaggtctctgccacccacgggcaaaggatgctctcctccatcctccttcctccctccaccgaaatcggagagccgcgggcctgatccaaagaggcatccccttctcgttcattccccagaggcctcaatacaaaccccaggagttggcccctctccttttgctacaaatccttgccttgcaaaggggaggtgaggatgggctattttagaagggaagcagggttgctccctggagaatgctgagtctgtgaggtgcctatgccgagaatagctcgaggaaattggagccccagctgttaaaagagcagagggcagggtgagggccgtggcctctcaggggtatctggaaggctcttcgagttgagtgcagacccagcctgggctggaaaatggacaaaggtcatcttgctggggtgaaaagggggagagcagaaccaagaagaagagggtgagggctggggggctccagggcactggttaggaattgtggggaatgaaggctttctttagtctcatccccctgtggtaccatcttgtcctcagaggtggtttgtgctccccctactgcctatatcgacttcgcccggcagaagctagatcccaagattgctgtggctgcgcagaactgctacaaagtgactaatggggcttttactggggagatcaggtgagatcgaggtggagaggggtgtgtgggacccttccctcactttcctcgttgaggggaaagccacagggtgggctccctgctgaaccttggcttcatctcttcctttagccctggcatgatcaaagactgcggagccacgtgggtggtcctggggcactcagagagaaggcatgtctttggggagtcagatgaggttagtagccaagagagaagataagggatgtctttttccaagaaggatgtctcaccaagtctgtttctcaacagctgattgggcagaaagtggcccatgctctgg

SEQ ID NO: 22609 - DNA, 1773 bp, Artificial sequence
  DNA replication origin
tcccagctcccttccaggtcaatccaaactggagctcaactttcagaagagaaagacgccccagcaagcctctttcggggagtcctctagctcctcacctccatgggccagacagctctggcagggggcagcagcagcacccccacgccacaggccctgtaccctgacctctcctgtcccgagggcttggaagagctgctgtctgcaccccctcctgacctgggggcccagcggcgccacggttggaaccccaaagactgttcagagaacatcgaggtcaaggaaggagggttgtactttgagcggcggcccgtggcccagagcactgatggggcccggggtaagaggggctattcaaggggcctgcacgcctgggagatcagctggcccctagagcagaggggcacgcatgccgtggtgggcgtggccacggccctcgccccgctgcagactgaccactacgcggcgctgctgggcagcaacagcgagtcgtggggctgggacatcgggcgggggaagctgtaccatcagagcaaggggcccggagccccccagtatccagcgggaactcagggtgagcagctggaggtgccagagagactgctggtggttctggacatggaggagggaactctgggctacgctattgggggcacctacctggggccagcattccgcggactgaagggcaggaccctctatccggcagtaagcgctgtctggggccagtgccaggtccgcatccgctacctgggcgaaaggagaggtgaggcctggggcagacgtggggagaactttctgtccctggtggcagtggtttgggatggaaactcttctgacaagagcagaggggatggaccttcatccagcctgcctcaacctctgttcagtgctgggaaaggctaggggtcttcacagctgttatttaatttaacccaacagcaatagaggtgaaacaggcttgagaaagcaactttctcaagttctcttggccagtaaatggtgaaccttcagaatggagggaggaactgcagggatgagagaattcaggagatatcaacccctgagcaagaggtgcaaagcgttaggtactgggtttgatgtacaggtccaaaagaaggatgggcagagccaggtacccaggctgtataccggattccctgggctctaacctgtctctgtgccacatacctacttccttcctcagccacacctctggatggagacactggggccctgggcaccagggaggagagcagtggaggaggcagggccttagggtggggcagcaggggaggagcctccccaggaactgactgggtccagggcttggagctgctctctgcagttgtgtgggctgtagagtggagggccatccctcctcacctcagccccagctcccaagcctctggagtcaaagcctgggccagctccaccactgtcagagccaccttggcctgttgtttagagggccttagccagctcttcacccccagctctgactagggatgtgtgaaatcttatctgggaggcagaacttccgggtatctcaaattcccctttcagccaggtgggcacactcgaagcaggaaagcagaaaggcatctgagtaggaccccgtagtttgaggacatctggctggtggctgcacccatacttacattcccctccttctctctcccagcggagccacactcccttctgcacctgagccgcctgtgtgtgcgccacaacctgggggatacccggctcggccaggtgtctgccctgccc

SEQ ID NO: 22610 - DNA, 883 bp, Artificial sequence
  DNA replication origin
cggtgatgccatcaaagcgttaattctgagatgggcctgcccgggtgcggactctgccgcagcaagagaagggttaactgccccgggccttcgccgtgggggcggggcctcggggagggtcacagcccgggactgagacccgaggttaaccgcccggggtgggctccacgggggcggggcatgctctccgcggctgctgccggtatagagcggtaactgcccaggagggggcggggccccacaggggcgtggcctcggagctgcacggccgtgggcggcgatgagagggttaagccccagagggccctggaggggcggggccgcgggacgggctcggcccaagggaggagctgggggcggaagcggccggcggtctgcgccctgcgcgcctcggcttctttccgcccggctccttcagaggcccggcgacctccagggctgggaagtcaaccgaggttcgggggcagcggcgagggctccgggcgagtaagggggatggtccatgctgaggcccaaatggggcgaactcgcgagagtctctggcgacctggatcagatggggcgagggcagatgaagggcccaggagctttggggcagcgaggagggaggagcgggcccgttggcaaacttgggtgaaaggatggggtacctgggtgacgagcccccgccaggattctgctcttcacgccccttttctcccagctcccttccaggtcaatccaaactggagctcaactttcagaagagaaagacgccccagcaagcctctttcggggagtcctctagctcctcacctccatgggccagacagctctggcagggggcagcagcagcacccccacgccacaggccctgtaccctgacctctcctgtcccgagggc

SEQ ID NO: 22611 - DNA, 1206 bp, Artificial sequence
  DNA replication origin
tgtgatcacagaaaatgtctctccctgtgaggaaaatttgccctctcctccccagctacaagacagggttgtggcctagctttgctgcaccaaaagaacacatgaatgtattacagagtagaatatggcacttagggattccttgaagggcagaagcaggaccagagcggggtcacacagcacctctgcagtaaatctggcaaggcttggcaggccagtcctcacagtgtttctagggacactggaaccccgagagtcccccagaggccccattcctagcaactggcaaccaaagcccattattcctgcatgaacccctcctgaccacactggcaggggcaacatggtggccaacctgggggagctggccaagcttcgagacctgcccaagctgcgagcgttggtgctgcttgataacccatgcacggacgaaaccagctaccgccaggaggccctggtgcagatgccataccttgaacgcctggacaaggaattctatgaggaggaggaacgggctgaggctgatgtgattcgacagaggctgaaggaagaaaaggagcaggagcctgagccccagcgtgacctggaacccgaacagtcattgatctagcagcagttctagcctctaaagatagtaaggaagcctgcagggaggcagtgggaggaggccaagggctgggcaggtaggggaagaggcaagaggggaagctgctgcagaaggaggtgggagaggaaagcatcagacaagcaggacccttaaagagaggagggttaggagtcagggagaggaaaagggacccaaggggcctgggaccagctgagaaagacttaggaggccagaagagtaagtgaaaagaattggggtggcaggcagaggagttggtggggggtggggcagccatacctgacacagagtgaagtcggctaggaaaggacaggtgtgggtgcatggtaggggctgcaggggaaagttggtggtgtatgcagctggacctaggagagaagcaggagaggaagatccagcacaaaaaatctgaagctaaaaacaggacacagagatgggggaagaaaagagggcagagtgaggcaaaaagagactgaagagatgagggtggccgccaggcactttagataggggagaggctttatttacctctgtttgttttttttttttttttttttttttttttgcgaggtagtcttgct

SEQ ID NO: 22612 - DNA, 805 bp, Artificial sequence
  DNA replication origin
tcccaacttagaaacaaatagaaccgtagatgagggcgagcaccgggagagaggcaggcaagggtggagaggcgcagttagagataggcgcgcagagggccagaaagcgaaggcagcgggcggggaaggccagggagggaaggcgccctgggcgcgggcggcggagcaggtgcgcagctgcaccgggccagagatgcggagaggtgcgcagcggcaccgggtaaaggaggcaggggcgccgcggcgaagggagggggccacaggggctctgggcctggcgggggcttcacctcgggactgcagactcagacggtggtagtggcggtggcggtggcggtggcgacggcggcgctgagagagcgggagtggcagtggcggcggcggctgcggctcccgggcggcgggcggaggaggcgcctatagggccgcgcgggcgcatgtgacccggagcccccgatgagtcaggagctgccggcggaggcgcacgtacgagcgcgggtgggggaccgacgagggtggagtggggaagggaggaggatgggggaagggtgggggcacccacgacctggccccagcgcacacaagcgctcatacccacggcccgacccactcgacagtaacaggcagagccgcacccctgtagcccgggtacgaaggcccacactgccagtgaagcccaagacagcctcaatgtctcacaaacccggtcagacacaggagcatcactctgtttctttattggaaatccgaacaccccagccgccttcgcaagtctctccaaccactcctaccagcaccccgcggc

SEQ ID NO: 22613 - DNA, 1580 bp, Artificial sequence
  DNA replication origin
aaaggaggaacatggaatgagagggagtgaagaggacacaggggccagggagtccttcagccttctggctctaaactgcctgcctaccacatctagctctctccccacactgctccctaacatccccccacccccaccccacacacacactgaggcagatgcacaagaagtggcctcctcatccacccatctgaggccccacatgcacaagtgggagcccgcagaaagaaaattgcttgcagcacacgtctgcacacatgcaagtgcacaggcagacacacggaggcaggacatgcctcacacgctaaactcgaacacagacccacctaccctggctccccggacaaggaggatccaaccgccacaacccaggcttgtgagcctggcccagcaccccatacccctgggtatcaaaaaaggcctccgaacccctggccgaacccagcctggccgtggaaaagctagggctgtaggaaggcccatgccacacccattacctttggcagtatagagatccacctccactgtggggttcccgcgggagtccaggatctcccgggcccagatcttctctatggacatgatggctgggatctcctcgggtggaagggaaggaaggagaaagataagaggcttagaggggtggagcctgagatcaatgggcggggcgggaggctgggagggatgggaaagaggttactgcagtgggtggggggtgggtagggaggcgctggctgcagtctagggctgtagaagggattccccctcccccctgggaagaggagaaggtcaatgcagtgaggaaggggaggtcactgcagtggggggcggggtaagatcaaatgatgagatgggagaacactgcagtgaggaggggaggggcacgacagtggttcccgcgcctctttgcagcttggccagccggtggggttcccccagatctcctcagagcggaatggctgccaggcttgcatttctcctgggagccaagaagaggatgggctgcctgggcctctcttccagagcccccatacctccccaacttaacaccccagctgcctgaacactgccccttccccaaggtcccactctctcccaaacgtgtatccctcctcttcccgcgaaaggcgcatgcaatacaggtgtcggggaagagggtcctgagaaaggccctgcagtccctgggggttgcagcgggaagtgaagaggataagagccggtggggagtggaggcgagctgggcctgtcctcccctctgcgcctcgacagatccccacttcttccatctctcccccgtgcagcagaggggaggaagcgcgaacggagaggggcgccgtggggaagagcaggagagaggggagtccaagggaagtctgggggaggtgaggaacggtgagagaagacatttccccaaatgcaaaccaaaagggacgctctaggataaaaatgcaccgcccggagaggctcccaacttagaaacaaatagaaccgtagatgagggcgagcaccgggagagaggcaggcaagggtggagaggcgcagttagagataggcgcgcagagggccagaaagcgaaggca
